United States Patent Application Publication US 2019/0348154 A1 - sequence listing, part 40

SEQ ID NO: 147830 - DNA, 3435 bp, Enterobacter cloacae
atgaaactcaaagacataaatgctgaaatcacttttgaattatggatgacgccggcgctgtacgaagagacgccaaccacgggggtgggctctattgctcctcaccaaaatgaccaggcatacagattaagaatcgatggccggcagtggagcatggtgcttcgggatactccggccggaaacgatctgaattttcacttaaaaagaggctgtgcgcaccttgccgaagtcatgctggttgcccaggatcgcagtgtgttggtgaaaattgtcttttttaacggcgaaattgttgaaattggtgatgtggagatcggcattgatgagcgcatagagttaacggcgaaaagaaatggcattcgcttcagtggcactgaagagctggggggcgtattaaacgaaaaatgtaacatcaacgttggtggcgacgattactttctgctaatgagtggaccatccgctagggctgactttgaagcggatatgtctgaagagggaggctcacctgatccccagggcgttgtacaggaaaaatacagggaattttctgtctatggtgagagggtgcgtattccggttgaaaggcgcaatgccgagccgttcagggatatctattttgcgaccaaagctatctttagagacgagcataagagggaaggagcattacgtctggcaagggggagggtccggtttactgattacacgaagacgggacgcatccgtgctttagctgccggcgcgatgagtcagctttccagggaaactgggagttacctgaaacagtgggacgaatacggcgcaattgaaggtgaaatgttgctggcccgtgcaaaagctgttggcagggtggattatcatggcactgaacagacaacaaaaggggttaagttctttgtgtcgtctgttccggaacaacttagcgaaggcgatgagatagagatcacctccgaggagcctttatacctcagggctccggatcttacttgggaagcttacagcaaggctctggaagaagaatttgccaccaaacgggatcgaaaaaagaacgatgctgaaatatccgtttctgtttatgccccgatcctgacaatttcaaagaccagtattgaactggatctgccgtcaattccgtccggtcagatgtttttgatcctgtccatcaatggcgacaagattcagattgaaagacgaatgcgggcacgttcagccattctggaaggacgctgcgcaaatccgcttcttggcctgcttattgaagaaggcggtatactcccggacatacagcgtgtcaccaaactgaaacctttgacgtcttttgtgaaagagaaaattttcaggcatgaaccaacgcctaaacagacagaggccatcgatgtcgcactgaacaccccggatattgcgcttgttcaggggcctccgggaacagggaaaacaacggttgtgacagccattcttgaacggctcaatgaggaatatgataaaacccgctcgataagaggtcagatacttgtctccggttttcagcatgatgccgttgagaatattgtggcaaggctgagtgtgaatgcgcttccggcagtgaagtttggcacccggtctggtggctcagaatttacgacagatgccgttactgaaaaactgaacaaatggtgcgccactgtcgccggaaagattcgaaccaataaccctcaaatggctcagacggagcatcaggtcagactgacagagcagtttgtcgcctattcactgtgcccctcaaagaacaacaccgccagtttaataaagcgtattctggatttgcccagagacgtgatttctgaagatatcacccgtgaggctgaagacatcatccattccctgcaaacggagcccacgtcagacgatccttccaccttgcggctcgtgagggctctgcgtgtcagtgaagccgcctttgttgacgacggtgcggtaagagcggttgatttactggacaagatagaagacggaccggctaatccggatttacgtgttcttgaaaaagcggctcgctggcgcagcggtaagccgctgaattttcttccagaactcagagaactgaaagcatcactgctctatcaatatctgccctcgcctgatttcaggacagaaaaaccaagagaggatgtgttgagactggtgacaacggtatctcagcgtctggagaaagaactcagttcaacccgtaaacgggatgcaatactggctgagtttttacatgagcttgaagacaatcctgatggcgtacgtgaggccatagaggactacaactttgtgtatgcggccaccacgcaacaggctgtcggaaaagacatcatccggtcaaagaataaaaacgtccaatatgatcagcgaacggaaatggttaagtacgacacggtgatcatcgatgaggccgcgagaaccagtccgcgagatctgcttatcccgatgtcccaggcggtgaaaaggataattcttgtcggggaccacaggcagttgcctcacctgattgaccaggaggtcgccagagctctcgaaggtgacgatcgttcagctccgccggttgatgtcgattttgtgaagaaaagcatgtttgagtatctgttcaaccgcctgaaaaaactggaggagaaggacggcatcaagcgaacggtgacactggatgcgcagtaccggacacacccgttgttgggggagtttgcaagccgcaacttttatgatcgatacaatgaaggttatcgttctcctttaggcgctaaatattttacccagaagttaaacggcatcgaagatagcgccgccgtctggatccatgtgcccaatgaggctggaaaagagcagcgtcttgagagtggcagtcgtgatagagaggctgaagctaaaattatcgccaagcgactaagtgactggattaagtcagatgagtccactgcagattatatgaagacgttaacccatgatgacaggcaacccggccttagctttggtgtcatcagtttttataaagcccaggtatttgctgtttataaagccctgcaaaaatacggtatcacggaacgggcacaggatggtacatggcagatatgtcaggaataccgctttctcgacaatggtgaagagcggctccgcatcggcaccgttgatgcctttcaggggatggaattcgacattgtgtttctttccatggtgaggtctcaggatatgaacgccttgccgcctcatatacgcaacgaggaggatgacaaaaagaaacagcaaaaacttttcgggcatctcatgtcggaaaaccgcctctgtgtgagtatgagtcgccagaagaaggtcctggccatagtgggagatggcgtgtttgcgaacacccagatagcggaggatgccgttccggccctgaaaaacttctatgatttgtgccatgaaaagggggtgatcctgtga

SEQ ID NO: 147831 - DNA, 2157 bp, Enterobacter cloacae
gtgagtgcaaaacccaaagatcatcgtcctaaagtcatcagtttccgcaccgcactggatggattgaacatcgctgccagacaaagtgttctgtggccatgtcatgccttcaacatctcacttccgcaaaagaaaaagagcggtctcaatgtatttgaagaaactgttctgaagatcacagagattgaatccggcgacacagaaacgattgcgcagctcacgtgcctggagaaggagctggtggcttttattcagagtcgcctcaaccagctcggtcttttgaatgatcgctatgagttgtctcagcaaggacaggcgcttttgaacgagtggcagaataaatccgacggagatctggaatacaccgtggccactgtgtttgtggatctgctgtacggaaagcttctaccttatgtcagtacaaaacagctgagctacaaaaaaatagagaccctttactcaaaagagaatcttcagaaaaagggggagtttgaacactatgtgaattttttcatcacccccactgatgataaatacattcgggcgattcagatacgtccagcaaacgacgctttctggaaaaccgttcctgacgccaacgacatcatcagagctatcagggaatttaagaggaaatataagcggcaggcgctgttgaaccagggcgtagagcagtacccgcctccgatccctgtggctgaagccatatccttacaggcgaatccggaactggtttacctgcattgccacgccctgatccagacaggcaattctgacattctggtgacggatggatgcggcttcggcttctctgagagctttgccagttaccttatgtctcagaattggcagtgggtcatcgacctgaagaataaaggggttgtcgacacgctgaaccccgaccaacgcaatgaagaggctgaagaagactcttcagcggcggatgagttgaagcaatatccgcggatagcgcgcccacttcggcgcgcacaagcgtatctgtcagacgctgaaaaaatcaggattgattcatcaaatgatgagcaggaattcacccgcctgaccggcctggcggtcgtcgccctttatgaagcaatagaatgggcattgcggtttgttgtttcggataacccagtgacgcactgggagcgattattatcgtcacagtcctacagggaaaatgaaaagatacttcgctcgtttgccacccggattgggtttgatgtttcagagagtgtgaagggcctgcttcaggttaaacccggcaaaatcagagccgttgaccatggtgcttccgagatgcagccgctactggctatggcaatcgccggggcgatcaatgatcccagccatccacttaatcgtctggccattgaagacgcaggatgtctctcttttattcacgcgctgaaagacgtcagggatcctgtttcccatggaaacgcaatgggtgtgcaactctcaagggaaacccttcagggctattgcaggagaaccgttcggcttattcaattactgataccggatatcacgcgggatgctgatacagccaaaacacggcagaaaaccgatattgatcaggtcagactgaaggccaggatcgaactggacaggtcattggggctgggtttcgtccacgcggtttccccgtcgttgcgggaagaactggtcaaagtgacgatcttaaaccagatgacgactctggataatgaacagcaacagcgctacataaatttactggcgtccattatgcaactgtcgttatttgaagccgctaaggaccggataacccccttcaaaaaccgaacaaacctgaaggatgaggcgattgaaaaaatcgttcaatccggtttttatcccacacctgatgccataccagtgcaaatcagcacggtaaacagcagtcgactctctcgtgctgtgcaaggttcaagcacaactcttggggctcaacttcttgcgctttgtttattggcatcagaaagcgaaagggtcgcactcaaaaggtcttttccggattgtttcgagcttatcgccagtttaatcaaactgcgtgggcacggtaatcaacagaaatttgactattcaagggaatacctggcgtcattaaaaatgaacgttttcaaactcatcaaaataattatggaagaattttag

SEQ ID NO: 147832 - DNA, 2712 bp, Enterobacter cloacae
gtggactctaaaaaaaataatagcgttcagtttactgcggataatgatatggcagatctgacggataacacaatcaacgtaacggagagtgagttcctgaataaactgcaggaactgaaggaacgggaagactttctgacgcaaaaagaaacggttttagcccaaaaggaacaggcgctacaggcggctaaagacgcgatggcccaaaaagaagcagagctgaatgataaatatgttcatcttcaggagatggagcttcaggcaaaaaacggctttccgcaattctttgaggaaaagttcgcagcattcaaaaaacaactggcgcagcgggaagctcagtgtgtaagtgagcgggaaactctcgaagctgaaaaggaaaaattgcggcaaagagaggtcgctgttcaaaaggcggaaatccaaagggacagggggtatgccgatgaaagggccaggcttgatgatgaactcttcagtctcagaaaaggacaggaaaaggatctggagtcaaaacgcgccagcgccctgacggcccttgaagaagagcttacagtggagagagtctccagaatagcaaacctggggaaagagatagctgaccggctaagcgcgcatgaagctgctattcaacaggataaggatgaacttgaacaaaaaagaaaggcattccttaagaaccaggcggagcttgatgagctcagggatgaacttgagtaccagaaacagcgccttcgctctcataaagaccgactcgaggaaagagaatctgatctgaaccttgaggtggatgccagggttgctcagcggaaacactctttcgagagtgagaagtctgtgcttaacgatgaaattgcccgtttgagggaatccctcaaaacaagcagtgccctcatttcaaacttcgaagtactgaagcataagctcggtgatgaagatcctgccgccgttttacttaagctgaaaacctatgaagaggaaatcaacaccctgcgcgaggatcttgccacacgcccaacacaggagatgcgggacgcctttgatcgtttgacgtctgaacagaacgaactgaagctggcctgtgagcgattctctgaagaaaatgaggggctcagaagtgcagcacgcgcacagtcagatctggaaatgcaggtagcggaactgaccgataaaaacaaatcgctgctgaggcggtttgaatccgtggatgccgacaacaaccgcttgatggaggagcttaaacgcttgcaatcctcttacgaacgggaacaggaccgtgaggcaaggattcgggacattgaaacgccatacgttcaaaaggaactgcctcgtgcggttgaaaacgttgaagagcttcaatggctggatggcatccgtcaatcctgcatcgattatgggctgagattcccgcggcgaattttacatgcattccacacggcactaaaaacgtcggagtggtctcctgtgactgttctggcaggcgtgagtggaaccggaaagtctgaactgccaaggctgtattcacattttggcggcataaactttttgagtctggccgtgcaacccaactgggacagtcaggaatccatgctgggtttcttcaactctatcgataacaagttcgatgcccaaccggttctgcgtttactggcacaaagtcagaaggcgcaggctgaaggctatccttttggtcttaaagatgccatgaatctgatattgatggatgaaatgaatcttgcccatgtcgaactctattttgcggaattcctgagcaagcttgagctgcgcagaggaatgaaaaaagaactccccttccttgatgttaagctgggggccggaattcagccctatcaattgccaatcggtcgtaatgtgctctgggctggcacaatgaatcaggacgagacaacgaaatccctctcagacaaggtcctcgaccggggaattgtcatcaactttccccgaccgactacgctggaaagacgccgtcagctgattccgttgggcgaccaggcgccattactgtcccgcagactgtgggagagttggtggtgcagagaaagtaaattcagcgatgatcagattttgccctttaagggttttattgaagacatgaacgatgctctttctaaagtcggaagagcactggggcacagggtgtggcaatcgatcgaatactacatggcaaattatcctgatgtgctcgacgcccagagaaaaaatgatgatgcaggcctggtcaaagccatgaaagtcgcttttgaagatcagcttgttcaaaaggttatgcctaagctgcgcggcatcgaaacccgaggtaaatccagaacggactgtcttgaccgaattcgtactcaactggtgaatgacaactatacgataatcgaagatttcgatctggcgtgcgaatttggttacggtcagttcatctggagcagtgctaattacttaaaagacgatgagtcattgaatgttcaaactggtaacaacgccagtgccagtgaagccagtatgctgtcatctgaacacgccggacttcatcatcggtctgctgcaggcgcaagcgctattcctgctgagctcagcgggtatgcaagtaatagtgcaagggaactctggcagctgacaacaaacgaaataatgaccgtcctgaaatgtgatgcaaaagaagcaaaggctatcaagtctttgtgtaatgcgaccagggaatcataa

SEQ ID NO: 147833 - DNA, 4047 bp, Enterobacter cloacae
atggagggtacattcaaaattgactctgttgagtctgtttacaggggtctaaataataccgatgagttaaaggctcatgcccagttaattcttgtggttcgcaactggctgacggaagtgtcgaacttcgacccagtatccggacttgtcctgcataccggtatcgacgatttcttggatgttgtggcgaaatcggtgcgggatacctcaccagaggaggagacaaaagaccgtatctatcgcgtggtatcacatgtgaaggacgctgtcctggcaataatggagcatacccgggataaggtgatacgcgaacatgccatgctgccgatatatgcggcgagagaggttgacagcaacagtgttcaatggctaagccgtcagccgggcaggacactccgagaaaagctttccggtaagccttatatgaaggccgtcagacggaggagcagtgtggatacgtcggaaaacagactgatgagagcttttctcttccggctggaacacattctgacagaaagacagggtgcattatctgccgcaaaagaagagacctgtgaggacatacttgtttcccttcagcgatggctaagaactgacgatgccgctgaaatcggtgcatggggaaatcttccacccaacaatacgcttctgcaggacaagcgctatcgaaaaatatgggatggttggctctggctccaggccagcgacgttcagataaccgaggacagcaaacggcttaataaagacctactcaccgttatctactggaatacactttcccagctttacgcgagtggtggctttcggacagttcagcaaccggtcggctttgattacgacaacttttctatcgtgcctgaatttcccattcggggatatctattccccgggtacggcgcaaagaaaaaagggaaggttaagttcattaagccagagagtttattcggatttatcacgtctgaagagggtgtggatttatttttccaccaaaaaaatctatctcaaaaattagacataaactcactaactgctggagatgaggtgtcttttgtcattggcagtaacccaaagggggaatgtgctgatgacatcgaccgtctagcggggatcatccctgtggcgttcaatttgacgggggataaatgggagatacacgtcggtgaggataagtatttattacatatcgtttcggggtatctggttattgcgtcagctcagggcgtaaataaaaaattaaaaatcgagcctgcagcgatcaacgagataccgaagacgataatgtcattcgtcacggatgccccgcctgaatacgctgcgccgacgaatactgaacgtgacccgatacggatggagagcaccgttgtggatctgtgttcagtccgtcctgcgttcacgcacggtacaggctcccaggcgcatctgccattcaggttggttcagcagtactggcccctgcattctgatggcgaagtggagattgactgcggttacgctaaatgcatcgccctgcattccggtattcagacggtcagcatgaggagccttttttcacctgactcaacactgcccgaggctactaaaagccgggcatcgatgttttttattaaaaagttgagtgactatatcaaggcagataagttgacctatcttattcctgattgggggaatgatttcgatctggaggggatacgaaaaagcaccaatttttattttgatgagtcaactccgcttcccaaaagtatcgctgctatctttgcatggcaatcgtcgaagaaatttgtacaggacagcgtccagggcaatgatgttgtgctggtgattgattcctttgacggtggcatttcagtaaccccggttcaggcaatttaccaaccggagcttgagggactgttgcctgagacaaaaggtattagctgggaaagacatcctacggttaatcagcccgacagcggcattcataatgccatggtccgcaatcttgacgggaatggctgccagacatctgaagaccttcttcatttgtttggattcgagggtttagccagcgatgccggagacgtgtcttttgtcaacgatgaacgctggtatcacgttcctggttctgttcgggaggttctgactcaggatctagatctcagcatattgtcaaacaccgccatcagtaactgcctgaactctgcaaacctggattgtcggggcgcgaatgtctttatcctgcctcttgacgttaccctcaggaaacccgatgggcgaatggattataagtggctggggtctgcatggtcgccaattaaaggttgccagaccttaaacagatggcagggggaagtgggtgatatgaccctctggcgtgatcatctgccagcgctatcaatagaggtacagagtgacaaagggtataaggttaatttttatcttgtaaaagacgcgacagtaacgccgcaacgtggcagaacggtggatatacccgtggaagaatggttcacgcttcccgcgggacaaacgcattatcgttttcccctgcaacagggagaaggcaataaagagatgcggtttgttgcatacctgatgtcgccagcttttccattaaagaaggacacaacgtgcaagctgaagatgacctatacctatggcgcggatgacccgtacgaactgaaattccttccgctggattcagcggaagcaggttttaaatctgtccgagttgagtggcgctcagcatcagaaagggggattgccgatctggcgaacttaccgattccggatttcccggccagaaaaagctggtccgattttcagtccttcccgaaagacgatggtaagagcgtctctgacctcctggactggtgttgctccaaaattgcaggtttgaatgatctggtctcctttgattatgaaaaggaatttcaatccatcctgaataaaagaaaagtcggctatctggaatggggaagcacagacagtaacgggaaatactattgtcgcgtcaatgttgagggacagagtgtgttttgccacagttctcactttattgaggctgttgatgaaaactccctgcataaaggctgcccggtttatctggatgtatttacgaatgaaaaagggccttacggggcaacgatatcctttttggagcgcgtcccctcacagcttcaggagaaggcacaggataccctcaatcggaagctgtccagaaccattgaatatgctgaaaaagggatcttcagcctccgtttccccgcattaaccatctggaatcacggtcactcgctttccgagccagatgtgcccgaccattttagaaacgcgatactcgacggaacgcaaaagatcatatcgataattgagtctgaaaatatgccggacacgcttaaagaggagcttttcttctttctgtgctgtctgcataaggacgcccctgaaatggttggctcccggcttcttgatgcagtgaaggatagaaagctgttgcggaagtaccacaagaatattgctttcgccatcggtaatgccgacctgtcttaccaacaagtgctgttggagaatgtcattgatcccattgataatgagggcctgaccagatccattaccctggaagttttgtcgatagtgctttggcgttccagaacagtgatcaacagattgactaaagagaagctcgaggctttatccgtaagcttatatcgttgcctcaggttcgatattcaaaagctggatagtgaaggaacgagataccaaatcgcgactcttggtaagcatctggagcttctgctggcattgctgagaagcagaggttccgaggatgaaggtctaaaaatgattttcgcgccagataatgaacggacccaaaaatttgtggacctgatcgatcgcgtttccaggttagtgatcgacaacaatatcggtttgcagtctcgcatcaatctgcaaattgaaaagccgaaaatttttcttaatactcccgaccttttatatgcattacgcatgtatctgacgggagacgcaggtgcaagcgcgataggcattacgtctgtttcagacgattaa

SEQ ID NO: 147834 - DNA, 141 bp, Enterobacter cloacae
atgaatgacctgattatgcgggatattgacagaatgacgggcaaaacccatgcccagtgtgacgatgtaaagcgcgaagcgcagatccacattcacaccgccagcgacgttaattcgaacaggccgagaagagaggcctga

SEQ ID NO: 147835 - DNA, 1275 bp, Enterobacter cloacae
atgggcaagggcaaacgagcacgagcagcatctaatgcggcgcgtcatccgaataccacggccaaacagatgatccgcgagcgcaaccaaatcgctgacagcattgttaagggattacgcatagcgcagcaggatgtcagcaaggtaatgacgaacgtgactcacttgctggcggtggggatgacaaaaagtgaagtggtcagggctatgaatacagatcctctcgttatcacctcccgggggagggaagttgcttaccgcgaaaaattggctcgtatggccgctcttcgccgcgaaaacaaagaaagaacagcccgctcaaacccgcaccacctgctgaaaaagtcgaaaggcaagcagacggtaacagctaaactggatccgtgggttgttgcgcgtacagcttccggtgccgaagccactaagcccttgacctttggcactgtccaggatataggcgagcgtgtgacacctcgtcaggtggagggcttcaatcagcgtaagctgggcggaactgacacccccgccgtcgctatcaggacctatgatttaccgatagccaaacccaaagcggccacccaaaccggtaagctgtccggcattgaagcggccatgaagcggatccccgccgcgcagcgtcatcagtttgccttgttcgtgcataagcacctcgccagtggcatgaccgtacagcaaatggccaagcagttcctgggtaaaccgctggccgagcccctgaagaccaggcctgcagccaacgagacggtaactgtcacgcaggtagttaatgctccggttgaggtttccgcgccggaagtgattgatatggccgtgcccgttgcgcttctgatgaaagacatcacaccgcccgagctgcgcgacggtcgcgagctgaaaggcggctcctccgagcgcgttgtcatgcagcgcgacgcggccatacaggcagagtttagggtattggttcgccagaactttggcggccgttgtgcggtgtctggtaagcatctgggcggcgtgctggaggctgcgcacatcgaaggtgcagatctgggttgctacagcgtcggcaacggtatcctgctgtcgccgacactgcacaagctgtttgaccgccatttgatgggtgttaaccctgaaacactgactgttcactttaagccaggcattgagtttgaagagtatgaaggccgcgtgatcattcccttgatttacaacctggacaaagcgcgtctggccgttcgctgggccgaatacttgagcggcacaaagtga

SEQ ID NO: 147836 - DNA, 594 bp, Enterobacter cloacae
gtgaaagacgttttatacgcagacttggctaacgaactgcgcagcgccacgcggccagccattgtggtaatcgacagtctgtatttcgacatgccggaggttgccgaacgtcttaaacaggatgcggggatcacgccgttattccttaagcttgcctttagcctgtccgaaaacgcacgccagaggcagctgaatatcctggcaaagatggacggcaaacccgtgatctttgttgatcagtatccgctggccgttcactgggaatctggtttggcaggcttccagctgcttaacgaagaaaagaaagcgatccttgaccggattcaggcggaaaacgagtggatcaggagtgcaccgaccaaagaagagcgcacccgtcgccaggacgaatccatgaaccgcgcaatgtccggcatgggtaacgcgatgtccaacttgctggaagagtcacgcgctatcagtgcagaacgagacgagaaggttgcgaaagtcatcgaaaccgaggatggagctgcctttaaggcgctggaagaagagtacagcgaacagaacattttcagacgactacagaatcgcatatggggtaaaaaataa

SEQ ID NO: 147837 - DNA, 234 bp, Enterobacter cloacae
atgatcaacctgtcctggtgttacgataaagcgcactacggtttcatgagtaacaaaagtggttccacagttaatgttttggcactggcaataacgttctttcgtattatccgatacacgaaagctgctgcgagtatgtgccgcgtgtccgcatttcggacaattcatcatatccgtttctccccaagtcattacccgcaatcccataatgatacactaacatccaatttgtga

SEQ ID NO: 147838 - DNA, 993 bp, Enterobacter cloacae
atggctactaactttctaataggtcgtggggagttgctggcgagtgctgtttcaggccctcgccgtggcatggataaatcagaggtttatacatttgctgaagcaaagcaaaggctaatacctcaagttcaacaagcaacatctgatttggatgatttacccgctagtgcctgcccaaacgattatgctgttgctagtttaacacttaatcctagttatattgcgcgttctttttttcctgacactttactcagagaaaacaacctgcaatcaataggaagtaaaaccgttaaaattaagcctgacggctggaagcgcaaagtcgaagtgactgagtttccaactacccagatttttgtggcgggtaagcgttcttcttttaaaaatatactgccctgggtacagtctctagacgctggcagtgatcaagcgatagactttgcgcgaattgaagcgttttctgcttataagccagaagaaagaatcgtaccctttagcaagaaggaggctggtgacttctacgaggtaggtgtacatcttttacctagtgacaatagtgaccttgtccagtctgcttttatgcgttatgccgaagctaacgatattacaccttactcagagctttcttttactgcgggtaacctttggtttgtccctgtacagtgtgggaaagaaaaaattgagattttatccttattcactttcgttagggtaatccgacccgtacctcctttgcgcggtattcgtccaatacaaagagccgctggagctcaagttcaaacgctattaccaagtgatccgccagtaagtgatttaagagcagctattttagatggtggcctgcctaaacaacactcaatacagaaatggctcaattcatatcgagttatggatgatggtgcagcagatgatagcgatgcgttgcagcatggccttgcagtaacttctgcttttctttttggcccattaaaagtgacctgcccccacgattag

SEQ ID NO: 147839 - DNA, 1140 bp, Enterobacter cloacae
atgggcgaattaagtggtattcagtcagatttagcccaactagtcaggctggttatagccgaacaatatgatgatgttcggttgtatgtcgctcgcttagtgcgtaagtatcgtgactcatcacctgacttagcggctcagcttgatcaatacttgcgttcgaaacctgcgggtagccataacagtttgcgtaaggcacccagccctgcacctgcaatttctcaacagcctttgcctgttgatgatgagtcgcgcctaagtttgctaaaaacgccggttttgaaagatgaacttgagaaaccagtgctttcggaaaaaaatgaattggtattagacaggctcatacttgagcgtaaaaacatccaacggttaaacgatttgggattgtcaccaacacgatctgcaatttttgtaggccccccaggagtagggaaaaccttaactgcggcttggttggcaaaaaaacttaatgtacctttttatatacttgatttaactgctgttatgagtagttatcttggaaaaagcggtaacaacctgcgagctgcactggattatgcgaagaaaaaaccatgcatcttattacttgatgaaattgattcaatagccaaaaaacgcagtgatgactctgatattggagaactcaaaaggttggtaacagtcatcttgcaggaagttgatgaatggccgacagattctctgttgttggcggccacaaatcacgaagagttaattgatcctgcattatggcgtcgcttcgacatgattgttaactttgacaggccggatgccgaaaatattgctgatgcaataagaagattttcagggcctgattttgcgatgttttcacgttgggttgatatcttgactttaacgtttaaaaatgaatcgtttagtaatattgaaaaagaaataaataaattccgtagagctgttgcattagggattgcatctgatcaggaactgattgaagagtttataaaaagtaggatttctatattggaaaggcctgagaagctggaggtggccttaagtctcagtaaaaagacaaagctctcgcagcattctatctcagatattaccggggttagtcgagatactatccgtaaacgtcgtgcctctgagggcacaattgcataa

SEQ ID NO: 147840 - DNA, 183 bp, Enterobacter cloacae
atgcttatccagatcaacagcaaaacagcaatctatcgcggcttcaccatcgtgaagctgccacgcaaaaaaccgtattcgcgccagcgttatcaaatcaccaaagatggtaattatctgggtttggacttcggattgtctcaagctcgacagactatcgatcagctacatcgggggcattaa

SEQ ID NO: 147841 - DNA, 300 bp, Enterobacter cloacae
atgtcaatgacgcaaggcgaaaaactggcgcttattcgcgactctgaacgtttaactaaaaggcaaatgtctgaattaacagggttaaattattcaagttatggggggtatgagcgtgataagacgaaaatgacgctcgaagcagcagtgagtatttttggacaccctcgttttcataagtatcaagactggtttatgtatgaccggatcgacccaagccggggccagatcgcaccggctctcgcacactttgggcaagagacaacgcaatcagaccactccgggaaacagactggttaa

SEQ ID NO: 147842 - DNA, 177 bp, Enterobacter cloacae
atggcgacacttttttgcacgttagtgttgactttgcataaaaatgtcctgtatgctttccatcgtgggatattacgcctacacgacaccaaacccgcctcagtgcgggtttttttatgtccgaaattcttcgcgccacgctcggcgcaattcaaccacagagcctttcaggggtga

SEQ ID NO: 147843 - DNA, 867 bp, Enterobacter cloacae
atgaaaagaggtgttgttttcacggtacgcgagcttctgaaagttaatggtggaaaaggattcactacgggtagaggtatttctacagaagaacttaattatttgatgttgtactgggataaacttgtttctccaactaataattttatccatattagtttagcaaatgaagaggaactggaaaattgtggagtcctttaccgaccaaagtttacccaacaagggggtatggatggtgctaggatgacagaatttcatgcttttacccatgtagaagctttaaatatgatgagaaaaaatgagcgcgaagttgattggcgtatgcatttttttaataacgaagtttcaattcctcaggaagctgcacaacaaaaagaagttgtgagattcgagttagctgaacttttaccagttccaccaaaagatacacctctacaagagatactagaattcaaagaaaggcgtagcgacgaacttcaagcactacatggttatcttgatgaactttatttggaagtgttaaattcgggcgactttaatttacaacgagccaatgccctttcaggcctgagggcgtctcttgaagatcttaataagttaaatagccaaggttggagaagcccattaaaattcaatctttctacagcttttgaatttgatttgaaccaggtaattagtggaggtgcaaccgcttatgcagccttaaactcatcacgaccacttgaagtgttaagtgtcggtgcggttgttacattactaggcggttttatcaaagttaagcctcaacttcaaaatgttctcaaaaatggcgatcctaaattggcatatctcactaacgctactagagaaggcatacttgaaaagtaa

SEQ ID NO: 147844 - DNA, 711 bp, Enterobacter cloacae
atgcgtcagaaaaccattgatgcgattatggcgcatgccgccgctgaatatcctcgtgagtgctgtggtgtggtggcgcagaaaagccgcgttgaacgttattttccttgccggaatcttgccgcggcgccggaggacaattttgtcctttgcccggaagattacgcatctgctgaggactggggtacggtgatcgccatcgttcatagccaccctgacgccacgacgcagccgagcgaactggataaagcgcaatgtgacgcaacgcttttaccctggcatatcgtgagctggcccgagggggatttacgcaccattcagccgcgcggagagttgccactgctggagcgtccgtttgtgcttggtcactttgactgctgggggctggtgatgagctatttccggcaaacgcatggtatcgaactccacgattaccgggttgattatccctggtgggaaaacgaatatccggaaaacttctatcaggagtgctggtacgagtgcggattccgtgaattcgacgggccgccgaaacctggcgatatggtgatcatgcaggtgcaggctgataagtggaaccacgcgggtatactgctggagggcaatatgctgctgcaccatctgtacggtcacctgagtcagcgcgtgccgtatggtggatactggcaggaacgaacgatgaagattctacgctacaaatctctgtgctaa

SEQ ID NO: 147845 - DNA, 3579 bp, Enterobacter cloacae
atggcgaataaaattaccggacgaaaaggggggagcaccagctcccgaactcctaccgaacagcctgatgatctgcaatctgtagcgaaggcaaagatcctcgttgcgcttggggaaggggagtttgctggacagctcaccggcaaggatatctacctggacggaacggcgctggagaacgccgacggctcccaaaacttcagcggcgttacgtgggaatttcgctcgggtactcaggcccagaagtatattcagggtatacccggcaccgaaaacgaaattagggtgggtactgaagtaacgagcgctacagcctggacacgaacctttaccaatacccagctttcggcggttcgtttgcgtctgcaatggccctcacttttcaaacaggaggacgacggcgatctggtcggatactcggttaattacgcgattgacttgcagactgacggcgggacgtggctgacagtcctcaataccagcgtgaccgggaaaacgacctcaggttatgagcgtagccaccgtattgatttacctcaggctggcagtacctggacaatcagactgcgcaagattaccgctgacgctaacagcgcgaagatcggcgacacgatgacgcttcaaagcttcactgaggtgattgatgcgaaattgcgatatccgaataccgcgctgctgtatatcgagtttgattccagccagtttaatggcgatatccctcagatctcctgtgagccacgtggccgcgttattcgcgttcccgatacttacgaccctgaaacccgagcttacagcggaacttggaccggggcgtttaagtgggcatggacggataaccccgcctggattttttacgatctggttgtttctgaccggttcggcctcggtcaccgtttgactgccgctaacatcgataagtggacgctttatcaggtcgcccagtattgcgatcagatggtgccggacagtaagggtggcgatggaacagaaccacgctatacctgcaacgtgtacatccaggaccgaaacgacgcttatacagtcctgcgtgattttgcggccatattccgtggcatgacgtactggggtggcgatcagatcgttgctctggccgatatgccccgtgatgtggattacagctacacgcgcgctaacgttgttggcggtcgcttcacctattcaagcagcaccacgaaaacccgctacactacagcgctggtttcatggtccgatcccggtaacgcctatgctgacgcgatggaacccgtattcgagcaggcgctggtggcgcggtacggcttcaatcagctggaaatgacagccatcggctgcaccaggcagtcagaggcgaaccgaaaggggcgctggggtattctcaccaacaacaaggatcgtgttgtttcgtttgatgtcgggctggacggaaacataccacagcctggctatatcatcgctgtggcagacgagctgctttccggaaaggttatgggcggccgcatcagcgccgttaacggtcgcattatcaaacttgaccgtgtagctgatgcagcagcaggtgatcgccttatcctcaaccttccctccggagcgtcacagagcaggaccattcaggcggttaacggggaatcggtcacagtaaccacctcgtacagtgagacgcctcaggccgaagctgtctgggtggttgagtcaaacgaactctacgcgcagcagtatcgtgttgtgagcgtcgctgataacgatgatggcactttcaccattaccggtgcatggcacgatccggataaatatgcccgaatcgataccggagccatcattgaccagcggccggtgagcgtgatcccgccgggcaaccagtcgccgcctgcgaacatcgtgatcagctcgttttctgtggtgcagcaaaatatcagcgtcgaaacgatgcgcgtgagctgggaccaggcgcagaacgctatcgcctatgaagcgcaatggcgccgcaacgacgggaactgggttaacgtgccgcgcagctccacaacgtcattcgacgtaccggggatatatgccgggcgctacctggtacgtgtacgcgccatcaatgccgcagaaatttcttccgggtggggctattcggaagagaaaacgctgacggggaaagtgggcaatccgccgaagccggtcggcttcattgcttctgaaaacgtggtattcggtattgagctgaactggggattcccggcgaacaccgacgacacgctgaagacggaaattcagtacagcctgaccggtaccgaggacgatgcgatgctgctggccgatgtgccttacccgcagcgcaaatatcagcagatgggccttatggctgggcagattttctggtaccgcgcgcagctggtggaccgcagtggaaacgaatcaggttatacagagtttgtgcgcgggcaggccagcatcgatgtatccgatatcaccgatgcaatcctggaggacatgaaaggctccgatacgttcaaagacctgatcgagaacgcggtggacagcaatgaaaaaattgctggcatggctaacgacatcaaacaggccaacgacgaactggagcaacaggcgcagaaaattgctcaaaatgcccagaatgtcgggaaggttcagaccagcgttaatgagctttccagcgaggtcggaggggtctcttcttctctctctatgcttgagcagacagtggcgacggctgataccgcgctgggccagcgcatcgataacatcagcgtgtctgtggacggtatgacgggaggagtgaagaactccgccatcgcgattattcagggcaatctggctcaggtggccgcgcgcaaaacgctgtctgcatccgtcgccggtaacagcgcgcagctggaccgcattgatgaggtgatcgtcaacgagaaggaggcaacggcgcgttcgctgctgagtttgcagactgacgtgaacggcaacaaggcatccatcaacagcctgaaccagacgttctccgattaccagcaggctatggccacgcaggtaaacagcatcacggcaaccgtcaacgggcacacttcagcgatcaccaccaacgcgcaggccattgcgaacgtcaacggggacctgaaggcgatgtacagcatcaaggtcgggatgtccagcaatggtcagtattacgcggcagggatggggatcggcgtggagaatacgccgtccggcatgcagtcgcaggttatcttcctggctgaccgcttcgccgtaacgcaccaggccggagccacggtgtcccttccgttcgtcatccagaacgggcaggtgttcatcaacgatgcttacttcagggatgccagcatccagttcgcaaaaattaccgattcactgaaatccaataattttgtgaccgggaagacaggctggaatatgccgaaaagtggtaacgctgaactgaacaatgtcaccattcgcggggctttgtatgcaacgactggtaatttcgggtttagcgggccgaacaaggcgacggtgatagacagtaatggtgtaactatcaacctgaccggaggcggacgtatcgtacttggagaatgggaataa

SEQ ID NO: 147846 - DNA, 615 bp, Enterobacter cloacae
atgtcaaacgcaaaagaaaccccacgcgcgatttctgcatttaatttttcatctcaaagcggtggcaaagatgcgataacacgcatccttcaagcttacggattcagcacaagacaggctttatgtgagcacttgggggtttcccaaagcaccatggcaaaccgctggatgcgcgataccttcccgcatgattggctaatcgcatgccatctagacactggcgctccgatgctttggctagctactgggcagggcaaaccgacaagcgaaaaaagtgactcgcaaagtttaactttgaaatttaaagaaatcacaaatggggtcttcaacgagtccattctggttcattacgattcgaacctactaccaaaagacgcattatcccccttctttgtgaagttcgaatccgtggtttatctcgttgatgaatacaaaggcgaaatcaacgatggtgttttgctgatcgagatcgacggctttgccagtgtcagacagatttatcgactacctggcggaaagttaagagttgaaaacggccctgcatcatttgaatgcgcagcgtctgacgtaaaagtattaggcaaggtgataagcaaaaccgagcagtttgtttga

SEQ ID NO: 147847 - DNA, 846 bp, Enterobacter cloacae
atgtccgcaagtcatgaaatgaacaataccgttgttgcctgcgtggacggttcgtcatcaacacaggccgtctgtaattatgcggcctgggcggccaccgcgctgaagatatctgtggcccttcttcatgtactggaaaaaagtgaccagcctgtggtttcggacctgacaggaaccatcggcttagacagttgggaacattttacagaagagctggttcgccttgagggcgaacgtaaccgattgttgatggcacagggtaaagccatcctgcaaaattgtgctgagctgctggcagatatgggactaccggcaccacagcaattgcaaaaacatggcgcgctggatgggattttggctgaattgggtaatacgcgtcttatggtgctggggcgccgcggggcgtccaatccggtcggaagccatattgagaatgtcattcgtctgcaaaaaaatcctgtgttaatcgtacccgaaaccttttcagtcccttcacgcgtaatgttcgcctatgacggaagtgaggcgagtctggaaaatttgcgccgaatttctgtaagtccattgtttttgaatctgacctgccacctggtgatggtgaatggaaattcagaatcgcttgatgcagctcagtctctgttgcaaagagcaggcataacaagtcaggcaagtctgctgaaagccgataccgtggctaatgcactgtgccgctacgccggggaacatgggattgatcttacggtcatgggagcgtatggacattcacggctgcgcagattctttatcggcagcaacacagaagagatgctatctaatagcagccagcccctgctgatgctcagataa

SEQ ID NO: 147848 - DNA, 1026 bp, Enterobacter cloacae
atgactgtaactatccatcaaaaacctcttaatgctttccttggtcgtgtcagaacccttgatgggcgtctggctgacggcttagcgaagcttttacctgattggtgggatgactcgttgaaccaatctccgagtatcagccagcaagtaattttaggattggcaaaattcgccaatcttgatctcaacaccgtcatagatccttctgtaccactggaatttaatgattcagtacgtaggtacaaacatgcagctaacaaacctgtacaggagctacaggctgcaacggctgttgtagatgggatggcaaaaattgcggcctctgttgcaaaaaatgattatcaagggcttccaactgctggtgaaattagaggttcaatattatccagcggcaagccttgggtagactatcttgctcttttagagttttcttggtcgatgggaataccggtactgtacatgccagaaatcccagccaagaaaaagatggatgctgttgctatcaaagtatctgatcgcccagtcattgcgttaacaaaaaggcacaagcacgcaagtgctcttttatttagtttagcgcatgaattaggtcatattgcttgcgggcatcttgatcgtaattcactgctgattgatgagaaaatcaacgaagatgatgtcgacaatccacttgaaagagaagctaacagtttcgctattgagttgttgaatgggcgacctgatgcatcgttttatagccaatatagggttactgctgacgttttagctgatggagccatgcgcattgcacgtcaaaatcaggtagacccaggccatatagcattaaattatgctaaaacgatgaccagtcgcacggggaaaaatttttatgcggtatgtgccagtgcattgaacttactctatcctggtcctgaattggcatggcctgatcaagctaaacgtacctttcttgcatttgtagatgaagagaaggtttccgaagataagttcgaaatgctctgcagaatgaacaacatcgaggtgtag

SEQ ID NO: 147849 - DNA, 639 bp, Enterobacter cloacae
gtggctgtattacttgataatgatgtagtactgaaattggcccaactcgacctgctttctgaaggttgcaaattacttactagaaattttggccaactatttgttttagatacgatcgtatatcaactacggggaaaggctgcgattcggcgctacggtaccgaggcaatagaacgcgtaaatgattgtcttggacaaggcgttttttcattatttggagagatcataacggacccaaggctgatctcattacaaaacgattttgataaccttgatgaaggtgaaatgcgcttggttcaagggttgttgaatcatcatgatttgttactatctggtgataaacgctttttgaaagcaatagcagaaacgggtttcattgaagaggctgcgttacataatcgctttgtctgcttagagcaggttatatgttttctaattaatgagttaaccctagagcatgtcaatgagaaagcaacaatagcttttcagggcgaattcagagttgacagtgcgctgcgtacttgtataggtcatggccgaagccatgaccatgtgattgaaggatttttaaatcaactaagggaattgccagcggtactgctatccatagaacagcattggcaactatcaagaccctga

SEQ ID NO: 147850 - DNA, 453 bp, Enterobacter cloacae
atggatcgcactgaatatttgaaatggcttatagctgaatcaccttctacgacccagcaacttatggcgtggctccaaagagcaaaacgctataaccgtgagatgaaagaacatcgcgatggagtacagatcgaagataatggtattatcgtaggtctgcgacaaagaacgaacctgtatgatggtgactgcctgactattcatgttgtagaacttcccgaagaaatacaaaataaaggctggtttaaatcttttcttaaattatgctgcgaatctaatccgtggaacgatgtagttattgaggatgtaaaaaatccacaccttctggcattttgtcaaaagcataattttaaggtcttggctgattttttccctgatacctatatagttaattctgaagaaattatggcgttggatatacctcccctgaaacgttacgaatattatctttaa

SEQ ID NO: 147851 - DNA, 774 bp, Enterobacter cloacae
atggaactggatactgaatttcgctacccgaatgttatcgatttcttcggtacgaccctttttcatctgtgtcatttcacaacaatagatctgcataattacgccgcatacaataattactcagaggataatattaagaaaagcaatgatatgctttgcaatgaaataaatgaacatctgaaaaataatggtggtgaatatcacgaggatattattgatagttacagtcaagaaataagagaatttggcgaattttacccccccatgcatcgcaaggccatggtgataacactgtataatttctttgaacatcaagttaaaacattatgcgccgaaattaataaacttctcccacaggacatgagcgataagtatttaaaagaagtgtgtataaaacgttatcgtcaatttttgaggagagaagccagttttgatattaatcaggggaatttattgtggaaacgatgggaggatatgctgaaagtggagcaaatcaggcatgttctggttcactctgaaggtgagattgagaagcacagggtagagcggctggctgatgatatagaaaactactgtaagcaaaaaaacggtatcaggctgattcgacaccgtatcatcattgatgagggttatgtggcgggacttattgctgagtttatctcactgtttgacctactggacaggcaggtgaacgctttcatccgtagatacgaaagcgagcatggtagctacgaagttccactcccgttgggagcatcacgaacgccgctgtga

SEQ ID NO: 147852 - DNA, 309 bp, Enterobacter cloacae
atgcgccagtcgctgatatacgggcttgaaccctggaaggcatcgggctgcatacgttttgccaaatctaatcgtattaattttaatcagtcttcaagatacaaggaaggcagcctcaccgccgttgcggctggagaggacgtcgttcctgcttctgagcttactgctgctctgcagcaggtccgggagcttcagcgccttctgggcaagaagacgatggaagttgagatcctgaaagaagccgtggagtacggtcagtcgcgaaaatggatagcgcacgcgcccttgttgccaaaggacggggaatag

SEQ ID NO: 147853 - DNA, 339 bp, Enterobacter cloacae
atggaacaggaaacactcaaagtattttttgtacagtttggcacaatgaaaaatgataaaacaaatgaagattttaattggggtaatgcgcaggcattatctactgaatttgaatcaacgaatagctcatgtggctttgctccggcaaaagtgaaaattacaccagataatcgtcatgctgtttgcctgaaaatgcgtgatgacctggagagtgcttataaatctggaaagccttttcttgaaattataccgtcatatgggcttaaggcatctaaaggtgtcatgattcctgtgattgttgattacaaaattgttggaaagatagatttgaaggggtga

SEQ ID NO: 147854 - DNA, 480 bp, Enterobacter cloacae
atgcgcgatatcggcagagaaattggcctggcgggtaaagacgtcctcaatctttccaatcatatgattgaacgagataaccagctgctccagctcaatgggaacgcgtgtcggttccagccgcgcatcaagattctcggaggtgatgtttttaatggcattgctgacattacgaaggggcaggtgcccctgacggacagcaatgcgaatgatcagaacaatcagcaggcttatcacgacggcaatcgcaatcagattttttttcagcgcatcgaggtaatggagatggaaattaatggagaggccagtcagcatgacatagttctgctgtttgccctgaaatgtcgcctggccagaggaggcgataatccggtacgtttccatcttcattccggacccggtatccatcgctctcgcagtatcctccaccgtccagagaaagacatcccgtgcgcggctgtgctcgctaaaatcggctga

SEQ ID NO: 147855 - DNA, 276 bp, Enterobacter cloacae; identical to SEQ ID NO: 118716

SEQ ID NO: 147856 - DNA, 303 bp, Enterobacter cloacae
atgcgcgatatcggcagagaaattggcctggcgggtaaagacatcctcaatctttccaatcatatgattgaacgagataaccagttgctccagctcaatgggaacgcgtgtcggttccagtcgcgcatcaagattctcggaggtgatgtttttaatggcattgctgacattacgaaggggcaggtgcccctgacggacagcgattcgaatgatcagaacaatcaacaggcttatcacgacggcaatcgcaatcaggttctttttcagcgcatcgaggtaatggagatggaaattaatggatag

SEQ ID NO: 147857 - DNA, 201 bp, Enterobacter cloacae
ttgcatctgggatggagaaggccgggcgttgtcaacatcccactcacggaatggctcaattttgtcgacctgattaagcacaaacagtgttttagcctcaccgccagcaggggccagcacatttttgtagaaatgttcatccgcagaaaaggcgcgatcatcgcctttaatcacccagagaaccagatccagctgtggtaa

SEQ ID NO: 147858 - DNA, 249 bp, Enterobacter cloacae; identical to SEQ ID NO: 141188

SEQ ID NO: 147859 - DNA, 357 bp, Enterobacter cloacae
atgacagtgcataccaaaatttttgatgaaaatgggattttgttttttgaaagtaagtatgatgttaataaattagctattatcgcagaagcaaaagacgagaaaaaactagctcttataaaagagaaaggcgcaaaatgggcattcgatggcctgcctatcttcgctagtgaattaataaaaacaattaaaaatcaagtggatgaggaaaaaatagaatattccacattcaatttaatccatacgatttggttagtacaatcaacctttggcgggcttactagagagaaatttgtaaagtccgatattgaactacaaatattagatgatggcacaatctctataacatactcataa

SEQ ID NO: 147860 - DNA, 216 bp, Enterobacter cloacae
atgaagaaaaatctaattaaaacaatacgattgaaggattctgagtctatcgatttaggagttctttcgtatgaactcactaagaaaaacattatgaatggaataaacatcatttataaagagtctgatttagtgcattttttaatcgaaaataaaatgaatgagatagatgtaaacgaaaaaggtgaattaacgtttaaggtcaaaaatagttag

SEQ ID NO: 147861 - DNA, 198 bp, Enterobacter cloacae
atgaacatcatctacttcgactacataccagattttggagtcaatgctagcatcggcggggaatgggacttttaccgctcctttgatgagctggtagatgaatgtttttgcttctatggtgatgattttcttttagtttctgtcgttctgcattctgattctttcgtgggttacagggagtcactgacatgcaactga

SEQ ID NO: 147862 - DNA, 1017 bp, Enterobacter cloacae; identical to SEQ ID NO: 141182

SEQ ID NO: 147863 - DNA, 1146 bp, Enterobacter cloacae
ttgggcctgacctctttcggcggcccgattgcccatttgggctacttccgcgatgagttcgtgacgcgacggcagtggttgaccgagcgcagctatgcagatttggtcgccctctgccaattcctgccggggccggccagcagtcaggttggcatcgcaattgggctgtcacgatccggctatgccggggcgttggctgcgtgggctggtttcacgctgccttcagcgattgcgctgatcctgtttgcgctgggcattgccagctacggggatgcgatgccgtctggcgtactgcatggattgaaggtggtcgccgtggcggtggtcgtgcaagccgtatggggaatggctcgcaatctctgtccagacgcaccgcgcatcaccatcatggcggcggcaacctgctttgttcttttggtgccgtccaccttggggcaggtgggggttatcgccattgcagcggtcataggtctgttgctattcaaacctcagcagggggcagcgcatgatccattgccaattgccatccggcgtcgcgttggattgttctggctgacgctgttctttgcgctgctgatggggttgccgttgttgaccgccacattcccgaaccagacgctgtcgatggtggatgccttttaccgggctggatcactggtctttggtggcgggcacgtcgtgctcccgctgttgcaagccgaagtggtgccttccggctgggtcagcaatgacgcatttctggcaggctacggtgccgcgcaggcggttcctggccccttgttcacctttgcggcgtttctcggtgcttcgatgaaccaggcaccctccggctggtttggtggcttggtctgcctgcttgcgatcttcgcgccgtccttcctgctggtcgtgggtgcgttgccgttttgggaacgtctgcgccgcaactcccgcacgcaagcggcgttgttgggcatcaacgcggccgtggttggcctgctgctggcagccctctatcaaccggtatggacgagcgcgattcatgcaccgcaagacttcggcttggcccttgtggcattagttgccctgatgttctggaagctgccgccgtggctagtcgtagttggtagtggtgtcgcgggctggttgttgagcgtgaccctgtga

SEQ ID NO: 147864 - DNA, 306 bp, Enterobacter cloacae
gtgaccgacaaagacctttacggtggattgatccgtttgcacatcctgcatcacgcagccgaagaacccatcttcggcctcggcatcatcgaggaattgcgacaccacggttacgagatcagcgcaggcaccttgtatccgatgctgcacggattggaaaagaagggctatctcacttcacggcatgagcgcaccggtcgacgggatcggcgggtgtatgagatcaccgagcaaggccgcgtggcgctgaccgatgccaaagccaaggtcaaggagctgtttggcgaactgattgaaggcaaatga

SEQ ID NO: 147865 - DNA, 297 bp, Enterobacter cloacae
gtggttaattacgaacaaaaaattcagtcagcctttaaggatgtttccgacacgcttgcgctgcgcgacagccttagccagcaacttgagtcacagcagcgttatcttgattcacttcagataactctccagcgtgccagaggattgtatgcaagtggtgctgtcagttacatcgaagtgctggatgcagaacgttccctcttcgcgacgcagcaaaccattctcgatcttacctattcccgacaggttaacgaaattaatctgtttaccgcgctgggtggcggttgggtagagtaa

SEQ ID NO: 147866 - DNA, 177 bp, Enterobacter cloacae
atggcagattttagttcaacaaacaaaacgtccacatttgaggaatggcatgagcaactgatggactatgcagacctgcgcggaggtagtgccgccgatgctgaagcatggcgtgatgattacgatgccgggaaaacgcctgttgatgcttactgcgacgaatggggggaggactaa

SEQ ID NO: 147867 - DNA, 672 bp, Enterobacter cloacae
atgagcaacatcgacaaacagtcgctgcgtacggcagcagaaaacgcaacgccgggagagtggtgtactgatgactaccatggggtaattgctgatgccggtctgaacgccaattactacatttcatcatgctcaggaccagataatcgatccaataagcgcttcatcgccgcagctaaccccgccaccgtactggcgctgctggatgagctggaagccgcagagaggcggattgctgagctggaggcgcgcagagcaccggattcattcaacatcatcggtgaaaacatcagaacgcaggacaaccgcattacatccgagccgatgttctgcgtattccagaagcgcgaaatcgtagttgatgaagattacgactgcgaccgtatcgtttgggttgatgaggaagggtgcgaggcgaccgaatggaaaagaatacgtcttgaactgctccatgataactgtcgcgaaacgccagacaaatggcggcggatcgcagtaaaagacattgatgactttgttacctgctgcttcaccgagcaaggatgcaaagattatctggcatgcaacgggcataacttgcggttgccgttcatctacgtaaaaagcggattcaggaacgctgagtacatcggcattcgtaactggctcgctggcatcggtaaaggagagtga

SEQ ID NO: 147868 - DNA, 579 bp, Enterobacter cloacae
atgaaattcgtagtttgcgctcatcacacccgcttagaacatgcacaacgtcttgctgcgctgctggatgctcatctgctgattgatgacggtaaccacggcgcgaactggaatcaccgacgcgcgcttgaatgggctgccgagcaaccttgccgggtagtcgtgctggaagatgacgcgatgcctgttgctggttttactgatctggtgggtgagtgtcttaaccgcttccctgattcactggtgagcttttacctgggcactggccggccacctcagtaccagatgcagatagccgaacgactgatagttgctgataaaactcaggctgactacatcacacttccgcggctgatacacggcgtttgttacagcgtaccttctcagcatattgaacgagttttttctcgatgggtcagcagcaagcctgccgattatgccgttggtgatgcctatggcggcactgtggtttatccctgttactcgctggtggaccatgcagatggtgaacctgtagagcgtcaccctgactcagcgccacgaacagaacgccgtcgggcgtggaggttgcatgtctaa

SEQ ID NO: 147869 - DNA, 921 bp, Enterobacter cloacae
atggagataacggcgggtcttcggtgcccgtcttttggagcctactttgacagtggctaccagaaagccaaatacgctgatattgccggttatgtttccggggcgcaggtgctgtttatcccgcacgcgacagcttaccttgattcagggctgcttcataaaatgaactcggtcaccatatccggtggccgtgtgacgcagaactccacgatgaaggacgtaagcatcagtgagcgtgagagtacgtacacgttccccggaagcatctggcagatatttcctcctggccagcgtaaaggagaaggcctgcttattgatgacagtactgacttcctggcgattaccaatgccacgcagtcagggcagtgtatctggaagggtaccgtcaatgttcccactggcggctgggctgttcccataatagcgggatacgacaagtccaaatatatcgtctttggtcgctgtaatagtggtaacaccgtcgatttcgatggcaacacggtcagattcttcagccctccttccacgaatgacgatgctccgactaccggaacgattgatatcgtcatcttcgccagtggcttggcgccgcagcctggcacggggctaaacatctttaatgcagccggagtctgcacgttttcaacgaccaagcgtcccttcgtctacctcaatcagctctggctgccttcaaaaaatgccgcgagcatcggcagcggctatgttccgctgggcagattcgggctgatggctcacgaagtaaatggcatgtatgtgtatcgaatgttcggaataaaaatacagaacggcagtgcttcagttcagggtgggaaatatctggggcgcgagcggtatgcaatttttggtaatgacacggtaacgccgctgaatcttcccgttctacccgatatgtacgtctga

SEQ ID NO: 147870 - DNA, 177 bp, Enterobacter cloacae
atgacgttcccggacgataatgttgacgacagctggctggaaaaatatgaaccgcaattttttgtctatccgggcaagagtatttatatgcggatcaatgaacaacataatggtaactatatctttaccttaggaacattaccgacatatgtgtgtcgtggttcaaaaaaagaatga

SEQ ID NO: 147871 - DNA, 1257 bp, Enterobacter cloacae
atgagcaactcacaaattcagacgattttggcagcaggaggtgagatatacgtatctgatggggtatatgatgtgtcgagttcaactgaaacatggaaacttgcacagaatagtagaatatatttttctgctaattcgcttctaagagccactgctaacaatgtaaccgttctaagaatgtcatcgcttgatgtatcaagttcatttatacgtaattgcaaagcattcatgccaaggattagcctcaatgggaaaaccgggtgcattggcattcatgtatattcagccaggaacaatagcagcctagaagacccgtgggtggacatgacgttgggaactggatgcataggcattcagatagaatttatgtcatatggagttattgtaacaaggccagaggttctaaacgggaatactggtggaactaggattctcatcagaaatggtcctaacgcgatatcaattcgagatcatcgttgttactcaggggtacccgctgatggacagcccgacagaagcattaccgttcttaatggactagatggttcattttcttttgattacataacgactttccctaccgcctcagtaaacatcacgggtgggtattcgcaaaacaccaaccagtatggactgctcgattcaggtgttagtacctatgtagatggagtatattttgaaaacaatgctgtatcagatgtaagtctaggtagtggtagctattattttactagcataggtacgcatcacagtcttaatgtaggcgggtcatgctttaggggtaggggtgctaactatgcgaaagttggcgtatttggtcctgcaacaagaagtcttggtcaatatgattttgactcagcgtgcaaacaatgttctgcggatggaagtcagatctggggtgattttcttaatgcactaggaacacttgatgggcttagattagatcttgggatgggatcaataaagcaatattcaacaactgacttaccaataaagattagagagggttataggtcatacagattaaatgttacttcgggtctaaacatagcaatcagtggaactccttatgatggacaagttttatctgtcacggcaaggggaagtaacatagcctcacttacatttgccggggttcctgtagacgtgacaggagcaaacacagcgacaacaaagaccggtcaattcactgcaacttattgggcatcgattggcaaatggaccctatctatgccacagtggacagcatcggcataa

SEQ ID NO: 147872 - DNA, 1944 bp, Enterobacter cloacae
atgattaaatatagaccagatatagatggattaagagctttagctgttctatccgtagtggtgttccacatagacccaaaatggctaccaggtggatttacaggggttgatatattctttgctatatcaggattcctgataactaaaataatttatcaggatgttgtaaatggcagttttagtttctctgaattttataagagaagaataaaaagaatattacctgttttcttttttgttattattgctactgcggtagtttcttttctgttaatgcgtcctgatgattacgtttacttcaccaagacagcggtttccacggtgtttttttggcaaaacatgtttttcggtgggaatgtagattatttttcatctgatgttacggaataccctcttcttcatacgtggtccctcgctgtagaagagcaattttatcttatatggcctttaattattatactggcaatgagacttactagaagtgcaaaatggttaatagcgcttggtgttgctattgcctttgtatcttttacagtatctcaattcagtagcatatctacttttattgataaatataattactattcactttttactcgcggcggtcagttgatgattggagcgattgctggattgtcttctttatattttaaaagggcaggggaaaaagtttcatcattcatggtgtatgctggctcgataattatcattgggtctattacattgttaaccgaaagtggtggatacccaggatacaaatcaatactccctgctcttggcgcgtctcttgttatgtattttggaggcggaaaatgccttatcagcaaaatactttcaattaaaccagttgttatcattgggcttatttcgtattcactttatctttggcattggcctacgctatcgctcatgaggtacataagtgacaatggatcgttgtcagcaaaccaattgcttgcggcttgtattttcatgctatcagcatcctttattagctggaaatttatagagataccaacaagaaaatctaaattgaaattggcaccgtcagttgctttgttctatttacttcctggtgctgctgttgtggcgctctggcactttagtgtgctaactggaggtttcccagaaaaatatggggctgacaaagaaagaatagtgcttgaaactacatatatgtacagcaaatattgtcacaatcaaagaattggtgattgtgtgtttggtgataaaaaaaagacgcctagcgtacttgtgatcggcgattctcatgctgggcattacacagcatttattgagaaagctggaaagatgtatggcttttcttcaaaaattgaaaccgttgacgcatgccctccacttatggatgtgggtggcgtcaatgcttcaggaaataaaaaatactatcacaaggattgctctccttccataaagcgatggacatcagaacttgataaatactctactgtaatacttgctgcttcatacagttcgtatttcgatgacaaaaatacgttccctaatttccattcagaatatcatgatgtggttaaatatttaacgcagcacgggaaaagggtccttatcatgggccaaataccattatttatgaagtctacttatgatcatgcaatgcgccagaggatgagtctaataaagtttgattctttttctggtgtaaataaagaccttacaaagtataggatgaagacaaatgataaggccaataacaagcttaggaaagaggctgagtacaacaatggcgcaaggttccttttgcctatagaatacctaacaaagcaagagcaggacgcgctgcctttttatcatggaattcttgcctacaaggatagaagtcactttaacgaatactccgccagattgatcgcgaacgatgtcctgcctaagcagagggagtactgggagtgggtgtctggtaaatga

SEQ ID NO: 147873 - DNA, 306 bp, Enterobacter cloacae
atggtagcgggtctgcccttccggcgtggtgcgggcgaccagctggccgctcgcgctccaggcaaaggcatgggtgatggcctccggatgaccggcggcaaaggtgcgcgcaatcgtgcgcccgcaggcgtcatagcgatactgcgaggccacgccatcaagccccacctcttccagcagcagcgagtctggcccccagcggaactgatacgcttcgccgttctcgttttccagggcaatcagacgcccgcggctgtcccagcggcggcgcacctcttcaccctgcgtatttcgggtggcggttaa

SEQ ID NO: 147874 - DNA, 567 bp, Enterobacter cloacae
gtgcgtgaccttctcagcagatccttcgagcgggttaccggctgcatcccagcgccactgctcctggccgggcagcgtgccgtcctgaaccagcagccggcctgcgctgtcgtactgccagcggtaccagctgaacgggttatcgtcccgctcttcgcgcaccaggttatgacggtagtcgtaatcccagcggcgggaccagcggcgcggcgacgggcgctgggcattgccggtaaaaacgtcccggcggttcagtcggccgaggcggtcgtattcgctgcgggtggtcagcagcccctgcgtgcggctggtctcgcggtgaagctcgtcgcgggtaaagtcggagaccgacagcttatcgagggcaatgctgagcagatgcccgctgccgtagtagaactgtttcagctcgcggccatcgggcagcgtgacggaggtgcggttgcccagcgcatcatatccccacgccagctcaccatgctcgcccgcttcgcgcgtgacgcgcccgagcgcgtcatactcaaacacaagctcctgctctgcctcggtggtccacacgtcggctga

SEQ ID NO: 147875 - DNA, 231 bp, Enterobacter cloacae
atgccagtaaatcgaaaagggttttccctgctggaagtgctgattacgatgacgataagcagcattctgttactcagcacgtcacgttttttaccggggctacagcgggggttttactgcaatccgggcagcaggagctggaggatgaggtctggcaacgtctgttcgcggtcggtaaacagtttcagagagcaggatactgtgcagggcattgccagggacaggggatga

SEQ ID NO: 147876 - DNA, 1464 bp, Enterobacter cloacae
atgattcaggatgagctacatctaatttcggataaactcatttcagcagtatattctttcgaaggaaatgtagacgccaaatcaatacacattggtaaatcacttcttgaagagatacctattcacatccctataaatggaatatttaactcacacatagggatatttggaaatacaggaagcggtaaatccaattcattagcaaagatatatagcgaattattcgcttgcattggaaaaagattatttaaaaaatccatgtttgtattcattgatttcaatggcgaatacaaacccatccacaaccaattgaatgataaaagcaattacattgtgcttgacacgcatttgaagaatggaaatcaaaaattaaaaattaaaaaatcagaattttgggatgtagaattactttcagtcttgttttcagccacagaaaaaacccaaaaaccatttcttaatatccttgttagaaatagactcaagtatggtgatgagcttaatgactacttccatgaaacaattagggttatgtttgggcaaaatcagcatcgtgaaacgatcagcgttttacggtcaataattaacatagtcaaccctgaaaaatcaaaagaaataaattccgagttatctgagtttagttggtactcaagaggggaaagtaataagtattacaggaatggaaatttttataatactccggatggttatcttgctcaccttccttcactaacaaacactaatatagatattgaaacgctatcatcttttcagcaaataactgtcagggcaactcttcaactgataaactccgtatctaggaattatgtacaatacgaacatatcagcccattaatcgccaagataaatgcctcaactggctcactagaaaaagtgattgagataattgatgatgttgaaatcgaaactaagccactattgttcatatcattaaaaaactgtaaccaagaaataaaaaaaaccattccgatgttgattgcgaagtgttcctttttggaacacaagaaaaaagacacttcaaaaaacagcttccaccttattattgacgaggctcacaatatattatcagagacatcaactagagaatctgagacatggaaagattaccgcctggaattatttgaagaaataattaaagaagggcggaaattctcatacttcgtaactattgcgagtcaacgaccagcagacatatcaccaacaataatttctcaaattcataattatttccttcatcgtttggttaacgaaaatgatttgttcttactaaaaaattctataagtaaccttgatagttcttcgcgaagtttagttcctatattaccatcgggagcctgtgtcgtatcgggaaccgcatttcatactcctatgatcattcaagttcagcgcctcccatcagaattagcgcctgaaagtgatactattgatctcgatacattttggtaa

SEQ ID NO: 147877 - DNA, 234 bp, Enterobacter cloacae
atgcaggcgcatgaccagcctcagggcgcgccagtgctggcgctggcgggggattcagtgtcggtaaaacgcatgcaaaaccatgcaccttatgcatgcatggcttttatacgtaaaaatggcgggattttcgggggatttttaaacggactactgcacggccagttctgcgcgacggcgggtgtaattcaggttctgtgcaggcgtgaatttttcacgattatcatcgcgtga

SEQ ID NO: 147878 - DNA, 228 bp, Enterobacter cloacae
atgagacacaccaccattaccgcccgtgacctcgaatgccttgagcacatgcgcaacgtcggccagctcgtcaatgagctgatgcaggtgcaggactgcgccaccgttcgtcgtgaccctgcgcagcagtcgcaactcacctccgtgatttacctcatgaccgcccagctcgacggcgtggtagagcgctgcaatcagcgctggctgaccggggagggcaacgtatga

SEQ ID NO: 147879 - DNA, 570 bp, Enterobacter cloacae
atgaaagagtccgatgacaagcagcccatcagcggcatcattcagctcgatgatgtctactggggtggagagcgccgtggtggcaaacggggtcggggcgcggcaggcaagacgccgtttgtggcagcagtagccctgaacaaggaagggcatccaatcaagatgcggatgacggtggtcgatggtttcaaaaccaacgtcattgctgattgggcaaaacggcatcttgccagtggtagcgcggtgatatccgatggattggcctgtttcaaagcggtcaaggaggccaattgtgagcacctgggtgttgtcaccgggggcaaccttgatttgctggatcatccggcattcaactgggtaaacacgatgatagggaatgtgaagaactcgctgcggggcagttgtcataagctcggagcgaagcatttaccaaggcatcttgctgaatactgcttccggtttaatcatcgttttgacctcaagagtatgtttgttgaattggggcatgcagtcgtggcaagcccgccgatgccatatcggctcttgaagctggctgagggtcatgggtaa

SEQ ID NO: 147880 - DNA, 555 bp, Enterobacter cloacae
atggcgcagacgagcaaagaacgcaccggtttcaggactttccgtatcgcctgctgtcagaaacggctctgcataatgatagatctcacctgtggtgatccctttccgcccgctgacgctgaccgtactgtcctgtggcgtcagcgcatcccggtagttgtaatcccgggtagtccccccgccgctgacaacatggtacgcggtatggatatcccagacactttcctgcccgctgtcgctcatgccggacgggtttcgcagcggcagggtcacgccaaactgatactgctccgggctatcctggaaaataatgacatcctgttcaagacggctgtccatttcgaaccgccagaaaattcccacttcggccagcagtcgctgaataaattcaagatcggtttcccgccactgagtaatcagctctcgggctgggtattcacgggacagacgaaactcaaagtccgccccttccagaccgtgcctgcggagtactttttccacgacgtcagtaacggaatgattgagaaaaatctcacaccttttcgttttcgctaa

SEQ ID NO: 147881 - DNA, 519 bp, Enterobacter cloacae
atgaagaaactgctgcttcttgttccgctcgtgtttgctgctccggtactggcttctgaagtgacggtgggtcaggtttgcaaggctgtttctgcggcaatgttcggtcgtgacctcaaaatcatgcggctggataaagtcgagtcaggtattgcttacgtaagcgaacttgaccagcagctcaagggcgtgagccaaggagtgcaaacgacgcgaaccatgctcgcggaacggcaggaaagcgatcggaggcaagtgttaagcagccttgaaacgttgtcttccgacgtcccggcagcactggtgcagcatttgaccccactaacccaggcaattgagtctctgcaaaccagccagcaggcgttgaccgaggcagtgagccagcaaaagagctatctggaggcgcaaagtgccgcaagtcagggtagattccgctacgttgtcatcatttttgccctgtttgctacctcaacgctagcttatatcggctatgacatctggaaaaatttaactccctga

SEQ ID NO: 147882 - DNA, 426 bp, Enterobacter cloacae
atgttcggattctttaaaaagaaaaaacctgacgctgcgcccgggcagggttcccgactgacggcgcaacagtttatcgcgctgacgctgagtgatgaaaagctgtcaatgcctgtgtatctgccggggatccgcagtgaggccgaatgcgacgaactgggtttatggccactcatctacatctggaatgtggatcgtgccgctggcacgttcagcctttctgttaacggtaaagccatcgcccacctccttgagcctttcgtgccccgtgaagaccaagcgtatgtcgaaattcgtgatgaagcgatgaaggttatcgctgaggcttcaacgcagtccgtgctggcaaccatagagaaaacgggcctcatgcccgatgttttgttcgcgtaccacgctgaggatgtacagcaggagcagggctaa

SEQ ID NO: 147883 - DNA, 1347 bp, Enterobacter cloacae
ttgattggtagctcatggggtggggctagcgtttgggaagattacccttataaaggcagcgttaagccgtcgaaggttatttacccaaccatgacaaacagtgccattcagacaatactgtctggtggtggggagatatatgtatctgacggaacatatgaaataacctcaacatcagagacatggaaattatctcaaaatacaagagtgacattttcatctggcgcgttgttgaagccaacagttgatggtgtcactgtactccgcatgtcatctttagatgtttctagtcagttcatcaggaacgccaagtgttttggcccaagaatcgacatgactggtcgatctggatgtatcggtattcatttttacaacgcaaggaataactctggaatatattacccatgggtcgatatggggattggcactaataacacgggaataaaagttgaattcatgtcatatggccttactatcagagaccctgaagttctcaatggaggggttggaggtagaagaatattcattttaaatggaccaaacgccatcaacattgaaaatcacagaggttattcctcggacccggcaaacaaatgtgattatggcatagttatattcaacagcacagacggcagcaccaatgtagattttgttaacacattcaccactgctgctgtttgcataacagggggctttagtcagaacaccagtctatatggtattaatgacagtgccgatggaaccaatgtttatgggatgtattttgaaagaaatgatgtagctgatataagcctgagcagcgggagcagggacttttattgtgttggcattcagcatagccactcagtaggtgattgcatgtaccgaggtcggggatgtgtaggcgcagttatacaatcacctagcaatggactaagaactcgatggttcgatttttcaggtgccagtcaatgttatgcttacattccaagagcaagggcattccctgccggaacactggttcctattgggaatactgatggtttagctgttgaccgtggagctcaatcattttctcaatatacttcaacatcgcttcctatcgatgtcaggcagggttacgcgctttattaccttaatgttacttctggcatgaacatcactgtttctggaacgccatataacggacaaaagataaacatgctcgttcgaggatcagagatatcttcattgtcgttttctggcgttccagtggatgttactggagcaaatacaacccaaacaaaaaccgcctcattcactgcaacatactggacggttcttgggaagtggacgttaacaatgcctcaatggaccgcctcatcatga

SEQ ID NO: 147884 - DNA, 1251 bp, Enterobacter cloacae
atgtttgcagttaacaggaaaaatttaaatgtggtgtctttaataaccatatcagtgtgcatcatgtacgttttcatttctgtcgtttataaagatattaccgacgatcatttcttttcaacagccctggaaaagtactctcttcctgatattttaaaaattaggtacatgacatggagtggtcgggttttcattgaagcatttctaatgaaaactataaacattttatattttccacagattataatagccttatcttgcattctaatgagttactgcatagctaaattttcctctaaagatggggttgtctcattatcattagttagtgctgcattgttgattatgttgtcagacttccatacgaacaggcaagctacactgtggattaccggggcttataactacataataccaatttcaattggaatgtactcaatcctgatatttctgaaaaaaaaccaatcaagcatcaagaaactcttatcttgcttgttaatatttttagcatgcaacaatgagcaatttgctgtgaccgcgtttataggggtgttggcattccttgccatcaaatatagatctgatggtatttcagcctatgatcttacattctttgcatgtttagtttgcggcgggataattgttctggctgctcctggcaatgttattcgcttgcattctgaaatctcaaactggatgccagacttcaataactatagtgttttccataagttagcagttggtgttgatagaatatctaatcaaataaatttcaatgacaactttcttttctttatcgtgagcattttatctatagctttcctcttgaggcgcagcgatttttgccttgtgaatgctgcaatgatatccatactttcattaaaagtattatctttcattctgtcattttatcctgatactatgctgtcaagattaataagatttgaggagtatatttcatcagcaacatggcgatatccagttgtttacataacttattttattaacctcttgtcgttatcatcgatactggttacatgtctgttggcttcaaaaaccgctaaggatgctacattgatttcagtagtactgttatgcggagtcctttccgctctgatgattggattttcacctacggcttatgctagcggaacaagggttatgtttttgtttgacgtcagcatggctattggtggcctattcatatttaatcgtatgcatgatataggtcatgatgaggcggtccattga

SEQ ID NO: 147885 - DNA, 468 bp, Enterobacter cloacae
atgcttaatagaaaacacctgagcctcacattttctgggctatgtttattcagtgctatatctgtagcaatcacatttatagtttggaatagaccggaaaagctacaatatggcgagaatgatgttatatggagtgaggtaaaaggaaatgttgaaaaatgtcatttagggcaatcttctgtttatgttaaaggatggatttaccccacaaccaaatatgaaggaatgtataagggtaatacttatgttgttttaaatgacgggggaaccttgtacaaaattaaaactgtaagagagaatagacctgatgtaacctcttactttaaagctgaaaagaagaaattcgatctaactggttactcatcagcttcgagattcagtatcttcggtcttagtccatcaaatgaaatctatgttataacagagaatgatggaacaatcagaggaatgaaacatgtttgcagttaa

SEQ ID NO: 147886 - DNA, 1383 bp, Enterobacter cloacae
atggcttacggcgcggatcgaataaaagaactcgttaataaaattaaaagctttaagccacatgtcctgttcgacgatcgtgtgtatgacgattttaaaagacgcttgatgccaagcgaccatacattaaaacagggaaaaaaaattttcttagataagcgtcagagtaagttggcaataagcgtgtctggaaaacaaaagattaagggtgtagcaggctgtggcaaaactactatcattgcaaatcgagcggtaaatgcttttcatcggcatgatgatattgtattgattctgactttcaatattacactaaaaaacctcattaaagaccgaatcagcgatgttcttggttatcgagacgatcaacatttcgcagtgacaaattatcatcagtttttcatgtctcaattgattgagacagaacaggatgtcagtgaattaattgaaaaatatggatttaatgaattatttaaccgtgatttattcagcgatttttctgttagtaagtatcggacaattttgattgatgaagttcaagactttgaaaatgaatgggtaaaaattattcgtgacaacttcctccatcacgagggtgaaatggtcctgtttggtgacgaatcacaaaatatttatgagagagatagcaaaagagcggccgtcatcgcgcagggatttggtgagtggaagaaattaagtcgttcctatcgtacaagcagtgactcgcctttgaatcgaatttttaaagattatcaattgaagtatctggtcgaaaaacatgcagatatagatttatttgaagaacaaaatatccagtcaggaatgaattttgatattatcaaatatcacttctttccatccgattgggaaaataaatgctttgaaaaaattcaaagctacatcagaaattatagtttcaatccaaatgatattgttattctgtcgtctaatatttttcttgttcgtcgattaaatgaaagattcaatgaatttgaaaataccacttgtatgtttgaaacatatgaagaactaattgaactcctaccaaaaggaaagaagcattacgatatcaatcgattaaaattgcttacaaaagaggagttgcgtgattttattaagcgacatactggtattaaatctgatattgagcgggtaaggaggacaaagaaaaaccatttttatccgaatagcggattgatcaaactatccacgatacatagttataaaggtctggagtctaaaaccgtattttatattatggatgacaaggatactcctgaggttatctatacatctattacgcgatctattgagaacctcattatcttggataaaagtagtgaggggaaatataaaaattttttcagcgaaatcaatgcgaattga

SEQ ID NO: 147887 - DNA, 1092 bp, Enterobacter cloacae
atgaaattatctatcgacatttctgaacttattcagttaggaagaaaaatgttgccggaaggcgttgattttttccttgacgaaacgcctgtagtttttgatccaattgatatcgaactttctgcaggtaaagaagttagaattgaagatcttgatcccggcagtggtcttatttcctaccaagggagacaggttcttttgtatattagagaccataccggacgttatgatgcggctattgaagatggagagaaagggaagcgatttcatattgcctggtgtagaacattagatgacatgcgccaaaaaaatcgatttgaacggtatcatgcaacaaatcgtgttgatggcttatttgaaattgatgatgggctcggtcggagccaagatgtcgctcttaaagtttgtatgaactgcctagaacgccttaattacaaaggaagtatagataaacaacagaaaagagtaatatttaaatcattttctttgaatgaatttttttcagattatagtacctgctttcgccatatgcctaaaggaatctatgataaatcaaatagcggctatgtagaaaattggaaggatatatccagaactactcgagaacaagctaactacaaatgtagtgattgtggtgtgaatttaatgtccatgaaaagtctatgcgatgttcaccacaaaaatggtattaaatatgataactcagctgaaaatctactcgtcttgtgtaaagattgccatcgaaagcaacctttgcacgaaggaatatttgtcactcaggctgacatggcaatcattcaacgcttacgttcccaacaagggcttttgaaggctgaatcctggaaggatatttacgatctgacagatccttcgattcatggtgatataaacattatgcaacacaaaggatacccgccaccagttccgggattagacttacaaaacgcggagcatgaaattattgctaccgtagaagctgcctggccggtttcaaaaattgcagtaaatttaacaccggtaaaagtcgatggttggaaagtattctccgtgggagaactcgttaaagaaatacaatctggggttattttctaa

SEQ ID NO: 147888 - DNA, 708 bp, Enterobacter cloacae
atggataaaatccttggcaagcaggcccctaaaaaagatcaagataatgaacattgggtttcaatgtcagatttaatggcaggtctgatgatggtatttatgtttatttctatcgcctacatgcactatgtgcgtattgaaaaagaaaaaattaaagaagtggctgtcgcctatgaaaatgctcaacttcaactctataatgcactagaaactgagtttacaaaggatttgccagcttgggatgctgaaattgacaaacaaactcttgaggtccgttttaaatcacccgatgtcttatttggtttaggtagcacagagcttaagccaaaatttaaacagatccttgataatttcttccctcgctaccttaaagttcttgataactaccaggaacatattactgaagtacgtattgagggacatacaagtactgactggactggagcgtccaattctgacatggcctattttaataacatggaactctcgcaagggcgaacacgagcagtactgcagtatgtctatggtttaaaagaaagcgcagcacaccagaagtgggtaaaaagtaaatttgctgccgttggatattcttccgcacaccctattcttgataaatctggtaaagaagatcccaatcgctctcgccgagtaacatttaaagttgtaacaaatgccgagttgcagattagaaaaataattcaggagtaa

SEQ ID NO: 147889 - DNA, 576 bp, Enterobacter cloacae
atgcgagttgcccttgatgaaggcactgaaggtttcagacagtcagtgactcagacacagcaagcttttgcatcaatggcgcatgatgtcagcaattcctctgaaactcttaccagcacgctaggagacactattacggagatgaaacaaagtggtgatgagttcctgaaatctctggaaacacactcaagagaattgcatcgaaatatggaacaaaacactactaatgttattgatatgttcagtaagacaggtgagaaatttaatcaacaattaaccagcaatgccgataacatgtttggttcaatgcaatcttcgtttgataaagcaagcgcgggactgacatctcaggtgaaagagtcaattgagaaatttggtagttcaattaacgagcagttacatgcttttgagcaagcaacagagcgcgaaatgaatcgtgagatgcaatcactagggaatgctctgctctcaatcagcaaaggttttgtcggtaactacgagcgactactcaaagagtatcaagctgtcatgggacaactgcaaacattaatttctgctaatcaaaaacgaggataa

SEQ ID NO: 147890 - DNA, 462 bp, Enterobacter cloacae
ttggctactatcactacccatgctcaggcattatttacagttcccttctctcacaacaccgacttcaatgatctggcggaccactgcgagcattttgcccataacctgctggaaactgacgacccggcggagaaaatggcactctgcgcccgcctttctgcatgtcttgtacttctacagccaacactccacgagcccatcccgccacacctggtggagcgatttaccctgaccgatctgccgtcccgtctgcccgtattcgaaccggaaagcgagctgctggggctgtactgccagacgcttacgcagctgctaatcagcaacgcaatgccacgggatatggcaaaggtaatggaagggctattgtatgaactggtgagcttctacgccgatacgctgaacgccccgcgctggctgcaaacgccggagggacgcgtggcgattgatgcattgattgactaa

SEQ ID NO: 147891 - DNA, 501 bp, Enterobacter cloacae
atgcagtacctgtttcgcgatgcagcgcacctgacattactccgtactaccagagaacaaatccacagaggggtgaaggttgaagaatttagcctgaagaccggggatttagtgttcttccagacgggcgaacaccttcgccatgtcggcgtctatatcggtgacaaccagtttatccatgcctcgtccagtcagggggtcaccgtttctgatctgggcaatgtctactggcaatcgcacttcatcactgcccgtcgggtgacggagaatgtctgcagcggcatgatgtcgattttttgcgaggcgccttccgggaataatttgccctgtttgtcgacgcatactctccgcagtatcttcctgttgcgcctgcaaaatcaggcgtcgggattgacctcctggtataagttacaggcgacatggtttactatgtcgtacgcacggatacacttcaatggtgggccgggcgggggcgtcgcaagacgcgccggtttcctgtaa

SEQ ID NO: 147892 - DNA, 639 bp, Enterobacter cloacae
atggcaactggaacatctgaatcaacgattttacgcaaatcagattatactcacctgctgattgattacctgaagcgcgatgccgaagtaaaacatattctcccccgccgccgtttaagtatgcaggtaggtcatgaacgcttttgctatttagtcctgaatggacgcgtaaccgttcatcgccgcagtgacgatctggcgatggcaaccgcaacgtcacccgccctggttggcatcggcaatttgcagcaaatgcagatggatggctatatcaaaacgctggtcgctagcgacattgcgatcctcaagatggcaacagttcacgatattatcagcgcgaaccagctctgggagccgctggcaaaacatatgatggttatagccggtaagctttttgagtccagcgagcagctttctgccccttctgcctatgacatcgtccgcgcgcagcttaatgagttgtttaatgaggatcccagcgtcagaaataatattaccgtcgagtcctatatccgtgaaaaaacgcatctgtcccgcagcggcgtgatgcgcatcctggcggggttaaaaaaggggggatacattgaaatgcagcgcggcgtgcttataaacatcgttaaactgccagagaaatactga

SEQ ID NO: 147893 - DNA, 663 bp, Enterobacter cloacae
atgaataccaaaatcataaccggtgccaacccggggataatatctgcactagggacaaaacccgtcgctgacattgacaaaataattgaacaaatttctccatttgcgacaagcttccgggctaaaaaaggcgaaattttacgttattattcaggcaataaaagaacctgttatttactccatcagggaagcgttacgctgaaccgcagaggtgatggtatggtgttaaattcagagcaggccacatttattctgggcgtgagcaatcagttttctcagtccgaaaacctctatattcgggtcaatgagaatgctctaatgagccgcttaccacttgagcgtttcaacctgttgattgagagttttgccctgtgggagagcctgtgcaaactgttggtgtataccgcttcccgtgtctacgagcactgcaccctgatttcgcagatgtcctcctatgagatcattcgctttcatctccaggagctgatgaatgaatcagagcggatccgcaccagcataacggcggccaactacatcaaaagccgaacctatctctcccgcagcggcatcatgcgcatcatcgccgagcttcgtgaggctggttatatcgaactcaatcgtggcattctggtcgccattaaccatctgccgttaaagtattaa

SEQ ID NO: 147894 - DNA, 1035 bp, Enterobacter cloacae
atgtttaaacattttcgctatctaataatgcttttgattttcttgccaatttatagtcaagcatgtgtttatacttatatcggctcgccctatactgtaaattatggggatattattgtacaaagagatacgcctattggatcaccaataagcagtgttatttatggaacaatggctaagacttattcttgtgtatcttcgggagcggaggggtccacggcgggtatcaaaagcggtgtgctccaatatgcactaacttcctctggtagtgcaaggatatataaaactaatttgccgggtgttggtatatcttttggtgtaaatctcaatacttcagcaggatcgtcatcgtggagcggaagtgggattattggtattcccggacctattaacgtatcgcctgatgtttgggcgcttaactggtatacatataatacaaacgaaactaacacttacaattatcaaccaagaattcagttttggaaaataggtcccattacgtcaggaatggttacaggtcaaattgcatcatttattgctaatgaaaataattcggctacgggtgcctgggttcgggaagtaccaatatatatcgggagtggttcgataacacaagtagcctgttcaatcagtactcccaatttaacatttccaattggtaacgttttggcaagtagctttgcttctacaattggaactgtaccttctggggcgcagaacactcagaatttaggcttaaattgcgatgctggagccaatataaacgtcatgcttcaaggtacccaaaaccctgacgtcggcaccactagcgtattagccttaacaggccagggaaatgcagatgtggcaaaaggtgtcggtgtccagctgttatataacggcacaccattaacattaaataaccgaattgtgctgaaacaatccgcaggcggccaggaaactttcccgataaccgcccgctattatcagaccaaaaccagtgtttctacgggtaaagctaacgcagcggccacccttgatttaacgtaccaataa

SEQ ID NO: 147895 - DNA, 510 bp, Enterobacter cloacae
atgcttaaacgtaaatggcttgccagcgcattcatgatgatgttgccatggctatcctatgctgatgcgtcgctgacgctgaccggtaacgtggttgccagcccctgtacggtggataccgatacggttaacaaaactgtggatttaggtaccctgcaacgtcgggatctgcaaaccgcaggagaaggcggggagtggcaggacttcgacctgctgctcaccaattgtccggccggaacgaccaaagtgacggctatagttagcggcacgcccgatacccaggacgccaccgcatggaaaaacagcggcaccagtgacaacacggcgcttcggatcgccagccgcgatcgtagccagacagttgcaccgggcgattcgctggctcagaacgttaacatcagcacgcgttcagcctcattcctcctgtcggccagaatgtttaccccacagggcagtgccaccgctgggacattccagtcggtcatcaacgtcgattttacctggcagtag

SEQ ID NO: 147896 - DNA, 678 bp, Enterobacter cloacae
atgctttatcgtttatcctttgaaaacgcggtacgcggaatacgttttcaacctatttattccgtggctgaaaaagcaattaaagcctgggagatattaagtttattgcagcccggaattaatcatgagcagtactttgcttcacaatcgcatcaagcctgtctgaatatcctgtgctggcagttgcagattatttataagatgaaaaacaaaaagcgttattatttaaacgttcctgccagcctgctttgctcttcgcaggctgttcaactcctcctgccctggctacgggaggggattattctcgaagtccaggatccgcacgagtttatttctctttcctgctctgaacgccgggcgtttaacgcccatgtcaggatgatcaaatccatgggagctgaactttggctggatgatatcaagccggatcagttcagcgatttagccgatgatctggcgcgattcgatggcgtcaaaattgataaaagcgttattctggaagagccttcatccttaagctcgctgattgcagattgcgcccgatacgttcaattcgtgctcgtggaaggggtggaaaatagccagcattatgaaattgccgaggagagtggaagccattttctccagggatttatgtggcctgaagagcaattttatatcagctatacatcggtttga

SEQ ID NO: 147897 - DNA, 603 bp, Enterobacter cloacae
atgctaaagattttaataaatgatccggacctcctgtttcgaagaggtatgaagtactttctaagcgattttttctgtaagcggtttaatcgtcatgttgaatttatcaccgactatacatcggaaaatattgctgacgcggatgtgattattctttcgctttgcaatggtgaacgttatatctgtcttccggaactccgcgcgcggcaaaagggtataataattggtttagttgatgaagaagatgattcccgaatttctccatcctgctttgccgatatagtctatatcctgcggcgcgaaccgctgagtgaaattacgcgaaaacttactttcgcctggcaaaaatggatagagatccaggaatttcaaggttataaatcgtgcttcgggtgtaaacatgtttcgctgtctctcacccagcttgaaataatcaccggattgaataaaggatattcttttcaggaggttgcgataaatatgaatatcacctataagacagttacaacgcataaatatttgataatgcgaaaattttgcttgagaaatgattatgacctgtttcgctttttaggcaggctgaaccaaaaaagcgcaatctaa

SEQ ID NO: 147898 - DNA, 762 bp, Enterobacter cloacae
atgaataccattccccaccaggacatcaactccctcataaagtcaggagccctttttgtttcgaaccattctggcggtaaagatagtcaaacgatgctgatcaagcttcttgaagttatcccgccacagcagatcgtcgtagttcatgcttcgcttggcgccatggaatggcccggcgcgctggaactggccgagaagcaggctgggggttccggactgccgttcatcgttgccagggcgcgcaagacactactggagatggtggagcgtcgatttgaaatccgcccggaggtgccgagctggccttcagccagcacccgccaatgtaccagtgatcttaagcgtggccctatccagcgtgaagtgagagcctacgcgaaggcgaacggtttcaaggtgatcgtcaactgcctcggtctgcgcgcccaggagtcgcctggccgagccaagcgtcaggtgttccgcaagaacgaaactgattccaactcagttctgacctggtacgaatggttgccaattcatgagctgaaggtcgaagaggtgtttgcctcaattcgcgaggctggccaggaaccgcattacgcatatgcgttgggaaatgagcgtcttagctgcgtgttctgcatcatggcgagccgaaacgacctgcggaacggtggacggcatcaccccgagctgcttgagcagtacgcagcgctggaggtgcgtaccgggtacacgatgcatatgaaccgcatcccgataaaggagctggcagcatga

SEQ ID NO: 147899 - DNA, 201 bp, Enterobacter cloacae; identical to SEQ ID NO: 121526

SEQ ID NO: 147900 - DNA, 1095 bp, Enterobacter cloacae
atgctagcattcacacagcttatattagttcggaataaactaagggagatatcagaatctccctacttttctaaagatatgcataagtatctttctgttcttcaagaagcagtagataagttatatgaaaaacatgggacaattgctgatgaaataattacagaatgtacttttttcatcactaatgcagttaactttttcactggtagcaccacaaaaaaaataccctatgagattgtttattgcttaaatgacgcctgtaaaaagtggataagtgaagaaacacttattactacagccctatcgccagatatgcatggattttatttcagatctgtaagcaaacaatcatatgatttacttgaacagactttaggtattagtttcgaagccgaattaattcagatttcattacctgaaatgtacagaagacgaccgctatgctctacacctttatatcacgaactaggtcattttgttgattttagtaaaggtatttctgaactggctattctcaactatcgttcagttaatcaaggtacactcccgatcccgaagggaccccagggaattgttgaatgggctacattacctgatattatttggctgaatcattgtaaagaattctttgcagatcttttcagtgcacaattcgttggaaaaagtggggtggagttcttatacaaattagcaggttctcatcctgcaagtgacactcatccatcaacagaaaaccgaattaaaattgtaaacgattttttaaacaatgttaaaaacccagttgttgatatgtttaatgcggtaatttcagccttacataaacaagggaagattatttcccccagcttaacattacctttaaatttacttgatgtaaaaactacttttgataatgtacgtccctttgtaattaataaccacaatgaaatgcatgcatttattaatagtagctggcagtatttatgtaccgaatgggaaaatccgacaggcatatggaagggattatcaaaagaatccatagaaaaaaccataaatgatttggttgaaaaatcaattcgaaacgtaatgatacttgagaaatggagtgcgcagtga

SEQ ID NO: 147901 - DNA, 633 bp, Enterobacter cloacae; identical to SEQ ID NO: 106964

SEQ ID NO: 147902 - DNA, 609 bp, Enterobacter cloacae
atgttttctagaattattgaggaagttttcccatttctttatttttactatattgccaacaaaaaaacagttagtgtgtatgatatcaccttttcaaactttgagttttactcaggattatcggatgaaaaaatagtcgagagacttgagagcgagcataatagagccaaggagatagatgataagacttttaaatttacattggcattaagtatatcattaagtattataagtgccggtgccagtggggttgttaaatttcttcctgaaagtcaattaagtccatatatatcgtttgtgttttttctttcttctttttatatgctgtgtggaggtcttatctcattaggttcattaaaaactctaccaaaatttgggtatggaacgtattttgagatcaacaaaaatagagaatctttaattaaggctattattggtcaggaaaaggttaatataatacggcatataaggaatgagctttcttatatgagtttgcgaaatgggtttttactaatcctctttgctcttattttgtgtttatttatattggctaccagtttttttgtgagtcacttacgatttgaaccgttgacatcttactgtctatga

SEQ ID NO: 147903 - DNA, 939 bp, Enterobacter cloacae
atgaaaaattatgtattgattctatcaagtatgtatgatttttccacggatttggttgttcagcgactggaaaataatagcgataattttattaggctaaacaaagagcaattaagtgattatgagatttttttagatcccataaatacaatcctaagggtgaaaggtgaatatgttgatgtagaaacatctaatgtaaaatcagtttggtttcgacaaccagtttttctaagaaatactccagggcgtagcattgatataaatgagcagctttcattatcacaatggaatgcttttcttaggggattaatggtttttgataaggcgtattggatgaattggccgcaagcaacatatgctgctgaatctaagccatatcagctaatgattgcaaaaaagatagggttttgtgtacctcaaacgattattagtaattctcttggttttgagaaactcccttcaacgaagtttattataaagtcgatggataccgttttacttaaagaaaatgatgattgctattttacatacacatcgaaagctaatcctgcggactttactttagacaaaaccaaacaagcaccgataacgtttcaagaatatattgaggataagttagatattagagttactattgttggctccaaagtatatgccgttgcaataaaatctaatggtaatgctatctctgatgattggagaaccttaaaaaaagaagatcttgaatatgtcgacattgaacttcctgttagaattaaaaaactttgcatagagtatgttaagttacttgggttgaattatggtgctattgattttatcaaaacaaaagacgaatatatatttattgaaataaatccaactggcgagtggggatggctttctaatgataaaagagaaattgattacgatattgcaaagaaattatctgaggctaattaa

SEQ ID NO: 147904 - DNA, 141 bp, Enterobacter cloacae
atgatcgtgcccggaaacagggggagcatcatgctggaatcattagtgactttgctttcgagcggagcagcagaaagccacacgccacaaactgccgttgcggcggtgctgtgtgcggcgctggttgggctgtttagctaa

SEQ ID NO: 147905 - DNA, 783 bp, Enterobacter cloacae
ttgaaggatcagatcacgcatcttcccgacaacgcagaccgttccgtggcaaagcaaaagttcaaaatcaccaactggcccacctacaataaagccctcatcaaccgtggctccataactttctggctggatgatgaagctattcaggcctggtatgagtcagcaacaccttcttcacgaggcagacctcagcgctattctgaccttgccatcacgactgtgctggtcattaaatgcgtattcaggctgaccctgcgcgctgcgcagggctttattgattccattttttctctgatgaacgttccgctacgctgcccggattacagctgtgtcagcaggcgggcaaagtcggttaacgtcagtttcaaaacgttcacccggggtgaaatcgcgcatctggtgattgattccaccgggctgaaggtctttggtgaaggcgagtggaaagtcaaaaagcatggccaggaacgccgtcgtatatggcgaaagttgcatctggcagttgacagcaacacacatgaaatcatctgtgcagacctgtcgctgaacaatgtgacggactcagaagccttcccgggtcttatccggcagactcacagaaaaatcagggcagcatcggcagacggcgcttacgacacccggctctgtcacgatgaactgcggcgtaagaaaatcagcgcgcttatccctccccgaaaaggtgcgggttactggcccggtgaatatggggtcacctcagaaaacggaaaaaatcgtacgctaagacccagagagcggacgtag

SEQ ID NO: 147906 - DNA, 1479 bp, Enterobacter cloacae; identical to SEQ ID NO: 86714

SEQ ID NO: 147907 - DNA, 1500 bp, Enterobacter cloacae
atgagcctgatatcagggtttgttaaatcgctgtctaagttatcgatgattggtcgcgccttaatgctgccaatttcactgcttcccgctgcgggcctgttgctggccttcggcgataagttccacttgccgctgatgatgaacgcaggcggggttatctttgataacctgccaatgctcttcgccatcggctctgccgtcggactggcttcggaatccggcattgccgctctctctgcggcggtctccgtgtttgtcactaatatcaccatcagcaccgtgctgagcattacgccggaaatggcctcccagggcgggaaatacgccatggtcgtcggcattccgacgttacagatgggcgtctttggcggcctgatctgcggtattcttgcggcctggtgttacaaccgcttccacaccatgcagctgccggaattcctcggcttcttctccggcaagcgctttgtggcgattgcgacggcgtttctgtcgttcctgctcggcctgctgctgccgtacgtctggcagcatattcagtccggcatcgacgccctgtccgtggtggtgaacggcgataaccaggcggcctcgacctttatcttcgggctagtggagcgcgcgctgatcccgctcggcctgcaccacatctggtatccctccttctggtattcgttcggggattacactacccaggcgggtcaggtgatccacggcgaccagaccatctggttcaagatgctggaagagggagtgaaatccttcagcagcgacacctaccataacgccgggaaattcatgcagggcgagttcccgctgatgctgttcgcactgcccgcggcgtgtctggcgatgtaccacgaagcgcacacgaagaataagaaaatcgcggccggtattctcttctccgccgccctcacctgcttcctgacgggcatcaccgagccggtagagttcacctttatcttcgtggcgccgatcctttacgtcttcaacgccatcatggcaggcctggcgtacatgaccatgtacctgctgcatgcgcatatcgccaagtcgttctcggcgggctttatcgactacctgtcgttcgggatcctgccgtcgtttaacggctatcagaccaacttcctgagcgccattatcatcggcattccgatggcattaatctactacttcaccttccgcttcgtgatccgccgtttcgacgtgaaaacgccgggccgcaccgaagtgaccgccagcgcgaatgacaagtccgattccgaacttgccaccgaaatcatcggcctgctgggcggtgcgcagaacattgattccgtcggctcctgcatcacgcgtctgcgtctggaagtggcgaagagcgaagcggtggaccgggacgggctgaacgggcttggcgcgcgcggcgtggtgttcgtgggcgataacgggatacaggtgattttcggggccagagcacagtttatcgcccagacgatgtccacgatgattggcaaataa

SEQ ID NO: 147908 - DNA, 906 bp, Enterobacter cloacae
atgtcaaacgaactatttaaagcatttagggcatcagaactacatgataagaatattaactttctaattggatcaggcgcttcagctacatttataccaacacttaaaattaatgatgatttcacttatgaagatatactcacagatagtgattatagtgaaataaagaatttcatttactatcagtactacaaaaacattttacgcaagagtttctgcctcatcaaaagagatgacgatgcagatttgcgtaaaacccgtagggaaacactcagcgcataccaagagttaattgataatattgtaaaccttataaatagaaaaggagccaatcaaattcggcgagccaatattttcacaaccaactatgatttgtttttcgaaaatgcatctgataagttacttcgtaactccactaattttatttttaatgatggtgccagaggattaaaaacacgctaccttcaaatcagtaactttcatacatcaacttggcatcagggtacaaatgatctttataaatttgagataccaacaataaaccttataaaaatgcatggatctgtttcttggaaaaaaataaatgaggaaaaaattgaagtaagttatccaaattcttacccaaaagatttggaagttgatttagatgttccagatatccagacagcaattaaattaattgaagattttacacttactcatacagctaaggaaagtttagctctgacaaatgatgatgaattggcgcttaaagaattcaggaaagaatatgataaactcgccatcgtaaatccaaccaaagcaaagtttgaagagactgttttccaacagcattattatcaatcacttagactcttaagttatgaacttgagtttcttttaaagatgaacacattcgagaaataa

SEQ ID NO: 147909 - DNA, 1974 bp, Enterobacter cloacae
gtgctaggcgattatgagccggagtttgtgctgcgtaagctgagtgcctcgaagctggcgacgttgcgtatggatacctttaaccagattccggcactggaagatgcatggcgcagtgagtatgagggctgcgaagggatgcagaacttcctgaatgcgcagcagaactaccctgtactacgcggtgtgcagactaatctgtataaatgcttcctgccgcaggcatggcgcttaggggcgcagaaaggtgtggctggattcctgcacccggaagggatttatgatgacccgaaaggtgggcaattacgtgcggcggtatatccgaggctgaggacacattttcaatttcataacgaattgagtctttttgctgaagtgcatcatgcaacgatgttcagcattaacgtatatggaccgcagaatacaacgccgtcctttattaatatgtcaaatgtttacgcagtaagcgctattgatgcctcttttgaacacaacaatgcaggccctgttcctggtatcaaagatgagcaggaaattgaaggcaaaatcaaagtttcctggaatacgtcgggccaccgttcaagactaattcatattggtttaaaggagctctcattatttgctcgtctgtatgacagtgaaggaactcctgcatggcaggctcgtctgccagctttgcacgcagaacaacttgtagcggtgttggagaaatttgctagccagccgaagcgattaggtgatttgcaaggtcaatatttttcaacggttatgttcgatgaaacttatgctcagagggatgggacaatactacgtaagactcaattccctcaagattcatcacaatgggtcttatctggcccgcacttctttgttgggacaccgttctacaagactccgcgcgaaaactgtacgttaaacagcgattatgactgcctcgacctgctaaccctgcccgacgattacttgccgcgtactaactatatgccagcatgtgatgtgcaggagtatgccaaacgtactccacgagtgacttggactgaacctggtgaagacgagccgaggaaggtgacggattattatcgttttgtgaatcggagaatgtttggagcatcatcagaacgttctatgatctctagcatagttccaaagcacgttgctcatatacaccctgtactctcaacgacattcagagagccaaaaagcctgctaagcttttcagcattttgtcattcaatagtggctgatttttatttgaaaacaacagggcgggcggatgtttatgaatctacattgcgttgcttcccttatgttgagctaatgagtgcaaactcaagagcattagctttgaacgtgttaacgaaagattatgctggtctctggcaatcctgctataacccagatttcaacacccagcgctggagccgcaatctcccgcaacttccacaagatttcttcgccaatctgacccctgagtggcagcgtgattacgccttacgctctgactacagtcgccgtcaggcgctggtggaaatcgacgtgctggtagcacaggcgctgggtttaaccctcgaagagctgctgactttatatcgcgtccagttcccggtaatgcgtcagtacgaagccgatacctggtacgatcaaaacggccgaattatctttaccccaagcaaagggctagtgggcgttggcctgccgcgtaccgcgcgtaaagcggacctgaaaaacggttttgtctttaacgtcgacagcccagactggaccggcggcgactgcaccgatcaagccatcggctgggatgatgtcaagcatctgcaaaccggcactgtcagcgtcacttttgatgattatacacgcagcgatgaaggcgagcgccgaaccgtcatctggcaggcaccttttatcaaacctgaccgtgaagacgactacaaagtggcctgggcattctttgcacaagataaggagagcgtctga

SEQ ID NO: 147910 - DNA, 1383 bp, Enterobacter cloacae
atgtacatcgagaaatttctgactgaatacgatgactcgctaacgggtgagttgaatgtggatccgcttgggcaattagtcatctggtcgtcctgggggcaggacatctttcatagccgtattacttctatcgcaaatgatgtacggcaatatacgctgaatctgctgcatcacagcgtattgcgccagatactggtcgatgaaaagctgcaaacttcaggcgtgatgaaaggtctgtatcccaaaaagcaattacatgagtttagagttgcctgtctgatccatttggaaaatatttatatctactccatgctggcggctgaaaaaagaggtgtcactctcactggtgtgcagggtattaataaagccagatctaaatggaacgctgcaaataaaaatcctcagatattttttggtcatgagaaaagtagtgagttactgactaatcagatcgctcttggtaccaatgggcgctataaatcgccaatgatgaaaatgcattttttctctactgattatcgctatgatctgccggaaagcaagccagtgtggcaggcagcagaggcatttattcggaatgtaccaaagctgaaaaaattacatgcagcggcattgacttacatgcaattgaaaatgcaggcctcacataagcgcgacctcaacccatttttcgaagatattcctttcggcctaaaaaaggcgtatgtaaaggcattccgcgacccgaaaatggtcggggattattcgcgaatattctggctacaaagaacggagttagataaatatgcagcgggtgctatttatcgggtactcaagcaggaacgtttggacgagttagagcttacagatgctgaagttttcaaacgtgccatgcatcaggcgaaaagtatgcctgaaatgaatgaaagtgacctcagggcgttacaacatatcagtcaggcggagccatttttatccctgatcgacctgatgttttcaggcttacgccgacagagtagtcagactttggcagaatttcgtcaattctggcagtcgcgcggtcttacggaacttgatctgccacaaaaggcggctcagcttctggaaaatgatgtgctcctttcctcgctttccggtacgcccgccagacgttttcagcaactattagcactggcctgtatgccgtcgctggaagatcaggttcgaggcttgctggattatcatcacaagataatggagtcaagggggcagttcccgtggctcctgcttgaaggtgatgatattttgctgcaggtaccaccatgttcgctacgcgaagatcgtcagaatagcgactgggtaaaccgttattatctaccacagttcagacatttgctgaacggtttatgggggcattctgcatga

SEQ ID NO: 147911 - DNA, 1902 bp, Enterobacter cloacae
atgaagctgttagatgtcttcaaaaagcaaattgctgatatgggtatgttgaaacgtgtctggctcaccacctttaatctggatatctcttttgttgaaacgtgggtacttcctgctgtgttgggtatggacccgcccgttagtcgtatggattacgaaggtctgcagcgtgcgctgaatgagagtggtattgatttccgcatctactgcgatccgcgcatgattgcgaaagaaaagccgaaacgtacctccattgcggtatatccggtgtcggtgcgtaagctggctcaaagcgaagagtcttatctggataaagagcgcgggctgtttcacccaaaagtattttatctcgaagatcactacagaaagattattgtgggtgcgggcagtgccaaccttacgcttagtgggtgggggcgaaatcaagaaactgtggattttcgttgtgttgcaagtaatgcccaataccagcaggtaaaacgattttttaccacaattgataacagtctgaatgatgaagaatttttcccaacccgtcgcaagtttctcggtgatgatcctgattggtcatttattcacagtctggctggttgcacactgctagatgcattaaaaaacggcggtgagattcatacactcagtgtttggtcgccttatcttgctgaggatttagcagggtttatcgacaatattgggcatgaagtgctcgtagaactggttccggatttggttgagggacgttatatccgcactcgatggagtgacagtattcaggcaatgattacaaataaaaagcttaccgtgtatcgctctccagtgcccaaggacgatagggcattgatgacccacgccaagctctggctggcgaaaagcaataccggtacgcaacttgccgtggggtcctggaatttcaccaacccgggttgcagcagcttacctgaggcaaactggaatgtagaagcgggaattgtgcatccggtctctcgtaacatcacgatttgcggcaaagaatgggatgatgttaatgaagagaatttcgccagtgaagcattgttggaggaagaggcgctggagcctgatgaacttcaacctttcgatctgagcgttatttttgactggactcgatgtgagtatcagatttccgggcaatggttcggtggtaagcctgcgtcaggttatcaactgatattgcccggtatcaacggggcaaatgaattggtatggaaagctaccggtataggtctgaaatcgccccggcaattgacggtattaaaaagcaatgccgtattggataaccctttttatacccttcgtagaactggaataaccgactggcagggcatgatcgttgaaagcggtattgaacaccggcgtgcgttgagctttaagtcgctagatgacttacttaacagctatctgaattcagtggatcccgcattgagtgatcgccttatgctgcgctgtgctggcgcgcaggatgaagagcaaagtgaggggatggcgcaagccatgaatttagatgccactagctatttccgcctctttcaggctatccaacaacggcgcaactggctagcagacgcggacgatggcactcagctgtatcgtcgtttgttcagtgaaccaggttgcttacaggaattggctgaaatagccagggagcgtataaatcaaccgactcagctagtatttaactggtttctggcccaagaagttaacactctggccgctctggcaagaaagcgtgttaaaagcatacgtcacaaacaaggggctgaagccatatctgtggctgtgcacttgtgggagtctctacaggttgcaattccccccctaactagcgatgccactagcctacgttatctcgctgctatcatggaagactgtagttatggcgaataa

SEQ ID NO: 147912 - DNA, 2655 bp, Enterobacter cloacae
atggcgaataagttaaaacagatcattaccccggttgaggtttcagccgtgatgaatttcgatgcaactgatacgcactggcagtatcaatccggtgcttccagcatggcggcgaagcaggcagagggggtggctgggttgtggaatttgctgaataaacaacgactggcactccttgctgatgaagtcggcatggggaaaacttatcaggcgatgggagtaatgttgttgttatggcaggcaaaacctgatgcacgcattctggttatggcacctaacaggacgctctgtgataactgggagagagaatttagcattttcacagagatacactatcgggctgaacataatgcctttaccactttagagggtaagacaaaatatgccccacaaatttatggcagactggcggagctggcggccgctgtggaaaaaaaatctcaccatttttaccttactactatccattcactaagcggtctggtccctccagatgaaaaaaaagatgctttaaatgctgccgcgtcttatggcgtgttatatcgtcagcagattaagcaagctcttggaaaaggagggtttgacttaattataatcgatgaggctcattactttcgtaaccgaagcggatcacagcgtgccgccgccgctcaggccttctttggtgatgcgcaggaccggctggggagcaatgtactgttgttgacggcaactccaaatcactcagcatcgcgaaatgtttatgacatatttagctacttcagtgacatgccaaaacgttatgcagaggatgatgtccgtgcgctgatgaatgattttgccatccgccgactgcgcaaaatgcagggcagagagagcagccacagcaaatatgaatatcgtcatgagcgcgctagcatttccagttttactaataagatggatgctgagttgttttttgctctatatcagaaacaactcgtggttcaactggacaaagagaaaaaggcaggtggcggcaggcgcatgctatatggctatcttgaagggtttgaatcaacgggcagtaccgcaagtgagcgggataatagtagtgatgaagaggggcaaatccataatgacttcaaccacgcgccggattctgctctgctcaatagcttgacccggcagtttcacgatatctataaccgctttccagatcatcccaaatacgacactctggtagaggcctgctttaccagtgatccgttcaagcagtctcagccgctacattgtagtaagcatttggtttttgttcgtcgaataccatctgtacgcgaaattactcagcgcatcaacgcacgttatgatgaaataatggctgagcgattgatgaatgtctggcagctacctgcaaaggcgctggcagaatggcgagagtcgggttggtcccgagatatttttgttaagcttttatcggaaaaatccaatgaaaagtccgattttgatgagtatatgctggaggacggggagacagatgagcctgaaacggataacgagctaaagctttcaagtaaaattgccgagctatttgttatgaagaaaacgggcctgcgcagtaccgactgcgccaacgttagtttgcgtttccgtcgccctgaaagcctcttttcattatttcttgagcctgcattggatggtacgaccgggacctatcattatcattaccgcaaagagtctggtgaacgtcaacgtgacagctatggtgatgccgcgagagatgcccggctgcagcagtcgacaacagctcagaaaatcaaatatatcactgctttgcccacagcctggggattgatgtttcatgagctgccgcggccagcaaaagagcaattgattaagtggcgtgaccagcctaacggtatggcaattattgagaactttgccaactatcttcgcacgggttacctgtttgccagtcctgtgatcattgagctctattgctggtttacagagttcaaccgtcgacctcaaacaggtgaggtccagcagcgatatcagcattttgtagaatgggtcaccccaaaattgaatggatcactgatgctacgttattttgtggctgccattgaaactttcgaaacgctatgtgtgaaaattgttggccagaaactagataatactcaatatacttggcgcgagttcactagcttgagtagtccaagttggtatgccagtgggcagtcaaaaaatcgcgaacgtttaattcgtggatttaattcacctttcttccctaatgtgctggtagcaacctctgtgttgcaggaaggcgtgaatcttcatcttcaatgcaatcaagttcatcattatggcatcgcctggactcctggcgataacgagcagaggaatggacgggttgatcgcctctttggtcgaatcaatacaatgcttcaagtccagggggcggctgagatgattatcaattatccctaccttgcaggtaccttcgaccaggatcagttggcatcatttatacgccataaacacagtgttgaagagaagttagatagttgcgagctggaggattttgacagcgaaattgatattcaggaggatcctcaaggttggcaaaaatggctacggcatccttgtaaggataaagataaagaagatccttacccagccaagtttgatcagtag

SEQ ID NO: 147913 - DNA, 228 bp, Enterobacter cloacae
atgagcatggtagtggtggtcttctgtccattcgataacccagaagaaaccgaccaccgcttcgagttgcatcatacggttcatcagctttcggatatctcattcgagttgccgatgatcccgcaggaaaaacttagcggtatgatcctggtaaaacagatctgttcggagtgccagcaggcaggaatagcgctctatcagtttgtcgatatggttgttcagaagtga

SEQ ID NO: 147914 - DNA, 207 bp, Enterobacter cloacae
atgacagaacaaatttctttgcttgataaccaactggtggatatgcggttcctcacgaagctaacgggacttacggataaatggttctataagctgattaaagatggtgacttccccaaaccagtcaaactggggcgcagttctcgctggttaaagagcgaagtagaaaactggcttcaggaacgcattaaccagtcccgtaaataa

SEQ ID NO: 147915 - DNA, 1017 bp, Enterobacter cloacae
atgaataggtgggaagatttcgcttttaatgaaattcacacgctgatccgagctctcaacataacacagaacagcccgcttaatgtgaatgctccggaactgagataccttgccgcgctttttgccgaaatgtcttatcacttggtaccagaatgggaagtggataagcataaacgcgcaaagctctacagagtcccgagtgaaggctatcagatattggtcgaccaaggtatccggggcagtgaaaatgttttcgaagctttcattgatgcggaactaccaaaacccttcattgcgtcatctgcagggattgtagtggttggagtggtaatcgacgggattatgttcattggattccgtggtacggctctgctgttcgactggaaggttaacttacgtgcagagcttgtgcgcgtggattccgctcaccgcgtaacaaaatatcattggtttgaccattgccacattgaagataaaaaaattatatctggtggattgcatagtggttttgcggaagaagccgttcggataacaaagcgcatttttgacgcaatacctgaagcagaccgttcatctatcgagcatgttgtactcgctggccattcactgggcggagccgtagcggcagtatcgaagtctctgataacacaatggccagctacggcgtgtatattcggtgcaccaaggtatgctgatgctggtttctatctgaattgtttcgacaattatccaatccagatacgccgacttggtgatttagtaccaaccgttcccccacgttcatatggtttctgcgaccaccctaatgagttcgccaccaacggtgaagagtacatagacacaagtttaaattcatggcttgtgagtgatctatgcaattggaccagatttttgagtacaaaaaccgctgctcatagcatggagaattatcgcacggagataggcaaggcgataggatctcagttcgcagataaacctctgacaaaggcagtaaaaattacgaaaaggcacatatga

SEQ ID NO: 147916 - DNA, 141 bp, Enterobacter cloacae
atgactggtagtaaagacaataagttcaattttttcattgcattaaccttacatttaattatggagaccatctctaatcagtttgtccggattgcccccgactttctgatggagaaaatgaattcagcgactgttgaataa

SEQ ID NO: 147917 - DNA, 858 bp, Enterobacter cloacae
atgaaacttctgccccagatccaggttgaaggcggtgccgaatggctggcgcgaaccgccacgcagtgtctgattgacgaagcacgtttaagcccgaaacccggtctggtggacagccgggggaacggcgcgcaccacgatttatcgcttgcgctgatggagcgctccgctcgcagcctgacccccacgtttcaggcgctggcacagcagagctggcagcgtccggcggatattgccctccggcaaaccgttggccgcctgggtcgcgaaggtgaacggcagatgatggccgctaccgacggcgtgaacacgcaccgtggcgcgatctgggcgctgggattgctggtgagcgcggtggcgatgctgggcggcgatgcccgggcgcaaaccgtcgcgaacaccgccgctcagctggcgaagctgccggatgacgtggcgccgaaagtgttcagcaaggggttacgcgtcacgcaccgctaccgtgtaccgggtgcgcgtgaagaggctcagcaggcgtttccgcacatcatgcagcgcgcgctgccgcagcttcgcctcagccgtctcaacggcagcagcgaaacgcaggccagactcgacgcgctgatggcgatcatgacctcgctcaccgacacctgcgtgctgtcgcgcgccggcatggaggggctggacgccatgcagaacggcgcccgtgcagtgctgaacgccggaggatgcgcaacgctcgccgggcagcaggcgctggcgcggttagaccgtcagatgctggcgcttaacgcctcgccgggcggagccgcagacctgcttgccgccacgctgtttcttgaccgcgtcgaaacgccctattcaaagcattaa

SEQ ID NO: 147918 - DNA, 1656 bp, Enterobacter cloacae
atgttatctgggcaaacacccacccggcaatggaacacccgacgcagtgagaaagcgcgtcgtctggcgtccgtaccggtgcagggcaaggtactgccaaccggcgatcttgtcgccatgctggaaaaactgatcgcaccaggcgacaaagtcgttctggaaggcaacaaccagaagcaggcggatttcctttcccgttcactggcggaagtgaacccgcaaatcgtgcacgatctgcatatgatcatgccgagcgtgggccgcagcgaacatctggacatctttgagaaaggcatcgcccgcaagctcgacttctccttctccggtacgcaaagcctgcgcatttcgcagctgctggaggatggtcagctcgaaatcggggcgattcacacctacatcgaactctactcacgtttatacgtcgacctttcgccaaacgtggcgctgattgccggttttaaagcggaccgcaaaggcaacctctataccggggcgagtaccgaagataccccggcgctggtggaagccgccgcgttccacgacggcatcgtcatcgcgcaggtgaacgagctggtggatgacgagtgcgaccttccgcgtgtggatattccgggctcgtggattgattttgtggtggttgccgataagccgttctttatcgaaccgcttttcacccgcgacccacgcctgatcaaacaggaacacatcctgatggcgatgatggcgattaaaggcatctacgccgaacaccaggtgcagtccctgaaccacgggattggctttaacaccgcagcgatcgagctgctgctgccaacctacggcgaacagctcggactcaaaggcaaaatctgtaaacactggactttgaacccgcatccaacgctgatcccggccatcgaaagcggctgggtggagagcgtccactgcttcggcggcgagctggggatggaagagtacatccgcgctcgtccggacgtgttctttaccggtgctgacggctccatgcgctctaaccgcgccttctgtcagctggctggtcagtacgcggtcgatatgtttatcggttccacgctacaggtcgacggttacgctaactcctcaaccgtgacccgcggccgtctttccggcttcggcggcgcgccaaacatgggccacgatccgcacggtcgtcgccacgccacaccggcctggctgaacatgatcaccgagcctgacccgatgcagcgcggtaaaaagctggttgtacagatggtggaaaccttccaggcgggcgtgaagccaaccttcgtggaaaaactcgacgctgttgacgtcgcgaaagcctccggtatgccgctggcgccggtcatgatttacggcgatgacgtcacccacgtgctgacggaagaggggattgcttacctctaccgggcgaaaaatctggaagagcgtcgcgccatggtcgccgccgtggcgggtatcaccgatatcggtctgggcgttgacgccaaacgcgtggcggaactgcgccagagcggcaaggttgtgtatccggaagatatgggcattcgtcgtaccgatgccactcgctctctgctggctgcgggcagcgtggctgacctcgttgagtggtccggtggtctgtataacccacctgcgaaattccggagctggtaa

SEQ ID NO: 147919 - DNA, 381 bp, Enterobacter cloacae
atggcaaccccgcttacgccagaagaaattaaaggcttcctcgctgagttggggtacgccatacctgatgccttgcttacgccgatcctctgcgtggtgaacaagattatcccgtgcctcgatggcgcgggttatgacgagtgcaccgcgaagctggtcctgatgtatgccgccgcgcttatggctacgtcttccggtgcgcgccgcatcaaatcgcagggtgcgccgtctggcgcgtcccgctcgtttgaatatggtgacgacagcattacctggctgcgcgactcgctttcccggctcgataccagcggttgcaccagtgagctgccaatcagtgccgataatagcgtcggtctgttcatggtggtcgggggctgctga

SEQ ID NO: 147920 - DNA, 198 bp, Enterobacter cloacae
atggtcaacctgatatcaagttttgtattctttataacgtttttatttaactacgcttcaagtgcctcagaacttactcgctctgatgagaaatatttctttgaaatgaatggtgaaacgttatctgatggttcacaagtttatatgcgatatgatgtggatatgttttacgaacaaaaaaagcacatatcaggataa

SEQ ID NO: 147921 - DNA, 360 bp, Enterobacter cloacae
atgaaaagaatatcgttttttttgctattcgtgtctataccttcaattgctgatgagttgatatattctaattattttagggattttacagaggcgtttacgcccccgattatttcagtgaatgattattcaaaattatcttcttataaacttcatcctgagctatttgttgatttcgggaaatcccctccagaatcatttgataacaacgatttgcataattcaaatgttatatttaatggtgcggcatctaaaaagttctttatcaattttgtcaactccacttttttgaatggtgacgttttgaatggaaataaaaaaactttactgacaaaaatgggagttattcttttcgggtga

SEQ ID NO: 147922 - DNA, 834 bp, Enterobacter cloacae
atggggtgtacgaaaaccccgggtgcggggaataaacttgtggacaaagaatggtttatccatctggaagtgctgagtaccgatacccgtatgcccgggtttttagccaacctggaaggtgtgaggggcgaaaaaaggtcagttctggtcccaaagggaaaaaacctgtttatccggcaggatgctgcgggacaaccggtatttacgccgacctccgccaggctgggcgcgcagtgcctgctcacgcgggacgcggcaacaccggttgcggatggctcccggaactggtggtacaaagtcaccgggagtggctggttaccgcaaagcgatgttgaagatgtgaatcagtatgatctactgaagctcgggtttcaggcgctggaggaagagagcggcggtgatgtgatggacagtccgtatgagggctgggtgtcccaggcgtttgatgcggtaagccggtcagcggagcagggggctgattatcagtacagccaggtgccgccgttttatcgcgaactgatggcagagatggagagcaaccgtgacggtaaagtgacggcagaggaaatcaggcaggcgctggcggtgcgtgatccgctggtgaaaaatgtggtgaaccgtctggtggtaaaacatcacagcgaatggagtaaaggccgttcgacggggcgctcggaagggttttatcaggatctggacccactggaagtaaagtactgcgagaaatggcagtcagatctggagtggatgagcagggtgccgccgtttgataaggatgagtcggtgtggcattttcatccggtggtgtttttatattcactaaacactgaatag

SEQ ID NO: 147923 - DNA, 213 bp, Enterobacter cloacae
atggttttcctgatcaaggaacattgtgcagatattgatttggcaggcaggaggacaaatgcaattaacgggtcactgatggataaaggactcggtctggtagaaaagctgatcggccagtcatattatcgcgttgacgtgtatgaatgtaccgaatttctgaatgtgttgtgtcacagagcggtggaatccctctcagccatggcgatataa

SEQ ID NO: 147924 - DNA, 837 bp, Enterobacter cloacae
atgagtaaaatttatttttcaattattttgatgtttttttgtttttttccaaagatagccatttctgataatggggtagatcataaactgtgggtgtatgaaaaagtttctggtgttgatgtttttggtaagcatgatttaaatacgattaacaatttgaatgaaatatacagtaaagtaaaatttacatttagtggtaaaacgctaacaataaaaaatgattttcttgaagataacaatgtgtgttcgattgattatgttaaaattaaaaaaacacccatatcatattatttgtctgaaaaaacaatggcactatatgaacggctttttaagtatgaaggtgtgtctctacctaaatatatttatcttctgacagctcttttaccaggggatgaatgcccacctccttatagtgagattctcgaagttaatgattatcttgttcttttggatcaaaactatgctttattctttaaagaggcggaaacaaagaataataatcaaaaaaaagatagctgggcaacttattgtaaggagaggcgtcccagccgagaatatgatggtgtaagtaaatatacgtgtttttttcctgatttgaaattaagggatgcttatgaggaattcagaaggattcaatatgataatacgctattcaaaaagcaactacccagtacaaataaagtcgataaattcaatgatgcaaaggttagttatgcatggcaggagagtaattcgttaaaaatatcagtggtcagagataatgagagtgtgactttttcttttaatgaaaattcaatgggaaccagccttgaagtcacagaagaaactcaatattaa

SEQ ID NO: 147925 - DNA, 1134 bp, Enterobacter cloacae
gtgtggcattttcatccggtggtgttcttggatgcgatcggtcaaaagagaaacaaagaaattattttcccctttaaagtaaaacctaaaaatgatatcgaaggggtgtggaaacgatattattgggctgcatctttgactgatagtaatgcatcgcaggctatatttgggcgtaatagatctcgagggaatagaaagcatgctgctcgcgatttatattctgaaccactaactgaaattgttgcagtgagcaatggaattgttaggagtatttctcactattactttgggacttggcaaatcactatcgagcatactactaatgatgggcggcatttttatattagatatggtgaagttgatcctcaaagcattgttttcgggaacggagagaaggtccagcaggggactgttattgcaaaaacagggttgatgattgatccatcaacacggcgacatcctaatatcattcctggtcaggttgtctatatgcttcattttgagtattaccccggtaatgaaactctgccgcctccaaataatacacccactccaccatttcaacgacgtaatgatttacaagatcctattgatatattgagagaaggttataacaacacattttgcaacgaaaataatgatactgaaagtaggagtgctatcagtgaactgaccgtttctgatatgggtaaggcctttatcaaggaatgggaaagttttaggtcgacagcttacaatgattcagaaggtttttgttctattggttatggacatttaattgcaagagctaggtgtgaagatatatctcttccagaagaattcagaaatggaataactaattctaaggctgatgaattatttgaatctagactctcgaattatattaaagaattaaaggcatctgtcagtacagatttatatcaatatgaattcgatgctttgattagtttgctgtttaatatgggacgaatgagtaaagcaccacaattgactttaaaactcaaccaggcaaattatgaaggtgcggcgaatgagtttttggatattacaaatggtggggtatccgggcttgttactcgacgtcaaaaggaacgtgatttatttttaactggagcgtatgatttctctcgttaa

SEQ ID NO: 147926 - DNA, 249 bp, Enterobacter cloacae
atgccgaagttcgacagcaatccaagcgagggccataaccatgggtacgatcgaagccgaaaggtcactgtcctcctcggcttcgatgaacatcgaagccattgcaaaaatgcatgtagcccgcgcagcccagagcaatccggcactacgataagcaaacgtgagcagttgcagtgcttcgatcagagaatcggcatattcttttttagtgagttgacgcgcggctttgacctgctccccgttgattag

SEQ ID NO: 147927 - DNA, 1518 bp, Enterobacter cloacae
atgcttccgctcgacgactcatcaaaagatcgtatcgcgaagcgacttacggagttagatcttattctggcgagccaaatcctaaatttcacagcggaagaacttcaacacgttgtgcgattacctgacgttcttggtggactcggtctgcaacagagtcgaaactcgctgatttacgcgctcggccatgaagccgaacttcgtcgggagggatcaataccgcaagaagagacgccagagaaggtggccgagttatttactttgcttgctagccaaccggtatctagcaaccagcatggtcctgtcatctttaacgaggcagactcgcagtgccttgtctcaagagttcagggcattcgtgtggcagtctttcacccgtgctccgatgccttagttcttgccgcagaagcagtaataggatccgttgaagcattttttgcaaccgcaatcgaaagcggcgccgtagcgcatacagagaacttcactatatcacttcaagatagttctgaagtgctggcacctgactacacgatcaatactgatgaaatgacggcgatagttcgctggccgactgggttcaaaccagctacatttgcccggcaggccgacatccagaaaatgctgattggattggctgctgagatttttgctgccacttgctacgtggaggatatgcgaaaaacgatcgaacatctcttcagcagtgaggcggtgcttgatcgcattagcatggtcgtaattgtcggcaatagtcggcaacgcgtattcaaagaagggctatcgaagctcagtgattggacgcagatggcgatatcggagttcactcttgagtcgtctcgtcccgtaatcatccgccgcttattaaacacggttgaggatcaggaaagatgctcgacggtaggaaaacgaagttccccgcccctaacaagtgatcatcgcgatctgggtgttcgctcagttatagatgttcatctttgggatcaagctggttggaatggaactgcttttactcattgggggccctcgtatcctccagcgattgcgctcatgtttaagcacgaggatgccgcgaggaagattttttcacgttggcgtcaacgtctaggaacggtcgataagcaggacgaaatttacctggcgattctgcgtggaatatccgttgacgaaccggcgcattatcgtgttcttatcacttctaggctttctaatgatgagggcgaaacgtcaggcaagaccttcatgatggcatcacgtatgcaaaccatgcatgcagaaaccgatgtcaacctgatccgctttcttaatatttacaggcagtcacgcgcgtatttgcttcttcctgcgatatttaatggacgggctgagccgaagtttattccagagctagcaatcctaaagcgggagcttagtgtaaagaacgctatcgaggtgaacgagcatgacgttgaggtgatggctcttggggcagaagagtatcgccgtcggttcggaacgtctgggcctggcaacagaagttag

SEQ ID NO: 147928 - DNA, 168 bp, Enterobacter cloacae
gtgaagctcttcttccgcgaaatcgcgttgcgcgatttcgcggaaggagatatcgaagtgctctttccaaacgaggtgccaagaaacttccggctaactccagggattacagtcgtccgccttatgccacccatggggcgcattctcgacaagcataacggcggttag

SEQ ID NO: 147929 - DNA, 3501 bp, Enterobacter cloacae
ttggagacgactgaagaattaagcaccttcctgacggccgctacagttgacggtattctcgggcgcctcctctatcgcggtgcagcttggtcgttgatgcgcaagaatggcgtattgccgcaaaacgctccgccgcttggcgcaaccatcgaaacagatcttgccgagcacggttttgccctgcttcgaggcgcaatggcactgcgggctcaggctggtgcttcggaactcactggcaaggcctttgagcgcgcagccaacgccttcgaagccctcgtgcgtaatggtgatccagagtcgcctgatcgcggattccgccgcaccattgctgctgcagcctaccatctagccggcttctcggccgtcgccttttcaatcttcaacgagatagaggaagaccttaacgtctcacccggggaaatagcgatccgacacctgatactgcgcgatctcgatcaacttcgcggcttcgttcgcgactggttgaattatggggctcacggcgatgagcagatcgcggcggccctgcagggcggagatgctgacgtcgacgaagtactgtcgacaattctcaatacgacgatctgccgtgccctggcatttttcgacttcgcgcttgagacgggcgaggttgagtcgttcgaagccgcgcgagggctccttaccaccgctgtcgggcttgccgacaacgctgagaacgtcccgctgtggtggatctcgaacctctgccgtcacctgatcgacgacttgtggcaacactcactacaccagaatttgccgactgagccacccgagggtgcggaggaaagatatcccgacctgcggcggttgtttatatcttccctttacgcccgcaagacctcagaagtggagctatggccatcgcagcgcgaagccgcccagcgctccacagacgtcacggacgatctggtcgtcgccctgccgaccagcgcgggcaaaacacgggtggcagagattgccgcgttaatgaccctatcctccgcacgccgggtgctaatcgtcacaccgctgcgcgctctttcggcccagaccgaacgaactttcaggaagaccttcgcgcccctagggtttggtgtctcttctctctacggcgccagcggcctttcggccggtgatgaagacgccctccgcacacgggagatcatcattgcgacgcccgaaaaactcgacttcgcgctgagaagcgaccagacgttgattgacgatgtcggcctgatcgtcctcgacgaaggccacatgatcggtcctagtgagcgcgaaatccgctatgagacgctcgtgcagcgtctacttcggcgcacggatgcggcagagcgccgaatagtttgcctttccgcgatcctgccaagcggcgacgaactcgacgaccttaccgcatggattcgttccgacgaacccggggagcctgtgcgttccgactggcgcccaacgcgccagagattcggcgcgcttacctggcgaggtaaggacgcgttgctacggctcgatctagacgacgatggccccttccttgacaaattcgtcgcggaaaaaccagcgctcgggaaggagaagaagccctatccacgcaagaactcgcacctcgctctgttcgcggcatgggagttcgcgagccagggcaagcgcaccttgatcttctctacccaagcaaactgggtcgagagctacggcaaacaagtcgtggacctctgcaagcgcggctatctggactcgttgctggaagacgagactccaatcgcccgcgccctagaagtcggcaaggaatggttgggcgaggatcacccagccgtggccagcctgaaggtgggcgttgccattcatcacggccgactgccgagcccgttcctacgcgaactggaactgcttctatccgaaggagcgctaaaggtcattgtcgcttcgccgacgctctcgcagggcctcaatctcaacgctgccgtgctgcttgtgcccgcgctatatcgcgcctcagagaagatcaaaggagaggagttcgcgaacgtggccggccgcgccggacgtgcattcgtcgatgtcgaggggctgatcgtccatgtcatgttcgacaaaatcaaatggcgaaagaaagaatggagggaactggtcgcctctgccaaggccaggacgcttaaaagcggccttattcagatcgttgccgaaatccttgagcgtctatcacgcgagggcgtcttggatatagatgacgcctgggaatatctcgccaacgcccgcgaggcttggaggtcacctgaagaagaagcagtggtagcagaacgactggcagccgcagtggaatacgacgcttccaccgacgatgaagacgagacggatgacgaggaggaaaccatcgacgaggagcccctgtctcagctcgtcgaacgcctcgacgccaccgtattcggtctgatcgaagccctagacgctgatcgcgccgatctacctaaacttctagacgaggcgctcagggggtcactctgggctcgccaaattgctcgggaggacgaggatgtcgcttccctgcaccggaaggtattcgaagcacgcgctgctctcatctggaaagctaccaccccccctacgcgacgcgggcatttcgcgatgggagtagggctcgaagctggcctcctcatcgacgctatggcggacgagttggccgaactcatcgacaaggcagacagtgcagcgttgagcggcgacatcaacgaactcgccgatgctctcggcggactcggcgaacgcctgctgttcatgcggcctttcatccctgacaaggcgaacgcgctgccgccgaactggaaagctatcctacgtagttgggtgtccggggaagaagtctccaagatcggcccgcagaacatgcgggcggtcgaagatgccttcacctatcggctagtctgggcgctagaagccgtccgcacccggcgcatgtccttcggctggtcgccggatacggtggcgggcgccgctgcggctgcggtcgaaaccggtgtcccacagttcatgatggcgatgctgatccgcgcaggcctgccgtcacggcgcgcggcaatggcggccatcgaagatgctgaaccaatcttcgtcacgcccgcagaaatgcgggcctggcttgaatccgacgagattacggccaaaaccgacgcaggcgactggccaacacccgacacctccgcgttatgggcccgcttccgaaccgaagctctcagcggaggcatccagaaatggtccgtcgaacgctataagcgcctactcgataccgagtcctccccgcccgctggcctctatcgaatcctcaccgacgaaggggacgcgcggacttggctgacaacccccgactaccagcggatcgccgtcttcaagaagccagcggttgatcccaagcccagtctattctcgggacagttgccgggcaaaacccggctcgtggatgctctacgcgtcggccgcggaaagttgcgttggccgactgccgacgtctaa

SEQ ID NO: 147930 - DNA, 777 bp, Enterobacter cloacae
gtggggctatatgagaagtggtgtgaatccattaaagaaaatgatgaacgcaagtattactggacgtatgtcgagaaggacggcggccgcgatgatatccgcgaggaccttgctgagaccattcgctcgcactacgaacgacttgaacgcatcgccgatgacgtagggcgactaggatacaaggttgctgccaagatcctccgcgaggcaatgcctaataccccgaagggccgctctggcgacctcggcgaaatccttgcgactgaactagttgaggaagaaatcggtctgcgggtacccgtgcgccggctccgttacaaggacggccgtaacatggccatgcgcggcgatgacatcatcggcgcgggctaccaaggcaataagctctggctgctaaaaggtgaagctaaaagtaaccagaagcttggcaaaaccacggtcaccgccgcccgcaaggtcctcgaccgcgacaatggccgctgcacgcctgactcgctgctgttcgtcgccaatcgcctgctggagagcaacgacgctggcgataacgcactgggtcgcgaccttcgtgacgaagtgggtcttaagtctatgccagccgatcgcatcgaccacatgctcttcaccgtgtcgggtaacggccctcacgcttccctgaaagagaaccttgaagccgctggagtcaacagggaccattacgtcgtgaacattcacgtcgaagaccatcaggatttcattgcggcaatgtacctagaggcggaagatcttggagacgactga

SEQ ID NO: 147931 - DNA, 510 bp, Enterobacter cloacae
atgtcagagatgaatccacacgatgccgcgcagactttgccccaggatcgggaaacgctgtaccacttggtctggtgcgagcccgcggaatgtatagctgtgttgtatgacatcagtactgagttactggcaaaacgatgcagcgaaatgcggatacccaggccgcttgccggttactgtaaggcacttgcgaaaggtactgcgcctgcaattcccgctctgcccgatctgaaaaagggtaagacggtaaaggtatgtgagaatgataatccatcaatgcactctcctgccgttaaggcatcaaaatcagcaacttcattagccctaaagcaagcccctgttacaggcagaaactgctgttcagcagcgtcttactgccgcccagacccgagcggttaccgctaccgggcaggtactggtgattggaaacagctacgacactcgcgggcgccagcagatggccagccagaccccgggtgcgacgaccgtcgaagctgtcgatttggttga

SEQ ID NO: 147932 - DNA, 600 bp, Enterobacter cloacae
atggccagccagaccccgggtgcgacgaccgtcgaagctgtcgatttggttgaccttaccgactttggtgcagggtttaacctggaggctgcggatgcgttgacgcgcctggtaaagtttgccgcaggcgtcatgacccaggttggccccgcagcattgctgccccggctggaaacgctacgaagaggaagagcccgcaatccgccgacggtcgcagaagcagcgttagtggcatttgcagagagaccaggttttacgctggccgcagaggcgctgcgtcttctgactcgtcaggacaatgcgcgagtctatcggccagaggttttgcgctgttgtttgcgcgcccttcagtcggctgctgccggaggctgcacttttgcagacgccacgataaacgagcgcgaacgcaatcgccacgagagtcgaccgttgccccggcgtgtaatcggcagcacattgttgctaaagggacttgaaggggaggtggcagtcatcacatccccggaagagatggatgcacaacacctctatgtcgctatgacgcggggagcttcgcggctggttgtgtgctcgctaactcccatattggcggcccgctaa

SEQ ID NO: 147933 - DNA, 942 bp, Enterobacter cloacae
atgggacgtgttgatatcacccagaataaacactatcagcatcaggccgaatcacagtcctatcagaccgcttctctagcaatcaatatgctggaaaaggcttatgatgagaacaatcaagctctcacgaagagtttccagctatcactctttactacgcagcagaagccctgcattccggtcaacctaccctcccccagaactgaggttagccgcagaatggcagctctatcacggtcttccaagacggtaaaaaacacaggtgttggaaacgttaaattaacaacctcactaatgataaatcctgagctcaataccgagcataatctgaagcagaacatgcagacttttggtgaaacaactgctgaggttgtggactatataactggcacaatgtccgataagtttctgcctgaactaaaacgtgcacatgacaagttagtacaacaaaatttggctgataaggcgaaatcactgcttcaacgccatgcaaaactgcatcctcttggatttggagcctgtacgagagatgtagctcgctggggttgtcctcatgcgcttaagtgtcagtctggtctaccttgtggctacttcactcttacaggtcgtcttggcgaagcggaagaagcatcacgacgtttatcaaacaagcgaaaagaaatcattcaactccgtaagttgactatagtgaatccaggcttcatgctggctttaaaagaacaggaagaagctctcatcgtgctcgaggctcttgaagctgatgctataaaggttcaaggcgagaaaaaactggtttccctgttttctgatgatctgaacaacccattatataaagttattgagcgaattaataaacaaatgctaattggcaaaaccccaacaaccctagctgatcttttctttattgaacagaaacgtatagagagaaataataatggctaa

SEQ ID NO: 147934 - DNA, 606 bp, Enterobacter cloacae
atgacgattgataactttattttggatgaggctatatcaatactttcttggaaagttgatgatgatttgaaagttaagctactcgagtttgttaaaactccgttggctatttatagtaagaattactctcaggtcgttaatgactatattttagaaaataattttaaaccagatgaacttctaatcttgacgtcatcttataaaacttggggaacctctactcagtcgctcatcttgagtcgagcaatacaggatatatcagcattgatagcaagtcctaatgatgtttctgaaccgttactaaaaaacctgtttgtcgcagagggactgaatatgcagaataaaatagcactgctaatcgctttgttgccgggtaaggatttgagtaagacgacttgcaaagagtatcttgatctgcttggtttatcggagttcagtaaaattttggggcgaggcaaacctaaaattgaagttgattcaactaatcaaagtttattaacagcattaagagataaccacttcttctctgattttgaggtggataatgaaaatcccacttattataaaataacaaggcggcgctctatgtttggctcagatacatag

SEQ ID NO: 147935 - DNA, 2388 bp, Enterobacter cloacae
atggacgcctgtattcatatttacagcgatgaagacgatgttcgggagagagcgcgggctcacgacaacgctcgggatatttatgctcatgactgcggacagttgccttttggcacgcttgatcccagagcattcgaattaatcgtccgggatttatttgatgagaaaaaggttgaggcgacctgggactggtatgacactgcctttcggataaacgatggttccgataacggtatagacgttcaactgatgaaagaccgagtgattgcgggcatcgtacaatgtaaacggtacagttcgaaagcgtttaccatgccagaagttcgcgatgagtggataaaaatctgcctgcgcagtctggtgataagtgatttgcttcctcctgacggtctcccattccgctatattctcgtagtttctgataacgttaacggcgaaacacagcagtatttccagcgaaactctactgcgctggccgatcttatcggacgaaaaacggattacctcaaagcactggttgccgtccgggacaaatatgcgttgctcagaaaatccccgctgcttaaggaaaaaaccggacaggcattatatgacatggtgtatccgcagtttgagcgactgaatattgagctttacacccgtgaatcgctctcgccacttgtgcgtgcgtccgacaacctcatgagcatctattttcgccgtgaagtgtatttttctcaacagagcgttctggattttttccgggaggtttatccagagggcgctattgcggcggatgtacgcgccatgcatgcagaaaacgtttatacccattacggaaatgaaaacctgttatccgcaggccggctgaacgcatttatttttcctgcgggtgaaagactttctgtgcgtatgctgggcgaattcctaaaagataaaatgcccgaggtggccggaaactatccggtcatgctggtctgccccgcgaatgcttttgaccctgctgaccagtgctccattgatgcgcttatcagtgaatgtcagggcaccgttattttacaggcaggctgcggcatcgtgcccggtaccatgctaaacacctggaaaaacgacggctggctttctgctgacagcgagggcctttacccgggaagggctcagtatcaggcgggctggtgctgggtaaagtccggtgtaggcgatattcaccgctttattttactggaaacctgcgactgcgatgccgcgctgagttatgcagggcgcgcgcttcgcctggcgtttaatgatgtgaatctctggcccgttctgaacaccgattattacactccggccggttcttccggcacggtactggatgaccgtctctctctgagcattgctgatgacggtcaccggcgacccaacgtccttctggtctcatcatcctgtgcgctgacacaggagcattttaacgcacaaatccgccgttttgagagcctacggcagaagcgttttctaggggtcattttctgccatcagtcacaagtggagattacggacggcatacgttatgcctcaggaatttacccagccagtgcaggtgatgatcttttgcacgccgataacgggccgattccggccctgttaatccgggataagagcgtgacctctgcgatgttttgtcttcggtttaattcggcgggtgatgaatttaccgcgacatcctcttacatgtggcaatggcacaatgggtgtttttacgaggtagccgatggtatacaacttgagcttcagcgggtgctgctggatcccttcactgatcccccgcaattccttgtacaggagggggtgaatgcatttcggcatgcgctggtgacatgtgcccctccctatgccggctattttgttcattatgcactgagcgggcccaggtcctatgtctatccgcaggtgaacacattccttcaacagcgccggggcattcgtaaagtgatcagagcgctaagctacctttcaatgcaccccagcctcagctggaacggtaatcatgccgtgacggggcatcttttatggaacggtgtggggacacctgagtccgtgatgggatggttacctgatgaaatgagtgacacgcaggttgacgccatactgacccaatggatacaggatgggggggagcattgcgacctgagcgtgtttgctgatgtggaagaggacctaccttcacacggtcgttcaatccgacaggatctaactcgcgccaatattgctgaacctgcggcggaggctgactccttcgctgcgccacgttcaacgcgcagagcctggcttttcccccttaatcctctgctcagccggacgcgaaatgacgatctggctgagcttgagtgctatctgagcaatttatggacggtaaaaaatggatag

SEQ ID NO: 147936 - DNA, 546 bp, Enterobacter cloacae
atggatagtttgattgctgaatttgaaacaaaagcagcctttgccggattcttcaggaaaacatttccggcagaataccttgagggtttgtctgaaggcagtctttactgggaatccgaatatgcatgcatgctgctgtggcctttaaacgcgaaacctgaccagatggaaagagaattgatcgtcagcgaaaggattgcggacgctatggcccggactcgtgaaggcacgggtagggtcattgatgcaagcgtaatatatgcgatgccgtcagttcactgtgtccctgacggcatgattacagatattgagcagaatacccgtctggtcagaaagcatttcgtgtggatggaaaatggggagtggaaacgcatcggtcgcgtcacaatgctggggcttgccccgctggagcagcggggaatctctgccgtagaccttagggtcacaggcagcacgcaagcgcttctggctgaatttgagtcgggaaattccccgcgtgctatcgccctgaaccatggaagtaagtgggagagcagcgatgtataa

SEQ ID NO: 147937 - DNA, 2742 bp, Enterobacter cloacae
atgtataatcttcagatattaaacgtgacgatcagccgttttaggggaatacccggaaaggtgaccattccgcttaactcgggactgaccgttatttatgccgcaaatggtacgggaaaaagcacgctttgtcaggcggtggagtggttactgacgggcatattacctgacgtttcagaaagttcgctgacctgtaagtggggggatggagaaacctttgttgccgcagactgcattatcaacggtcagcagtatcggctaacgcgcacgctgaagggactggagaagtccgacggacaggtcatcactcaatgcaacaccttgtctcttcttagcctactctctccgaaggaaattggtgcgggcaagaaccgtccccaggcggttctgacaaagcaggcctggcttcgcaatagccggtggctttattctaatgccttatccctgctggtcgatgaatcgcaagccgaacagcgttcacaggtctttgccaacattctggggtacggacatctcatacctctacagcagtccatcaacagttatctccagtatctgcccggtgtcagccagttgacacagcggctagaccgtctccgggaagagctccgcgccgtcaatgaggctgaaaaagtaaatgaacctgcgtcagatgcggctgagctgatttcgcagcttgccgtcagtctgaattccgggttggacaagtcaaatcatgaaaccttccttcaacgtgcgcaaacggatatagcggaatacagacgtgagacggaaaattatggagccatctgtcttgatgtttcagcccggtgggaagcctttgagcatgcatccggagaggagcagcagttacgcacccgaatccttgtgcatcgcaccgcatggcaggatgccaaccagaagcatcaacatgccggggagcaaaaactacgtgacgacggtcaggttcgggaactagacacgcggctgaaatggatggctgcgcaaggatccctggcgcaggattatgctcaaataatgcagcaggcgggtgtcagcgcaaatcaccgtttcacggatacgcagctgcttgaaaactactttgaaaagggtatcccgtcaggcgcgttgcagggctatcacgaagaactgagtcgctacctggatgtggcacgcagtgtgtatatttcaggacaggctcgtgaggaatggcagtctcgtatcaggcgcgtgtcgcgggatgaggttgtcgcgttacgtgttaaagaacaacaggcagcggatgaacttaagcggatgacatactcggtcagggctctggatgatcagaccgctgaactgcacgcactgggattgcagcttgtcagtcaggtacaggggagctgttgtccgctctgcacgcatgactgggttaaaaatgaacgtttattaactgcgttacgtacggcccgcgacaggctttctcctgaagcacaggcgctgaatgtgcagcttgagcaaatgcgcagtgattatgcgggcatggaagagatgctcagggaaaaggaaggcttattgcgtgatgcagacgccttttcagcatcccttgccgcagcggagagcaagctcagtgaggcatttagggcgcattgcaatagtgtcttttttgaggagagcggaataacttcatcttcacccgaacagttatctcagtttatcgctcacttggacctgtctgcacgttatgcagcgttcagggagaggctacttgccgcggaagcatttctaaagacggatacagacgcagtggtcgaattatctgtctacgaccggtgccagtctgtgcagtcttcgctggcgaagatgaaggatgatactgacattgccctcaagacggcgcggctggcgcagcaggtatccgaaatggggctgaagcagaccggggaagacgtctctaatagcctgcaacaaataacggctgcagaagcgcagcttgttgctgtccttgctgaccttcagttcatccagactcagtggagaaaagtcagtgctgcagacctgacaaaagcgaatctgctccagtgtgaagaggcacatgcaagcatgcagaaccgcctgaatcatctggagacgctatatgcactggctcagacggccgtggatctgcacaggactatttcacgcgcgggaacgcttcgcaccagcattgagacgcttgagcgcaggatagatgaacacacacgcagaaagcgggaaggtgagcaggcccgtgatgagctagcatccgaaatcgaacgtctgaccagcctcagtcttaagaatctcatcgaacctgcttcggagatgttttcacgaatgcatgccaatgaagtttacgacggactgaaagtggcaaaggacggcaagctgagatggagggcactgacaggtgaaaaagcggatgatgaacttattacgcaggattatttcagccaggggcagcggcaggatcttgcactgtccctatatcttgccagagcaaggaccctgggcggcaccttctttcttgatgagcctgtcgctcacctggatgatatgaaccgggtggctatgacggatattttcaggatgctgacgatgcaggagaaggggcttgggttagtgctgacgacggcaagcgacccgctgaggcgccacctgagacaaaaattctcggccctctcaggcgatcgtgcattgctgagcattatcaccatgaacggtaaccctcgccagggcgtctcctttgacattgagcagtattaa

SEQ ID NO: 147938 - DNA, 165 bp, Enterobacter cloacae
atgagggttcggtctttgtatctgctatgcattaacctcctccttcttgactttattaataagattgatgagctgagaaccgaagttgcctataagctcttcaatgatatcaatggcgttctgatcgacagaataaacagcaaatcggttgttgagttaatgtaa

SEQ ID NO: 147939 - DNA, 918 bp, Enterobacter cloacae
atggggactccagaaaactaccaccttaagggctatgtagaccactcactaccaggtcaaatcgagacgttacataaggcgacgttttctagcaaagaggaagtacttacatccagcacgctctcacctgaagatgttttcattttagtcgaaagactccactgggcttcaattagtggcaatataactcatcatcttgaagaaggtgcatctaaagtaatactaaaatatccattttcgcaattctgggaaataatcactgactcattcgctatcgcccagtactctaatgagtacggaattgcgttccaacatgatttaaaatcaaagctaaagctggagagccttaactttccccacttcattcgaattatactttcagcacattcgatcggcgaggaatttgatagcataagtattccccctcacaatgctgatattgggcatttcgagtgtcgagcggatataatttctcatgcagcttatatagagggtatgctttacaagataataactgacagcaaaaaaaccacatataatcttgctgataaaatgacatataatagaaaaatagatttttgcgaaaaggagaaactactaagcaatgagcttctttcaattgtcaaattgctgaaagatttgagaaatcaagctgcgcatcagttttcgtttgagaaatgcggcccaacaggaaactatcttaaaattaaccccgtcagcgataagttattagaggagataaagagttttgtatgcgcctgcgaaaagcggtactctttgaaggaagggaggataaatcgctttgacaatgtttttcgaatgcttgcaggagagttaaatgccaaagccaatttggcccaaatgataaccttaggaaaacaatacccagccgagctatcgagttacttctacggataa

SEQ ID NO: 147940 - DNA, 1488 bp, Enterobacter cloacae
atggctgaaagagaacaagtaaaaggggtatcgccatcaaaattcatgcgtgaactgcgtcctgaattttactcggataccagcgatcgcacagcatatcaactcgatgcctcggcacttgagtaccacctcgatagtattacatcgcgtaaccagacccatgatttcgagatattttgtcgcaagttgtgcgaacgcacgatctgcccaaacttgaagcctgctaccggtccggagggaggaggggacagcaaagctgattcagaaactattccgattgccgacgagattgctactctcacgtatatgggggacgcaaatgctgcacaggagcgttgggcattcgctttcagtgctaagagaaagtgggcggagaaagttcgcaatgacgttgcaggcattgtggctacgcagcgtggctatcagaaagtttattgtgtaacagcgcagttcgctcgggcgaaggatcgcgcccgcgtcgaggatgaactttcgaaacagtacggtgtgaccatcactattcttgaccggagttggattgttgatcaggtcgtcagtaatgatcgtaaggacctagcctttaattaccttggtgtagggcaggaggttgcaggctcaaggcgtatggggcccacagattactcccgctcacagcaacttgaagacatcgagaaaacgctcggcaatccggaggcattttctgggatgaaaatgcaacgagttacggaatctctggtggcagctaagttgtcgcgtaatctagagctcccacgaatcgagacagatggtcggtttgctcgtgcaattcgactcgctgaacaagatggaacttatcgccagaagttggaagcgcactacgagtccatctggaccgccttttggtggttcgatgacatcgcgtatttgaacggaaggtatgacgagtttgcgaatctggtgagcgacacggatcacgccataaaccttgagtttctttgtaatctagtacaattgctattcaactcggtcattcatcagcatttgacggtcgaagaggctaggcttgaagagcgagcatctagattgaccgagaggttaaaggtaattgctgagaataaagaacgtccaaataatgccttggaggccctgtcgtcgttactcgtcgtagaagtcaatcaggcgatacttaaacaagatactgaaaaactgagttcgctatggccgcagttctcggatgtcgtcaagcgtgcgagaggtctcggtgagttttctgctgagcgtttgactaaaatgattgaggtgttcgggctcgtcgccggtaaggacagtagttatgtccaactggttgacgaggtagcagcgtttgtttctgagcgtaccggtgaggctcagggggcgttagtgcttctcaagcgagcgcaacaactcgatttcgaagataacttcgaaatcattcgtttgttgggcaaagctgacctgcccccacgattagatacaacactcagttag

SEQ ID NO: 147941 - DNA, 168 bp, Enterobacter cloacae
atgagggtaacggaagctgacctgcgtccgcggcctgttacggtcccgcagctggctgatgacctccgtcaggtgatgttcaccgtcataacggtagtgccagcgaatgacgttcagctgcgtcagacggttgtgcgtgaccttctcagcagagtcttcaagcggtaa

SEQ ID NO: 147942 - DNA, 162 bp, Enterobacter cloacae
atgaaagatgaagatttagaccgctgcccgcgctgcaaagaggatatgtggaaaggacagcagctgtgccgtaactgccagcatgaagatgatatggaagaatggcctggcggcgatggatatcctttctctgcggaaaataaacaggaggccacccaatga

SEQ ID NO: 147943 - DNA, 570 bp, Enterobacter cloacae; identical to SEQ ID NO: 147879

SEQ ID NO: 147944 - DNA, 879 bp, Enterobacter cloacae
gtggatagcgcacgcgcccttattgcccggggatggggagtaagcttagtcagccgttgtctccgggtgtcgcgtgcgcagttgcacgtcattctcagacgaaccgatgactggaaagatggtcgccgcagccgtcactcagatgatacggatgtgcttctccgtatacaccatgttatcggagagctgcccacatatggttatcgtcgggtatgggcgctgcttcgcagacaaacagaacctgatggtatgcctgcgatcaatgccaatcgtgtttaccggatcatgcgccagaatgcgctgttgcttgagcgaaaaaccgctgtaccgccatcgaaacgggcacatactggcaaagtggccgtgaaagaaagcaatcagcgatggtgctctgacgggttcgagttccgctgtgataacggagaaaaactgcgagttacgttcgcgctggactgctgtgaccgtgaggcactgcactgggcagtcactacgggcggcttcgacagtgaaacagtacaggacgtaatgctgggagcggtggaacgccgcttcggcaacgagcttccggcgtctccagtagagtggctgacggataatggttcatgctaccgggctaatgaaacacggcagtttgcccggatgttggggcttgaaccgaagaacacggcagtgcggagtccgaagagtaacggaatagcagagagcttcgtgaaaacgataaagcgtgactacatcagtatcatgcctaaaccagacgggttaacggcagcaaagaaccttgcagaggcgttcgagcattataacgaatggcatccgcatagtgcgctgggatatcactctccgagaggatatcggcggcagcgggcatcgttaacttaa

SEQ ID NO: 147945 - DNA, 1326 bp, Enterobacter cloacae
atgcctgggtttaattatggtggtaacagtgtaggggatggtactaattggagttctgagcggggttctgaccccactacgccagggggcggagataatggtcatgctggagatcattcttcatctggtagttcgtcatcaactgttgaacataccccttggggagacctgacaaccgacgctgccggctatgcttatatgaatggtattaaactgacggcagataactcgcaacttgcttacgtttctccaactcatcttgtgcgagtacttaattctctgctcgatcgttcttacatgaaacccgagccaggtgaacattccggtgtgacgggggtgcctgcgacatccccaagccgtgtaaccctcgcagataacgcgctgaagaatgcacaatcaaaagcccaagatgccgcagctgctctgtcgaaagcaaatgcggctattagtcaggcgcaaacacgtctgaatacagcaaaagcgaaaatccctagtcttgaagccaatgttaacacgaagcaacaggcttcagataaggccactgctcgtgcgcatgagctggctcatttcctgaatgatatgggtgggcccgggcgttataatgccttgaatgccggttatcagtctgaagttgcacagagtgagctcgataacgctaaaaaggcgttagcaaatggccattctgaaattaccgctgcacagaaagctttggatgatgctaaaaaggctttacctaatgccacagcaaacaaacagaaggctgacagtgctgtggcatcagctgctgatatgaaagatgcgattaccactactacagcctttttcgagtcaatttcgaaaaaattcggtgaacgggctgctcgccttgcgcaggaactggctgcccaggctcgtagtgcaaaaatccgtagtgtgcctgaggcggttgctttgtttgataaacataagggtactgctgtaaacaaactgaacgcagcagataaggcggcgatcgcgaatgcgtttaaatctctcgatcaggcagccatggcaaaacaattggccgcgtattcaaaggttttagggcactttaataaggcgatggattttgctgatttaggtgcggcggtaaaaaaaggtattgagacaggtaattggaacgatgccatcaacaagcttgaatctattgctttaactaatacggctggacagttagctgcgattgcttttgcggcagcaggtgcgccacttgggattgtgggctttggtattgtcatgaccctgtctggtgtcttatttagtaacgaaaaagttttgagtgcaattaatacatcgttaggcatgtag

SEQ ID NO: 147946 - DNA, 489 bp, Enterobacter cloacae
atgagacatacaggagacacggtaatttttatggcttggcacaccgtaaaggacacactaaaactgaccggtcgttcgcgatcccagctgtatcgggacatgaaaaaaggccttgtcagttaccgcacagggaaagatggacggcgagaattcgacaccagcgagctgattcgggcttacggtgaactgcggacggaggagacagtcaaaaggcacaaaaagggacagcaagaaattgacgatactccagctgaacacccgcaactgaaagagatacaacagcagttaactgccctgcagcagacggtcacattgatgttggaggataaaagcactcgcgaagccgaactccggcaacacgatgaggagcggacacagctgctggccgaaatcagccgactgaatgaagatctggagcaggaaaaaaaacgcagcctctggtccaggttgttccgacgtgatattgaggagaaaaatcgtgaaaaatga

SEQ ID NO: 147947 - DNA, 423 bp, Enterobacter cloacae
atgcctttatcagtacgcttttcaccatttatgttctttatcccgctgtttttgacggcatgcactgcctctccacatacaagcgtagaaaaatcggcaaaagcagaaacaacccagcccgttgacgacctgctaggggatttaaaagcaggttcaagcgataatgtcgccagttatgcaacaaaaataaaacacgccgtcgaagaaaagatgtacaaacctgaatcatataaggagcagaaatgtactattcggctcttactcgggcgcgatggtttagttatgggcgcaacagcggagagcggggactcagagctttgtaacgcagtaatgatggctgttaaacaagcgaatattcctcctgcaccggatgaaaaaacttggcaggaattcagaaatacctctctagatttttcatactga

SEQ ID NO: 147948 - DNA, 5166 bp, Enterobacter cloacae
atgaacgttcagcaactgcattatgcgccacttctaaatcagcttcatcagcgtgcggtgaggtcggtggtaagtcagctggcattgcggagcaagtcgttgagtcaatatctggaatctcaatatttccagcctccaggtctgggggggtcactgcttgcagatccggtattcgaaagtacgtttggctggatgcctgcggatgaaacaatggaggatttgcgtgacaaactgatctccagcccgctggttgatgctttgagcaatgcgccagtgccgtttcgtcatcagctaactgcgtggcgaacgattcttgaagacaagcagtccctattagtgagcagtggtacagggtcaggaaaaacagaatgttttatggtgccggtgctggaagatcttattcgtcagcaaaatttgacccggcagtcactaacagggacgcaggctattttcttgtatccgttgaatgcgctaataaatagtcagcaagagcggcttcgcgagtggactcgcgggtttaaagggaagatacgctttgcgctatataatggcgaaacccggcataccaaatatgaagttcaggaagaccagctcaaagtacctgaacaggcattgagtcgggaagccatttatgaagccccaccgtccatcatggtgacgaataccacgatgctggaatatatgctgattcgtcgcaaagatgcccctgtcattgaaaagtcccagggaatgctgaagtatatcgtccttgatgaggctcacagttatattggctctcaggcagctgaattagcgctgcttttacgtcgcgtcatgcaggccttcaatgttggacctggtacagataaacctgtgcaaatcattgctacctcggccactattggtgaagattctcctgaaggtaataaagaacttgctaaatttgttgccgatctcgcgggggtcacagaacgtgatgtaaaagtagttcgcggctatcgacaaataccgccgatatcggagtctcttattcgtcatgaatatcccacatctttagcatctcttaactcactaagttctcaggaactttaccaacagctgtgccattaccgtgtggcccagcaattgcgtcaggcgttaactcgccccggacgcctggcggtacgtttgagtgaattgctcaatgttgccagaagaacctggccagacattaatcaccgtgagctgctgcagcttctcgatctgatggcgaaatcgcgagagggtgaatctaaattttcactagcttttacgccattacgtatgcatgggtttatccgaacactcgcgggcctatgggcatgttcaaataaacaatgcgcacataaagcgagtgaattaggtgagagtgactggccatttggtcaggtatggtttgaacaacgccaatattgtgactgtggtgcgcctgtatttgaaatcttacgttgctccgggtgtggttcagcttatttgtctgccaaggaggaagtgcgcggtgatggaacgagctggttggtggcgcaacctgctgctgccgaagaggatgagtttgctcttgatctcgatgtttattctgaagatgaagataacaacgaattagaaaataactcccaatttgatcgtcttatagcgagcgatggtgaaaaatatatcatttcactggaggaagcgacggcgggtaaaatcgaccgcgaggcgcaaaagcactatgagataaatctgctaagacctgaatctcgaggtgagggacgcaataattcctttgcttgtgtttgttgtggtgacacccaacggaaaaataatcctttgttccgtccgcttcgactcggtgcacccttttttttaaatgaaattattcctactctgcttgaattttcgcctttaccgcaaacaagagaagagcagttaggaccgtttaatggtcgacgtttgctcacctttacggattcacgtcagggaaccgcccgtatctctgcccgattacagcaggacgcagataaagctacgttacgaaccctttgttatcaggaactggcaaatattaatgagccatcagtaaagctcagtccggcacattgtgcattgttagagagttttattacccagttttctatccctccgttaaaaaattccatcgacgcactgagaaaagcgatggtttcgaatgagaagcttagcccagcagacgttcaggcgcttagaattatcgagccgatggttagttccttaagtcaggaacatgctgaagcaatgcaaatactcctcgtcaattcaggcaatcagcagaagaaaaccatgtcgtggcaaactctgtctgaacaacttgttggcagtgtggaccttgcggacagaatgagaggcagttttaaagacttgtctggacttgagcttactaaacaacagtttgctgatttttgtttatacagtgagtttggtcgccgccctaaaaatgcctggaccctcgaaagtctggggctggtggccattcactatccatttattgataaagtcacaacctgcccgcaggactggaagacattattacccgaccccgataagcaattaccggaatggcgtaatttattgaagattacccttgatttctttatacgtgaaaacagtgccgttttttacgaaaacgaggagtaccctcgctggatgggagcacgtttcccggtaaaaatgctgcaggggccagataaaaaatacaaagggcagaaacgtgatcaactttggccacaaatacgcgatcgtcattataaccgggtcattaagctattaattgctgtctttccggcaatacagcctgagcaggctcactggaaagcgctggttaattacttaatgaatgaggtctgggaagctattcgaccatgcctgcgtcagtttgaatcgggttatcaattggacattaaacaacaagctgaattttacagtccaaagcaagtctggcgttgcccctatactcgccgtgcgttagatgtcactttattgggttattctccgtatttaccaggtagcaaagagatagcacctgaaaaagctgtattgattgaaatgcctgagcttcctgcgcgtcactggcgtttatctggtggtggagaaatggcgcgagaagagcgcctgcactggctggaatgtaatgaacgcattcaacatgctcgggaggagggggtatggtctactcgcagtgatcgattggccctgaaagatagctggtatcgtctggaggaacactcagcgcagcgaacaccagagaagaaccagtttaatgaaaaacaatttaaagcagggaaagtcaatgtgttgaactgttccacgaccatggaaatgggcgtggatattggtggtatgagtttggtcgcgatgaataacgttcctccggctccggcgaattatttgcagcgtgctggccgtgctggccgtcgcggtgaaagcgcatctgccgccattacgttatgtaaaaacaccgcgcatggaatggaggtattcaaagaccctctctgggcgttcaacaccgttgcgagtgccccacgggttcgttttggtagcagtagtattgttcagcggcatgttaacgcattggttttaggtgcgtttttacgggctgaagttcctgatgcgacaaaactgagttgtaaatggttctttgaaggtgatgagagccagtgtcttcgttttctccattggttaaatcatcaggccgatcagctggcggataaacttaaacgccttacccagggaactgtactgatgtcattgacgccgccacagctcttgactcgtacgcaaacgatgatgcagctggttgatactcgttggagaagccaacttgccatactgttggaaaacatcgaagcgttgaaagcagataacagcgcgtgggaagaaacgccagcaggcaaagcaatcacttatcagcttcgtgattatcgcggtgcttatctgttttctaaactcatcagtgaagcgttcctgccggggcatggtttcccggttggcgtggtcaatttcaattatctgactgcggatgaactggaaagacgtcgcgcaataaaagccactcaggctgaccctaatgaagggggagaaaacttttctcgccgcattgaaaaactgcccagccgtgacctgcccacagcattacgtgaatatgctcctggtgctgatgtggtattgggcggaaaagtatatcgttcctcgggtattatgcttggtaaagtacttgccagcgggcaggagctgtctggcgatcatcatattccgtggttctggcattgccgtaaatgcggcgcgggagcgaccagcgccacccggcctgtcgaatgttgccactgcaaggcagatatacagcagcttgatgtgaagcggtatttacagcctgtcggtttcgcgacagacattcgttatcaggcacataatgatgtatccatgcctgcgcaacttccctggaaagatcctcgtgttcttgtaccttcttcggtatgggtctccttacccgatgctggactcggacgttaccgttttagtcatagcggggaattgttccactttagtgagggtgaatttggtcatggctacgcaatttgtctttcctgtggccgggcagaatctcaaacccagccccagcgtactccggagaatctaaagaacccggagaaggaaaatacacactacctgttgagaggcggtagtaatgatcggcaggggaacaataaattgtgccacggtcatgttcataaagatctgtggttgggatatagcagccgtacagatatggttgagctgcaactcagtgatgatagtggcttactgatcagggatgatgttgccgcgcgttcccttgcggttgctttgcgtgaaggattagcgcataaattgggtatcgaaaatactgagctgggcgtgacgacacagcaagcgcgcgatatcgatggcttcactggatattctatctttatttacgataataatgctggtggtgcgggttatgcagtgcaattgatcgataattggtcggatgtctttaattacgccagaaaattgctcgattgcagctgtgataaattctgccaccactgcttgctcagctacgacagtcagcattatgtcggcaaattagatcgtctgacctgctccccgttgattagtacaccccgatgttag

SEQ ID NO: 147949 - DNA, 639 bp, Enterobacter cloacae
gtggttgttcagttgttaatatcatcatgtctttctggggatagtgatgctatttatgatatacaggaggaattacccttctcatggggatggattcctgtttcaatatggaaagatgtctttgaacagtgttggtattctctggaaaaacagattaatgataaggcatttgcattaaatatactacagccatttattgcatttataaatcatcaagcgcatatcgatcgtcgattagttcccatcgctaatatgttgcttacacatagtgagatattacctgcaggttgcactgtattgccatctgtaagccgcgagcagtttaatgatgccaaacagatgttattaagaaacccagatagttttggacgtgtcagcattttttctaaagagctttgggatagtgctattactccagaccttaaatctgtttttaataaattttggatcgaaaacacatatcacactcgttttgaaaaacgttttaatttgatgttagtcgcggcgctgctttcccaaagaaacaataaacttatgcatcagctaactgcactttttgaatttcactatcagcaagccccgcagcaattgggggttatctatcagtattattttgaacaagcaggagtatgtcattga

SEQ ID NO: 147950 - DNA, 1866 bp, Enterobacter cloacae
atggctggccagtatgaaaaagcaataacgataaaacaagcgatagactcaattaatttacgccactatcttctgcctgcaattcagaggaagttcgtctggagcagcagtcaaatatgtttgctgtttgattccatcatgcgagactacccgataaactctttcatgatgtgggatatccgtagtgccagtattaaaaacgattacaaattctatgaattcctgaaagaatactgtcagcgatttaatgaagaaaacccctgcgtagcaacaaatgctggatttcatgatttcaaggctgtgattgatggtcagcaacgtctcacatcattatatattggattgtgtggaacgtatgcgtataaacagccccgggtgtggtggccttcggcacaggatgatcgcatcctgccgccaagaaagctttacgtcgatttaacagcgccacttaattcagacgatgagctcatgatgaagtataacttcaggttcctgaccgacaagcaatacactgattcacttacagacaacaaacatcactggttctgcctgcacgaaatattcaaatacgagcagtatgattcccctgatgatattttatttaacgttgtcgtaccagaacttgaaaaaagagatctcatttccagtgagttttccagaaaaactctgctgagactttatacaaaaataagaactgagaacatcatccactacttcaatgagagtagtcaggatattgaccatgtgctggatgttttcatacgcacgaacagcggggggacaaaacttgagttctccgacttactgatgtcaatagcggtagcgcactggcagggggatttcagaagagaactggatgaactgacaaaaaatatttatcagaataatgaaatggggttttatattgaaagagactggttcttaaaaaccagcctgatgcttattgactctgacgtccggttcaaagtaaaaaacttcacttcagaggaggtcggtaagatacaacaacaatggtctgaaataaaatcctgcatcaaggagacttttattcttatcaggcgattcggcatcaatccacagtctttgatatctaaaaatgcagtcattcctgtggtctactggctttacaaaaagcaaaccagtggacatccattatatacaacgattaatctcctgaataaaaaccacaatgaacgctcagtaattagccagtggttttacatggtacttctgaaagggatctttggaagccaggcggatgcgctactcacaagcatcagagacgtaatgaagaatagtctttcagatattcattttcctcttgagaagattattgacagatataaaggctcgaataaagaccttagatttgacgacgaatacatcgaaagccttctcaatatcagatatggcgaaggtcgttgccgtgcactattgcatcttctgttcccagaaatgaatccaaccgaggtgtttcatattgatcaccttcacccaagaaatcacttctcaaagaaatatcttgaaaaactagattatattgcgaattcaccggagaagctcagcttttatgaaaatccggaatactgggacaccataccgaatcttcatttactgaatcactctcagaatataagtaaacaggatacttccctgaaacaatggctatctcagtcatcaaacaactattcgccatcaatgctgttagtttcagatgaaaatattgagttcagtcgcttcccggatttctacaatgagcgaagaagcgccctgaagcaaagactgctgaatcgggtatttcttacaacaaaaatagattcatcaccatccacaatggatacggatgaagaaattctcactgactga

SEQ ID NO: 147951 - DNA, 240 bp, Enterobacter cloacae; identical to SEQ ID NO: 27380

SEQ ID NO: 147952 - DNA, 396 bp, Enterobacter cloacae
gtgctgccgctctcccggtcgttcacccaactgcttctgggtatcgttgcgcaaaaaccgcctcatcgtcaccccatcaccggattaaccattaactttcgtgaccctgaatactcaccggaaaagggcggctggcatccggtcgaaatacgcctcatccctgtcggagaagactggcagctcgattacgttaccgattttcattatgcagggcatccatggcctgagcttgaaaaagatgtcgatgtgagctggacgcaacaatacacgtggctttcccgctgtggcgatatctctcatatcgacgcccgtgagttctggtcgctatgggaaagtaactttatggcttaccacgatatgggggttttcacggtccgtacgttgtgggaaagctga

SEQ ID NO: 147953 - DNA, 951 bp, Enterobacter cloacae
atggccaaaagcaaagtccaattccagaaaggctacagcctgtttgattttttcaaggactatggcactgaagcgcagtgcgaaaacgcgctgctcgcttggcgttttcctaacggctttgtctgccctgaatgtgccaacaagacctgttgtcgcctgagaaggcggccacgtgtgtggcaatgcaatcactgccgtcaccagatgtcattgactggaaacacgattttcgcaaacaccaagctcccactgaccaagtggtttctggcaatgcacctgttgtcacaaaccaaaacaggcttgtcagcgatggagctaaagcgccagttgggcgtcaaatatgacaccgcctggatgctcaagcacaagctgctgcaagccatgaaagagtccgatgacaagcagcccatcagcggcatcattcagctcgatgatgtctactggggtggagagcgccgtggtggcaaacggggtcggggcgcggcaggcaagacgccgtttgtggcagcagtagccctgaacaaggaagggcatccaatcaagatgcggatgacggtggtcgatggtttcaaaaccaacgtcattgctgattgggcaaaacggcatcttgccagtggtagcgcggtgatatccgatggattggcctgtttcaaagcggtcaaggaggccaattgtgagcacctgggtgttgtcaccgggggcaaccttgatttgctggatcatccggcattcaactgggtaaacacgatgatagggaatgtgaagaactcgctgcggggcagttgtcataagctcggagcgaagcatttaccaaggcatcttgctgaatactgcttccggtttaatcatcgttttgacctcaagagtatgtttgttgaattggggcatgcagtcgtggcaagcccgccgatgccatatcggctcttgaagctggctgagggtcatgggtaa

SEQ ID NO: 147954 - DNA, 510 bp, Enterobacter cloacae
atgaacagctcacgtcctgacgatatcgatgaactgaaacgtctccttgccgaacaggaggcactgaatcgtgccctgctggaaaaactgaacgagcgtgaacgcgaaatagatcacctgcaggcgcaactggataagctgcgccggatgaacttcggcagtcgctccaaaaaagtctcccgccgtatcgctcagatggaagccgaccttaaccagttgcagaaagaaagcgatatccttaccggtcgggtggatgacccggccgtgcagcgcccgctgcggcagacccgtacccgcaaaccgttccctgaatcacttccccgtgacgaaaaacggctgctgccggcagcgtcatgctgcccggaatgtggtggtgcgctgagttacctgggtgaagatgccgccgaacagctggaactgatgcgcagcgccttccgggttatccggacagtacgtgaaaagcatgcctgtactcagtgcgatgccatcgtgcaggcccccgcgccttaa

SEQ ID NO: 147955 - DNA, 330 bp, Enterobacter cloacae
atgggtaaaccaacatttagatcatttatcgatgtggtcagggagcttgaggatgcatatggccataaagagctatggctgtattcaggaacggcatacgcaacgccaacagaaatgattaaagccaaatataactggaaatcgccaaaaatcctgaaacgtaacggaagaatggttgcagaacgaatggataactcggactcatggcaactggttggtgactacaaagatccacagtcacaagattgtgctccgccctggcaatcctgcctgatagataaaccatttatgctcctttacagcatcgtcactagaaagccagaggaataa

SEQ ID NO: 147956 - DNA, 951 bp, Enterobacter cloacae; identical to SEQ ID NO: 147953

SEQ ID NO: 147957 - DNA, 183 bp, Enterobacter cloacae
atgcttaccgttgtcatgatgcagagtatgaaagtttggctgctcttcttcgtgcccatgttccacgtaactaccccaaaaccatattcatttcttacagtgatgttttgttcagcatatacgccgctgagtttatccgccgtaaccatactgcaggacatccaagatgggacgttattttag

SEQ ID NO: 147958 - DNA, 852 bp, Enterobacter cloacae
atgcgacgtaaatctattatgaataaatttatattagttctgccattggtgtttgcttcattttttttaaatgctaaaaccgttcctgtcgtgacggatatattatcaccgaataattctacgtcttgggtgagttatctgatctccgagcctattattcctggaggagaagatgttactaaggattcaattgatgttatttttaaagggaacaacattgttattgataacactaatgtctctatcggcaatatttgcaaatatgaatacagtaaggaaagtatatctcctctggaatactggcatagtgaaaaaacagttgatttatataaaaagttcctttctgcttataacattaagctaggaggtaaattaaacttaattactccgataaatccttctgttaaatgtgattatccgttttcttattttattgaggttgatggttcattagtttttattcttaataatagagcaattatttattctcacaataataaaaatgatgatgttcccaattctgtatgtatacataaagaacaaccactggagaaaatatttgaaaatggtgatattgatgagtgtttttataaaaataaaaatattttgagttcttatcaaaaatatagagatagtttaactaatgataacaaaaaatatctccaggaaaatatagagttaaataaaaatttctccatgaaatgtgataacggatgtattaccgttatctataaatgggacgggccagatcatcttaccatttcgcagcagtttgatggtggtgaaacagagatttccttcagtaaagaagttcagggttgtcgagtcgtgactaagtcgcttcccgattaa

SEQ ID NO: 147959 - DNA, 1179 bp, Enterobacter cloacae
atgagcagggtgccgccgtttgataaggatgaggcggtatggcattttcatccggtggtgtttttggatgcgattgagcatgagcttgataagcaggtaatttttccgctaaccgtgaagccggaaaacgatcccgggcatatatggtctcattatgactggagaaatatgcatcagtctaacatggctgcatatggaaccaatcgtaatggaggggccagaaagcacgctgcacgtgatttgtatactaaaccttatgaaaaagtggtagcaatctgtgatggcaaagttcttggtacaaatcctttctatgatggaaccaatgagattgctatttttcatacaacaacagatggacgtaaatttattgttagatatggggagcttgatccaccgagtattaaagtaaaaattggggatgaagtaaaacaaggacaacatataggtaatacagggaaacttataaatccgaaaaccaatcgaccaaggttgaaattaggaaatgtcattgtttatatgctccatcttgaattatatactagcaaagtctcttgtagtattaatcctccacttacagacaaaacaaagcctccatttttaaggcgtagtgatttggttgatcctattgaaattttgtcggaagggtatgctaatacatttaataatagtacctcgaaggaagaacgtttggatacaacaacactacatacatcagaaaatggtaagatatttataaaaggatgggaatcattacgccttaacgcttataatgactcgcacggacattgcactataggatatggtcatttaatagacagtaaaagatgtgagaatatttcattgccaactgagtatcaaggcggaatcactcaaagtaaagcaaatgaaatatttgatattgatttggttagatttgaaaatggtgtcaaaagaaatattaatgttgatttatatcaatatgagtttgacgcacttgttagtttgttatttaactgtggggaatttttcttttcatctaacggggctccgaatttattgaggttaataaattcagaaaactatgaatctgcggctgatgaattcatggatataacaaatggtggcgaccccggccttgtgaaaagacggttatctgaaaggaacttatttgtaaacaatgtttatgattctaaggattaa

SEQ ID NO: 147960 - DNA, 1230 bp, Enterobacter cloacae
atgaacaatgtaacactatcagttcaacggttagctttatacagagaagccataaaaaaaattaaaaaaggcaaatgttccttatctttcccgaaggataacaacatagaatccattctcgattttgaatctgatcttgttcagttggctgcctggtttgatgcccgacttgatgggtttaataaaattcaagaaatatccactgaaatcagtaaaggcagtgttcttgatgaggttttaaatcgcatatatgacacatttcatgtaataataccttacgataggatcggctgcgcattaatatctgatgattatgagcgggttttcgctcattgggcaaaaagcaattacccaggaaaaataatgatcaaaaagggatatactgcttttttaagtggtagtagtttagagggggtactaaccacacaacaaccccgcattcttaacgacctgcaactatatttagctgaaaaccctaactcattatcaactaaattaatagtttctgaaggcattcaatcaagtttaacctgcccgctcattgcagatggtaagcctatcggtttccttttcttctctagcaaagaaaaaaacacatacattgatgcccacccaaaaacatttattaaccttgcaagccaaatatcatttttagtcgaaaaaagccgtctttatcaaagcatttatgacttaaacaatcagttggtaaatgcattggcgcaactcaaagagcagtcttctcgggatgcacttactggtgtttttcatcggggcgctataatggaattcctaaaaaacaccatagaaaaagacacaagaaaaaaacagcctactactgtaatacttgctgatatagatcatttcaaacatgtcaacgacacatatggtcatgttgctggtgatacagcgctgaaggaggtcagtaaaagtttaactaaccacttaaggagtcatgattgtgttgggcgttatggtggtgaggagtttttaattatactgggtgaaaccaatgccacagatgctctgttaattatagagcgtatccgtcaagcaatttctgatctaaagtttgaaaggaatgaaggcaatttttctgtcaccatgagctttggtattgcctgttcagataatacctcacatataaagactgaagaaacattactactagaagcggatagtgctttatatcatgcaaaaaacgaaggtagaaatcgtgtatgtatcgcataa

SEQ ID NO: 147961 - DNA, 570 bp, Enterobacter cloacae
atgaaagagtccgatgacaagcagcccatcagcggcatcattcagctcgatgatgtctactggggtggagagcgccgtggtggcaaacgaggtcgcggcgcggcagacaagacgccgtttgtggcagcagtagccctgaacaaggaagggcatccaatcaagatgcggatgacggtggtcgatggtttcaaaaccaacgtcattgctgattgggcaaaacggcatcttgccagtggtagcgcggtgatatccgatggattggcctgtttcaaagcggtcaaggaggccaattgtgagcacctgggtgttgtcaccgggggcaaccttgatttgctggatcatccggcattcaactgggtaaacacgatgatagggaatgtgaagaactcgctgcggggcagttgtcataagctcggagcgaagcatttaccaaggcatcttgctgaatactgcttccggtttaatcatcgttttgacctcaagagtatgtttgttgaattggggcatgcagtcgtggcaagcccgccgatgccatatcggctcttgaagctggctgagggtcatgggtaa

SEQ ID NO: 147962 - DNA, 354 bp, Enterobacter cloacae
atgtttaaactcacgacccccaccagtcttccccttctcaacctgcccgcctccgcactggtggccctcagcaatgaaatccttggccctgtcgatgatatcgacctgtttaccgatttctggaacgaaacgggaaccctgctctggcatctcaaccacgatgacacgctccccgaagacccgctgctggcagtcgcactggctaacccggaatacgtcaccgcacttgatgacggctggtatctgcttctcggtatcgtctgtgataacggacagggtatctatctggtgttcccggactcgactgttatcactcaactccagaacctgattgaggcgctgaaccatgagtaa

SEQ ID NO: 147963 - DNA, 492 bp, Enterobacter cloacae
atgggggggtataatatgattgattttaatgctgatattttatcaggaagagcactaggtaacgtttttttgggggataatatcagtaagtacataagcgagttatatgctggctataaggtaacttactttgattatttcttgcctgatgataagaaaaggcttgcatatattgtagatgacacaatgacaatcgctacccttgaagatggaacgatcatttctattggttgtaacgtaaactataaggggaggtataataaaatattacaaacaggccaaacgatgggggaaataatagggttgacttacaaacagcgtatatttaatggctgtattattataaatgacgactttggtttttcattcgagttgccagcgccatatgatgaaattgcagatagcattgcacatgttccactagatcttgttcttaatgaaatccgtgttgctgattactctgattggaacccacaaaaaataaaacgctga

SEQ ID NO: 147964 - DNA, 207 bp, Enterobacter cloacae
atgtgtgaggtggtgctgaatacggggaatatcacgctggagagcggtattgcccagggcacggtcaacccgtttaattttatttttgacgtgcgccctgccgggcagggttcgtcccaggctggtcagggtcagtctggcgccgtgggtgagggcaacagccatggaaacaaggacattaacccgaaagctgtgaatgtccggtaa

SEQ ID NO: 147965 - DNA, 867 bp, Enterobacter cloacae
atgaagtatgtcttcatcgaaaaacatcaggctgagttcagtatcaaagccatgtgccgtgtacttcaggttgcccgtagcggctggtacatctggtatcagcgtcgttatcagataaaccggcgtcagcagttccgccttgtctgtgataacgtcgtccgggaagcattcagtgacgcaaaacaacgctatggtgcgccacgcctgacggatgagcttcgtgctcagggttaccggttcaacgtgaaaaccgtggcagccagcctgcgtcgtcaggggctgcgggcgaaagcttcacgaaagttcagtccggtcagttaccgcgaacatggtctgccagtctcagagaatctgctgaagcaggacttttacgccagcggcccgaatcagaagtgggtgggtgacatcacgtatcttcgcaccggtgaaggctggctttatctggccgtggttatcgacctgtggtcgcggtcagtcattggctggtcgatgtcctcgcggatgacgacacagctagcctgcgatgcgttacagatggcgttgtggcggcgtaaacgtccggaaaatgtcatcgtgcatacagacagaggcggtcagtactgttcaacggattatcagagcttactgaaacgccataatctgcagggcagtatgagcgccagaggctgttgttatgacaatgcctgtgcagaaagcttcttccacacgctgaaggtggaatgtatccacggagaggactttgccagccgggaaatcatgcgaacagcagtgtttaattatattgagtgcgattacaatcggtggcgtcgtcacagtgcctgtggcggtctcagtccggaacaatttgaaaaccagaacctcgcttag

SEQ ID NO: 147966 - DNA, 300 bp, Enterobacter cloacae
atgacaaaaccagcatcaaccaccaaaaagccacgcaagcagcacacgcctgaatttcgtcacgaagccctgaaactggctgaacgcattggggtggccgcagccgcccgcgaacttaacctgtatgaatcacagctctacaactggcgaagcaaacagcaaaatcagctctcttcttctgaacgcgaacaggagatgtccgcagagatcgcccgtctgaagcgtcaactggcagaacgggatgaggaactggccattctccaaaaggccgcgacatacttcgcgaagcgcctgaaatga

SEQ ID NO: 147967 - DNA, 471 bp, Enterobacter cloacae
atgccgagcttcagggagtacaagcagcagcgaccgacacgaggcctttacgacactatcacgttctaccatccatccttcggctatgtccgcctggtcgataagcagttcttccagaagacgcttggcggccagacgtacacacccgcccgttttgaaatcgaagagagccagcagagcggtacgccggtgatcgacgctacggtgaagttagggcgtctgtcgtctgacatcaaagcgctgatgaaacagtggaagggtgcggccaggctgactgccatcacggccacaaggcagatcttcgacagtggcgacgtgtctgtgccgattaagtcctggcagctttacgtaaagacggtggatatcgatgccgacgccgcatcggtcactctgtctgtcaccaacccgctaaacaacaacatcggaaggctctatgacccaacggaatacactggccttcagtacctctga

SEQ ID NO: 147968 - DNA, 705 bp, Enterobacter cloacae
atgaacccattcaaaggccggtattttcagcgtgacatcattctgtgggccgtacgctggtactgcaaatacggcatcagttaccgtgagctgcaggagatgctggctgaacgcggagtgaatgtcgatcactccacgatttaccgctgggttcagcgttatgcgcctgaaatggaaaaacggctgcgctggtactggcgtaacccttccgatctttgcccgtggcacatggatgaaacctacgtgaaggtcaatggccgctgggcgtatctgtaccgggccgtcgacagccggggccgcactgtcgatttttatctctcctcccgtcgtaacagcaaagctgcataccggtttctgggtaaaatcctcaacaacgtgaagaagtggcagatcccgcgattcataaacacggataaagcgcccgcctatggtcgcgcgcttgctctgctcaaacgcgaaggccggtgcccgtctgacgttgaacaccgacagattaagtaccggaacaacgtgattgaatgcgatcatggcaaactgaaacggataatcggcgccacgctgggatttaaatccatgaaggcggcttacgccaccatcaaaggtattgaggtgatgcgtgcactacgcaaaggccaggcctcagcattttattatggtgatcccctgggcgaaatgcgcctggtaagcagagtttttgaaatgtaa

SEQ ID NO: 147969 - DNA, 498 bp, Enterobacter cloacae
atgccaattatcgactatcccgactggctgccgctggcgcagaaggccagcaaaaacatgactctcgataccgggttccagaccgatcagccagcggtcggcccggctatcttcgagaatcaaaccgacgacctgaaagtgacctggtcgctgacgtggatcttcactctggctgaggagcgcgcattccagcaatggctacgcagcccgaactatctcaaccggggcctgaactggttccggatgaatatcaatcttggcggcagtggcctgcaattgcaggagcttcacttcacgcagatgccagtccaaaccagtatcgacggcggggtggtgacctggacggggacggttattgcgaactacctctacaacgccgacgacgagttcgacgacatcattgttgagttgccgccaccgtgggattcatggctggatatcgttgtcacgggttatccggacgggcgcgatccggaatctttgccgagggtgccgtaa

SEQ ID NO: 147970 - DNA, 471 bp, Enterobacter cloacae
atgccgagcttcaggaagtacaagcagcaacgcccgacgcgcggactgtacgacacaatcacgttctaccatccatcatttggctatgtccgcctggtcgataagcagttcttcccgaagacgcttggcggccagacgttcacgccagcgcgctttgaaatcgaagagagtcagcagagcggtacgccggtgatcgacgcgacggtgaagttaggacggctgtcgtcggacatcaaagcgctgatgaagcagtggaagggcgcggcccggctaacagccatcacggccacgcggcagatcttcgacagcggcgatgtgtcggtgccgattaagtcgtggcagctttacgtcaagacggtagatattgatgccgacgccgcatcggtaaccctgtctgtcaccaacccgctgaacaacaacatcggaaggctctatgacccaacggaatatactggcctgcaatacctctga

SEQ ID NO: 147971 - DNA, 1212 bp, Enterobacter cloacae; identical to SEQ ID NO: 119866

SEQ ID NO: 147972 - DNA, 1485 bp, Enterobacter cloacae
atgactcaacctgcgaaaaaggcgccgtcgattaagctgctgttcagcgcactcctgctggtgatgctgctctcggcgctggatcagaccattgtctccaccgcgctgccgaccatcgtcggtgagctgggcgggctggataagctctcgtgggtggtaacggcctatatcctcagttcgaccatcgtggtgccgctgtacggcaaattcggcgatctgtttggccgaaaaatcgttctgcaaatcgcgattgtgctgtttcttgtagggtccgcgctgtgcggtctggcgcagaacatgacccagctggtgctgatgcgcgccctgcaaggtctggggggcggcggtctgatggtgatcagcatggctgccgtggcggacgtgatcccgcctgccgatcggggtcgctatcaggggttgtttggcggcgtgtttggcctggcgacggtgatagggccgctgatcggcgggtttatcgttcagcacgcatcctggcgctggattttctacatcaacctgccgctggggctgtttgccctgctggtgattggcgcggttttccacggcagcgcgcggcgcagcaagcatgagattgactacctgggggcgatttacctcagcatggcgttgctgtgcatcattctgtttaccaccgagggcgggacgatccgccaatggagcgacccgcagctgtggtgcattctggccttcggcctgacggggatcgccgggtttatctacgaagagcggctggcgtgggagccgattatcccgctgtcgctcttccgcgaccgcagcttcctgctctgtagcctgatcggttttattatcggcatgtcgctgtttggctccgtcactttcctgccgctctatttacaggtggtaaaagacgccacgccgacgcaggccggtttgcagctgatccccctgatgggggggctgttgctcacctccattatcagcgggcgcatcatcagccgtaccgggaaatatcgtctgttcccgatcctcggcacgctgctcggcgtggtggggatggtattactgacgcgcatttcaatcacctccccaacctggcagctgtacctgtttaccggcgtgctgggcatggggctgggactggtgatgcaggtgctggtgctggcagtgcagaacagcgtgtcagccgatcaatacggcgtcgcgacgtctggggtgacgctgttccgttccattggcggggcgattggcgttgcgctgtttggcgcggtgttcacccatattctgcaatcaggcctgatcgacaggctgccggaaggggcggaactgccgcgcgaacttaatcccgttgccatacaccatctgcctgatgccctgcgtctggactatctggatgcgttcggctcggcgatccatgcggtattcatgctggcggcggggattatggtgctggcgtttgtgctgtcgtggtttttgcgcgaagcgccgctgcgtcggcaggcgtga

SEQ ID NO: 147973 - DNA, 312 bp, Enterobacter cloacae; identical to SEQ ID NO: 119901

SEQ ID NO: 147974 - DNA, 294 bp, Enterobacter cloacae
atggacgagctcaaaaatttcagcgcgactgactggttatttttcgcaacgatggtgatcgcatggttttacctggcagccaaagcgtatggctggtttattggttttctgtttcgccgttgttggcgctggtggaaccggaaagacgagaaaaccctagctatggattcgttttacgaggcttttgatctggctgatatcaatcctggggatagcatggtgatcaccacccatagtggaatgacgatccgcattcatcggcccgaggctaagcgcgacgtaaaaccgctttga

SEQ ID NO: 147975 - DNA, 384 bp, Enterobacter cloacae
atggtgacccggttaagcggtacgccattgtttgcaaaatcacggttgaagaaattgattaaggctgccagtggcggccttttttacgcccgtcagcgggtaacgacagagggtaaggcgatggcaaaagttgttctggtctggaatccacagaagacagagtgtgtcggttttttagagcgagaacctgatggttccacttgggattgtggatcagatggtgacgcggagcatgcagctggcggtatgagatggaatccagtttccactctcgccgatagcttcagggagcaatacgaagacgttgatgacgaatgtttcatgcagaccattgaagttgatcagtcattagccgacgcggttgaaagagaagaagaagattaa

SEQ ID NO: 147976 - DNA, 213 bp, Enterobacter cloacae
atgccggatgcggaggcgggtaaagcgttcctcgcggttggcgacttcaagcgcggctatttcattgtggatcacaccactggcgtgcgtacccgtcctgacaacatcaccgaaccgggtttctacaaggtgcataccgataaatacctgggcggcggcgtggtggactccaacgccataaaggtgcttgagctttccggctccggttcctga

SEQ ID NO: 147977 - DNA, 561 bp, Enterobacter cloacae
atgaaaacaatcgattttgaaatccgtacctccgaagtgagcgccagcaacaaaaagctggtgggctatgccgtgcgctggaacagcctgtcagaaattatctgggatgagttccgcgagcagtttgcgccgggagcgtttaaagacagcctggcatccggtagcgatgtgcgtgcgctgtacgagcataactatacccagctgctgggccgcaccaaatccggcacgctggtgctgtccgaagacgataccgggctgcgcttcgagctgaccccgccgaatacccagcttggcaacgatgtgctggagctggtggagcgcggggatatctcaggcatgagctttggtttccttgcgctgaaagaggcgtgggatattgctcagtctccatatctgcgcaccgtgaccgccgctgaactacgggaaattaccgtaacatcaatgcccgcctacccggaatctggcgtggaaatcgctcaccgttcgcttttctcccaacatcctgaactgcgccgcgctggcgataaccgtcgccgctgggctgaattagcggggctttga

SEQ ID NO: 147978 - DNA, 150 bp, Enterobacter cloacae
atgttccattatacttggaagattttcggccttagtgaaatgtaccagttgagtgactccttgctgttccacgatacgttggatctgctgaattcgctgagtcatagtcaatccgtccttttttgtatcaatatatttccaaataaataa

SEQ ID NO: 147979 - DNA, 147 bp, Enterobacter cloacae
atgttctcagaattagttttttctttagccattgcttacgcgccatccattaacatgattattcgcacgctatgcctggcaatcagcctggcaatcagcctggcacttttgaaacgctacggcattatcaagcccacccgcagatag

SEQ ID NO: 147980 - DNA, 219 bp, Enterobacter cloacae
atggccgacatcatcgataccgcagcagagattgaagagcttcagcgtaacgctgccctttccgctcaccgagtaaaccgcaacgccgtatcagcaacgcattgctccgattgtggagaggatattccagacctgcggcggatgaaggtgcctggctgccagcgctgcgcgtcctgccagcaggataaagaattacgcatgaagcatgggaggatgtga

SEQ ID NO: 147981 - DNA, 375 bp, Enterobacter cloacae
atggattacagcaagctaagcgactttgagattaataaggctgttgcagaaattgctatttatggcgactggttacttgaaccaacagatgaaagtccatcatggttttttaatctcggggtgccaggcaaaaataccgtcaaactgcccgattactgtaacaacccggcggaagcatggccgattatcgttgagaacagcatttctttgatacttgataacccgtcatcggcaatggcaaccagtaactgcgttggatggtactcagatgaggaaccgccaattcatgcatcaagccaaaatccactgcgtgccgccatgacagtatttctcatgatgcagggggcagccaatgttcaggataatccagcctaa

SEQ ID NO: 147982 - DNA, 504 bp, Enterobacter cloacae
atgagtgtggcaattctcgcgcccggctcacggacccggcgcttctcaaagcggttaacgcaggtggtggtgacgctgttcggccttctgctgctgacctttttcatcggccgcgtaatgcccgttgatccggtgctggcgattgtcggaccggatgccgaccacagcacctatcagcaggtctatcaccagctgggattcgaccggtcgctgctggctcagttcggtatttacctcaataacctgctgcacggcgatctgggcaatgccctgctgacgggtaaaccggtgactgccgatattctgcgcgtcttcccggcgacgctcgagctggcgacgatggcgattatcgtcggtgcgggtctgggcattccgctgggcgtactggcggcggcgcggcgcaacagcgtttccgactacgtggtgcgcatcatcagtctggcgggttattccacgccgattttctgggtcgggatgatggggctgctgctgttctacgcctag

SEQ ID NO: 147983 - DNA, 801 bp, Enterobacter cloacae
atgagtatattccattatacggacttgaatggatttaaaggcatcgttgagaataatacgctatgggctactaatatttatcacctaaacgatagcagggagtatcatcacggagttaagtgtgtgttgaatgctctggattatctagaaaatgattacatcgatccatcgatgaaaggcactcttgaatcaatgatggatcattttatgagaaatcaaggtgcttatatatttagcacctccttctgtttaatatccgatcaactaagtcaatggagaggatatggtaataaacagggtgtatgtattgagttcgatgaaaatgagttgcatggtgtatttaagcaccttaattatcaaatacaacgtggggatgttttttatactaaggagggctcaacattagaggcaagaaatgaaattaacgcattcttgtctttaaattacttttctcaacaatttgataaggatagatttaaaagggatgtatatttgcataatattatgcgaggtctaataccatttttcaagcacgatggatttgaagaggaaaaagaatatcgatttatctatacacctatcagtgagatacctgatgttcattttaggatatccggtgatagacttattccatatataaaacctacggttctggaagggctgaaactgccaattaaaaaggtcattattggtccatcgaaatcaccagaggatattgtgtctggtgtgcgattctttttgagttattttggttatggtaatgttgagattgttttatctcaaatcccctatcgtacttaa

SEQ ID NO: 147984 - DNA, 1743 bp, Enterobacter cloacae
atggtggagaaaaagaagaagacccgttcaaccagttcttcggttgatcccgcaacgcgatacgccatggatgtagtttcgggtaaggaaatcgccgggccggatataagaaatgcctgtaaacgacaccttaaggaccttgaatcatgtcatgcccgggggctgttttgggataccgaagctgcgcagcgcgccatcgactttttcgcgaaagtgctgaagctcaacggcggcgagcatgaaggtaatccctttatcctccttccctggcagtgtttcattgttggttcgatatttgggtggaaaaactctgaaaactaccgtcgttttcgcatggtgtatgtcgaatcgggtaaaggttcggggaagtcaccgctggctggcggagtagggctctactgcctgacagctgataaagaaccacgtgctgaggtatatgccgcggccacgaaaaaagaccaggccatgatcctgtttagggacgcggtggcgatggttgatcagtcaccagcgctggcgcagcggattaataaatcaggcggagccgggaaggagtggaacctggctttccttcagacggggtctttcttcagacccatcagttctgatgatggacagtcaggtccgcgtccgcattgtgcactgattgacgagattcacgagcataagaacaaccaggtcgttgagatgatgcgcgccggtacgaaaggacgtcggcaggcgctgattttcatgatcaccaacagcggccacgataaaaccagcgtctgttatgactaccacgagtacgggcgcaaggtagcagaaggttcgatcgaggatgacagtttcttttcgttcatctgctcgcttgatgaaggggaggacccgtttaaggacgagacctgctggaagaaagctaacccctcgcttggtcacaccttcacagaccgttatctgagggaacaggtcacccaggcacgtggcatgccgtcgaaagagagtatcgttcgccgcctcaacttctgtcagtgggtagacgccgataatccctggatgagcagcgatgtgtggatgggatgtgaagaggacttcgacctgcatgaattgcagggtgaggaatgttatggcggccttgacctttctggaagccgggaccttaccgcgctggcgctgtttttcccgaaaaaaagaaaactgctggtggagttctggacaccgaaagacacgttgcttgatcgggctaaaacggatcgggttccttatgacgcgtgggagcgggatggatacattcataccacgccagggaaagcggttaagtacggattcgttgctgaacgtatagctgacctttctcagatgttttttatcaaggcgatagcctttgaccagtatcgaatcaaatatcttgaacctgaactggaagatgccagcgtatcagtgcctttgatccctcacgggcaagggtactacaaagcccaggagtcagggttatggatgccgcactctattgagctgttcgaacagcggctggatgacggcgacatcatcatcaaaaccaatccctgcctgcgctggaatgctgcatcagcagtaaccgaagccgatcagaaagaaaaccggatctttgccaagaaaaagagtaccggccgtattgatggcgtagtggcatctgctatggctattggtgcatctgaaggggatgttggggatgagggcgatgtcgatggattttttgacgaaccgatcatagtgggtatctga

SEQ ID NO: 147985 - DNA, 465 bp, Enterobacter cloacae
atggcaggacgacgcccgaaaccgacccacctgaaagtggtaaccggcaacccgggcaaacgcaaactcaacgacaaagagcccacaccggcgcgagaaatcccgagtccacccgagcatctctctgactggggaaaggtagcctggggaaagctaaccgtgctactcgacggcatgggaattctgaccattgccgatacgctggcgctcgaacgtctttgtgatatttacgccgacattctgcaactgcgtctgacgattgccgatgaagggcgaacgtacacagtgcagacagagggcggttttttgattaaagcaaacccggcggttgccatgcttgccgacgctgatcgtcgatttaaaagctacctggttgaattcggtctcactccggccgccagaacgaaggtgaaagtggatggtggagaaaaagaagaagacccgttcaaccagttcttcggttga

SEQ ID NO: 147986 - DNA, 345 bp, Enterobacter cloacae
gtgaataaagaaccgcgtatctatggcagcaaatgggacagagagcgtctggtgttccttcgcgcacatcctctctgtgttatgtgccgggatcagggaagggtggcagcagcaacggttgttgaccacatcattccgcacaaactgaaagaggctcttcgatctggtgatgcggatgccataagcaaagcccagaagctcttctggagccgcagtaactggcagggactgtgcaagcagcatcatgactcaacgaagcagaggatggagaagcgcggcactatcatcggctgtgatgaaagcggccttcctcttgatccttcttcacactggttcaaacgataa

SEQ ID NO: 147987 - DNA, 336 bp, Enterobacter cloacae
atgatttcgtatgaggttgagttcccgacccaaaaatctgtaagtttaaaaattgacggcttaaatgcatctggatttccgaaaaccatggtgactgatgctattggtggtgatgttaaagtacagctcgataagaaaactatgctgactgtaccttatcgtgaagacattacagcagactttactcttgaaggttacaagcagcgcgctgaaactcacgcgaaaactgtaatcgatcagattgtgaatgcggctcagcaccgagccgctgacgatttaattcaggaagttacgaacgcggttgcttcttctgaattattttctcaactctcttaa

SEQ ID NO: 147988 - DNA, 1746 bp, Enterobacter cloacae
atgtcatctaagcaaaaattatacagctatgtgcgctggtcaagcgagaaacaatcaacaggcacttcatcagagcgacaaacatcccgcgcgatgagatttgctgaagagaatgaacttgaatacgtcgaaattaaagatgctggtgtttcggcgttcaaaggtaagaatacgacccaaggtaaactaggtgtgttcatctcggaagtagataaaggggttatacctcgagatagctggttatatgttgaaaacttggatcgtctgactcgagaggacgtacttactgccaatgagctattccttcgtttgcttcggatggggttgaccatagtcactggtatggataacagggtgtttactcgtgagagtgttaataataatcccatggatctaatggcctcgatcttgatgttcatgcgtgctcatgaagagagtaagactaagtcagatcgagtcacttcgcatgttttagcccttcttgaacgccagaggaaggggttacctgtgaacataaaagctattggcaagcatccattctggattgatgatagtggttctgcacatgagaaggtaaaaaaacaccctgacttttggctaccagcgcaggaagcagtgaggctcttccttgaagggcatggcgctttttacgttactgactatctcaaccagaactatcctgttcctcctgcctttaaaaaaacgcagcgtagggaagggggatggcctttacaggctataaaaaaaatgagagccaatatggctttagttggaacaagaattttcaacctgtcaggtaaagaataccgtcttgaaaactattatcctcccctttgtaccttgggtgagtttgcgcaacttcaagacatcaagacaaataacaaaagatatagtggcaaaacttcgacagcaatcaacctcttaggaggtatgaagattctacgatgtggccattgtaaaggtacgatgacagctttcttgcagagaggccagttacgttatatctgtgaatatggtcgctcgggggggaattgcacggcctggagtttgaaagcgtcaatcgttgaacgttgtttaatgccggtgttgataactggttttctgataggggcttacaaaactcatagtgatctatctcttctggataagcagacgaatgaacttaaagaacaacttaagaaagttcagagccagcaggataatgtcattgacgcaattgctgatctcggaagaacaccgaaattagatgctaaattcaaagcacttgaaaacgaagaacaaagggttagtgggaaattgcagcaactccatcaggcaaaatccttgtatgccagcacgaaagatttctcggagaacattgtcgattttgttgctgggcagtgccattggatgattgtctctgacgttcataatccaaagcgggaagcgctaagagaacggattcgcagtgttatcaatgaagcaatagtcacaaaagataatcgatgcattcgtatagagtttcgatttcccacaggggaaacttttgttttctcggggagtcgtcctggagaatatgaagtttttcttcctcggaaagtacatgaaatccctctagatgccactgagcaggaaatcaacgaatgggaaagatcagattacgaatacaataaaaattttctcaagctatggtatgaagtggtcaacaagaacttgctttctcactatcctgctatcgacgggaaagatttttggccaaaacgataa

SEQ ID NO: 147989 - DNA, 210 bp, Enterobacter cloacae
atggtaagaagagtgttgttgatgggatttattcttgctgcgttcagtaccaatgccgggcgtataactatgagcaacccggagcagtcgaccacggcgaacgggcaaaccttgtgcgtctactccaatagtatttataccttcagctacatcactaagtcgaagcgttgcccttattcgaaaagctttgatgtaagtgaaagtgaatag

SEQ ID NO: 147990 - DNA, 696 bp, Enterobacter cloacae
atgattccatacttcttagaacacattgacaaattcagtactttcattacggcttttgctgcgctgttaactgccttagcaacttttttcttatggcgggtaacccgtgtcttggctgatgaaacaaagcgaatggtcgacgcttccgagcagcctctagtagtggcaacgctggaacctaatgcatggtcaatgcgttattttgatattagtatcgctaacactgggaacgcaccagctttcaatattgatgtcacatttgatcctcctctcgaaaatgcttcccatcggaaaaatggaactatccctttaaggaaaataagtgtcttaagaaatggtcaaacaatgaccagtaatctttgtgaatacgatcagttagaaggtaaggttttccaagtcaccattagctggactaaaaaaccaaactctacggtgaaagagatcatgagttatacatacgacatggcttcttttgctggtattagtcaattgggtgccaaaaacccaatgacagaaatttcacaacaaattaaaggaattcgtgaagattggaagcatatcgcgaaaggtacgaggcgaattcaaacaaacatatatgactcagaagatagaattgacgaaaaaaagctgagagatgaacagcttcaagtggctagagaagaatgggaaagcaggctagccaacaaaaaagagtag

SEQ ID NO: 147991 - DNA, 1377 bp, Enterobacter cloacae
gtggatgccgctaacctgatcaaaccgctgctctccagcggcaagatccgcgtgatgggctccacgacgtaccaggagttcagcaacatctttgagaaggatcgtgcgctggcgcgtcgtttccagaaaatcgacgtgaccgagccgtcggttgacgaaacggtgcagatcatcaatggcctgaaaaccaagtacgaagcacaccacgacgtgcgttacaccgcgaaagcggtacgtgcggcggtggagctggcggtgaaatacatcaacgatcgtcatctgccggataaagcgattgacgtgattgatgaggcgggtgcgcgtgcgcgcctgatgccagccagcaagcgtaagaaaactgtgaacgtggcggatatcgagtccgtggtggcccgcatcgcgcgtattcctgagaagagcgtttctcagagcgaccgtgatacgctgcgcaccctcggcaatcgcctgaaaatgctggtctttggtcaggataaagccattgaggccttaaccgaagcgatcaagatggcccgtgctggccttgggcatgaccacaagcctgtcggttccttcctgttcgccggcccgaccggggtgggtaaaaccgaggtgacggttcagctctccaaagcgctgggcattgagctgctgcgctttgatatgtccgagtatatggagcgtcataccgtcagccgtttgattggtgcgcctccgggatacgtgggctttgaccagggcggcctgcttacggacgcggttatcaagcatccgcacgcggtactgctgctcgatgaaatcgagaaagcgcatccggacgtgttcaacatcctgttgcaggtgatggacaacgggacgctgaccgataacaacgggcgcaaagccgatttccgcaacgtggtgctggtgatgaccaccaacgcgggcgtgcgggaaaccgagcgtaaatccatcggcctgatccaccaggataacagcaccgatgcgatggaagagatcaagaagatcttcacgccggagttccgtaaccgtctggacaacattatctggttcgatcatctgtctaccgaggtgattcatcaggtggtggacaagttcatcgtcgagttgcaggttcagctggatcagaaaggtgtgtcgctggaagtgagccaggaggcccgcaactggctggctgagaaaggctacgatcgtgcgatgggcgcccgtccgatggcgcgcgtgattcaggacaacctgaagaaaccgctggcgaacgagctgctgtttggctcgctggtggacggcggccaggtaacggtggggctggatcaggcgaagaacgaactgacgtacgatttccagagtgcggcgaagcacaagccggaagcggctcactga

SEQ ID NO: 147992 - DNA, 558 bp, Enterobacter cloacae
atggtaccttataagcgtgtagatctcattgttagtgcgtttgccaaaatgcctgataaaaagttagtggttatcggtgatggttctgagatggataagatcaaacagctggcgacggataatatcacgctactcggctatcaggatgatgctgccatggtagactatatgaagcgtgccaaagcttacgtatttgccgcagaagaagattttggtatctcacctgtagaagcacaagcaagcggtacgccggtcattacgtacggtaaaggcgggtgccttgaaacggttaaaccccttggtagcgataaaccgacggggctgttcttctttgaacaaaccgcagacgctatatgcgaagccgtgaatacttttgaaaaatacgccgataaaattaagccagaagactgtcgcgaacatgctttaaccttctcagagcagcgtttccgtgacgagattagtcagtatgtcgatagtgcctgggctcaatattctgagtcactgatcaatactcaggctgcgcgagtacagaacagctatactcatccggaaaaataa

SEQ ID NO: 147993 - DNA, 438 bp, Enterobacter cloacae
atgaaaattagcgtatttaaagatcaaaagaaagaattcatttgccgtggggccttaattgcatcggatttattttggcttaatgtttctttggggctttcctttttaaccgtcatgttttttattggcgatttaaatacctttatgccaattcgccagattgatgtgagggtgttatcacactttattctgactgtaatgtgtgtgttttggtttggcgtccgcttacgtcattatgcacaaaagaaacccttctggtctgaacttaaagaaacactgcgtactattgtcattttttcgatcttcgatcttgcattagtggcattttctaaatggcacttttctcgctatatttgggcctactgttggctatatgccatcattatggttccgttatcattaacaaaaacaaaggctttcattaaaactccgtattag

SEQ ID NO: 147994 - DNA, 342 bp, Enterobacter cloacae
atgtcatttatatttagccacgaagtattacttcttcaggttcacaataatctgtctaaactgacctcgcgcttcattaagcgtactttcgatatcgtctgcaccttaggcattcttcttgtttcatcgccactgctggtttacctgtggtataaagtttcccgtgatggtgggccagctatctatgctcatacgagaattgggcgccgtggtgagaaatttgactgttataagtttcgctctatgaatatcaattcaaaagagatccttgcagaattacttgagaaagatcctgaagcgcgaggtcagtttagacagattattgtgaacctgaagaagtaa

SEQ ID NO: 147995 - DNA, 1098 bp, Enterobacter cloacae
gtggagaaagataacggacagacccgctggcactaccgctacgacggcgagcaccgcctgacggaggtcatcagccagccgcgggaccgcaacaggccgcagacgcaggtcagcttccgctacgatccgctcgggcgacgcatcagcaaaacgcgccgccagatgctgggcggacagccagccggcaagccggtcaccacgcggtttgtctgggaagggttccggctgttgcaggaagtgcacggggaagtgcctctgacctacgtctacagcgatcaggacagctacgatccgctggcgcgtatcgacggcgttgatgccccggaaatcttctggttccactgtcagccgaacggcacgccggaacggatgacggatagcgaaggacaggtgcgctgggaaggggtaaacagcgcctggggcaagctgctgcgggaaagcgagacgcaggtatcaggatattcccagaacctgcgcatgcaggggcaatacctggaccgcgagacagggctgcactacaatctgttccggtattatgacccggactgcggactatttacgcagcaggacccgatagggctggcgggagggattaacctttaccagtatgcgccgaatgcgctggggtgggtggatccgtgggggttgagccgcgagtgtagcggtaaaacaaaacctgatttctatgttggtccaaatggccctagttcgactatgccttctacagcatatcgttatatggatagcaaatatgctccacagacaatagaaaataaatcagccccgttaagttattttgggtatacgaaatataaatctgcacatgaagccagggacgcctatcaaattttttatgagaaaggtaatcctgattcatggagtgatgcacgtttattaggtgagtttgatacattacaactgtataaaaatggagtgcctcaggtgcaagtacctcttgccaatggtggtcgagggcctggatatgagcttttcaccagtgcatatcctgagtatggtaaaggtggggcattacagttgctaccaatcgaacgtaattaccctgttatttttgaacgtgttactataattccgaagtaa

SEQ ID NO: 147996 - DNA, 258 bp, Enterobacter cloacae; identical to SEQ ID NO: 131976

SEQ ID NO: 147997 - DNA, 405 bp, Enterobacter cloacae; identical to SEQ ID NO: 131943

SEQ ID NO: 147998 - DNA, 525 bp, Enterobacter cloacae
atgaacttagagcaagaggaaagaattgaagattatctaaaatacaaaatcaagtgtattaaggatgcagtagaacttaatgatttagtatttatagaagacaatagcagacttttttctacttctgacttgtttaaaattcactacgctacatccataactattgatataaataaaacgccctatgagatatatagggctgtattcaaatctggttataatcctgatgtggtgattttttatgatgaaccggagacagatgatccttatgaacctcacttctatgatgacagatataaaaaattagttttgaatctaattaggatggggattcaagttattatgtttgatggttttcataaaggatatgagtttttcaataacaaaacagtcagttttgatgttatcaggtttgaaaactgtttttcaaaagaggcagtgaaagagctggatgattatcttctcaagaagaggttaaagatgattagtagacatatagaacagttaactaatacagacatataa

SEQ ID NO: 147999 - DNA, 435 bp, Enterobacter cloacae
atgggttttccatcaccggcgcaagactacacagaacgctctctatcactcgatgagctatgcatacacaggccagccgctacttactttatgagagctgtaaacaactacgttagagctggtatccagaaaggagccattctggttgtcgattcatcagcaaagccatgtgatggtagcgtagtgattgttgctcatggtggtgagttcgttgttaagcgtcttcagcttcatcctaagcctgttcttgtcggtctggactacatgggggaacgtatagccatagatcttgatgatatggacgagaacgccgctacgcgcatcttcggcgttatgacgtattgtgtaaacgatatgagaacagcagagtttgatgatacaccgtatggaattgaagacccggctatgatagaaagaaaacaggattattcatga

SEQ ID NO: 148000 - DNA, 666 bp, Enterobacter cloacae
gtgggtagtgtatgggctcatacggtgatggttaacggtactcctcgcttcagggcaggtgttgcaggcattggtggtgccgtctcttaccaaatcgcaggaagaaataatggcaccgatgcattctcaacaatgctgtctgtgaagccaggctcagttgtttacacttctgaaaataccacgaaagccagcgacggaacgctcagggcagcatcccctgtagcccgtatagtgaaaagtcaggaggaatgtcagcggactgatatcgatgaaccaggctttttctggagcggctgtggtacggcgaacaccgaggctgaaggaatcaaaatctcccgcctggatgttggtgtatatgccctgttcggttccgcaggcttggcatcagaaggctggcagttactgccgccaatggaccctggcggcatgggagaactgggtgtggctgaagctgaacaaaccgctgacggcgagctgactatccgcctgtttaagcgaaaatacatgctgagcgatgaaggggagatcgtcaaaacaaaaggggaaccgatggacgtgccggtgaacagctggatcgatgttcgcctggatatgcctgatgattctgtctttaatcagcggatgagacaggaaccacagcttgagcctctttctccagctctctga

SEQ ID NO: 148001 - DNA, 600 bp, Enterobacter cloacae
atgttcccgctgagaaaaaataatcctaaaagaacaaagcaacaaaaactgagtaaatacaatttatataaagcagcattatcaaaagattttttttgctgttgtggctattgtggaactcaccatgtatattatggctcaggaaaatgttttcacattgatcattttgcacccaaaagcaaatttaaacatcttgaaaacgaatattctaacttggtttattcttgccccacgtgtaatatagctaaaagtaatgactggtgtggtccgaccgagaatgaaaggatcttcaataatgttggatatattgagccttgcgatgaggtctacgctacgtcattttacagggactcatcaggtaaaattaagtatcaagaagggaatcttgctgcaaaatatatgtatcacaagctaaagtttgggttaaagcgacatgaaatattttggctcgccgattatttttacgaattagtaccaagaataagtaagaaactcagagaaacccctgagagcaatccattgtatgatgaactaaaaaaattattattagactccatcgaacaaatggataaatacagacaactacaacgagaattataa

SEQ ID NO: 148002 - DNA, 348 bp, Enterobacter cloacae
atgaccatcaaagcttttggtaaatggattacatcccaaattaatcaagcgagcgacattcaaaaggttattagttttaaaaagaactgtttgacctttattgtttctgtggttgattttagcgccacagctaacaagatacctgacaacatccatattaggattgatgaaaacagccgtttcaccatcactgttctgatagttaacatcagcgccgttctctaccagtgccatagctacttctacatttcgagcaacgaaaagtggtgtgaatcctttgtagttcacaaaattaacatcagccccattactcaccaaatcaagaacttctttggaggtattaactaa

SEQ ID NO: 148003 - DNA, 306 bp, Enterobacter cloacae
atgctttttagcagcctgagctttctgttctacagccggtttggtcgcttttttgtggtgctttttagcagcctgggctttctgctctacagccggtttagcggcttttttgtggtgctttttagcagcctgggctttttgctctgcagccggtttagcggctttatggtgtttcttgtgatgtacggtttttgctggcgcagcggtggtcgttgcagcaggcgccgcagcagccggtgcagcagtggtttcagcagcaaacgcagcagaagacagccccatagcagcggcaacaaccagagctaa

SEQ ID NO: 148004 - DNA, 492 bp, Enterobacter cloacae
atgagcgggttaatcatcaaaataacactgtatcatgactggaataatacgatgaatataaggacaagattagctctatcctctgatatagagggtatttttgacgtcaggacttcggttaaagaaaatcatctcagtcgagaagaaatggagcggatgggaattaccgagagcgttgtcaccgatatgatagaaaaaagtcgttgcgcatgggttgctgaggatgatgggaaagtgattggtttttcaatgattttgcctgataaagcatgcctttttgcggcatttgttctacctaaatatgaaggccgaggtttaggtcgcagacttgttggactcgcagagcaggaattattcaaacatcatgaggttgcatggcttgaaaccgacaaaaacagtcgtgcggcagaattttataggcggcagggctggattgagaaagaaaatgtaagcgaatccgatattatattagagaaacgtcgctgcatttga

SEQ ID NO: 148005 - DNA, 384 bp, Enterobacter cloacae
atgcaaatcaagtttggggtgttgttactcgtggtgcttgtgccactgacatcgactgcagcaaaagggagttttgttttttcggtcggtaatgagaaaacttcgtttgactctggatgtgtaaagtcaattgattatgtagagaaggatgagacaggtgcagagaatttagtctttagattttccgatgaatgtggcaaaaggttgtcggacatgacccgacagaatatcggaaaacatatgatcatcgcctacgatgataataaaatcacttccgctatgattgcctcgctcctgagtaccaatttcagaatatccacaaaagacacaccaagaataatgctaatgcaaatacttaatgattatgatagtgttcgtgattaa

SEQ ID NO: 148006 - DNA, 1653 bp, Enterobacter cloacae
gtgaataacgtcaattccttccttaaggaaaatttaccttcagtaagtaagaacgtttttgttgctccaggtatccctgaaaaaaaactgaataacgtcgctaaagcattcaatgtctctgataacctgaatgctgtgctggccatttatgacaatacggtatttggtagtgcaaaagatggcatcgtttttaccggcgaaaaactggttataaaagaagcgtttgaaagtccttatgacgtctactacaacaatattgaaaccgtagaatatatagaagatgtcacagtaaatgataaaggcaaggaaaagcgaacagaatttgtctccctcaaactaaaaaatggcgaagtaaaaccactcaaaagtttgatggagtgcaactataagaggctgagcgacattcttgagcataccatcagtgactttgatgagttcaaagaagaagatcagctcatcacccttgctgaaatgtcagaagctcttaaagtggcttacgtcaaaatcattgttaacatggcgttctccgatgacggtcaggttgataaaaaagagtttgccgaaattctcttgttgatgactcgacttgagttaacgaccgaatcccgatttacgctgcgtagttacatcggtgcagaatccagtctaatgtcggtcgaagagttaatagcgattgttgaccgggaatgcgtgcctggccataacaagtcaataaaaatctctcttgttaaagacctgattagcattttcatgagtgttaatgatggtgaatataaaaactttccatttcttcagcaggtgcaacccctgcttggcgtaactgacgaagaaatagaacttgcggtgatggctattcagcaagactttaagatgttacgagaagatttttccgatgatgcgctgaaacgcagcatgaaagaacttacggcaaaagccggtgcggtaggtgtgccgctcgctgctgtctatctttctggctctgtcatcggtatgtccgctgcgggcatcacgtctggcctcgcaacgcttggacttggcggcgtgctgggcttttcaagtatggcaacgggtattggtgttgcggtgttaataggtgtgggtgcctataaagggattcgtcatcttacgggtgctaatgaactggataaatccaagcgccgggagcttatgcttaatgaagtcatcaagcagacacaatccacattgtccgcgctaattaatgatctcaattatatttctggtaagtttaacgacgctctggatgcgcataatcggcaaggtgaaaaaattcaaaagctccagaagatgatgaatgcattgaccggcgcggcggatgaattgaataagaaatcgaataaaatgcaaaacagtgcactcaaacttaagtgccctgtctaccttgatgaggctaaacttagttcgctgaccagagaacctgtcaaaaaacaattccatgatatcgttctttcatactatgaagaatgcattgttgaagagcaacatgatggtaagagcgttgaagtgaaaaaacgtaagattaaagaaaacacatccactcagcaattagaaaaacttgccgccatctttgaaggcatcggttatttcagagcgggggacgttattaaaggcaaactgactggattgttctcataa

SEQ ID NO: 148007 - DNA, 1491 bp, Enterobacter cloacae
atgaaaaaaccggatactcaggtatcggccttgctggtgcagaagcacctgcttgaacaaagcgagggtcaattgagtgaccttgatgccgctctggacgcccttaacgctttgcaaactgatacagatgctgctttagatgaaatgattctcgctatggagggcgtcctggaacacgcaggtatcacctttgataagaacatccatacaacggtttccagtgaattcagcgattaccttgaatccggtttgatcccgccatcgtccagtatcagtaaactgtcgatgattgaaacaatagcgttcacgagcgatacggactgggaaacttattcccagtccgtatcggactatgctcataagcacaatatcgatttaaaggtcgatccgtttagcgccctgatgtccccaactcagagaattgctctggagaaacgcattcaggaagactttactttaaagaccgcccgctgcgataaatatgattacatgatcgccggcacctgtggcgttattggcgggcttatcgatatttttctggtaggcgcacctggtgaaggaaaactgaccaggcttgcagataatgcggtggacggagcagtcgagaaattcgcctcagcatttggatggaaaggcggttcagaagggagcgatcctacaaaaagcgctatcggctttctggagagaaaatttaaggtcaattatgaccatcggcatggcggcgatgttgacggtctcttcaggatgaatacgaagaatcaccatattaaaagtcttgcccactccccggacctggtcggtttatttttctctatccttgatcaatttaccagcacggcacattttgtggcagacggaaaactggtttccgtagataccgaaacttttgagcttaaagggaataactttgtttctaaggtattcagtggcttcgtaaactggctgggccatcttttctctgatatggcgggctcttctggtgctgaagggagaggctctggtatcccaattccattcttttccttacttcagtttattaacgtgggtgaatttggtcagcatcgtcagtctttcgcgaccattgccgtccaggtttttgagaaaggatacgacctacggcatggattagcgatggctatccctgtcctgattaccgaattgcttgtgcggatcacctggacggttaaacaacgttgctaccataagaaggcatggggggaatgtattccttctgcgaataacccagaactcagacgaatgttgctggttgcgcatggaaccttgtgtttgatggatgctggcgacgcggcacttcgctcaggaggagacatgattcagttcctcctgagaacgaacctcatcggctgggcaaggtttggcactctggcgattaaagaactccatgtctggtacaaagcgggtggaattgacgccagtgctgtagatgaatatatggaccatgaacttcggcgaatgctaaaagcgggttaa

SEQ ID NO: 148008 - DNA, 735 bp, Enterobacter cloacae
atgaccccgggaaaaatacttaaaaaatcatttattgctgttgttttgagtggtgttcttgccatttctggatactttggagcgctaaatacagtgtttgacttgtatcagaatatcgcagatagatttttccaaaaacaagcggaagataatctacacgtaatttataccggggcatcgataaagtacatcgaatcaatttttggcgcacctgtgaaagaagaacattctgaggatggcaaggttaatgagtatatttactcgttcaggaagttctatctacaagtggtttatgataataagaatactgtgatactctattctgtaaccagcaaggataaggactttcatcctgaagtgccttatctggctaaaacccttggccataagtttaaagactttggaaataatattaactatttgcattttgaccattctgcgaaattctatcaatatgaagaagggcactacttaggaaatcctggtaactataggaacttttatctcgcttataatcctgctggcgttgattacgttgagttgcagtcgctccctgatttttataataacgatgagccttctccaaataaaaaagatgttgaagtgttcagaagcaaaaatgcgcctaatacatttggtgtaggcgatataaacggaggtcccgagggccttgagttaagctttagacttgggattgattattacgatgcgagagatattccagataaggattag

SEQ ID NO: 148009 - DNA, 813 bp, Enterobacter cloacae
gtgatttctataaagaacattctaaatatcaacatagcaaaaaacatctacctttccctgatagggggcggtgtggtggtgtttatgatttactctatgagaattggcttcttacctacaggattatcactttctgatgtcatattttttcttcttgtcattatctctttttcaattttttttacattctctcttgcaatatggtattcaatgtcggttgtaacctcttattactgctcgatgtttattttactccttgcgcccaataaaaaaataaagcgtaaagaatggcgtggaaaactgaaagcaacccttaaagcagggagaataatgagggtttatgttgctttgtatgcccatttaattattgcttttgtgggtggcgttattcttttttttggtagcgctaatggaatgtttgatggggtgttcgttttattatcgttactattcactgcattttttattacactgatcatctatacttgcattgataaaatggtaaaaaaagaagataaaagaagtaccgttatatcaattttagttttaatttttgttatattctttatgctttcagatatggcgcctgtgcttagcgatgcaggcatgaagtatatcggcgtgcgcaaaatcaatgtgacaatccttctgaaaggaagcgatctggaaatggcaagacatttaaccggcaaacaagatcagaccttctttaaaggggacgcactatttactggtgtaggaacatcttctctgctgattatcaacaacaaaaaaattatcgcgaaaaatgaaaacctgaccttgtcattctga

SEQ ID NO: 148010 - DNA, 579 bp, Enterobacter cloacae
atgatgaaccataaaacctttattatcggcggtatctccggcatgaggtcaacatatttacgtcccgttcttgcggcgcttttttttattgggttgtcgggcgccgcatattcggcccaggcagaatgggtgaagccaaagcagcttattgcagacaccagcttgccacaggctcaattaaaggcgaatgaagccgtcgccagagaatatgcctcgttctggaataccggtaatgaaacactggcgcgtgatgccctggcggctggatttattgataaaacgcctccggaagggcgtaagcaggggccggaaggcgctattttagcttcccgtgcgtttcgtacagccgtgccagatttgcgttgtgacgttgagcaaatgattatttcaggcgaacgcgtggtttcgcatttacatttttacggcacatttaccggaacatttggcaagctgaaaggaaaggggcagaaaatagattttatcgccacggatatttatgagattggtgacggtaagatcgtggctaactggcatattgaggacaacctgacgctgatgaaacagctgggcgcgctgtaa

SEQ ID NO: 148011 - DNA, 1002 bp, Enterobacter cloacae
atgatatacaatcttcattttgatacagaatatgtatatagtgatgaactcaaagattcaaactgtgaaatacttacatctatgatcctaaatatctggagagacaactgttgtttctttattgcagataaagaagtgaaaaattatattgaggttatagacactctccccccacaattaagtatcaaatggaagacggcgttaactaattacaaaacatataatattgatgattgctataagccattgcgtgacttccctgacctcaccagtcttgaaaaaaactataaaaatactgaattagatttagtcattatccctaacaattataatggtcttggttttacaaccgcagtaaataacagaaatatcaatggcatggatatagtaaaaagccaatacattccactatcagcaacatacaaccatatatataattcttataaccgtgatataaccggaactgaaacgctcgaccaaatttgggaaacaaaatttagtcgccttgcaaaaactagctctgcaattacaataattgataggtatttaggtgttaatatttttcaagatattaactctaaaaaaacatctttggagtattttatcgacaaaatactctcatgtaacatagaatgctctataaccatttatacatcacacattacacatccaactagtggggactttttacccgaagataaaaatgaatgcaaaacttttatcgagaattatattaggagaaaattagagataaaacctcgatttaaaaaatccatcgctagtcttgagattaatttctgtgaggaaagtcttttccgtccgatcgctcacgatcgatttattacatttgacaaacatacaataaatttagggatagggatggagattttcagacaaaatggcataaaagcaacaacatgcacacttcgatacaccggcaatacaaatttctcgacaatattgaacaatttatcaaaaaatagatttttatctgtcaaataa

SEQ ID NO: 148012 - DNA, 1389 bp, Enterobacter cloacae
atgttaaagactctcagcatagaaaacttcaaatcgttctcggagaaacagttaatagacctagcaccattgaccttaatatttggtcctaactcatctggaaagagcagtattattcattccctattagcattaaaacagacaataaacaacccgaacgaatcagagaaattcatctcaactggaaaatatgttgaccttggttcatttggtactgttgtttacaaacacaatttagaaaataaaatagtaatttctctgtcatttacaagcaacttaccattagaacaatatgaaaaaaaatacagtaagaaacctatatttggaatcgatgatgtaagaacaatcgaggtttgctattcaggatgtgaagactctcaaaaaaaatataaatcaactttagaatatttcgactatgaggcagcacagaaaaacaaccacgaatcacttgtgaaattccgcctagaacagaacattaactcactgaaagaacttaattatttcatccctcaatcctatatacaaaaactaacatcttatctagtacggaaagagaaaagaagtggaaataacaaactagatcccgagatatataacgcattaatcaaaccagagtataggtttataacagagtcatctattccctttaaaaataatcactttgacacacttcctctggtatctcagtttttctcatcagttagtgatgaaataaagaatgaactagcatccttgatccacttaggaccattgcgtacatatccaaaaagattctatgcatctgatgatgaatcaccgacaaataacaagggcgaaacaaatattggggcaaaactttatgaagcagatgataaagcaaaaggggaaataaatagttggtttgagagttttgaaataccttataaatttataacaaaaaacataggaaattatgggacaggagatgttatcgcagtaatattacaagactcccgcagtaaagtaaaagtaactcctgctgacgttggatttggtattggacaagtattacctattatcattgactccacaatacttgaaaataaaataatttgcgttgagcaacctgagatacacctccaccccagacttcaggctcatttggcagatctattcataaactcaataaaatccaataataatcaatggattgttgaaactcatagtgaagcattaatgctccgaattcaacggcgtattagagaaggtcaaatatcgccaagagacataaaaatattatatgtggataatagccaaaacggcagtgttgtcatggacatccctttaaacagcaaaggggattttttaaaacattggccagatggtttctttgaggaaagaatatctgaaatgtttggtgaacaaaaatga

SEQ ID NO: 148013 - DNA, 1680 bp, Enterobacter cloacae
atgaaaacattcatgttaaatataaactgcaattatcattttccagagcgcggtaaagtttttatcgctggcatctggttatgctgtggtctgctctggatattaccgaatcaggggggctccggactggcgttaccccaaaacctgctggcctggtgcgcgatggcgctcatggtgttgtggtgctcactgaccgggcgctgggtaaaattcagttatccggctggcactcaactgattataacgggtgccattctgtggtctctgccgctgctatggtcgccgtcttcagcctggcagtggaatgccgcgacgaaagtaatggcactgtgggggctgctcatcgtctggcttgaactgcttaagacgcctgtcaacctcatcaccagacgccactggctgctgattctggtgatgtcggcctttttacagaccattttctgtctgtaccaattgactgatatggcgaaactgcccggcggacgcccgtacggcagcttccagcaggtgaatgttctggcatcgtatttagccaccggcacggtttgtgccctgtggcttaatataacggcgcgccagaagtgggtaacgcgtgtctgttccctgtcactggttatgctaccggccatgctggtgttgttgcaaagccgggcgggttatcttggcgctatcctggggagcctgatcgtactggtagccgcatacaaaacgcaccgtagccgcggttatttttctctgttgctgatgttagcaggtatcattctggggcttgtcgcgcttcatgttggcccacggttatttcctggttttataccgggattagccgacaaaagcggatcgaacagtcagcgctggtatatcctgcaagtgacctggcagcttattcaaaatcatcccatcgtcggcaatggatacggcagtttcgaagctctgtttggtcagctgacacagcacaatcctccagggctgagagacgccaccttgctatatccgcacaatgaacttctttatacctggatggaagggggaatcgttgccatcgcgggtgtgattctgatgatcggcggcatgctgaaacggctgtggagtcggggaggacgtcgatggattggtctggcaatgttattacccattgcgctacacatgaatctggagtatccgctctatcaatcagtcacgcatggtctggctcttgtcatactgctgggaattagcggcccaacagcgacgccggtgaacaatgccgctcagggcaacgtgatgacattcaacagaatgttacgcgttttggccgcgagtgccgttttgatatttatggcaaccggtgtcgtaaccgaagtgcaaatgacccatattgagcaacatgggcttgcaccgctggccagggatgaaagcgctgctgccggaacattactcaatccctggagtcaacatgacaggctggattttgaccgccacgtagctctgctgctgcggttcaatttgaccagagatcctgatttattaactcgcttccagtcctgggccgagcactatcggaaggttcacaatagttctgatgtcaacttcagcctgatgatgatctacagggcgcaacacagcgaaaaagcgaaagagatatgtatgcaaagcaacgcactgtggccagaagaaatgcgctttagatgcgagaagttttag

SEQ ID NO: 148014 - DNA, 546 bp, Enterobacter cloacae
atgaacagtcacagaatgaagataacttgctggggcgcagttgcgctcattctcctggccggtctgtctgccaggccggcgctggctctcgaagacaatctgcattttagcggcacgctgaccagcgccccctgcgggctggatccgctgaccaccgatctgaacgtcgatttcgacatgatcatggaaccggatatttatgcctatgcccgctcaagaggtgtgccgtttaccattaccctgacggactgtgatttgtcgatagccagcaaagtgacgattaccttcaaagggacagaaagttcggaattacccgggtatttagcggtgacgggagaaggagcaggtattgctatcggtatggaaacgcagaccgggatcgccgtaccctttaatacacagacgtcggaacacgtgctgaccagcggagataacagcgtaaccctgatggcgtacgtccggggggagccgaccgctctgcgtcaggagaaaatcacacccggtaatttttctgcggtgacgacatttgtgcttgcatacccttaa

SEQ ID NO: 148015 - DNA, 561 bp, Enterobacter cloacae
atggcgatacgttcacggcttctgccacattgcaactttcgtttaattgaacagacagttatgaagagaatattccacattgtcaccttatctggcttgctgctgaccgggacgccgcaggccgcgcaggttggcgatcagatgtctgtcaattttaaaggcacatttatcattaccacgccctgtacggtttcgggcgatgaggtgatagatgtatcgtttggcagcatcagcgtgggtaaagtaaacggcatcgacaataaacaggacattccttataccgttgactgccacggcgcgccggatgattccgcactcaatattaaggtgagcggagtggctgaaattttcgatgacgccgccgttacgacctctgctgacgggctgggtatccagattcaggctaacggcgtgccgatgaaactcaaccagcctctgaagacgacgcttggcggcctgcaatccctggtgctgagcgctgtaccggtgaaggatccggcaaaagtattgagcgaacagacattttccgccactgccaccctaaccgctgattatttctga

SEQ ID NO: 148016 - DNA, 564 bp, Enterobacter cloacae
atgactaattcacgcgtgataacgtttaaacgccttgtccgtacaccgctcctcgcgctggtgctgctggccccgatggtaagccaggcaaataaaggcgacacctactcattaaacatcaatatcgatggcaccctggtggcaaacggttcttgtcagtttaatcagggcgacagcctgacggtcgactttggtgatgtgaaattgctcccggaagggacggacaccatggcgctggatgggaattaccgtaaatcgattaccagcacatttacctgtactggtgacactgccggactcttgcaaatgcaattggccagtctatcaggaagctataaagcttataacggaaccgatgtgattgagatagacaaaggtatgcttggcgtcgaactgttagtaaatggcgctccgcaggcgtcggggaagtggttcaccatcgaccaaagcaagccacccacgcttgaggcagagttggtacaaatcagcacaacgaacagcaaacaggtgacaaatggcgatacgttcacggcttctgccacattgcaactttcgtttaattga

SEQ ID NO: 148017 - DNA, 603 bp, Enterobacter cloacae
gtgaacggaaaagcattttaccgctactcgcgcacgtgtgcgttgagtctgctcctgagcggcagcgtggcgagtgatgctctggctgtcgatgactggaatgttcagggtgagaatggacagttgcacgttcacggcgttctgcgtaacggaagttgcctgatcagcatgcgttcaaaactgcaggatgtggtaatggataactcggcgctaggggcgatgaaacgcccgggcgataccggtaaaccgacacagatcgtatttcgtcttctgggctgcgaaagcaccggtggcctgcaacgtagtggtcgaatagggccattgtcatgggatgaaacccaaccggtggtcacagtcagtttcgtcggcgcgacggatcctgacgatccgacattattactgatcgccgggatgtctggcgtcggccttcgcatccttgacagtaacggcagaatcgtaattcccggcactcgcggcaaaccgcagtttgtgacgacgggcagtgatgaactgacctataccgttatccctgttcgtaccatcgccccgctgattgcgggagaatttcgcgcctcagttgatttcggaatcagttatgactaa

SEQ ID NO: 148018 - DNA, 2277 bp, Enterobacter cloacae
atgaaaaaagtcaataaaaccatctttctgggcaagttacaccctgtagcgattggtgtatttcttgcgtttcttgcagtcaaaggcgttcacgctgaagagaatgtcgaatttaacactgatgtactcgacattaaagagcggaacaatgttgatttgagccagttttcccgggcgggttatttaatgcccggtaagtatcagcttacgctaaaggtcaataaaaccgacataccggatcagacggtagagtatttcccgcctgaagacgatccgaaagggagcgaagtttgcctcacagccgagcatgtcttacaaattggcctgaaagagtccatcgttaagggtgtttcatggtggcataacggacagtgtctggatcttcattctctggaaggcatggtagccagagccgatctgggaacaagtatcctctatctcagcattcctcaggcataccttgagtatacggccgaaaactgggatccgccttctcgctgggatgagggaattccgggcgtactatttgattacaccgtcaatgcaacgtcgtcgaaacaacaggaacagcgttccagttccgtcacgggtaacggcacgactggcgcgaatttgggtgcctggcgcctgcggggtgactggcaagcgcaatacatacgcaataccggaaatgagagtcaaaaacagcaaagctgggactggagccgggtttatacctatcgggccatcactgcactgcgggcaaaactggtgctgggagaagactatttaaattcctctctgtttgacagtttccgttttaccggcgccagcctgtctacagacgataaccagttgccgcccaatctccgcggatatgcgccggaagtggtgggggtcgcgaagacgaacgccaaagtgactatcagccagcaggggcgcgtgatttatgaaaccactgtcgcgccaggtccgtttcgtatccaggatctcaactcggcggtatccggcaagctggatgtcaaagtggaagagcaggatggcggaacccagactttccaggtcgacaccgcctccattccctatctgacgcgaccggggctagtgcgctacaaaatagcgatgggcaaaccgtctgattatgaccaccattctcaggggccaaattttgccactggcgaagcatcatggggcgtgaatagcggctggtcattatatggcggaacgctactggcaggggactataacgcgctctccttaggggtcgggcgcgatctgttgatgtttggggcaatttcctttgacgtcacgcagtcccgggctgcgattcctaatcaggacacattaagcggtaaatcttatcgcgtcagctattcgaaacgcttcgatgagtttgacagccaggtgacctttgcgggttaccgcttctcagaacgtgactttatgagcatgtctcagtatctggaccgccgctatcacaacggcgataacggtgggcgcgataaagaactgtacaccatcaccatgaataaacagttccgcgaacagaacatgagcgcgtttctgaactatagccaccagacttactgggacagggaagcgacgaacacctggaacgtttcggtatcgagcttttttgacgtcagtcggtttaagaacatcagcctgacactgtctgcctacagaactgaatatgacgattctaaagatgatggcgtctatctgagcttgtctgtgccgtggtccaacggcgcaacattaagctacaacagtcagtacagcggagacagcagtagcaatacggtgggttattaccagcgcatcaatgccaacaattattaccaggttaatgccggcagcacgactgacggccgaggtaccgggagcgggtactttacccatgatggcgatagcgcaagtaatacgcttcagctcgcgttacaaacccgcgtcaaactcttttaccgcccggaagcgttgcagttacaaaacgggatggagaacgaggccgcgaaaaaactcaccttaactcgtcagggtgaaggattccagttaaccaatcccacgccttactacctgacgattgtcgcagcagcgacgtcagagaagagcggtgatattgagagttttaaacctgtaatggtcgcgcctaaagaaagcattgcactgggcataaccgcggcttcactgggctcacatccggtactgacctccgtgaatgattacggtggtcggccgaaacttgtttttaactgtgcagggaatacctgttcagtggaccatgttaacgcgggctaa

SEQ ID NO: 148019 - DNA, 552 bp, Enterobacter cloacae
atgattgtattatctggacttcgggtgattatatttccctgtatattgataccctgcatagcggcggcaaataatccccgccatgcgctggccgatcaaggccacggtattgtcaatatgcagggaagtataattgataccccatgcgctatcgccaccgcggatcgtgagcaaagcattgaaatgatgaccacgaccgtgggtgaaattattcacaacggccgtggaaataaaaatcccttttcgttaacgctggtcaattgcaatctgcatataaataaggatgcgcaaaccctgtcatcccatttccagacgacgtttgatggtccatctttagatggacttttttccgtggacggcgcctcaggcgtagggattgaaattacggatgacgccggaaatgtggcgcaacctgggaaagcgctccctccgggtacattgagcaacggttcacaaattcttaaataccagttgcgtcttatgagtaatcgcgaccgcctgaaagtgggtgagtatacggccacgatacgcttcaaagttgattacttttga

SEQ ID NO: 148020 - DNA, 570 bp, Enterobacter cloacae
atgaacccaaatgggcaatatcttattgaagagagttcttatatgaaggcaaagaaaatcgctctcgcgattgcgatgatagctggtgctatgatcgcaaatgcgaatgcaaaagatcagggacatggtaccgtaacgtttacgggttctattattgatgcgccttgctccattacaccggacagtgctgatcaaaccgttgatttgggtcagatctctaacctggcgctggaagatggcggtacctctattcctcaggttttcgctatcaaactgcaacagtgtaataccgaaaccaagaaatcagtgaccaccacgttctctggcaccgcatctgcagctaacccggatctgctcggtattcagggcaccgcgaaaggcgcttctgttgagattaccacggacaccggtacgccgattaaactgggccaggcttctccggcgcaggcactgctgaatggtgataacgacctgacgtttgctgctttcctgaagggtgatggcgcgtctgcgacaatcgtcccaggtaaattccaggccattgcaagcttcgctctggattacccataa

SEQ ID NO: 148021 - DNA, 1071 bp, Enterobacter cloacae
atgacaactaaattttttgcaactcctcgcatacaacaactaatgcaaagctatactcaagaaatcgaatcaatggaaaaccccaatgattttgaaaaaaacagaaacaacctcattacatgtatttttaatgttttcctgagctcaccagaggaatgggatgaaaaaggaagttttaacattcttcatattggtgaagcctttacaaatgaacttgaagacaagttattttccaatgagtccttgaatttaatattcgccatatgctttagaatttgtgtagagccaaccatactcacaaccacaatgaataatccacttagcatcattggccaaatcaaagattttggaatacacagacatgacgaatttgatgataccagtaaaggccaaattaactacgcattgcgagaaatgcctttaaacatttttagggatgcatttaaaagcgatgaaatccagacatttaaagattttatgagtaatgtcaagtcatcaaaagaattcgcctcagactgggagggatacatagaagacaaaaagaaacaagtcgaggatatcaaatcaacacttgaaggatatgaaagcgcttttaacttcgttggtttgttcgatggatttaaaactctaggtgaccgtaaaaataaagaattatttttatctcgaatcctactattcatacttgctcttcttatcccatgcccacttgcacttgaatttattatttctttaaaaataagcaccccagtaacattcactgataaaattaccaatctcatcccgctcatatcactaacatttatactaatttattattttagagttgcactcacaaatcacacatcgttgaaagcacaggccttacaaattgacttaagaaaaagcctttgccaattcatccaaagttacgctgattactccaagaaaattaaagaagcaaaccaaaactcacttgcaaaatttgaggatgtaatattttcaaacatcattccaaaccaagacaaaatcccatccacatttgacggagttgaacaaatagcctcactcatctcagcgataaaacccaaataa

SEQ ID NO: 148022 - DNA, 876 bp, Enterobacter cloacae
atgactacttcgcttgccagatgtaaagcgccagacgttcagcgcaccttcgctgagctggctgccgaggcaatgtatcgggaaattcgcttaaccccgaagccgggtctggtggatcgcgtaaacagcggggcgcatagcgacatggattttgcgctgttcatgaccagcattgcggcgattgcgccctggttctcaacgttctttaacgttggcagagagacggctcgtcttgctggcccgcaaacgctgcgagccataagaccgaccggcctggcctgcgagcaggcgatgtttaacgcgaccggcggggtgaatacccataaaggcgggatcttctcgctggggctgctgtgcgccgcggcgggacgtctgacgcaaagggatgaaacgctcacgcagcgcagtttatgccgcgagacccgcattatctgtaccggcatcgttgagcaggagctgaaaaccactggcatcgccagaacgaagggcgagcagcagttccagacatacggatttaccggggcgagaggggaagcggcaagcggttttatgaccgttcgccaggcgggtctcccgcacctgcacaccgcgttaggtcagggcgaattcgaagacgtggcgctcttaagaatgctgctgggtttgatggcggcgaatccggataccaatctggtttcccgtgggggaataaaaggtctgagctacgccagacgctattcgaggcggttattaaaaataaaacgtctcccggcggataaattggttaacgcgctgctcagaatggacgcggaatttattaaacgcaatttaagccccggcggtagcgccgatcttatttccgttggctggctattgtcgcagttgccacccgaataa

SEQ ID NO: 148023 - DNA, 1032 bp, Enterobacter cloacae
atgtcacaacgtaataatctggatttactcagccgtaaagaaggaatgtgtttgttagagcaaagcatgggttttgtatggcaggcagcacttcgggctgtcgcggtattaggcgttgcagatctactggctgaaggaaagaaatccgttaagcagctggcgaaggagcttaatgtcgatggcgattatcttcatcgaatcatgcgtttattgtcttcgcgtggggtgttcaacgaagtatccgaagcggaatacggtcttagccattcagcacaattcctgcgttccgatcatgaattttccttgcgtgcggcggtgctcatgctgacagaccaaacattctggcagccagcggccagaatggatgaaatattgcaaggtaaacccgtttttaacgaattgtttggcaagcctttttacgattactggcagcatgacgacacggcgacgggtagcaatatttttcacgccggtatggcctctatgtcatccgtagagaatgaagcgattactgatagctatttgttccctgaaaacgctgtcgttgccgatatcgccggtgggctgggtaatttattgctggccgttttacgtcgaaatccgaccttaacagggatcctgtttgatcaaaaagacgtgcttgcgcgcaatcgactgtcactattgaatgataatcgccgatggaagacggtagagggtagcttttttgaagcctgtcctgcagcggacatttatctgcttaagtatatcctcatggactggcctgatgagaaggcggtacagatacttcagtgctgcagaaatgcaatgaaagagaacgcccgcttattaatttttgaaccgcttattaaaaaagaaaataatgagcagggacgatttgaaattgaccttcttctgttaacaagctttgatggcgggcgggcaagaacagagcctgagtatcaggtcttgtttgaacagaccaatctgaagctgaacaaaataatagatacccgttcctatctgtcgattttggaggtcatacctgtctga

SEQ ID NO: 148024 - DNA, 450 bp, Enterobacter cloacae
atgagaattcaaactattacactggcggcgctggcgtttatttctgcgccttcctggtccgcttttcaggagcgcgaatacaatacatggtatataaaaaatgccgttctttatgatatgacgcagacctcagaaggtttccccgtcatggtgagtatttctcaaccggcccggcgttcggccaatctgctggtgtcctacatatcccctggacaatgtggtgcgaaccggcaagagcttaacgtcaatggcaaggtgcttcctgcacaatatcactgtgttcaggtgggagagtacagaattgagcatttttcagtactggacgctgacagcgttaatagtatggtgacacatttgaaatccgattttaccgtactgcttcaaaatgacatcaaggtttgggcggcaaacattaagacacccatatatgggctgacgccgagattttaa

SEQ ID NO: 148025 - DNA, 315 bp, Enterobacter cloacae
atgagcttctcgtcgaaagtggagtttttccagcagatttacagcaggcgtatttcgtatatccacaacggcgatgagccgatgctttgcataatgcgtaaaaagcagcgtgataacggcattgagtgcttcccgggcataaccctgcttctgatatttcatatcaaaggtcatacccagttcagcctgcctgccctcatcaaaaaaatgaacaccaatatcacccgccactgccccgtccgtttgccgttcaacaataatctgataccacgtatcatcgctgttaaactcaagaaggatctgctgagcatataa

SEQ ID NO: 148026 - DNA, 342 bp, Enterobacter cloacae
atgaccctcaatcgcttgtgttattcacttctgattttcgctgcaatagctagccttcttacctcgcatccgttgatcatctggtttctgctgattaacgccctgacgacaggtatgtatggcgccgataaaatggcggcgcgtaaaggtttgcgcagggtgccggaagtcacgctgctggtgtttggcgcgacaggcggctggcctggtgccattgtgggccaacagctctttcgtcataaaactcaaaagcagcccttcaaaacctactttgttatcagcattttcgtcagcatcgccgtaatggtgacggcttaccatttctcttcttttgcttcctga

SEQ ID NO: 148027 - DNA, 1524 bp, Enterobacter cloacae
atgcgccgtatatcgttttatttagctgtagccacgacaatttttatgctgggcgtttttattatcaatttacaggtctggtattctgcacgggcagacagtctggcaggggcgcgctacgtcgtcaggaatatgaatgttattcttaatgaagcccgcgatgcagcccggatagcgatgcaacttgctgaaaatgaatgcgatgctgaaggacaatatcggctcggcaccgaagctgcgttacagccacacctgagaacgatcgttattctgaaaaaagatgcggtctggtgctcttcgttgccgggaaaccgcgtattgttggttaacggctcagcgctgcctgaaacaacattgctgctcgttcccgcgaaaagtacggtcaacggcctgccggttcttttataccagacacagcatgccggaagccgaatcatggtgagcatcagtgacagccatatccgggatgcgctgaatatgccattacgtggcgtggcgtattcactgcatgtcggcaatcgtagcttaggccaatccggcgatgtgatgacgccagtccatgcaaacaaagatgtactcagggtaaaagacgctgattatcctttcgcgattcaatttaactctccgcctttttttagcctgacgagattattcgaccaggccggtggagtgctgttatttctgctgctcatctcctctcttcctgcttaccttctgcagcgatatctctctaaggatatttcgcctgaggaatcgctgcgtattgccatctacagaaatgaaattattccctactaccaacccgtagtaagcggtaaagagggaacgttgcgtggggtagaagtgctggccagatggaaacacccgaagtcagggtttatctctcccgcgtcatttattcctctcgctgagaaatcgggcttaatcattcccttaacccagagcttaatgcgtcaggttgcatcgcatatgaattcgatttctaccttgttacccgaagggttccatgtcggtattaacttcagcgcgtctcatattgttgcctccacttttgttgaagagtgtctccactacaagcgtagctttattcaacaggatcttaaccttgtcattgaagtgaccgagcgagaacccctccatgtcgatgaacatctcgttaagaccctgaatgcgctccacgagattggttttgctattgcactggatgattttggaaccggctattctggtctgtcttacctgcaggatttgcacattgattacatcaaaatcgaccaaagctttgttgccagggttaatgccagtgcggactcaaccgttatactggattcggtactggagctggcaaaaaaattgtcaatcagtattgtggcagaaggcgttgaaacaccagagcagctggattatctcacgcgtaaccacatcaattttttgcaaggtttttacttcttcaaacccacaccgtttaaggaactggtgaaagttcttttgtcgaagccaaaagttaaggtgaaagtggagtga

SEQ ID NO: 148028 - DNA, 1860 bp, Enterobacter cloacae
atgcttgagattaacacaagtaagattgttaacaccgttactttcaccgtggataaaagcagtattgcggaggctaaaaaagccgccgatgaccttcaacgccattttaaaaagctggagaatccgaagattcgtttcaaggctcaaaagcaacgaagagctaaagcgcgtgaacaagttgcagatgctaaggtttctccttctaagagcaccactgacttaaagcagcaacgccaggcagaagaggcagggaaagcgcaagccagggaagcggcgaagattgccaaacgtaatgaaaccgctgatttgaaatttcgtagtgctaatctccagatgaaaggtatagccgggaaatacggcattgatcctgcgaagcaataccagttttcccgcttcgctaaggaacagacagagcttttccgtaacggtcagatcagtagccagaagatgaactatgagctacgcgaacgcatagctcttatgcgtcgtgaagcagcgttacaagctaaggtgacagcttccactcaggctcaggcggcggcaatacgccatgctaagaaaacagactatgcaggggctgcaaagggtattaaagaaagaggtataaacggcatcatcggcggtggagtgggcttaatcggggccactgctgcatttgctggcggagcaggtgtcctgtctcgtattcgtgacaaagggaatgagaatctcgacctggtgagacaatcggctcttgttaagactaatcctaatgcaatcaagacgatggtagcatgggggcagcaacacggcgtagactccgctaacacgtctaaggccgtcgataacatgaaagatgtacgtgagcgtcttgctatgactgttacaaatggacagttcaaagatggaaaatggacaggcggcgacggcgggatcacaactatcatgaataagtttggctggtcgaaggagcagatcgctaagtatcaggataatccgttagatttcttacaagctactgtgaatgaagggcagcgtagaggctttagccaggcccagattggtaatttgatcgaatcattaggtgatgatctgatgcactacaccgatctattcctgaataatggtgcagagtttaacaagacgctaaaaaccctcgttgatagtggccagacgctgaacgacgaacagatcaaacaaacctatgcttacggcgatctaaccgttgcaatgggtaatctgatgaatggcgttgataacagcctgttcactggcttcatgaaaggttttgctgatggcggtgatgacctcgtgaagaacaccaaagtgatcaccgaatcggctggaatgcttggagagggattaggagatctggctaaacaggtgacgggctttgttggtgagatttccggcgtagtgtctgatctgaatgctgggcttcgctctcgtttccctgattggtttgctgataaagataagccagcggctcaggcggtctatgatggcgtcacaggaagtgctaacggcgcggcagggtggattcaagagcaaacgggttggaatcctcagacagtggctccggctattaaatcgtggttaggtattgatgatcagcaagcagggacagcggcgaacgaatataaccttgcaggtgattctctgcgtgattctgcaatgtcactcaatagcggcaatccaccagcgtataatctgaatcctacatttaacctgacggttgcaccgtccgtaccactgacaatccaatccgacacaggcagattagccgactatgtagacttccaggcgagagcttctcaagccagcttcgcacagtcgctaacgctgcaaatgtcgtctggtcaatcgtctacaggtgggtga

SEQ ID NO: 148029 - DNA, 333 bp, Enterobacter cloacae
atgaataataaaactatgaacaacgtgaacactcttattaactcttttcacgatatctggcatttaccagccttacagcttgttaataaggcgtggcgtgagagaacgccctccgcgctccttgaagctgtgcaatacactgaacaggcaatcaccgcccttgaacactggaatgctgctgtagaacacttggtgcagatgaactcggatactgtcaccgtggatcaggcgtggcgcattgccaatgacctcgaagagctggcttgctccttccagtacatcaccgttgaactcggagagcttgccatccagatcgcagaagaatgcgcataa

SEQ ID NO: 148030 - DNA, 156 bp, Enterobacter cloacae
atggctatcgcgaacagacagattcatgaagaatcaccccatgaagagttggatcgcttgttggatgagcttgaactcacacaggagcaacgggagtttatcgagtccatgcggcaagaggatgtggacgataacaacgaggattgcttgctttag

SEQ ID NO: 148031 - DNA, 432 bp, Enterobacter cloacae
atgagtttaaaaagtaagttatggtatttctggggatgtatggatgttctggcggtcttactttactgcattaatgcactgcggcaggatagagttccgtttatttcagatattatggcttttaacagcctgacgaacgatgtctcaggcggcggactggtaacgctctttttcattttagatctgattcttttactatcgcttattgcatcagcctggtttttctttaaaagaaagacctacgcaattaaatttgcactgtttcaggaagttttccgcctcatctcgttcagattttcagtgccactattccctgtattagtaagcatgtttggtgtttcgaatgtttggctaaatttggggttgtttgtgttgtcggaatttttaaagatttattcgctgatttatattttaaaaaaacagcctgcataa

SEQ ID NO: 148032 - DNA, 804 bp, Enterobacter cloacae
atggaagtgtacgatcttcgaaaccaaaggcttcatccaaaggaatttgaaaagattgtctctcctgtttatgcccggagcgatgtaggacgcgagtttgttgtggtacgtggggtgtcaaatcctttccacagcatagagggtttgacgttacgacatcgctacgaatttaatcctaacgcggtttttgatccgctgtatgcacaaaatcttaataagatcgagcgcttaattgacacgggtgcagtagtgttaattgaccggcggcaacggacaaaggcgacttatccttttttcatatcagaatcaggagagttattttgtgttgatgaaacgcgttataactctgcttatataaattatgtccttgagcgttatcgtaataatgttgctctgttcggcaaacccgcgccaacgagagatacatttgttcctgtaacggctcactatggtccgggatactggaaaacggtagacaatgattatcatggcacgaaaaatgttctggtaatggtgataaaccgtttaacaagcatgggggatgaggggcgagtttttggatcggacggtaaagattatatgaatacctcacgtgacaaaattcaacaatggacccctttacccgcagagttggatagcacttcgcgggcattactctctgaacagtctgtcatcagacgttatggagaaaagcgctctatttaccaaaagtatcaggaaggggatgatgcctgggctattggcggtaaatcatggcattggatcccaggagtaagagaagaagattatgagtttaaaaagtaa

SEQ ID NO: 148033 - DNA, 519 bp, Enterobacter cloacae
atgaaaggattatgcacaggtctgacagctgcagctgtatttatggcagcgggttgccaggcgaaagagccgccgacacaggtgatttatcggtttgacgatcaccgttacctggagttaaagggatgggactgtgaaggtgaactctggtatacggatacactaaaaggtatccatagccaggtatggagccaatattatcggatattcaccaggaaatttattcatccttctgagcgttacatggctatttcgtcgtgggggggggatttacggtttcaaaggattacggaaaaacctggagcggggctcattattcgcctggcgaaaatgagccaaatggtgatgaccgaccaccttacgatgacatcctttccttcacagtcgtcaatgatcagggttttttacagacgaaacaccggctgtatatgtcgtcaaaaccgtttgatgacccgcgtactctgcccggtggatctgggattacatataccgcgtcagatggcgctatacatcacctaa

SEQ ID NO: 148034 - DNA, 696 bp, Enterobacter cloacae
atgaaaggattatgctcaggtctgacagctgcagctgtatttatagcagcgggttgccaggcgaaagagccgccgacgcaggtggtttatcgttttgacgatcaccgctatctggaactgaaaggttgggactgcgagggcgaactctggtatacggatacgcaacgaggcattcacaccgagcccgtcagccagttttaccggattttcactaagaaatttgtccatccttcagagcgttacatagcaattcctacctgggattctcctggaaccatgatttccaaagattatgggcggacgtgggtacctcaatttttttcagtaggtccaaatgaaccagatggaagtaatcaaccgtcctatgacgatattatttctttcacagtcgtcaacgatcagggttttttacagacgaaacaccggctgtatatgtcgtcaaaaccgtttgatgacccgcgtactctgcccggtggatctgggattacatataccgcgtcagatggcgctatacatcacctaaagcctaattcttctggtcctgcctgggggctggattacatcaccaaacaaggtctgaaagaagatattgtccagtttaaaacgaactatcaggacctccccgataaagtgccggaagtaaaaggttataccggctgggatcatatgcgttgcgatatggatgcggggcgataa

SEQ ID NO: 148035 - DNA, 711 bp, Enterobacter cloacae
atgaatataaaccacacattaggcatcgtcttaacggcgatgctggtaatttctggttgccatgccaaagggacgccaacgcaggttgtataccgtttcgatgaccatcgctatctggagctgaagggatgggactgtgaaggagaactctggtatgtcgatgctaaaaaaggcattcattcgcaaatagccagtcaattttatcgaattttcacgaaaaaatttgtgcatccttcagaacgctatattgccataccctggtgggggaatgtaacgggtggtttttcagtatcgaaagactatgggcaaacgtgggtaaaaggtggtgcatcaatgtcaccgggagaaaatgaacctgatggaagtaatgccccttattacgacgacgttctttctttcactgtcgtcaacgatcagggttttttacagacgaaacaccggctgtatatgtcgtcaaaaccgtttgatgacccgcgtattttgcctggaggggcgggcattcaatatgagcttgaggatggaacaaaaggagatataaaacccggaactgcggggtgggcctggggaatagtttatatgactaaacaagggctaaaagataccgttcaggaacttcagaccagttggcaaaatcagcctgacaaagtaccggaagtaaaaggctacaccggctgggatcatatgcgttgcgatatggatgcggggcgataa

SEQ ID NO: 148036 - DNA, 2511 bp, Enterobacter cloacae
atggcaggacaatcagacacggttcaatatcaggatacactgaatcgttatttactgtattttcccagaaataaaaccgttttatctgatgttcactggtttagcggggaagaagaactcagtaaaccttaccgttatactattcgctttaccagcccaacaccgaacatcgcggttaaagacgtccttaaccagatggccgagtttattctgcgtgccccgaatccgagagcaggctggcatcatcaggatccctggctgccggtgcggcagataaatggcgtaatcacgtcattttcccgtctgaagtcatccgccgatgaaacgctgtatgaatgtgtgctggagcatgaactggccttgatggaccgaaattaccgttcggccgtgtacatggacatgaccgtgcctgagcttgtcacgaagttaatgaaggacagcgggtattttcagggttacaacatcgatttcgaccagctgggcttcagctatccgctgcgggaaatggttatccagtggaaagaaaccgatcttcagtttatccgccgcctgctggccgaagtcgggatctggtttcgctttgaaaatcacgacaaggtaccggccgaaacggtggtgatttttggcgacgggggccgtcgctacgtattcagcgataaaaagctgccatacgttcctaattcgggcatgaccagtcatgaagagtatgttaccgagctcgaagagcgctaccagctcattcccgaaaacgtgctggtccgcacctacaactatcgcgatccgttttccccgcaggcggataaaactcttaccgacaacgacattcctgacgggataacccgcggcaaacagtaccactacgccgatcattttctgagtgaaggcgacttttatggacaggaggcggaaacggctacgttttacgcgcgcctgcgctatgagcgtcagctgaacaatcagagcgtgctgggggtgacgaccagcgatccggaactgctgccgggcgtgatgtttaacctgacaggagatattcctgccgggtttaagcccggattcgttgtcaccacgatgacgctctccggcagccgcgcggagcactatcgcgccatcttgaagggcattccttatctgcacggctacagctaccgtccggactatctgccgcgtccggtgatagccggaaccgtgcccggccgcgtggcggccattaatcgcgatcccacgtatgccggagtcgatgcgcagggccgctaccgcgtgaagtttgattttgaccttgatgaaaaacgtgacggctttgaaagtgcgctgatgcgtctgggcagaccgtacggcggggatgtgtttggttttcacttcccgctgctggacgggacggaggtggcagtcgcctttgaaggcggcgacccggacaggccgtatatcgcgcacgtcatgcatgacggcagccatccggatttggtcacaaaccgcaacgatacccgcaacgtgatccgcacggccgcctcgaacaaaatccgccttgaggatcgccggggtgaggaacatatcaagatttccacggagcacggcaagggacaggtcagcgtcggccacctggtcgatgccacggggaaaaaacgcgggcagggcgtggaagcccgcactgatgactggatggcgctgcgtgccgccaaaggggtgctcattaccacagaggctcagccccgcgcgcagggccaacagctggatatgacggccgccatcgcgcagctggaaaaagcattgtcgctggcgatgacgctgcaacaaagcgccttaacggccggtgccgggaatgtggataccgatcggcaaaaccagctggccctggtgctgaaccagctgacagggccgggcattctggcgtatgccgaaaaaggtgccgcacacgtcaccccgcagagcctgcagctgtccgccgggaaagacctgatcgcaacagcaggtcaggatgccagcgtgaacgtggtgaaaaaattctcgctggccgtgggggaaaaactctcgctgttcgtccgcaagctcggcatccagatgattgccggtgccggggatatcacgacgcaggcccagcgtggcgccatgcacatgctctcgcagaaagatttcacgatggcgagcactgccgggcagctgaacggcagcgccaaacagggcatacagctggtctgtggcggcggcgggatccgagtcagtccgaacggactggtcaccatcttctcgccaacgggaatcgaactgaaaggacccaacctgaagtatgacggtccggaaagcgcgcaggtcacggtcccgccgttcaataagggcgcattcaaattccgctaccagctgcacgccggagacgacccggagcaaattctcgcaaacaaaaaattcaggctgaccagctcggccggaaacgtggttgagggtgttacggacagcaacggtcattcatcgttactcgatgccgatgacctggatacctacaaaatggagttactgtaa

SEQ ID NO: 148037 - DNA, 1086 bp, Enterobacter cloacae
atgcacgtcgtttacggagaaactattaacgatgtaataatgaagatcctagaaaaagtgcttactgatggtgtcagcatatcgactaggaacggtgatgctataactatctacgatgttagtatgatcttgagaaacccaagatcaagacatttaagtttagttggtcgaaagaataacatattctctacttttgctgaagccatgtgggttctcgctggagataaccggattaaaccatatctaactttttttcttccacgagcacctgaatattcagatgatggggtcatttggcgagcagcttatggcgaaagactctacgctcatgggcaactcgaaaatgtgatacaacaattcaaaaaagatggcatttttaccagaagagcagttattagcctatacatgcctgaccgagacactaatgacagtcttaggcatatatacaacttagagaatagcgtcgatataccctgtaataacttaatacacttctttattactccagacaaaaaattaaacattaaaataattcaaagaagtggagatctgatatttggcgtaagcaatataaatatatttgaatttagtttacttcaagacattgtactatctgtattacagaaggaagtagatagtcaaattacgatgggatatttgcatcaatcagtaacaaaccttcacatatatgaatgtagaataaatcaagccaacgagatacttaaaaacaaagaaaaacaagtaacaaatttaataaatgacgatgatatatcattcccactttcactaattggcataaaatcattattcaatgatattgtttcatttcttgatataataataacatccgaccctcagaaaataagtacaatagataaggagagtgagaaactaaaaaaaatatttgtaaaccatgcaataaatactgaaagaaacttgctctggggatacgcagaagcggcgttgtcatatatatatcaaaaaagatttaatcagccaatatcgttgacagctgcattaagtaatgatttcaatttaagcgtaacttcaaattattttaataaaaatagtaaggaaagaatatga

SEQ ID NO: 148038 - DNA, 1128 bp, Enterobacter cloacae
atgaaaaaattcccgtttcccctgcttattccgctggcgatgctgttgctggcggcaggattctatattcacaactttgtgacgtttgttcatacgccaccagaattgatcgctaaggaaaaacgtatggttgataccctgtttgcctccactaaagcccagtgcgtggggcgctatgtgtttgaggttccgacctcttttgaaaacacccggaccgaagatgccaaaatcaatgagatcagcatcagcagcaagcgactttatcgcccggcatttgaacaacgtatcaggctacgagagcaggagttgctgaacgggcatacagtgaggaaagtggatcagcctttcttaaagcaggtgtaccggatcaatgagaatgcggtgatctttgaccggaatagaaatgggagtgaaggaggatatggccgcactctggaagggcacctgtatatagatggggtagcgtttatcctcagtcaggatattatcgatttatcagatcctaaatatcaacaagataaggaggattttatcaatgctggtgtcagtcctggccatattaataacaaacctcagaaactagcagagctacaggacttaatgtcccgtctgagcgggcgaaaaaatgatgaaatcccgacacagccgggcacctgtatttcagaagggtttatccgcgacgggaacggtaaaccaaaggaagacatcacctttatttatccgcacagttcggtattttcttttatcgtctggagcaataatgctctgaaagaaagcaccaccatgctggagcgaaccggggaaattcagtcttatatcaacagcattaatggacgcacattacgtaagggtgaagcgcagattgccggtttcacgggcaatgaatggctgattaccgccccaccaaaaagatcatccgataatccctcagcgcagctcatgtttacagccgtagcgaatgagacaaatgcagacttcatgcatcccagtcttgatctgacactcagcaacgaaatcccacccgaaggaagcgacactgctcccccatcagcctatagcgaagctgagcttgtggcgatctgggatcgcattacccgttcatttcgtctcagggacaatgcgttctga

SEQ ID NO: 148039 - DNA, 1530 bp, Enterobacter cloacae
atggatgactctgaaaatcgtgcttatcatcggcccatctgggacgacaatggacggtttcattatgaattgacctcccagccaaaagaaaataattacgtggcggtttgccttatgccgccgcacaaaatcattccggttattttcattccaggagtgatgggatctaatttaaagaacaaagagaacaaagtctgggagtacagctttgaatcactaaaaaaatggccgttggcaggcccggagaaaagaaaacagcttcttgacccaaaaacaacatttgttgatgacagcgggaatatcttcaatgagggggctgacggtaaaaagttcccatcccggtgtgtgcggggctgggggagtgcgttttacatgagctacggcgaggcgcttgaccggttacagtacctgctcagtgacgtcgatatcctgttagataattatttccgtgaagcgcaattacaaacggcgcggcagcgttttaccggggtcaggatcggtgacgaacctgcagagcaggtgctgacggaagaagaagcggcgcacgggcaccactttttatacccgcttcatgtttttggctataactggctacagtcgaatgctgattcggcggcgttgcttggccaatatatcagcaaggttctggggttatatcacggtcgtctggcggtggacaaagtcattctggtcacccattcgatgggaggcctggttgcccgacattattcagaaaacatgaacggtcagagcaagattctggggattgtccacggggtgatgccggaccttggctcgccagcagcttatcgacggatgaaaatcggcgaacggggaattaccgggataattatcggggacagtgccgagaagctgatgccggtgttggcccagtctcccggcccgtcacaactgctgccgggcaaggcttacggtcctggctggctgaaaatcgagagcggcgatacgcaacagtctctaccaaagagcgatccgtacacggaaatatacctgaacaaaacggactggtggcggctatgtgataaggatttgctgctgggggatacgaatagtgagtggcaagattttgtttaccggataaagaatccagttaaagaattcattgagaaactgaatggcaaataccacccgcagacctggctgttttatggtgcgagtgcagacaataagtctgatgcttttctgacgtggaaagaacggcctgctctgcggcctgtgccggtgatgggctatccagagccatcgtcaccgacatatcggtatgatgcaggaacaacctttgagttgatttccgcaggaacgcccggcgatggcacggtgccagtaaaggcgatccggaccaggtcccccagaatttttggggtgctggcgaccaatgttgaccatgaaggggcctatgccgttgatcctgtggatcgctcccgttcagtttacagcgacctgtccgacgccctgatgttcacggtccgctcggtggtaaaaatcgtgcagcaggtgccggcaccatga

SEQ ID NO: 148040 - DNA, 1629 bp, Enterobacter cloacae
atgagtgcactcagaatgaagccgttgatcatcgctctgccgatggtatttggctgttcgattgctctgcaggttcaggcgagtgatacaacggctgcggtaaagtctctcgattcgatagcttcacaatctagtgaaataccttccttattactggagaaaaatgtcacgcttcctgaacctgttgtttctgcacaggagtcacgagcaacatctgtacctaaaagtgcccgctatcgtttgcagacctcgcaggcacaggcggatgcgttgaatgcccagatagcgacgatgaaggcagcgcaagagaaaaagatagcagagttgacccgacaaattttgcaggctcaggagagcgcgtctaaatcgggcgaagcccagcagcaattaaaagagatgcagaagcagcttgctgatatgcagacgaagtggcaaaacgctacacagcaactggaaaacgctaataaacggattgctgagctgtcagcggggcgtctggatgatgggcaggaagtcgagcagttgaaacagtctttgacagacactcagagtcaaaatgttgagctaacgaagaagattactgcactgtcagcgttgcaggatactaaagcagtggaacttgccacggcgaaaaaagcattagcggacagtgatgtaaagcgtgctgatgctgagaaaaagtggcaaagcgcttctcaacaacttgaaatggcgaacaagcgagtggtggaaatgaatgccagccaccttgaggacagccagcaagtcataaatctgaagcaatcattaacagagactcagaagcaggctgtggaactaaccaaaaaaatgaccacgcttaacgaacaacagaatgctaaaaccactgaactcgcggcggcaaataaagcgctaaccgagaatgaggcgaagcgagcggcgttagagaaaaaatggcaagaagcaaatagcaaactggaaagtcagagcaagcaactcgcttctctgcatacggagcctgagactcccgtccccaccagtaaagacgatatccgcgcttacgccctcggtgcattttggggccacgacgtgctgagtgcgatgaaaaaagtggaaagtgacggttttaccctttctcagccacaggtcatcagtggtgtcatggatatgatgcgagggaaatttaaaatccctcaggaacaaatgttggccgaattgaaagatatggataccagcgttatggccaaatcatcgcaaccttccacctctgaagatgagggcaaaaagctcatcgccgcctacagtaagaaaccaggcgtgaagcgtgctgatatggggtattactaccgtataacagaaaaggggcgcggggaaattaagaattctgatatcgttgccattgcggtaacagagagcttgtcgaatggtaaggtcattaaagatatgaataaattaggcaaagtgctggtgcttccgctggaaaagttcccgcctctgtttaaaactgcaattagcaagttgaacaataaaggcacactacaaatggttgtgccacccgagctggcttatggcaacgctggcagcccgccgaatattccgcctaattctacgatgatctatgacgtgaaaattgttaacgttacccactaa

SEQ ID NO: 148041 - DNA, 483 bp, Enterobacter cloacae
gtgatcgtcattagtagattgcgcgaaaaacatactataaatcatttgttttctttgctctttatttcacatctcttgatgttgacgggttgtcaacattctcaatccaatgaagttcgcgcaggttcggaaataccagcatcactctcttacgtaccagcacctgtgataacaccgaaagctcctgtgcctaagatagcccggccagagttaacatcgtccgaatcgggggcggcttcaacctgtcagcgagagctgatagtgttatcgaaagttaaccaaagactttacgcacagaaaaaagcagcctttgatgagttaatctcaagtgtgtctgtttacacggctgtacgcgaagatatcaatccacaaacgaaagataccatggacgctttctataaatttaaaacgcaaaaaatctgcagtgatattgagcaggctgtaaggcaggcgctcattaatcgcgtggagaactttaaatga

SEQ ID NO: 148042 - DNA, 1074 bp, Enterobacter cloacae
atgtataagctggatttcaaatcccaaaaaacctggggggcgctggcgtcgattgctgtcatcgctggggtattagcatccgtattggcgtggactgcgggttggttcggatctcgtaccgtcagtcagtcgttagtgtcagaaacaccgaaaccgtttccagccggctttcgtcgtgcgcacgggaaaggcatctgttttgcgggtacgttcacgccagacggtgcagcaacgtctttatcaaccgcacgcctcttttcccaatcaaaaacccccgttgtaggacgattctctattggcaccggtaacccacatgccgcggatacctcgacgaaaacgctgagcatggcgctgttgcttaaaacggatgacaaacaacaatggcgtatggcaatgaacaacgtgccattcttcgcaacacgggatcctgaaggatttctcgccatgccaaaagcgctcgcggtagatgggtctaccggcaagccggatccgcagcgccttgcggcatttttaaaagcgtatcccgaggcaaagaaatacctcgcgtgggcggcacaaaccccggctcccggtagcttttccggtgcgacgtttaacagcattaatgctttctaccttgtcgatgctcaaggccataaacagccggtacgctggatgatgcgcccgcacgatctgtttatgcctttggatgagacggtacggcagaaagtcgatcatgacttccttttcgaaggtatcagccagagactggcacagaaaccaatctactgggatatggtattgcagctcgcacagccgggcgatccggtggatgacccttcccagccatggccggacgatcgcaaaaaggtggtagccggcacgctggaagtgacgcgcgtcgaaacacaatccacaggcgcgtgccgcgacgttaactttgacccttcgattgttcctgcaggcgttgcggtgtctgatgatcccattttaaacgcccgctccgcggcctactcccactctttcagccgccgtgagcgagaaatcggctacggcaaggccaccgaagccgtgcaaaagcaggaggtaaaatga

SEQ ID NO: 148043 - DNA, 417 bp, Enterobacter cloacae
gtgaacaggatctatattctcgacacgaacatctgctcgttcatcattcgcgagcagccggaagcggtgctgaagcgcttggagcaggcggtgctgcgtggccaccgtatcgtggtctcggccatcacctactccgagatgcgcttcggtgccaccggtccgaaggcctcgccgcgcaacgtgcagctggttgatgcgttctgcgcccgcctcgatgcaatcctgccctgggatcgagccgcagtggatgcaacgacagaaatcaaagctgagctggctgctgccggcacaccgataggtcccaacaatacggcgatcgccgggcatgcgatcgctgtgggggccattctggtgagcaataatacacgggaatttgaaagggtaccgggactgaggcttgaagaatgggtgagataa

SEQ ID NO: 148044 - DNA, 462 bp, Enterobacter cloacae
gtggatagctggtatcagtacggctggttcagtaataaggtgaacggtgacgaactggcggaagaggacttcgacagcactagccacaccgcttctcttgagaagggttacgggtttaatctgggtgaagcgatggggcagcgctggattgtaaagccgcaggttcaggctatctacatgcattacgagcaggaaagccatatagaagataatggtactcgcataacgaacggaagtggtgatggcgtacttgagcgcgttggtacacctctgaccgctgtacttccgcaaggaaaaacaacgggtattcgtccgtttattgaagcgaactggtgcacagggtatcctgttgccgacagcatcacccttgatggtgcaaccatcagtaacgactcgccggaaaagctttatcaactgaaagccggtgtacagggggatttaaatgctaacctgcagatatag

SEQ ID NO: 148045 - DNA, 213 bp, Enterobacter cloacae
atgtacagtcagttgccgacccaactccggaacctacgcctgagccaactcctgccccactccggaaccgcccctggcccggcacaaattcgcccggaggtgggctcttatctggccaaccagcaggcggctcagtcaatgtttgttaatacgcttttcgaccgcatcggcgatcgctttaacaatgccgacggcaatatcgatgcagcctga

SEQ ID NO: 148046 - DNA, 951 bp, Enterobacter cloacae
atgaagcatttatttaagttgttcgttcttatatttttttcgatttttatgaaattgtgtgtggctggttgtactaatgtacagtatgaaaaattatcggtgaccataccagatattattataccacaaacccctgtcgtgggttcagttcttacaagtatagatatcccatcaacttctggtaaagcaaagtgcggtacggggacagcatattccaggtatcttacaggacaacctaccggccaaaaatacctgaacataaatgacatctatagtactaatattccaggcattggatttgctttatgttttagtgggtgcgcaactccagttagtgtaaacgggagttggcccgcattctcgaattctgtcaatggaaattggcccgatgtatattttacgagaccattcaccattgtattaattgtaacgggtgaagtgacctcgggtaagttaaatgatggcgtttatggtcaaacaggtatagataatactcccttagtggatattcaagtaaatgcttcaacgattaacagactgacttgtgaatcagataatcatgatcttgaggtgaattttggcgatgtttcactgaatgaatttactgcaataggaagcactacacagagcaaagaaatttcctttggtttaacatgtaatagtaatgctaatgtctcagtcactctggaaggacaaaaaaacacggagtcgtcatctgataatttgatagcgttgacaaatcctggtgactccagagttgcctcaggtttagcagttcaagtcctttacaataattctcctttaaaaataggcacacctgtgccgttacaaaacgtcaatgggaatataaaagagattttaccgtttgaagttcgttattatcagaccaaaaacgaagtaacttcgggtgatgcaaatgcaacggcaacacttgtgattagttaccaatga

SEQ ID NO: 148047 - DNA, 504 bp, Enterobacter cloacae
atgaaaaagataaatatcgttctgtctgctgttttattgatttcctctgtatcaggtctggcaaatactacaattaatatagttgggaaggtagtagctattccctgcatcgtgagtgaagagactatcagcaaagaagttgaattgcctgtaacagaagcccgcagcatggcggaacctggtagcggtagcggttgggtcgattttgagctggagctggatgattgtccgttttatctcaaaaaggcaatagctacctttactggtgttccggataaagatgataaaacaacctttaaaaatttgggtgacgcggccaatgtctcgctacagatggtcgcccaatcaacaacctatggtgacgccagtcagatgaaagttgatataaactcttcgacaaacaaagcttccttccctctttctgcacgaatttattcagcaaaaggaaatgctggaaaaggaaccttcaatactatagttggtgtaagcttcacttatcaatag

SEQ ID NO: 148048 - DNA, 537 bp, Enterobacter cloacae
atgaaattaattaaattcatatctactgtcagtctttctttgctggcgggatttatagctgaaagttcgtacgccggttccgacagtgttaatatcaacgtgaccggacgcgtaattgcgtctccctgcacgaccatcaatggagggtccgatagtttatcggtctcactgggtgaaacgatccaggcgacaacgctttcaaaaccggattcaggtacaccaaaagtgactttcgatttaccactgacaggttgtcccttgggaacgcttaatgttaaagctacattcagtggtacggcagataccacttcacccactatgtggaaaaatacggcagcatcaccagcagcaaatactgcagtggagttgagtacgcaggcggacagtacaatattaggcaacggttctacattgactgtgccagtttcagacggtaacgcaacatttaaaatgcaggcgagggcttattcttccgccggttcggtcacgccaggagatatcgattctacaatcattgtggcttttgaatatcaataa

SEQ ID NO: 148049 - DNA, 2529 bp, Enterobacter cloacae
gtgagcttattcaaacgtaaatggttagcatattttatagcaacatcaattgccggaataccgagcctcagttattctagggaatattttaacccttctttgcttgaagttgacaacccggaaatgaaggatgctgatttatccgcttttgaagaagggacgcaggctgccgggaagtaccgagtcgatatattagtaaatgatgatactgtggatacacgcgaagtagagtttaggaatataaaaaacgccaataatgaaactttacaaccttgtctttccgtaagtctgctgcagagttatggtattaaaacaattttatttccggcccttggaaaagatgctgaatgtgcagacctcgacgccattcctggggccagcgcacgatttatatttgacgtgcaaaaattggtgttgagtattccccaggctgcgatggccccacaggctcgtggtactgtaccacaagaactctgggatgacggtattaatgcggcactcttaaattacagcttaagcggtgacgaaactcattcaagagacagtaacagccatgacagtaacagccagtacgctaatttacgaccggggatcaacatcggaccgtggcggctgcgtaattacacaacctggaaccggagcagtagcggccagagcaaatgggacactgtttatacctacgcacagcgtaatgttgtggcactgaaaagccagctaacgttaggagatagttcaaccccatcggacatttttgacagtatctcatttagtggcgctcagatggcgtctgacgacgatatgctgccagacagcatgcgcggttatgcccctgtcgtccgtggtattgccagtaccagcgcgcaagtgattattcgtcagaacggttatgtcatctatcaaagctacgtctcacccggcgcatttgagataaccgatatgtatccaacaggcggttcaggggatctctatgtcactgtcaaagaaacggatggcagccgtcactcttttgttgtgccctttgcttccgtgcctgttctgcagcgtgaaggacgcttaaaatacagtattaccgcaggtcagtatcgttcctatgacagcgaggttgaaacacctgctctagcacagggtaccgctatttatggcctgccacatggtttcaccctgtatggcggtatccagcagtcagcacattatcagtcactggcgattggtataggtaaaaatatgggggcgatcggcgctctgtcggttgatgtcagtcaggctaagtcatcacccaaagggatggacaatgcaaaagggcaatcctggcgcatccgctacagcaaaaactttacagagtcaggcacgaacttcgctctggcgggataccgctactccacggcaggttattacggtatgcaggaagtgcttgattcctggggtgacagcagtgcgctgagcaaccgccgccggaatcgagccgaactcacattaagtcagaacttgggcagctccgcggggtcgctatcgggcagcattattcgggagaattactggaattccggaaaaacgatggagtcctggagcctgggctataacaatgcctggcacggtgttgcttatggcatcaactacacagttagccataactcggatgataacggcaagagcggaggaaaaatatacgacaatgaccggcagatctccgtcaacatgagtattccgcttgaatcactgctgagccacacccgggcaaattacagtatgaataccagcaagcaggggaacacgagacactccgttggtctgagtgggactgcgttgcaagggaatgcgctgagctggggtgttcagcagggatacgggagcgataatgtcggcaacagtggcagcataaatgcggaccatcgcggcacttatggcgaagccaacggcacatacagttacgataaagacagctcacgcgtcagttatggactgaacggtggggtaatggtgcacagcgaaggcattacactcgggcaaccttttggtgacaccatcgctctagtatccgcgccgggcattaaaggtgcagccgtcagtaaccagactggcgtcaaaacggattatcgcggctatacagtggtaagtaacgtatctccctatcgtaaaaatgatatttcacttgataccgactcactgggtgacgacgttgaacttgcacttaccagcaggactgtggtgccaacccgaggggcggttgtcagggctgattatcaagccaatgttggtatgcgcgtattaatgacgcttttaagagatcacaaccagccagtgccgttcggtagtactgtaacggtggtgggtaagaatagcgctcatagttttattgtcggcgatgacgggcaggtgtatttgtctggtcttggcgaacatgaaattctgaatgtgcagtggggtaataataacgataaaaagtgcgtaactgaatttactctcagccgtgcacaggaagttaagcaatcgcatatttatctgagtcacgaagtatgtaaaaagagttaa

SEQ ID NO: 148050 - DNA, 678 bp, Enterobacter cloacae
atgaaaacatgctttcagttcgctatagcgggagcactgattttatccgccataagcaccgcccaggcaggtgtagtggtcggtggaacgcgagtaatttacgacgctagcaaaaaggaggccacccttagcgttaaaaaccctgattccgtaccgtatcttattcagtcctggattgaaaacccggataaaagccctgcgaaagtgccgtttatcataacgcctccgctctatcgcctcgatcaggggcaaaagaatgtcatgcgtatcgttctgtctggagaattgccggaagataaagagtcgatgtattggctgaacgtcaagtctattccatcctcagagaaaaaagccaataccttacaaattgcgttaaaaacccgtttgaagttgatctaccgtcctcaggcgttgaaagtacactcagcggaagaaatggctgataagctgatctggaaacgttcaggtaacaggttactgataacgaacccaacagcttattacatgaactttaatgaaataaccgttggcggcaaaagcgtatctgatgtgacctacgcggcaccgggtcagacggcaagttttgatttgcctgaaaatattaatgcaggccgcatcacattcaagattattaacgactttggcgggcttggtacgagccactcagcaacgctgtaa

SEQ ID NO: 148051 - DNA, 528 bp, Enterobacter cloacae
atgaagatattaaaaattccctttgttttattaatcacaggtattggtattaataatgccatggcggtcgatggtgaaattaattttaatggatcggttatcgatactgcctgtacgatggatgtcgggactgggaataaaatgacggttgatctcggtgaagtggctaaatcatccttcacaggagtgggttctgaaacaacagcaacagaatttaatctttccgttaaggattgtccggcggctgtgaagtcagcaaccgttaaatttgatggcacttcctataacggtgataatactgcacttgcgttggatgctccggaaaccggtacggccgcaaccggcgtgggtgtccagattaaagacagcaaagataaagttgtttctctgttcgaatcatccagtagttatactttagctgagggggcaaatagcctgccattctatgccagctatgtacaaaaagcagctactgtcgttggcggtgcggcaaatgccacggcgcaattcacactgaactacaactaa

SEQ ID NO: 148052 - DNA, 267 bp, Enterobacter cloacae
atgcctcgtcgtgaggacagaatttgtctacgggcatggggtcagtccaattgttgccgccgtaccctcgtcgattggatcactttgatcttaattatgatgtggttcttgagtataaaaaagtacccgaactacctgatggtagccgcttcaaaggaaggaatagccggtagtgaagggagtataaataccagcgtacaggctgaatcttttgcgttattgttaacggtttgtattttttttgcacagagtccatttttgcactag

SEQ ID NO: 148053 - DNA, 273 bp, Enterobacter cloacae
atgcaaaccgtaataaatttagaatttgataaacaaaaagtgattgttttacactcttatgatgaattcaaaaaatggtatttacgtttttttgacatcaatatttttgcagaaggtgaggtgaatgcattgcttaatgagggaaaacctgagttttatccctgcataccgcttatccttgataaggatatgaacattgtttttattgatgctgcatctgttaaatactggtgcaaacagctggaatccataaatttaagacgaaaacattaa

SEQ ID NO: 148054 - DNA, 642 bp, Enterobacter cloacae
atggtagctactatgaacgtaaaatcaacccgtacagataccaaacatcttaaagtaataatggaaaaacttgagccatttttaacttataaagttcacaaaaaaaataaccgcttttttattaataaaggaaataatgatttctgttattttattaaaagcggtgcggtttcattgcatcgatatcccgatggggtgttactggaggtttttgatgcacctaccctaagagggtatattccattgtcatgtgattgtgaaacggaatatgtaattaaaatgcttttatcatctgaagtggcaacaatctcaaagaactctttatttaatttgatgacatcccaaaacctatgggaagatttttcaagatatcaaatggcacttatttcttcagtgtcagaagtgatttacaggctatctactcctaacaactatcactcaatacggcatcagttgttagaactaatggaaaagccaagtgaaattagagagcttattactgcagagaattacatccggtgtaaaactcgtttatccagaagtagtataatgcacatcttatcagatctgaaaaaaggagggtatattaccattgaaagaggtctcttacttgcagttcataacctcccgcttaaatactaa

SEQ ID NO: 148055 - DNA, 570 bp, Enterobacter cloacae
atgaagattattgaacaagttttttctatgaataaaatgtatgttatttctgataatcaatattttaatctcggcgttttagggattttaaaaaagaatgtcatcgtgattaacccacaggatatactcgatagaacaaagggtctggatggtggtatttgctttgtttacataagagatagagatttacattatcgattgtgctattcttttcgaaatgcgttatgtaaattcatcttttttcttcctaatatgcagtgcgttatggagccagctattctgcatcatttttggccggctacacttgacactcttacttttcaagaaagaacgtcgaaaatttcacatgattttaatcttacattaactccaagtagattgagacttatcaataatttatctcaagggatagtatattatacttgctggataaggaaacgatgtaataacccgaaaacgatccataatcattatcgagatattataaaggcggcgggaatttacggtgtaagtgtgcataatttatttctgtctgagtatatagctgtaagctatatggtaattatttaa

SEQ ID NO: 148056 - DNA, 1086 bp, Enterobacter cloacae
atgaagaacaatatgcgtaaattatgcgtgctgcccctcattctggcggcagtctttccggcctcggctgaagtgataaccatcggtaaaggtagtggtattgtttgggaaggcttgccctttaataagaggctaacgggcgcattggatagtccggtgcttttcctgaggtatggattactgtctgtctcaaattcatctgcagtatgtacgggacccacatcacttaaacagattgcaggttattgggctctgccgctgggggattccggagcagggctcattccccgcgcaaccggcacagcaacgtattatcgatatgaaggttcttatgaaaccttaacagggacggttggccttccccagacaaaaggaaacacgtcggcgggagcaactacaatgcctcacactggatatgagtggtgcctccctcctgcaatgtcagagaatcaaagattctacagtactaatggtaacagaactgcgagtttggttggtacgtgggttatcgtggctgatggaaatcaaaaaaatgcggaggttagagtgcctacgatgtattttgggtctttctctgcggttggctcgggtgatagatccactcagattctgccgaacgacattaccctgcgcatctcttcgcttgagtgcacggtaaatacgcccactgccatcgactttaagaatgtgacgcgaatcaccgaagcgggtgcacaactggctttgctgagttatccattaatcactacctgcgggcagccagacaataaaattagtgcgaatattaaccttcagtttcgtgcgatcaccgggctggattcaggaaacgccgccagactggccctgcggcagggcggtggttggataaccggtgaaatcagtaacggggcgacggggagcggggcatgtacgagcaccagcgggatcccctttgataacaagccagtaaaactgggggccatcacaaattcagaaaccagcaagagtctgaaccaccaggtcacctggcggttgtgctcggcaggaagtagcctgccagaaggagcggtcgatgcagctgcggagatgctggtgacatttaactga

SEQ ID NO: 148057 - DNA, 2574 bp, Enterobacter cloacae
atgaaaatacatccagttgccgtagcgatgttaacgcttcttgttgataacacgattgatgctgcggttccaaaagcctgggctcgagactattttgatcccgctctgctggctcttgacggccagacggtagtgacagatatgagcctcttcgaaaatgccgggaatatacccgctggcacttatttagttatgctggttgtgaatcagcaggagttaggccagcaatcaattgtttttaaaattaaaaatggaaaggctgaacctgagctaactcctgagctgcttgctgaagcgggggtgaacacggctgctttacagtcattcagcggtctggctgtcgaccaaccgataaacgacctgaaaatactgatccccgacgcccgggtccactttgaattatcacagctgcggctcgaactgagtatccctcagatagcgatgaaaccaaacatccggggagcagtggatccggctaaatgggacgatggcattcctgcttttttgctgaactactctctcagcgcaggtcatagccgtcaggatggcctttatgagcaggccagcagcgatcaaaccaacctgtttgcgaactttcatagcggcctgaactggcaggtctggaggttgcgcagcgacatgagttacacccgtaacgaaagcaacacaggccagggagcgacccagcgttatgaaaagactcaatttaccaacacttatctccagcgggatatccgtgcctggagatcggaatttctccttggggaaagctttaccctgaacgacgtcttcgatagcgtgccgttccgcggcgtcaggctaacctcaaatgaagatatgctgcctgtcagcctgcgcggttttgcgccggtggtgaccggcatcgcccagagcaatgcccttatcagcatcagccagaacggcaacgtggtctatcaaacctatgttgccgcagggccttttcgtattgaagacctgtaccagacaggccagggcggcgatttaaccgttaccgtgactgaggcagacggaagcgtgagaacctggacccaaaccttttcgtcgctaccggtaatgcagcgccctggcgggcttaagtatgaattaaccgctggccgatataacggcgggataaccaccgattcgcgcgaggcagaatttgtgctgggcacgctgatgtatggtcttccccataacatcactctgtacggcggcggactcggggcaaaagattacctttcagcggtagcgggtaccggcgtatcactgggagggctcggcgccgtgtctgcggatatgacgctgtcatccgccacgttgcgcgacgggcaaaggcagaacgggcagtcataccggctacgatacgccaaaagtatgctcagtaccggtacctcggttgatcttaccgcctatcgctattcgaccaaggattaccttaactttgccgattttaacaatatgggataccgccttgaggatgatcaggtgccctggacgctggcccgacagcgatcggagttacaggtgcgtttaagccagcagttgagttcctggggttcgctctatctttccggttcgcgtcaggattactggggccaggaggagacaaatactacgctgtcagcgggttacaacggcagcctgggcgtcgtaacttatggactggcctatagcatcgatcgtctcaaatctgatggtaagtggccgcaaaaccgacagctttcaatgaatctccaggttccattcagcgcgttcagccgtgcgcagacagtgagccgcaactatgcgaactaccagatcacgcataacagccacggtggagtgcagcagcaggctggcatcaacggctcggctctggacgatcgtctgacctatagcgctatggaaggctgggggaacggtaataataatgccgcgaccagtaccctaaacgcgagctggcaggggagtaagggcatgttcagtgccggatatagtcatagtcgcagcgtcgatgccattaacatgagtggcaacggcggagtggtagtacatgccggtggcataacgttgagccagcagcagggcccctcaattgcactggtgagcgccccaaacgcgcaagatgctgaaatcatgaacggttcagtgcgcaccgatagtaagggatatgccgtcgtgccctatctttcggcctatcagaacaatgctattacgctcaaccctatatccttaccggacaatgtcgatcttacgcagagcagcgtgaacgtctcacctaccaaaggtgccgttgtaaaggcaacgtttgccacccgtctgggctatcaggcattactgacgctcactcgcgcgagtaaaccaataccctttggcgcattagtgacgcttgagggcgcagacgccgaagaccaaagggggattatgggcgatgccgggcaggtttacctgagcggtctgcctgaacagggccgcctgcgcgcaaagtggggagccgctcctgaacaacagtgcagggcaagttacgatctaaagcatgcggcgttttcagcaaataacccggtacggtctttaaaaattcaatgtgagcaataa

SEQ ID NO: 148058 - DNA, 741 bp, Enterobacter cloacae
atgatgatgcgcattttgtactttattacagcctgttttctgatggtcagcggcactcttcacgcagaagaaagctcacctccgggcatcactttccacgttttgcgactgatctaccccgaggctgccgcacagggtgtaacactcacggcgggcaataccaccccagatgcctatctgattcagtccaggattcgtccagtggatgagaagaccggtgacttggattttaactatcagtctcataccgccatgccgttcgtcataacaccgccactgtcgcgtctggaaggcaacagcgagttgaccgtgcgcatacgccgcaatgacgtttcgcttcctaccgatcgagagtcggtgttctttgtctcaatgagggccatgccttcccagcatcccacgccggagcagggaaaaatggtcatgacggtcgtaagcaacctaaagctattttatcgcccggagggcctaagcaaacgcgccgtggcagatatggcaccccgtctgcgcttccaccgggagggctctcagctgatcgccagcaaccccacaccctattggctgaccttctcacgccttgccgtaggtaacgcgctcctcagtaacgcggagctgcgccttatggtacctcccttcggtcagcaggcttatgccatgccgcccgatcgccggggagaagtcacatggcagttgattgatgaagacggctggaacacgcccgtcagtaaacagcccctgtaa

SEQ ID NO: 148059 - DNA, 693 bp, Enterobacter cloacae
atgccctctctttttacccttatggctcccgtgctgttgttactcagcgcggttgttgccaatgcccaacagggcggtatcagcctgaaccagactcgggtgattttttcttcagaggatcttgcgcaaaccgtagcagttaagaacaacagcagtcggagctggctgattcacagccgcatcttgtccgaagcagaaaatgacgatgcgccgttcatcgtcacgccgccgctgttccctctcaaaggtaacagcagccaacagttgcgcattttactaaagcaggcctccttgcccgccgatcgggaatcgctgttttatctctcggtcatagcgatgccgtcgcatgaagggcccgtcccggacgccggaaaactctccgttggggtgcgttttgtgctgaagctgttttatcgaccagtcggattgcagcttgcgcggaatgatgccgcctgtcacctgatcgtcagcgcgcagggcggcgaacttcgtattgccaatcctacgccttactttcagacgttgagcgtcctgaaggtaaacgaccacgtcatggccatccccgcgcagaagtcaatgattgcaccgtatgacagtctggccctgccggtggagcgcccgttacgtcgggcgatatggcagaccatcaccgattacggtacccactctgagccgtgtagccagacattttga

SEQ ID NO: 148060 - DNA, 561 bp, Enterobacter cloacae
atgagtttagtagaaccataccttaaaggtatgctgctggcctcgttcgccacagcctgtctgctgcccgttaccgccatggctattccgttgaatttttctgcaacgctaaccaacggcacctgttcactcagcctagataagagcacgcttcctctgggaagcctgtccctttcggcattaacaccggcgcagcttgttaacgcaaagccgttcacgctttccgtcactgactgcacaggcggcgagggcggcacgctcacaccggtagtcgttgtcagcggcgcgggtgtccgccaggacaaccgctggctgtttcgtaatagcgactcagcagagggcgtcggaataatggttataaaaagcaatacacctccagcccactcccagtcagaaatcatgagcggtaccgccatacagctggccgccgccgggaaaattccggtcacgcagtctcacaccttttatgcaggtgcgacatgcgtgagcactaccagctgtgcaaaggctacgaccggcgcagtcacagcgagtctgacgtttacgtttgcctatcagtaa

SEQ ID NO: 148061 - DNA, 714 bp, Enterobacter cloacae
atgtcacgctttatttcctggtttgcattgcttcctgcgctgcttgctgccgccctttcggcacaggctaacgggtttggcatcaatgctacccgactgatttataaagaagatgcgggcagtataagcactacggtgcgcaataccgagtcgaaaaccccttatctggtgcaaagcagcgtcagtaatcagcagcaatcgtgggctccagcgcccttcaccgtaacaccgccgctgtttcgccttgagccccaaagtattaaccaactgcgtatctccttcaagggtgcgcctttgccgcgcgatcgagaatccatattctacctgcataccaaagccattccttcaggtgcgcagggagataacgaacagtcggcgaatgctattcagggcaacgtccactttggcgtcggtaagattattaagctgttttatcgcccggcaggcataaaaggtacgtcggaagccgcccagggtggactgacgtttgagcgcgtagccggggggcttaaagtcagtaatccgtcgtcctactttgtcagcctggcgatgctggaggcagacaataaacagctcccgctcgacagcccagcagctctgatgcttcctcctgggggcagccatacctggtcggttgctacagctcgcgccataaaatggcagaccataaacgatactggaggcaaccatgagtttagtagaaccataccttaa

SEQ ID NO: 148062 - DNA, 549 bp, Enterobacter cloacae
atgcgtaattcaatttattctatggcacccattgctttagctctgcttgcctgttccagcgtggctaatgccgcatccaacgccacaatgaacattactgcaaacgtagtagccgctacgtgtgacgtgtctgtttctaacagtacactggatctgggtaactttacaaagactgattttatttcggtggcgaaaccgatcgccagcagccttaaaacgttcactgtaggcctgagtaattgcgaaaagccaaaagtcgccggtgataaggcgaacctggtcatttccggacagactcttggtggtaatccaaacatttttaacagcaccggtactaacacgggtgtaatgattagccaggtatctacgccatcaacttatctcagcgctggtgaaaagattgctgtcgccaccgcaggcgcgacgcctgctgctggtgattttaacggtaagtccgtcagtttacaggccggcctggcctctacctccatgaccccggatattggtgcagtcagcgcgccaattatcttcagctttgcctacaactga

SEQ ID NO: 148063 - DNA, 777 bp, Enterobacter cloacae
atgacatttataatttttaacaccatagcctttcgaagcgatgatggtgcattgtggaacctggggcagccccagcggaaatctttattgacaaccatccctacgaggctctttacatatcttttagaaaatgtagataaaattatcagccgcgaggagttgctgaacaacatctgggataaatatggtcttgagccatcgaataactctgtaaaccagtacatctctatgatccgcaaacttcttgttgaactcggctgcgacgaagagattatacagacccttccgcgtatgggttttttcattgagggcggaaaggtcgctgtaagtgataagcaccagacagaaaaaaaggatttatctggcccggatatatcctcgcgaaagccaacgctttgctggcaaaaagtaggactaatggttttcgcagtagttacgacactttttctgattattcagccttttagcacagcattaaacgccacggactatcactttccctcttctaagctctataaatttgggaccattgatgcttgtcctgtttatagcttgcgtcctgttccgtcggagatcgcaggacgtaaagaacagcttgcgcgtaacctttcctcaggaaagttagcctgtgttgccgatgcgatatttattttccagtcgagtgagcgggtaatgcaagataagaccgtccggatctttatgacgcgctgtattcaaagcagtaaaaattcagataatttttcagactgtaaggccatctatgatttctctgcataa

SEQ ID NO: 148064 - DNA, 495 bp, Enterobacter cloacae
atgatttctctgcataaatacaaaatcgttaagttgattggtgtagcctgcgcgttactcgcgataggcgctctctttaatggcacgatgcattattttgtcgttaaggagaaagggccaaaggtcgattgctccgctttttttgccacccagactgagattcagaccgatggcgttatgactctacatctggatggtatgggccatggccgaattaatctttctgccgctgcacggaatagcacgacgcaaaaaaactataatcttttgcgtgatataaattttaattacacttatgaaggtgagggatacttgtccataaagcctctggctttcacccgaaccgtcagcgatgatatgcccgacgatctttttaaccgggccatttttgatacctctggtgaaacccggcggttaagaatcaccaaactgaaaaacggctatatcatatggaatgctttctcccctgctttgatgtgcatccagtccgattaa

SEQ ID NO: 148065 - DNA, 570 bp, Enterobacter cloacae
atgttattaagtgatatcacgtatgcgtgctcttttagccgcatagcctttacttcaattttacagatgattgaggcagaacggcatgaaaacaaagagtttgctgatttccccattatttttattgatggcgatcgtgctaaccgctatgagattattcaaaaactctatatgcatcgtaaagccaacagtaatgtatatatcgttaccctatgcgataacgaagatgatatttcatcctcgattaaacacctgtccgacattgtagtaagtaagaaaatactttttcagcaactggaaaatcagatccgaattttagggacagccaagccaaaagcgctaggtgacagcgtttttggggatattgtcggggaattattagaatcaacttctaaagagcagcgcgttatacacctgctgcttcagggctattcacagacgcaggtggccaaaatgctccacttgtcggtaaagaccgtgagcggttacaaggttaaggcagccaaaagacatggtttcagaaattttaatgaactatttatacatagatgtgaacgtaatacgctataa

SEQ ID NO: 148066 - DNA, 561 bp, Enterobacter cloacae
atgccattagtattgttgaataataattacaggtgtagttttagcagaatagccttcaagtctattgtcgactctatttctacggcgccagtggctgttgaagcctgtattaagtttgttgacggggattcttccgacatccataaaacgctgaagatagtctatgaaatgcgcagaactaatgagatgttatatgtgataactcttatcaaccacagcaaaaaatactcacccataatttggcatatgtccgattgtgtgctcgaaaaacaaatctcttatgataagttagaaacaatcataaatattattctctccagaaagccaaaggtggtcactgacagcgtgtttggtgacatcatgggagatatttttagaatttcagaaaaagaacgcaacgtacttacactcttactcaatggccactcacaaacagaaatatcacaattgctcaatatctctgttaaaacggtgagcgcatataaaaacaaggctgtcgaacgctatggggtaagaaacttcaatgagctgtaccttaactggcttcaacactccgcttga

SEQ ID NO: 148067 - DNA, 132 bp, Enterobacter cloacae
atgtcaaaaaatgattatatgcattggctgatgatactgtttgaagggagtataacgttgacctgtcagaaaaatcgcagaaagatatacactctggcccagcgtgcgcagagtactcgctgggccagctaa

SEQ ID NO: 148068 - DNA, 312 bp, Enterobacter cloacae
atgaaatacttcactaaggctattttaggttcaatgtctgcattatgcctgtgcaatgtggcttttgccaacatcacgccatcgatcggtgaatccactccagaaaatatgacctgccatgaatatatcgatcttaatccgcgagcgatgactcctgtagcattttgggtggttaacaaagatactgattataaaggtggagattttgttgactggaatgaagtggaaaccatctcggttccgcagctgttgaagatctgtgacgagcagccgaaaagcaaaattacccagtggatagataagctgaagtag

SEQ ID NO: 148069 - DNA, 591 bp, Enterobacter cloacae
atgctaattaatagctcaaatataaaaaatttgagcatgggtttgcttttaaaatacagaaaaaagacattaataatgggtgggttactttttatttgcagtgttgcttgcttgcttattcccttttacgccggtcttgcgcttggtgatttaacaggggttatattcatagcctgcggtatttatatgttaaccagtataggtgctgttaaaagatgtactttcatctcgacattatctgtgtttatttttagtctgatttatatattgttgggttataaaattattattaatcctgtaatgggtattaatatcctgtccttactgttttgcttcctgttcatttttggtggcttgtgccgcataaccgcagggtttaaagacaggaatatggcgggtcgctactggtttatattcattggattactggatttagctatagcctttatatggttaagtgcgagttcaaatgctaacttctttattaccacgatggtcattggtctcgaactattgttctgcgcatggttttcgctgataacgtcatttgcgttaaaaaatgctcctgccgcattcagcagcgcacactaa

SEQ ID NO: 148070 - DNA, 1542 bp, Enterobacter cloacae
atgaaaaatacaacagcgcaggagcctctgaagggtgtcccattactgctggtgacgctctcgctttcaatggccacctttatgcagatgctggattccacaatttcgaatgtcgctattcccactatttcgggttttctgggcgcttcaactgatgaaggtacttgggtcatcacctcgtttggggtggcaaatgccatttccattcctgttaccggtcgtcttgcccagcgatttggcgagcgccggctgtttttattttcagtggctttattcgctctttcctctttgtgctgcgggctatcagtcaatctggaaatgttaatatgcttcagggtgatgcaggggctggttgctgggccattgatcccgttatcgcaaagtttgctcctgcgtaattatccgccggagaaaagaaacctggcgctagctatgtggtccatgacggtaattattgcaccgatatttgggccgattatcggagggtatatatgcgaaaactacgattggggttggatatttttaattaacgtgcctcttggagggattgttctgtcattaacggcttatcttctcaaggacagagagactccaacgacgacggtgaagataaatctggttgccctgagtttacttacgcttggcgttggcagcctgcaaattatgctggataaagggaaagatctcgactggttcaactcgaacataatcattatattaacgattatggctgtattcggtatcggtctgctgattatctgggaagcgactaatgataacccgataatagatctcagcctgttcagatcgcgaaacttctccatcggtatgatttgcattgccagcgcgtatttgatctatgcgggtgccatcgtcctgatgccccagttgctgcaaatcgtcttcaactacacgtcaatatacgctggcctcgcctatgcgcccatcggaatcatgccgctaatcatcgccccgttaattggccgatatggcgcgaatatagacatgcgcgtgttagttacctgtagctttatgatttatgcgctctgttactactggcgtgcgatcacttttaatcctgaacttgatttcttttgggttgtgataccgcaatttatccagggtattgccgtggcctgcttttttttaccgctcacgacgatctcgttatcaggtttgtcacctgaaaaatttgcctcagcgaccagcctgagtaactttttccgcactctatcaggatcaataggcaccagcataacgatgacgctatggagtcgacgagagtcgttccatcatgcccacctgacggagtcgatcaatgcttataacccctcatcaattacgctttttgaaaggttacatagtctggggctcgatcaacgtcaggcggaggtatatatcaatgacatcactacctcgcaaagtttattgatgtctgccaacgatatttttcacctttctgcgatcgtatttctgggattaacactgttagtctggttggctaagccgccttttaataccgccaggccacacgatagctaa

SEQ ID NO: 148071 - DNA, 1164 bp, Enterobacter cloacae
atgaatgctccacaacaggaaaaaaacatcacaactttacggcaacagacacgaaagaaaatgatgtttattttctgcttagttttcattatggcagccgttgcctcaggctgttggttatatctttttcgcgctgtccagtcgactgatgatgcttatattatggggaataagatagctatttcatcgcaggttgcaggcagcgtgataagtgttcattacaaggaaaccgatcgagtactcaaaggagatgttctcgttacgctggacgataccgatgcccgaattaattaccggaaagcgatacacaacctcgctgatagcgtcaggaaaatcaagcagctatatattaacgacgatcaatatgccgcagccgttcgcaagagcaacattgtttaccagcaaacgttagctgattttcagcgtcgaaaaagcctggccggcgtggcggcgatttctaaagaagagttgcagcacgccaggaatgcggttatcgaaagcgaggctgccctggacgtcgccagagaagcattgcgcagcaaccatgctttgatagcaggcactgtgctggaaaaacaccccgaaattttgcaggctgctgacagcgtgagggaggcgtggatttccctccagagaacccgggtagttagcccggtgacgggctacgttgctcagcgcaatgttcaggttggcgaaacgctcaccagcggccagtcggtgttgtcggtggttcctgctgacgacatgtgggtagaggctaattttaaagaaacgcagctgagcggcatcaaaattggacaagacgtgtcggttgtcaccgatttgtatggcagtaaagttatgtttaacggcaaggtggaaggcataagcatggggaccgggagcgccttttccatactccccgcgcaaaacgccaccggtaactggatcaaggtggtacagcgccttcccgtacgtatcagactcgatcctcagcaagtcaacgcgcatccattgcgcatcggcttatcaacgacagtaacactacacgaaacccataccggcggagagtctctggcaaccgcacagcgtatatcgccagcctggcatagcgatgccctggtgattgataccacgagcattgataacgacatccttgcaatcatccaagccaacgcaaggtga

SEQ ID NO: 148072 - DNA, 633 bp, Enterobacter cloacae
ttgaatgaacatcttaatctcaaggccgtcatcatcgatgatcatccactggcacgcttagcaattcgtaatgtactggaaaatgagggcattatcattcttgcggaagcgggagacggggttgaggccttacgcaagatcaaccaactacatccggatattgtgattatcgacgtagatataccattaatcagcggcatagaagtggttgagaaattacgtaaaatgcaatttaccaaaagtataattgtggtatcagccaagaacgattttttctatggtaaacgcagtgctgaagctggtgctaacggatttataagtaaaaaagaagggatggccaatattctttatgccattcatgccgcgcagagtggctacagttatttccccttttcactgaacgggtttgtcggcaacatatccaatgaacaggaaatgttgctatccctttcaagccaggagataaaggtaatgcgtgccatcttaaatggtgcagataatatgcagatcgcttccgacatgcatatcagcaacaaaacggttagcacctataaaaaacgctttatggaaaagttgggatgtcattcactgatggaactcttttcttttgccagccgcaataaaattggatag

SEQ ID NO: 148073 - DNA, 3597 bp, Enterobacter cloacae
atgcggtgtaaactggcataccttttattaacgctatgttacttattcatctctggctattcggcgggcgcagctcctgtctcgctgacgcttttcagtaacaacgacattattgttccgccggtaccgttaaatgatgaggactcgctatggctggttcacaagcgtacaatcagcattgccatttacgggccggaaaaaccgccattgagtatcagcgatatcaacggacggtatcggggcatgaacgctgattatctgcaattgatgaaaaacgcactcggcgttgcgctcacgcttaaatcttaccctgaccgccaaagcgctgtagaagcgctgcgggccgggaaggttgacctggtattgactgacccggatgaggccgttattactgagccatctctggtcgcctcgctgccgctggtaaaaggctatcctggcctggtgagccgtcaaaatgagatgatgaaaccgctgcacagcagtgaccaacgggtcacgattgcgataacgcaacattatccttctgaagattttattaaacaatcttttccgcacgccattattgtctcttatccaacggtttatcaggcgttggagtcggtagtgaaaattcacagcgattattatatcggtaataacattacatccagttttatcatctcgcgggatttcaatcatcttctggagatgactcgcttctggcaaaggcctcaaaacagcaatcggtttctggccgcaaataatcagagcaagctgattaaaattatcaattcctttatccattctatgaacgaaccgctgcataatcagattgctcagtcatgggttgagataggcagcttgacatttttaacccgcccgctggatttaacgcctcaggaaaaacgttggctggaaaaacacgaacgcttacgtgtgctcgtcaatccctactatgccccctttagcctggtcgatagcagtaacgagatcaggggtatcatcggcgacataatgaatttgatccatctgcaaacgggcctcacttttgagccggtaatagccaactccaacaaggagatggcacacattatgcgtaagggagagtgggacattgttccctcggcaacctatagccccgaacgggcagatgaaatcgcgttttctcacccctttatctccaccccttttgtgattgtgatgcgctcgggcgagcagggtccaatcgcattaaaaccgggtatgaaggtcgctattcccgtttaccacaccctttcggaaaagctaagaaggcagcatcccggaattgaatggcatgatgtagaaaacacctgcgtagcactgagccttgtggcacaagggaaagtggatgccgccatcactacgcaacttaccagccggtacctcatcgatcattactattctgggaaactggacttctcgcacattcccgaggagccgccggcacaaattagcttcgcccttcctcgtggagagcctgagcttcagagcatcattaacaaagcactggataacattccagcgaaagagatacttggtattgccggtaaatggaccagcatgtcaaatgtgcagattgaaacctggaatctctacagtcggccattctattgggtggtgggactggccacgctactggttcttctttgtctgatgtggggtgcctatttattaaacgccgtgcgcagacgaaaggcctctgaggccgccctggggtaccagctgacgctgcgccaaactctgtttaatgctattcctgttccggtatatgtcatgactgcgcaaggcgagcttgatagctataatcacgcctttgccacctttttcagtcccgaactgcatgacaatatgcggctctcgatgttcgatcgtcgtcatcccctggcccatatttttccgaaaattcaacacgaagttgagcaaggcctaaccccagatctggttattccacatcaaactgtgctgcataacggcaaagaagagcgattggttttacactggatgacgatatgtcgtctgcctgcatcccggccgcctcaacttctttgcggctggcaggacatcactgaatcacgccagctcatgcaggcattgcaggcggaaaaggacaaggccatccgtgcaagccaggcgaaaagtagttttctggccagtatgagccatgagatccgcactccggtgagcgctataatgggcttcctggaattaatatcatccggtaaccagtcgccgaaagaaaatgaggagtctattaagttagcctggtccaccgcccagtcgctgattggtttaattggtgaagttctggatatggaaaaaattgaatcgggcaaattagaacttaaacccgaatgggtcgatatcaaggcgcttatttgttctaccctcaggaactttgaagggctggcaattcaaaaaaaacttcacctgagcggcgattatcgcctgccggaagagaaagcgctctggctggatccgcaggctattaagcagatcctgagcaacctcatcagcaatgccatcaagttcaccaccgaaggcggggtgcagatttttgccgacgtgcgcatgctggagaacgggcaagcgcagctgactttacgcgttcaggacagcggagtcggtatttctgagcaggagcaaaaaatgctctacaaaccctttagtcaggccagcagcggaaagcagcacaccgggtcaggtctgggactggtgatctcacgtgagctggcgcagctctccggcggagaaatgcacatgaccagcctgccgggggtggggacaattgttacggtaaccctgaccacccgcatttcagagctcatcgcgggcgtctccgtattgaccgacagcgtggaggagttacccaaaaatctccgcatcttaatagtggacgatcatgccaccaaccgacttttgctaaaacgccagctgatggcgatcggttacgaggtgatggaggcaaaagatggaattgaagctctgaacttaatcaactcatacacctgcgatctcatgatcactgatataaatatgccgcttatggacggcatcacccttacgcagcgggttcgtgaggtaaatcatactatgattatctgggggcttactgccaatgcactgcccagtgaaaaagagcggtgtttacgcagcggcatgaatgcgtgtttgtttaagccggtgcatttaaagcagttgcaaaaagcactgggtaatctcaaaaagctttcggcagaacaggcgctgagtaacctaatcgacatggaaaccgtttacaccctggcattaaacgataccgccctgataagacagatgctcgaacaatcttgcagggaaaatgaaaaggatattattcatgccagctcggcaatgctcgggagaaactggcagcaggccaggtacagcgtccaccgaattaacggaaccgcccagctaataggcgcaggggcaattcacgaccaggcagaacagctggagaatgctttagctattgctgccgatcccgctaagattgaatcccaaatgcatatcctggagcagcgcctgaacgagctgaacgcagctattaagactttcttatcggataatcggtga

SEQ ID NO: 148074 - DNA, 1392 bp, Enterobacter cloacae
atgaaaaacacaaatcaatataatattgatgatgacgtgtacgcttcaatcgatttagcaaaagcgttaccgagctcgggatttcctgacaatgaacacaacgcccgccatgtatttaatgctatacgcgatgaactcatgctcgacggcaattccagacaaaatctggcgacgttctgtcaaacgtgggtcgatgatgaaatccgcgaattaatggatctctccattgaaaaaaacatgattgataaagatgaatatccccagactgccgaaattgaagcgcgctgcgtcagaatgcttgccgatctctggcatgcaccctccccggaaaccactttaggttgttcgacgattggctcatcggaagcagcaatgctgggcgggctggcgctgaaatggagatggagaaaaaagcgcgaaacgcagggactggcgacggataaaccgaatctggtgtgcggcccagtgcaaatctgctggcataagtttgcccgctattttgacgtagagctaagagaaattcccctggaaggcgatcgcctgatcatgacgccggaagaggcgctcaagcgtgtggatgaaaataccattggtgtgatgccaaccctgggcgttacgtttacctgccagtatgaaccggtaaaagccgtcagtgatgcgctggataagttgcaaaacgagacagggcttgatattcccatgcatatcgatggagcaagcggaggatttctggcacctttctgcgcgccggcgctagagtgggattttcgcttaccacgcgttaaatcgattaacgcctccggccataagtttggcctcgcaccacttggggctgggtggataatctggcgcgaagcggctgacctacctgaagaactcatcttttatgtgaactatctgggcggcaacatgcccacttttgcccttaacttttcccgtcccggcggccagattgtggcgcagtactataatttcttgcgtcttggccgtgaaggctacaccaaagtgcaccgggcctgttacgacacggctcagttcctggccgaagagattggtaaattaggtccgtttgaaatcctgtttgatggtgacagcaataaaggtattcctgctctggcctggagcctcaaaaagggcgcgaatattggtggttataccctctacgatctggccgacaagcttctttctcgcggctggcaggttccggcgtactcgatgctggcacaacgcgaagatctggttattcagcgtattcttgtacgacacggggtaagctatgaccttgcctgtctgttgctcaatgatatcaagcgtgctcttgactatttcaaccagcatcccgttacccaccctctgaccgaagcggaagcaagcggtttcaaccacgcctga

SEQ ID NO: 148075 - DNA, 1539 bp, Enterobacter cloacae
atggcgaactcacagcgcagcgccgcggcaaaaaaattaacactcttaggcttcttttccataactgcctcaatggtgatggccgtttatgaatatccaacttttgccacttccggcttttcccttatttttttcctgcttttaggtgggctgctctggtttattcctgttggtttatgtgcggctgaaatggccacagtagaaggctggcaggaaggagggatatttatctgggtatccaggacactgggagagaaatgggggttcgctgccatctcatttggttatttgcaaatcgcgattggctttattcccatgctttattttgtgctcggtgcactatcctatattttaaaatggcctgcattgaatcacgacccgatacttaaaacggttgccggcttaattattttatgggggctggcatttacccagtttggcggaacaaaatatacggcgcgtattgcaaaagtgggcttcttcgccggcatcctattacctgctgcgatcctggtcattctgtccatctgctatctacatatgggcggcacgctggccattaaaatggattcaaagacattcttccctgatttcacgcaggtgggtacactggtggtctctgtggctttcatcctaagttatatgggagtcgaggcgtcagctacccacgttaatgagatgaaaaaccctgggcgtgattatcctctggcgatgctgttacttatggcgacggccatcgcccttagctccctgggcggcctgtcgatagcatccgttatccctgtagatcagataaacctgtcggcaggtgtgatgcagactttcacaatactgattaaccatctgggtacgggcctcggctgggcggtacgcattattgcctcgctgctgttgctcggggtgcttgccgagatctctgcatggattgtcggaccgtcacgcggcatgatggtaaccgcgcagagaggtattctttcatcgcgctttgcgaagatgaacaaaaacggagttccagtggcgctggttatttcccaactcgtaatcacctccgttgcccttaccgtgctcactaataccgggggcggcagcaatatgtcgtttctgatcgcactggcgctgaccgtagtgatttacctctgtagctactttatgcttttcatcgggtatattcagctggtacgtaaacagccagaaaagagacgcactttcaatatcccagggggtaaacacgtgaagatagcagtggccattgtcggcctgatcacttccatgttggcctttgtagtctctttcttcccgcccacagggctacccggggggaaggcgaatgaaatttactctgtattgctggtagtttgctttctggttgtattgtctattccctttatcatttacgccctgcatgataaacggcaaaaagctacgcaaattatgctggaaccgatcactcaggactccgcgccaaacgggcatttcttcatacatcctcggggtaatgaaacccaccacattatcattaatgggaaacgtatgaattaa

SEQ ID NO: 148076 - DNA, 1098 bp, Enterobacter cloacae
atgaaaactgtatttgtgcttggtgctgggttttcaaaggaagctggtgcaccgatgcaggcagagataatggaagaaatatttaaaatacgcaaggaagatccaagttattttaatggttctgaatttagactttttgaaaatctgcttattaagcaattgtactataagcgtagtcagtttaaatatattcaaattgaagatatctttactcctttagaccgatgcttggctgataacatccagtttagaggcctttcaattgagcaaatgataaaaactagagatgctatttttaatataattggcatggctatcaaagagatcttaaatcggaagggaaagagtaaggagtatattgatgattttgctcggtatttggttgggaaatgtagtaagagattaggtggtaattacagattgaatgatcctgtaagcgttattagtactaactgggatattttattggataattcaatatataatcatatccagcagagctttccgcaacgtgccgtcgttgattactgctgctatataagctccttagaagaaaaggacgagacagtaaagcctggattagaagtattaggagccggtggctttaatgtcaagttgctcaaaatacatggatctctcaattggttgcaatgctcgcgatgtatgcgtctttatgttggttttaatgaaaagaagggggcccttagaggtcttacttgtagacactgcgataataactatactgctaaaagtaatgaaaatagattaatttcaaatcttatcatgcctactttcttaaaagacttatcaaatcctcaatataaaataatatggcagaatgctgggatagaactatccgaagctgataaaataatttttataggttattctttgccaagtgctgattttgaaatgagacagcttttatctcgaatgactaaacgaaacgttaaaattgaagtcgtaacgtatgaagaagataaaagaaaagaaaaggatataaaaaaatattggcaggcattctttggagagcgtgagattaaagttcatttatgcggtgccagccatttcattgagcgatccttatatcttgattaa

SEQ ID NO: 148077 - DNA, 2547 bp, Enterobacter cloacae
atgaaagagatgaatgaactatatcttagattgattaaagctagtgtggttaaattactcggttttgtcagagatgaatttaccatcactcaggaagaaatatataaattactctcatatgcttctattttatcattgtctgaaaatattctagataaatcaaaatcatatgagattgttagtcgtgtatttgaagtgactaatgattataaccctaaattgattaatgctgcggatctcattttgtctcgaatagggaatttccctgggcgattgttaatgagaaatagatttaatcgaggggaggagccagatctttcactacctttttcattagaaagaatagcgagagaggtagagaactcatttgatgataaaaaattaacagatttccaatataatcttttttcatcgctggaaaaatactcatcgcttagcgtgtctgccccaacttcggctggtaaatcatttgttttaaccttaaatgcaataaggtgtattaagaatcattctaaagaatgtatagtttatatagttccaactagagcacttataagtgaagtatctacgaggatccgaagtgaatgcataaatgcaggtttatctaagacaataataagaacatccccagctttagtggacagagataaaattgttgaagggttagtttatgtattaactcaagaaagatttattagtttacttaccgaatcagtaagtcaccctgattttgttgttaatttacttttaatagacgaagcacatgaaatacaaaaaggtaaaagagggatcttgctgcagaatgcaatagaggtatcgcttgatttatatcctaatgctaacgttatgttctctagtccattaataaaaaaccctgagtattttttatctgtattcaaacgagaatatagaagtaagtattttgtcgaaaggatctcacctgtcgcacaaaatgttttattggttaatcaagtaaataggaaagtaaaaacaatttgcgtttctaacctgctagaaggaatgcatgttgatattggtgagtttgagattgatttttctttccgtggtggaaaggttcagcagaaatcatcttttgcaaagtttatttctgataatggaggggccgtgattgtttttgaaaatgatccttctgctgctgaagatgttgccctatctttgacagaaaaactgattattgaagacgctcggcctgactacttggaatttattgattttattaaggaagaaatgcatagcgactattctttagcgcattgcatggagcataaagtcgcttttcattatgggaatatgccatcaataattagaagtgggatagaatattttttcaaacgtggtgatatacaatatattgtttgcacgagcaccttgttgcaaggggttaaccttccagcaaaacatattatattagataaccctcatagtggttccaattcaatgtctcgtgctgactttttaaatttatccggcagggctggcagattacttcatgaatttcatgggaatgtttggtgtttgagacctgatgattgggatgcaaaagtttttgaaggtgaaaagcttcaggttataaattctgctatgtctgatgtaatgttggatggtggtgggattatttgcaatgctatagatgggttgcttattgacccaattgaaaaggatcttgctgatgtagcctttgcaaaactctttcacgaaatcaggcgtgatgatttacaatcggagtatttcctcagaaatgataaaagtgaggagtatcatgaagtattagaatataactttaataaaatctccatgatgaaaattaatgttcccgatgagttgcttagaatgaatatcgggattagaccagattatatacaaagactgtatgatttatttaaagagtctgcaaatttagatgattattctctatactcaccttttaaaaaaggtggtaaacaaagaattgatgtggctattgaaatcataagggatatattctcttgggatattagccaccaacattctctatggataagtatgctggctcataaatggatgacaggcaaatcattgagcagtctcatctctttcgaagtcgacagagcattttctctcgaagagagaaataaaagcgaaaaggatatttcctttaaaaggagaaaagtttcgtcgactattcgtggtgttctcaaaggtctagagactcaagttagatataatttagtgagatatattaaagtttatcaggatgttttaaggtttgtcatggaagagcgcaatgaaggtgcaaaagcagtgctggtggaaaatatcagcgcctatctggaatttggctcttgtaatccggttgatttaaatcttatgtcattaggactttcacgtagcacagcattattagtcagaaagaaagtaaaacttcccccggaagggacccctgaggattacctttctttccttagaaaggtaaatttcgataagacttctataccgtcatattgcatgagggaaataaaggatgtattgggagatatgaaaatttaa

SEQ ID NO: 148078 - DNA, 927 bp, Enterobacter cloacae
atgggcaagtttgataatctaaatgaatatgtcgcggtgagacaaaaagattttgaaagttgcataaatgttgtagaacatgaactccatattgattgtgtatcaactaatctgagattccatcatgttaaatttaatggaaatggaatccctatggtgaaggcgttagcttgtaagttatatgagtatattattgattactgtctttctgctcgtgagcgttctgatactcttacaccgcaacaatcaatgatattatcaaaacaagccagagacttgtttcggcatccaaaaattactgataactcaccagataagacaggtgaagcaggtgagactttactattttttttaatggaagctgtacttggtgcccctcaattagttgctaagatggagctaaaaacgaattctaatgacgaagttaaagggtcggatggtatacatgtaagatggaatgagcaggataaacttgttgatttgtattttggagaggctaaattatataaaaaagtatcaagtgcgttagatgaagctttaaaaagcatctcatcatttcacgagagcgaaatgtataagcatgagtttaatatagttactaaatttttcaaatatgcaaatgatgaaattaagaatgcaataagtgagcttattgtttcaggagagccggggccaaatattaggcttaatcacgcctgtctcatcggttacaattggcacaagtttaataaattaaaagctactaacgaacagtctttagagcagcatttcctaaaagaatttaagaatgattttccaagactaaaaaaattgttagaggataaatttatatcctttccacagaaacatcttaagtttgatgttttctttattccctttccttcagtcactgattttaggaatgaattcaatgccgctttggactaa

SEQ ID NO: 148079 - DNA, 585 bp, Enterobacter cloacae
atgtcgacgattactctggctgcccagcgcagctataccctgaacgcaccggtctggttttcttaccggcgcccctcgctgaaaaaagtggtctgttccaccctgatctgggcgatgggaatagtgatgacgatcgctgcgggactctacgctcatctctactgggatctgcgccatccggtacctgagccaataaaagcgagcgccgttaagccagaaacgacgctatcggatatgcattatgtctatgtcagtaaaccgttcccgcagcctgaaccaaagcaagaacctgtgacaaaagagatgccgccgctgcaggagatgcccattgatagcggcgatgccgactggcagcaggcgcccgacggtgaaatgccgcatgatatttcccgggagacattgccagggacagaggtgaaccatcagaaccttgatgacggggcgatcaaggcattattaatgaaggcgttaaaagaacaggaaaaagattattcgcaggggaaaatgcccacgcctcccgaggaggaaaccacggcaggaacgcaggcaaataattcactgaaacatagcgcccctttcacttaa

SEQ ID NO: 148080 - DNA, 483 bp, Enterobacter cloacae
atgcataaaattaagcttgcagtgatatttctttttatttgcgtttttaacacgactgtatctgctagtaattcaatgtctatgaattatgctataggcaagaaaaatggggcagaaaatatgcatggattgaatatcatgtttagacacgatatgaatgatttcgcactggtcgcatcagggacttatatagagaataccagcggctctggatattcttatttaaagaataaatatgcatctattatgccgggtatagcatttaacattacgcaagatataaacttatatgggcttgctggtcttgcttctggctcaaaaatgaaacctaatcaaacacatgaggtttacggagctgcttttggtgctggttttttttacaatttaacagacaacattcaattaaattcaggatatgaattgggaattattgataacaaagaaataaatactttcatcattgggataggatatttgttttga

SEQ ID NO: 148081 - DNA, 558 bp, Enterobacter cloacae
ttgattttgaaggtgaataaaatgatctctaaaaaattattaagaatatacgttattactgagaattattttttatatcacggcatcagggaacttattgaagattcaaaagtttttgaatcttatacatataacgttgagcaaaccacaaagcttccaacacttattttttatcataagtatcatactcaagatattattattacagataactttttacattgttatgcagtttcaaaatacagaccagaaaaaactttgattttaccatgtaattacgacttggataaatacattgagtgttttaatgatttaacagaccaaaatgactttcatgatatgcttcattttaaaaaactatcatcacaagagactcttttgttcactttgttttctgaaggaacaacagatgacaacattgcaattattcttaacataacaaaaaagacaataagcacacatcgacgtaatattttgcaaaagttgaatttaaaaaatagacatgaactttatatgtatgctctggcaacaaaggagggggtttatgagcatgtataa

SEQ ID NO: 148082 - DNA, 543 bp, Enterobacter cloacae
atgagcgcacaggcagaggaaggaacattacgccggatgacgttaggcgagattgcaatggctcgtagggtgttcggtgattcgatagtttatagccgtgtctggattcattgcgacagttatttaccattcggactacaaaaacaaaactacgcgatgactccaaacggagagttatggtacagaaagtcgatgtacagagaagacttttccgcaaactcgattttcatcgaagataaatatgttttcatccatgagctggggcatgtctggcaacaccaacacgggcaatgggtgagaatgcggggagcttttagctgggcagctgaatatacctacaggctggataaagaaaaactcattgattactctcttgaacagcaagcctctattttagctgattactggttactgctggtttatggggtcagtaagtggtcttactatcagagaccagggcgcatggggatgtacaggggcgtagatttgttgcaggatgtcccttcgctttaccagaaaatcgtaacagggaaggggcgttaa

SEQ ID NO: 148083 - DNA, 237 bp, Enterobacter cloacae
atgcaacattgcttcaccttcgaggacttcgtaaacgagtggagcaatggcaacgaccaccgcgaaatcaaccgatggttgcagagtgcctacatcggcatggaattttaccagggcaaaacgtattacgttacgtcttacctggtcggtggtaagagtccattttattgcccacgttgcaaccgcatcaacatcaaacgtttattagaaatcaaggaaaaacagaagcatgactaa

SEQ ID NO: 148084 - DNA, 465 bp, Enterobacter cloacae
atgactaaacttccagccgcattaatgcgtgaagtgaaaaccgagttcaaggcccagcgtgaccagtatgtatctgagttcatcgaatcccatctgtctgatgtgttcagcatctcagatttttaccccgtgatcctcactacgttacaagacgccatcctcgacgggtacaccatagccgactatgaccgccagccgttctacaacgcaggggaacctgcaattcgcattgtgctaaaccgcaagcaaggggaaatcgaggcagaccgtgccactctcaccgcagaggcagaagcccagctaatggcatccctgacagcccaggcagaagaatactacgctcaagccgtagccgaagaggaacgccgtcaacgtgcagaagcagccgcacaagccgcagcagcagccgaggcccagacattcgccagccgtctccgtgtcgccctttccgagaatgcgaagtga

SEQ ID NO: 148085 - DNA, 207 bp, Enterobacter cloacae
atgaccaaaaacccgcaacaatccttagcctggttaaagcactattggagccaccagcaacaggacatgcagaaatcagaaatcaagctcgaaccactgaacaagccagagttgttcgacaaagcagtagataaaatcaccattggtcagttctatcagtggttactttccgaaggctacatcttcaaaactaaggataacaaataa

SEQ ID NO: 148086 - DNA, 387 bp, Enterobacter cloacae
atggcacgacgcagcaaagctctatacgaagaatttttccaaaatgggcgcaaggcacagcgcatagaagaagttgagcgccagcttatgaacacagaccaccagcaccaccgtcagcttgaagcggaggagcgcagcgcggaaaacattgaagatcatttccctcgtgttattccaaacacgccaatcatcgaatggttgccgggctactacatccatcgtcttgagtgggaggcataccgcgacgggcgcagcatgatagacgtacacacaccacgccagacggttgacccagagctaatctcgtaccagtggaatcactttgttgttaactcacgctttccgtggaagctggaagatcacgccatcgtttacaccttcgtttag

SEQ ID NO: 148087 - DNA, 612 bp, Enterobacter cloacae
atgaccaccagccgagtttatgcctatctccgcgcctccaccaaagagcaggacgctacccgcgccaaagcagcattggcaaaattcgccgccgataatgatttgggtcacgtcacctacttcactgagaacgtgagcggagccagtttacagcgcccggaacttatgcgcttgatagagatagccgcgcccagtgacattctgttagtggaacagatagaccgccttagccgtttgaatgctgacgactggcaagcattgcgccagacaatcagtcttaaggggattcgtgttgtagctttagacctgcaaacctcacacacgttgttaaaaactggcgacgagttcactggtcgcatgtatgaggcgcttaactcgatgatgctcgacatgctggcagcaatcgcccgtaaagactacacagaccgccgccgccgtcaggctgagggtatcagcaaggcaaaagctgagggcgcttataagggccgtccagtggataaaaaattacacgaacagatccgtgcattgcatgaagcaggtaagacaaagagcgagatccatcgcctcacaggtgcagcccgaaccaccattaacaaagtgctggaggcgtaa

SEQ ID NO: 148088 - DNA, 429 bp, Enterobacter cloacae
atggttgatccggcttccattgctgctttctctggcactcttgagcttgttaacaaatcggtagacttagttcgcaacctccgtaagaaaggagatgatgagcttactgccgctgaaatgcgtaacacgttgattgatttactcgatgatttggtagaggtaaaaagcgaattcgtcagcctcaaggctgttttgctgaataaggaagaagagatccaatctctcaaagcgcaacttgaaggaaagaataaacttcattttgatggcaagctctattggatggaaggggataaaacaccgtattgcactaagtgctatgaaaaagattcattggctcttcatttaaactttattaggagtaatcaagctcatgcgatcagtgagcaatggtattgcagaagctgtaaatcaagctattacctaaaatag

SEQ ID NO: 148089 - DNA, 552 bp, Enterobacter cloacae
atgcgtattaagggattatctcttttcttttgtgccatttgcgcgggttgtaatgggtattctcagccacgagagcacttagatgtgccgacttactcagaaagctatgatcaagccctgggatggcttgtaactgctcgctacagagatgtagataactcagagatcgtaatgtcacttgtcggagacttttgcagaagcaaagggaaggaagcaactctgtacaagacgaccgctggcagtacatccgctattcaagaagtttgggcttgtcagactcccccaatgctgaatgataccaacatactgagtgggatttattgccatttcattgttaacgcgcctcgctattctgttgatttttcaaaccgtcagaaagaagtagcagagcaaaaatttgttaaggcctttttagcaaaagggattgaatatcctgtcggcggtttttacgagaagtatcaaaataactttgcttcgtgggcagttgccaaacacgaggagagcaccaacaccgataaagtgcggcaatggtttgataagaactgccattag

SEQ ID NO: 148090 - DNA, 441 bp, Enterobacter cloacae
atggccacgatcaccaaaacatacgagaagatagccccgaaacttgatgacatggtgcgccgtggattcagcgacattgagctaaggtatgggagccagaacgaaatctacgcctacggggaacggaaactatcagcagaggatttccgcaagctctaccctgaaaaggtgaacgacattcctcaagacttcccgccagatgccacggtgatcgtggaagacatggtattgctatacaagccccgtagcggtcaactcaccagaaccgcatcagagacacagctcaaacatcaccaggctttcaatgactggtgtcattccaacgctggcaaagggaaaggctacacccagactacaaagaatgcggtaaacgcgataaacattatcggcgctctcgtattggttgggcttgtcatttggggactatctcacatccgttga

SEQ ID NO: 148091 - DNA, 495 bp, Enterobacter cloacae
atgaaaaagttgttagccgtagctttcttgttaacccctcttttagctttcgctggtggtagtggatacggtaatactaagtggggtatgagtccgtcagaagttgttaccgcccagggcaacggcgcacacttgatttcagcagaaaagtttaaaggtagtgttgggaaggtacggattgataatgtttcgattggcagcgatctgtataccgtcacattcttgtttgatagctctgatcgccttgtgcaaacgaatgtcgccagcaatgagaagaaaaatgaaggtatcgttgcccgtcagtttggaacgttgaatcagcttttaacccagaagtatgggaagcctgagttttcggattcagataaggctacttggaaactacctgatactacggtggagttaagtcagttaatcatttcgggaatcatggcgcagactatagttcgctacattccaaacagccgagtcgcaaacgatacttcgaatctttag

SEQ ID NO: 148092 - DNA, 153 bp, Enterobacter cloacae
atgcgtaaaggaaagttaagcagtgatgcgccattcgggacattgttaggctatgcgcccggtggcgtggcgatttactcttcaaattacggcagtctggacccgcgaagctacccacaggacgcggattttcgcagctatatcggcaactaa

SEQ ID NO: 148093 - DNA, 891 bp, Enterobacter cloacae
atgcgatattttgatcgaactctggtcccaagacctggctgtcttgatatggataataaaaaaagtgcggcttacaaagaactgcaaagaaatattaaaaacagtaaggcaaaggtctttaatgtttatagcgatgatgccgtaaaagcagcgctggaaaagctctttcacgggaaatgttcttattgtgaaagctattattccgctacgcagccggtagatgtcgaacatttcaggccgaaaaatgataaaacgggttacttctggttggcggcagtttgggaaaatcttctaccctcctgtatcgactgtaatcgggaacggtatcaatacctctttgatccgctgacgggcatattgttaaagaaggataagaaagcgggaaaacatgaccatttccctttaagcggtgcaaaagccacggtggtgttcaatagcacattcatcatcaataatgccaatctcgctgcaaccattgctggtgagccatcattactgctcaaccctacagttgacaatatagatgaccttttcacttttactgatgaggcaattatcgccccttctaaaagtacgctgtcctcccccggcgtattggcgagggtagataaaaccatcgagctattaggattaaatcgcgttagcctggtggccagaagaaaagagatattgctttcactaaaggttctcatttataccgctgataagcttgttgtgcttctaaatgatcgcacattagcgggggaaagtcgggaacttgtaaaagatcttttgttctatttgttcaaagagatgcatcggtgttctgcacctactttttcttactcgcagatgtgtcgaataactatcgagcagcattttggtaagttaccctcagtgagcactaagtga

SEQ ID NO: 148094 - DNA, 2034 bp, Enterobacter cloacae
atgagggatattaaatttatcaatgaaagaatgcccctgactgaacggatatattcaaattataaaattaaggaattgagaaataaacttccgggtaggagtcgtagatcgtctgttcgctatcgtgaggcgttaactatattattcaataataagtgcgcctattgcgaacaatgtatacccgatatcacaatgtatattgataacttccgaccgggtagcggcgtaatagatgtggaaacaggcaaagcattccctttacattatttatggttgagaaactcctggagtaatctttacctctcttgtccagaatgcaatgggcgaaaaggcaataaattccctatcgcaggtcctatctgtgaattgtttgcaactggagatgaactcgcgtatgaaatgccgttgttactggatccttgcgatccgcagttgcgtattgaagaacatctggattttatagaagatggtacagttcttcctctaagcgagcgcggtgaaatgaccattaacattcttggtctgaacagaccatcgttagtcggagcacgtaaactccacgcggtgcttttgctacaacaactcaaagcgaatgcgaatgaagatcgtattaatgatttcttaaaaactcacaatggccagttcctggctctatcacaacagctcatttcacaatttaatcagcgcgtaatagcaaaaccaaaacaagagtatcattcaaagatggttaagccagctgaaaaaatacgattgtacggccctaaaattaaacgtattattattaaagatataggcccgatatctggtaagcatattatagaattgagtgacgataatgatgtctggttgatgctgcttggcgataacggggtcggtaaaagtacattattaaaactagcagcgctgcttctggctggagagaaacgagctacggatcttttaagggagctcaatgttagtttaaccgatttccttcgttacggggccaaagagggatatataaaacttttatttactcgtgattttcccgaactgattttaaccattacgccacacggtgccattttttctgattcggcaagaagggtaagccctattgtacttaacgcttacggcgcatcgcgtttacatcctaatgctcggcatcctgcaaaggatcgagtagatacttgctatattgatacactgtttgatagttttgaaccactttccgacgttaacctctctattaaatctctggatccgcagaggctggcttattgtgttgacagtttatctgagctctttggcaaacaccgacgtttacaaattatgtcagaaggtgcaagtgcagaaaatgtgaggtttattatagataaaaaacccttcgcttttagccagcttagcgatggcttcaaatcaattgtttccctttatatggatatcgctaatacggccatgaatctggggtttgaaagagcggaagattttaatggcattgttatcattgatgaattgggaacccatcttcatcctcgctggagaatgaagattgtaaaaagtctgcgtcagctgtttcctgatacgcagtttatgtgcagtacacacgaaccgttgtgtctgcgtggattaaaagatgatgaagtaagagtgttgagacggtccaacagtagagtgaaatttgttgatggtcttcctccggttagcggcttgacagcagaacaattactgacttcggctcatttcggcctaaactcaacccttgatcctgaaactgaagctgattttgctgaatattatgcattgctttataaacagacgaagggtgaagatttatcaacagttaatctcagtcggcttgaggttttgcgaagcagtttagcggctcgcggtgcgggcacgggaattttctcggggactcgacgcgatcagctagtttatcaaaccattgacagaatgatcgctaaaagccctgagcgagatataatggatgccctgaatgatgatttgattacggaacttgatgttctttggactcaggctgccggacgataa

SEQ ID NO: 148095 - DNA, 375 bp, Enterobacter cloacae
atgatttatttttccaagtcgtcaaatggctttttcctggacagcataaacgacaatatgcctgctgatatcgtcgaaattaacgctgatttatacaacgccctaatggcgggacagcaaaatgatgggaaggttatcgaatcagatgatgatggatatccaattcttgtatcgctcaaagttgaccacattgcacaggcagagaatcagcgcgcgcaattgctggcaatggctgataatgttacggcagactggcgggttgagttaatgctgggtgatatcagcaatgaggataaagcaaaattatcatcatggatggactataagaaggaagtgaaagccgtcgatacgtcgacggctcctgatgttagctag

SEQ ID NO: 148096 - DNA, 597 bp, Enterobacter cloacae
atggcgaaggcaaaattaaacaaggagcttattgctacagtgcccggtgatataactgtgtttaactacgatggtgagacgcgcgaatatctttcctcatcggttgaatatttgccggtcggcgtcggtattccggctaaatcatgcattgactctccgggcgaagacaaagagggatttaccatatgccggaaggcagattttacagcctgggaatatatggctgatcaccgtggtgaaacggtatacagcactgaaacaggcgaagcggttgtcatcacagcaccgggggattaccctgacggcactaccacgctggcacctgcgacatatcatgacacgtggaatggtaatgagtggatgattgatactaaagcgcagcacgcggcggacgtggaagcggcggagcaacaaaaagttgcgttactttcagaggcgcaaacaacgatcaatatatggcagaccgaactacagttaggcattatcagtgataaagataaggccagccttatactctggctgacctacataaaggaattgcaggcggtcgttcctgacgctgcgccaaatatcaaatggcctacaccgccggtttaa

SEQ ID NO: 148097 - DNA, 492 bp, Enterobacter cloacae
atgccaattccagctcatttatttctgaaagacgacggcggcgcccccatcaaagggtcatctgatgtacaaaatcgcgaaggcagtattgaagtgatcaccttttcgcatggccagcatatccctgtagacggtaatacgggaaaacaaacaggaacacgtgtacacggtgcttttactatcgggaaagagtttgatagcgcctcgacctacctgtacaaagccgtatctaccgggcagcttctgaaatcagcggagatgaaatggtaccgtataaacgatgcaggtcttgaagaggaatatttcaatatgtttttggaaaacgtcaaagtcgtttcggttacaccggtaatggcgaactgtaaagatccgcacacccagcatcttaaccatatggaaatcgttgaactacgctacgagaaaatcacctggaaatttgtcgatggcaatctcattcactctgattcatggaatgaaagaactacagcctag

SEQ ID NO: 148098 - DNA, 471 bp, Enterobacter cloacae
atggccagacttacttttgatggttgtgcccatacgctttcattgctaggtagtgatggctctattgttgatacgtggaccgcttataataacgtcgatcgcagagccacattcaaacacattagtaacggcacatatcagatacaggataaatcaaagccacatttacacccaggcgatagtgaagatggttcgtatgggacttatggaatcattcgatttagctatcctggacacccgggtgtaggtgtacattcaggtcaggcgcatagcacttataaaccagggccagaacatccgacaatgggatgcattcgaactactgatgaggcgatgaagaaaataaaagagcacatggccaaatcctccctttcaaccatcaccgtatcaaataacagcgcctgctcggccatgagtgcgacgcagaaatttgaaaatatctatatcccaccgggaatgaacttgatatga

SEQ ID NO: 148099 - DNA, 123 bp, Enterobacter cloacae
atgggcttcgaaaaagcgggattgaggtggtgctggtttaagttttttaccctctcccctatgggagagggcagggtgaggggaaatcacgtcaccggtgccgggttaaacaccgccagctga

SEQ ID NO: 148100 - DNA, 720 bp, Enterobacter cloacae
atgagccggaaattttttatcttatgggtagtattagttatcggcattgtggtcatctgggtggtgaatcagcctgccgcagatacccgtcctgctcagatagtgtatcgttttgacgaccaccgctacctggagctgaaaggctggaattgcgaaggtgagctttggtacatcgacaaacaacgtaatattcactcgcaaattgcctaccagttttatcagattttcaccagaccatttattcatccttcagagagatatatcgccataccatggtgggacaccatcacgggtggttttactgtctcaaaagattatggtcgaacctgggaaagagggggggcatcaatgcgtggtccgaatgagccggacggaagcgatgcgccgtactacaaagacgtgctttctttcactgtcgtaaacgatcagggattcttgcaaaccaaacaccgactatatatgtcatccaaaccctatgatgacccccgtctggcaacaggggggccggggataacctatgaagctgaggacggctctgtgcatcatattaaaccacgctctccgggagcggcatggggcatggtgtacatgaccaaagaagggcttccgagcagtactgagcaatttaaaatcaactggcaaggacagccggataaggtaccggaggtaaaaaattataccggctgggatcatatgcgctgcgatatggataagcactga

SEQ ID NO: 148101 - DNA, 249 bp, Enterobacter cloacae
atgaccgatacgtcctgtttttttcttaacggcgcatcctcaggtaactggtttgatatcgtcctgttaaataacagctaccagaaagccgatcccgaaacaaaggcttccgcttttaggctcagccgggttcctgttttcagacgatcgcttttttttcatttccctctcgacagcatgatttttttcaggttattttctaagcatgccacatcggtggcagcgtcgctcggacggtccgggcgctaa

SEQ ID NO: 148102 - DNA, 300 bp, Enterobacter cloacae
atgaaggataaatctcaatgtagcttactgcttgctggcctgatgtctctgattttcattattgcttgtcaaacgaaggcggtcaccgttgaacgtaataaaaacattcagatagttaatccattctcgggttcaagccctgatgggcaatgctataaaataactgctgaaaataaagattattatggtcgtctggataaatatggtcatccattacaaattcctgaaattgaaaataaggatatcaaaattagcctgagattattaaacgatagagattgcagagaaaaaggaatctaa

SEQ ID NO: 148103 - DNA, 498 bp, Enterobacter cloacae
atggcgcttattctgaccggttgcggggtgacgcagagcgttaccgacggtaccaaatcggcgtttaattctgtgttctataaacaaattaaaatcctgcatctggatttcaccgcgcgtgaagcactgaacaccgactctcgcgaaaataactcgctgtctgagcctgtcgtggtcagagtttaccagctcaaagaccgcaaaacctttgataagacggtttatcagcaattgcttcaggatgatgccagtattctgaaagacgacatgctgggtagtcgtaatatcgtggtgaagccgggtggtgatgcaagccttgatatgccgatggaagaagaggcgcagtttgtcgcggtagtggggctgttccgccatccggacatgaccaacgacacctggaagctggttatcaagcgcagcgatctggatcccgataaaccgcgcattctggaagccggtgagaaccatctgacgctgcaaccgcttaaggacaattga

SEQ ID NO: 148104 - DNA, 1164 bp, Enterobacter cloacae
atgaaaactaccgttaatgctggtgataaaacgactttggctgttatcgtgtttggttctatattcggtgctgtaatgggtaatgctcatgctgctacaatgcatgtagctgatgttaccaatcaaactaacggctttctggtagaggctcaagaaaaccagctttatgatctggatgctacgcaatctggcattaatggattgcaaaacactacccgcgatcatgaattgcgtattgatggattagttcaaaacgcaattaatcaacaagatcaaatagatcttaatagccagcaaatcaatactgatcgtgcaaatcaagcacaagtaaacgctgatttagctcaaggcgttactgacatcacaactacagctaaccaggctaaagccgctgctagcgcagcagacgataaagcacaagcggctattgatggtgttaaagctaacgtcgctgtaatcgacaacctgaaaaccgataaagctgatcttgcatcattgaataacgaggtcacgcaacgtcaagccgatgtagccgcacaagctaccactgacgctagccaaaacgctctgatctctgacactgctaacgaagcagctattgctaccaccacagctaatagcgctaccaccgttgcaaacaatgcaacaatcgtagctaacgctgctacaacgtctgctaaggctgcacaaaataaggctgatgtagcctactctgcaggcgtatatgctcaacaacaagccgcagatgccgctaccgtggctgctgttaacaaagctgctgtagctaacgttcagtcgcgtcaacaagcacaagaaaccactattcagaatcacagcgcacaactgaataatcatgaagaacgtattacagcattggaaaatgaaagtaataacaacttccggaatcttaaggatgatgtagataacaaccgtaaacgtgctgctgttggtgttgcttctgttgctgcgatgagcaacatcccacaagtaacagattctcaggcttttgctatcggtgctggcgttggcggttatgactctcaaggtgctgttgctatcgggatctcagctcgtattaccgatcatatcgtcactaaagcttctgttggtgcaggttccttcggaggagctacttacggggctggcgtgtctttcggttactaa

SEQ ID NO: 148105 - DNA, 300 bp, Enterobacter cloacae
atgtcaacagcaatcaatgtgaagctggctctcatgcgcgagtcagagaggctaaaccgtaagcaattcgctgaaattacaggagttccttacagctctttaacctattacgaaagcggaagaaccgttccgccaacagatatcaccatgaaaattctgcaacacccccgcttctgtaagtacgccctttggtttatgacagaacaaatagcacctgaatccgggcagattgcaccggcgctcgcacactttgggcaagagttaacagactcgcagcactcagaccaaaagattggctaa

SEQ ID NO: 148106 - DNA, 426 bp, Enterobacter cloacae
atgaaactgatgttgtttttactggccgtgcctattgcggttgttctctggcagcgtcatgaaaacggcaacctgagccgctcgtttgaacgggcgaacagggtcgccacggaacaaaaaaccgcgatcggaatgctgaaaaatcagctttacgtttcgcagggaattgccaggcgaaatgaaaccgcgcaggtcagtttacgcggcgaactgctggccgccggtgcaatggccgtgcggcgtgaagaaaccattacgaggctgataaatgagaatgaaacgttacgccgctggtacagcgctgagctgcctgatgttgtgcgtcggctgcacacccgcgccgcctgcgcctccgccggtcattgtttacagcgcctgcccgaaggtgagctattgcccgatgccaggaagcgatccggccactaa

SEQ ID NO: 148107 - DNA, 159 bp, Enterobacter cloacae
atgccaggaagcgatccggccactaatggcgacctgagcgccgatattcgcaggcttgagcacgcgctcgccgcctgcgcgctgcaggttgaaaccatcaaagactgtcaggataaactcgatgaagaaagcacgcagcctgcgcgaagcgctgattaa

SEQ ID NO: 148108 - DNA, 468 bp, Enterobacter cloacae
atgaagaaagcacgcagcctgcgcgaagcgctgattaaagccgtcccgcagcttgaaacaaaccccgaaatgatgcgcatctttgccgatgaggggaatatcgatgcgcgtctcgcggcctcgctgtcccatgagaaaatttataccctgaatgtgatcgtgtgtgactttgtgggcgaccctgatttgatattcgtgccggtggccgcatggctaagggaaaaccagccggatatctgcacgctcgatgacggccgcaaaaagggctaccgtttccagatggatttgaacgacggggacagcgtcgacatcagcatcagcctgcaactcaccgagcgcaccctcatcaaagaggaaaacggcgcgctgcacgtgagctatgtccctgagccgccgctgccggaagccgtaaccccaccaaaagagctctatcttgacggggagctggcgagtaaatgggatgaatga

SEQ ID NO: 148109 - DNA, 468 bp, Enterobacter cloacae
atgaatgaatttcaaccctttaacgaccggctcaatggtctgattgctgccctttcaccggcagtacgccgtaagcttgccggggagatagctaaggagctgcgcaagtcgcaacagcaacgcatcaaacagcaaaaagccccggacggctcaccgtatcaggcgcgaaagcgtcagccgcttagggctaagaccgggcggattaaacgagcaatgtttcagaaactccgcacaagccgctacatgaaagccaccggccacgaaaacagcgctgtggtggaatttaccggtaaagtggcgcgtatcgcgcgagtccatcagtacgggctaaaagatcggccaaatccacatagtcattacgttcaatattctgagcgtcagttaatcggatttaataaactctgcactcaagatattgaaagtgttgtcgtttttcatcttctcaaagagccctgcaacaagtggtaa

SEQ ID NO: 148110 - DNA, 912 bp, Enterobacter cloacae
atgaaagaacaacattctatcgtaactgaaattctcccaatccttatccccgataacgagtatgagcttggtgctcgtcttaaacaacgtatacaggctgttttttcctctcggaatttacctgagtttgatccaaagaaagaaggttatcctaagttttcagtgtatttagagcgattacatacagatgtcgtcagggttgtccgaattcctggccaaagtgatgttcatgtttataaaaaggctcattcatctctatctgtcacaaattctgctcctaaatctgatcttaataggcaaagcgttgttatacgtagtgatatctggcaggcatttctcaatcctgatgtttcaagaaaacggttctttaataaagaattaaaaaatattacgcactatattccctcacaaaactctagtgaagagattgcggtgggggctcaccctgagtcgtttgtggaaatcactccaattcctggttcggaacagttgggttggatgcgtgaatttttagcaaactctccaatcaatgaagctgaaaggcaagttattgcttctcaaattggagagaggtactcaagtgcgcttaatgcaactttcataaattcacttggctcgcaaggaacattgtggagaaagtatagaattcctcgtattattaaccacatagagacttgggcagagcaaaataaggtgcctttcggtgagttatgtgtttctccggtgtcatatccttctcagctaaaggttgctgccaatcaaagtgctccttatggtgattcagaaacgacaaacgaactttcttctaaacagctggcgcacaaattaattgatctcatgacagaggttgatgttgcacaaatggtactaccaacgattatgaataccctgctgtttaaatctcgtcagtaa

SEQ ID NO: 148111 - DNA, 852 bp, Enterobacter cloacae
atggaaacgatatttattgtcgggatgtttaaatcgttaactaagcgttttgcttccgagtgtaatcggcgggatattcgttaccataaggtcttggctgattttggaaagcagggttttttggggctggttccaacgcccggcgacgccattcttgcttttcaggagtggcttaaagctgaaaatgaagagtatcataagctccatgtcattgtactgccttattgtagcattactaaggagatggctgaggagcttgaggcagtagaggaattcggcgcaagcgtcaagtatgtagaggcggacagtgatggttggccttctttgttacctcgtaagaaaagaccagacacagagtttttaaataatattctaaaaaaaacaattgaactacttcctccgatagttgaacctgaagttagtgtttctgattattaccgtcaactagcgcgatctaatccgaaagttattttctctcctcatgtttttgattgttgcgatcaagtggctcctcatagaaagctatttatgaagaatgctgttgatgcgttatcggaatttttagagcagccatcgggtttgaggattgatgctttctttcaagggaaaggtattgagcatgcacagtcaggtggaatagtgacgcacctagaggttattagtggtgattctaaagtgaagtattcttctcagactcaccttaaaaaaggtgacaatacaactagtgctgctgcagtgcgaatttattatcattttataaatcagaatgatatttattatattgtaataacttacgcgggggctcatccggaaaatgatttttcttgggtggtgaatcttcctcctgactag

SEQ ID NO: 148112 - DNA, 1038 bp, Enterobacter cloacae
atgaccgcaaaatattttgccattctgaccaatcagggcgcggcgcggctggcgaacgcggcggcactcggtaccagactaaacctgacgcagatggccgtcggtgatgcgaatggtacgctgccgaccccggacccgtcgcagacgaagctcattaaccagaaacgcatcgcgccgctgaacctgctgaacgttgacccgtccaataccagccagattatcgcggaacagattattccagagaatgagggcggtttctggatccgcgagattggtctctacgatgatgaagggattctgattgccgtggcaaactgcccggagacctacaaaccgcaactgcaggaggggagcggccgcacgcagaccattcgcatgattctgattgtgtcgagcacgtcggcgattactctgaaaatcgacccgtcagtcgtactggcaacgcgccagtatgtcgaggataaggctatcgaggtgaaagcctatgccgataatctgctggctgcgcacctcgccgctgctgacccgcacccgcaatacctaaaaacggcggatattgataaatacattcccgtcggatttccgctgccgtggccgcaggcaacgccgcccgatggctggctgaaatgcaatggtgctgcttttgaaaaggcgaaatatccaaagctggccgtcgcttatccttctggcaatctgcctgatttgcgcggtgagtttctgcgtggatgggatgacggacgtggtgtggattcgttaaggggaattatgtcaactcaggccggtgatatggcttcacatgttcatatgtggggtatctggactgccagaacaaacgatatgtcactggaaagttttacgggcactacgattttgaagcaaataacgcctgcatcacccgtcattgattacgacaattatccaataccaaatcccgcgattacggatggtggcatcgtcaatgcgactaccagacctacaggtggtactgagacgagaccgcgcaacgtggcatttaactacatagtgagggcggcataa

SEQ ID NO: 148113 - DNA, 597 bp, Enterobacter cloacae
atggcaaaagcaacgctgaacaaaaacgggattgccacaaagccgggtgaaataacggtttataatttcgacggtaaaaccctcgaatatctggcttcatctgtcgagtttctggcgctgggcgtggggattcctgctaattcctgcaccgatgcaccggtcgaagaaaaagaaggtttcgcggtgtgtcgcgcggccagtcttgacgggtgggagtatgtcgcagaccatcgcggtgagacggtttatgatacggaaaccggtcagccggccaacattaccgcgcccggtgactatgccgtcggcgtaactacgattgcaccgtcgaccccctatgaccgctggaacggtggcgaatgggtcacggataaggacgcgcagaaaaacggtcaggttaaggaggctgaacagaaaaaatccgcgctgctgtcagaggcgcaaagcgctatcagtctgtggcaaactgagctgcagctcggcatcatcagcgatgatgacaaggccagcctgataacatggatgaaatacattcagtcgctgaacgcgatcgacacctctgctgcgccgtatattgagtggccggaaagaccagaataa

SEQ ID NO: 148114 - DNA, 879 bp, Enterobacter cloacae
atgacacctgagtatagaattgatgctgaaaaaagaattgctgattatttgatatctcaaaatgtagataatataaagtacatgcaggttgaacagtcatttaacgaactaggccacgaagttaatatttggaatgtcagaactaaaaacgatggtaactggtgggttgctgaaggtgaatgcgtccctttaaatctatacactcaaaatgagtatttcttctctgctgatgaagtatattcctttcatttaggcataacgcaaagactgcaagcaaaacatcataatgatttcaaacatgttattgatgaactgcctttagatatagagatgcttcgctccataagtcgtaggctaaacgcgagcgcgattgctctgaaccatattgacggccctgaaaacatccaagccattgggttgacttgccgggaaagcatgattgaattagctgcgcatctttataaaacacataaggatatcttaaaaaaagagaatgtcaaagctgctgacttcaagagtatatgccgtatagtcattgggttatatgctacaggaaaacgtaattcgagcttaagaaaatattgtcgttcgactattgaatccgcgtgggatttatccgctgaaacggtgcattcttcaaataaaaatcttcccgatgcaaaaatttgcctcttacttacttgcactgctgtttcattaattcaaaacctattccttaaattcattggttttgatcgtgaaataaaatgccataattgccacagtttaaaaagcgatatttttgagtctgaaaatgataaacaactacatgtagtgtgtgtggagtgcgggcacgtggtgcaggttatttcagaagaagaggttgacgagaaaccctag

SEQ ID NO: 148115 - DNA, 828 bp, Enterobacter cloacae
atggataataagctaaaggtaattgaattaaatagccttgatctgtttcgcaaagaattactaaccactacagaaccagaaaaagtggaaggattgctaagatggtatcttcaatcatatggcggtgttaacttcaagttcggttatgacaggccaatatttagagcacggaagtgctcaaacgaatgcggatataataatatcagtgagatatacccccctcctccagagaaatgtaaaataggccgaatgaatgaagatggacaagatatcttctatggtgcctatagtatcggaacagctttagccgaaattaacgcaaaggaaggggattatgttcacatagctcattttgaaatgccgaaaacctcagagtctggaatgagatgttttgctatcggcgaggtatttaatgcgtatcacggtgtaaatacaatttcaatcgaagtgtttaatgaaattcgggatgccattagcaggattggtaaggatgacatccgtgctctactatcatatttgtatatggatgccctttctgctgagttgctaaatagtgtcaatgcccatgaggtgaattatatttactcaaggattttttgccgtattcttcttgataaacattctgacgttgatggtcttatttatcctagcgctaaaataaaagggacgtcaaatatcgttttgcgcactgaagttgtcaagtcaaaaatgcaattggctgcaaatcttgtatttaaagtaaataagatttacccatatggaatagttgattttagtatagtaaaaaaggccaaaggctatacgccagatggacgcattgtatggtaa

SEQ ID NO: 148116 - DNA, 396 bp, Enterobacter cloacae
ttgaaactcctgaaaattatgctcatgctatccatcgccctcttgtcctttacctcacaggcaaatgacgtcgccactatgaaaaaatcacttaaaccatggcagccaatcgaggtttctaaaagcagtgacacgctgacggtgacactcaacgagaaccaaattacccctaccgtctacgatgcgattatcaacgccggtgcctgcatggatatatggacaaaagatgtccccatgaaatatctgaaaacagtcaaagagctgcacattctcaacaagcataaagcgcagggttatgtgctggaaaacccgctcgatacctgtcaggaaatggggaaagcaacgcctgagaaagcaaaagggatcatgctttcacatacacggctttttaagtaa

SEQ ID NO: 148117 - DNA, 864 bp, Enterobacter cloacae
atgaaaggcattattcttgctggtggctctggaacaagactatacccaattacaatgggggtttctaaacaattgctcccaatatatgataaacctatgatttattatcccttatcggtattaatgctggcgggtatacaagatatactgataatcacgacaccagaggatcaggatgggtttgtcagactgttaggtgatggaagacagtttggaattaacctgagttatgcaattcaaccaagcccagatggactggcacaagcatttataattggtgaagaattcattggtaatgattctgtttgccttgttttgggtgacaatattttcttcggtcagggttttacaccaaaactgcaaatggcaagtaacagaggtagtggtgcaacggtctttggctaccaggtaatggatcccgagcgatttggtgtggtggagtttgatgccaattttaaggctttgagtattgaagaaaaaccagagaaacccaaatcaaactgggcagtgacaggcctttatttctatgataacgatgttatcaatattgcaaaaaatataaaaccgtcatctagaggtgagttggaaataacaactgttaacgaagtatatcttaataataacaatttgaacgtggagttattaggccgaggtttcgcatggcttgacactggtactcatgatagtttaattgaggctggtagttttgttgagactgtacaaaaacgtcaggggatgatggttgcatgtcccgaggaaatagcctggcgtaacgggtggctctcaagcgatgaattacatacacgaagttctaaattaatcaaaaatcattacggacaatatctccgcaagcttttatgttag

SEQ ID NO: 148118 - DNA, 402 bp, Enterobacter cloacae
atggaaattattgattttgatgtttacggtgatgaccgtggatcgttgatctcacttgaacagtgtaaaaatattccttttaatattaaacgagtgtattacattttcaacacgtcttctggtgtatcgcgcggattccatgctcataaaaatttaaaacaaattgtaatagctattaaagggaaatgcgatttccatattgacgaagggcaagggattgaagttttgaccttagactcgccttccagagggctctatattgacaagttaagctggagggaaatgcataatttttctaatgattgtgttttaatggttttagctagtgaaatttatgatccttctgattatataaccagttacgaagaattcaaaggtatggcaaatgttagagttcgttga

SEQ ID NO: 148119 - DNA, 447 bp, Enterobacter cloacae
atgttagagttcgttgaatatgacgagtcatttcttgcgttaagttggctgtggttgaaggaccctgagatatccgtactgactatgactcctgaatttacaaaagatgaacagttaatattttttaaatctttaggagaaaggcgtgattactttatacgcggcatcacttatcagaataaaaagataggagctgttggtattaaaaacattaatcatgaaaaaggagaatattggggatacataggcgagaaaaattattgggggcaagggttaggcagagaaattatgcaaaaaataatttcagaagcacgattgctggggttgaaaaaattgtatttgcatgtaaattctaataatcagcgagctattaatctatataaaaaagaaggatttgtgttttcatctgtggatgagcagttaatcaaaatggaaaggtggttgtaa

SEQ ID NO: 148120 - DNA, 597 bp, Enterobacter cloacae
atgtttcttcaggaaaaacagagagaaattgagcaggctattttaccaggcgggaagtattcacatatccgggattttgcgtcaaaagctatagagcaggcactgcgactggctacaataatgactttttatttaactaaacctacaggaggcagttcggccgctgaccttatttatactaagattatcgatgcacgtcagataagaaatgccctgacaatagtgggttggtatttgcagcaggcgagtgatttattttaccctctgtcagagcgataccggtttgaatgcgacgtccgaagcctctggagctttattgttaaaagactgaacaaaagtcaaggtatgccatttcctaaatatgaattgcttcagtctggtccgggccgtctcagacacatagataaattaacgcctgcgttaaatcaactaatcaatcagggcatgtgttgcattataaggttcaatggctccagtgctttgtacatcgcgggtattcataacggctctatatgtacaggcgggattacccaccactacagcatcgtacaaaggcaaaatctgaaggatgaaggtttcttgcatgttgatttgtaa

SEQ ID NO: 148121 - DNA, 927 bp, Enterobacter cloacae
atgggagatatcgtgaattattatcatctgtatatatgcaaatctcgacaccaacgaagttatacccttccacagaagggatgtgatggaaaaataacgcttgttccactgttttgtctggatatcagccatctatatccgaacgcaaagggcggggcaaatattgctcagaatctgattatagctccttcatttattaatcgcaggaataatgatgctatcccgtatcagggacagggcttcgggggaattcagtcaacgggtgggttgatccgttttaacggcagtctgtatgacagtttaactgcgcgatttggttcagaggaggtgaatgcggcattaagagaaataacaccggccaaacgtttttatggcaatgttcccagagagattgagtttggtggtattgagcaacagcttcccttattcactttgctttatggggaattatggcgtcttgggcatgacaaaatctcggaatgcctgggggagatcagacagctgttccctgaatatcctttttatctggagttactggcgattgtgggcttccatgcggtgttatctggtgatgctgatcgcatcatggcgcttttatgccgtgtttttaataaatgcttcaatatcaactcgtcattacgtgagccacacaagcagtgtatcggtctgatgtatcgcttactgagtaagtatcttcgtcgctacttcagcgttgagatagacgacagggaagccgtggtggcgttctacaatgggttttactcacaggagataatcgcgcctggcgattctgaagatgaagtcgtgtgttatcgctatttcactggcgtcagacgttctgctaccacctttttctatgtaccacaacagaagaaggaacctgtcgatttatggcgtcttatgggggaagatcttacttttgaataa

SEQ ID NO: 148122 - DNA, 945 bp, Enterobacter cloacae
atgcagcctaaaattgatgtcagtgtcattatcccggtattcaatgcgcaggccactatcggctatctggtacatgaactcatcagcgagcaaacactcaatattgaggtgattgttgtggatgatggctctaccgacgaaacatcgaccatactcagcgccatcaccgatgagcggctgattattgttcatcaggaaaatcagggtgtatatgctgcaagaaatgcagcactggcagtacaccggggtgaatgggtggtctttctggattcagatgaccggattgaagaaggttttctccgggagcgactgaagagcgcacgagcggctcaggccgatgttgcccttttcaatggctggcgtaccaacagcagttgcctgcagcggcgaccggttcatcgtaagcagctctatgctcaggtggtcagagggcatgcgtggatacaatattgcgtggcacagaaagaatggccgcattacctgtggctacaaatggtgcgctcgtcctatataaggaagaataatctgcactttcaggaaggaaaaagccacaaggacatcctctggacgattaacctcgccgctgcaaatggccagttttatttcgccgacaggaaggactatttctacatcacaaacccggcatcgattacccaccggcaggactactacgatatccgggcgcacagctacattgatgttatcagcgacattctcgttctttcatccttgccacagcaccatgaaatcaaaacgcctctgagaaggcatgcgctggttgaatgtcgccattttctcgggttgttccggcgaaagattgcaaaccggcaggcagcccgacagttgtttagacagcgaatcgtattacgtctgttggttgcaggggtcggcagtctgagcgacctcttttttgtgctgaaactagtgagaaagatttatctgtag

SEQ ID NO: 148123 - DNA, 168 bp, Enterobacter cloacae
atgaaaagatgtgcaagatgtaacaagagaaggggcgtcatcagccgcctgcttgggcttgataaggaatactgcgacgagtgcttgtttgatactgagcaggaaattagggaaaaacgcattctccccgtcaggcgtcagaaagatgacagtgaagggaaagcgtag

SEQ ID NO: 148124 - DNA, 228 bp, Enterobacter cloacae
ttgccgcaagggacgttcacccgcgctcaggctgaagctatagccgccgcatacatcaatattgctatcgaagatgacctgggcacccattttcgtctggttatccgcgataccgacgacatgcttatctggcgcgactggaattttgctccggaggctggcgtgatgctcaaccgctatattgccagcaacggcatcccaatgacccctgtagctgacgacaattaa

SEQ ID NO: 148125 - DNA, 819 bp, Enterobacter cloacae
atgcgattagccagccgctttggccgcactaaccagatccgccgtgatcgtccactgacctacgacgaattacgccaacatgttcccagcgtttttggcgaggacaaacacgaatcccgctcggatcgctactgctatattccgaccatcaccctgctggagaacctgcagcgcgaaggttttcagccgttcttcgcctgccagtcgcgtgttcgtgaccctgatcgtcgggagcatacaaagcatatgctgcgcctgcgccgcgccggtcagataaacgaccagcaggtgccggaaatcatcatcctcaacagccatgatggtgcatcaagttttcagctgctgccgggcatattccgcagcgtttgcaccaattccctcgtctgtgggcagtcgtttggcgaaattcgcgtaccccaccggggaaacgtggtggagagagttattgaaggcgcctatgaggtactgggaatatttgaccaggtggaagaaaagcgcgaggccatgcagtcgctgttactccccccaccggcacagcaggcactggcgaaggctgcgctgacgtatcgctttggcgaagagcatcagccggtaaccgaagcgcaggcgctctccccccgtcgctggcaggatgagaaaaatgacctctggacggtctttaaccgcctgcaggagaacctgagcaagggtgggttggtcggacgctcggcacagggtaagcgcagccgcacccgagccgtcaacggtattgacggtgaccttaaactgaaccgggccttgtgggtgatgacggaacaactgcagcaggcgctgagctga

SEQ ID NO: 148126 - DNA, 483 bp, Enterobacter cloacae
atgacggacatgattcatcttaacgataacaacttgttgtatccctctaccggtgatgactccataccggtattagccgccacactcgttccggatgaacaacgagtggaattctggccgcagtactttggtaacatcccacaatggataatccttgagccgcatatcttcacctggatggaccgcttttgcgcggactacagcggcggcatctggcagttttacacgctgagcaacggcggtgcttttatggcgccggagatgaatgaggataccgatgaaaaatggtcgctgttcaacaccatgaacggtaacggtggtgaactcagcgtcgaagccgccggtatcgtcgtctgtctgatgacttacagtcaccacgccatgcgcaccgaatgcgacgccatgacggagcactattaccgtctgcgagactacgcgctcaaccacgcagaatgccgcgtcatcatgcacatcatcgactga

SEQ ID NO: 148127 - DNA, 480 bp, Enterobacter cloacae
atggatacacagttaccgctatttgccactgaattaccggtatccgcacaacgcaccatccgggaggcactcatcctgctggagcatcagcttcgtgagcccggcgtggcatttacttccagccatgcagtacgtgactggttacgcctgcagcttgccacactggagcacgaagaatttactgcgctcttccttgataaccaacaccggctgattgcgtatgagaccctcttcaccggcaccattaaccatttgcaggtccatccacgggaagtggtaaaggcggcactgaaacataacgctgccgccatgctcgcggcgcactgccacccttcagggcacgctgagcccagcgaggcagacagacggatcacagaacgtctaaaacaagcactggacctggtggacatccgtctgctggaccatctggttgtgggcggaatggagatcgtctcgctcgctgagcgtggctggttgtaa

SEQ ID NO: 148128 - DNA, 375 bp, Enterobacter cloacae
atgtccgatactgaaagtaccgatgccggggcgatacctcagcacacaatcgcttcccccaggtgggggctgaagtgcgacaccacaccctgttttggtacccgcctggtccaggagggcaatcagctacacttcctgtctgaccggagcaatttcaccggaacatttcacgaaagcgaagcattgcagcttaatcaggcttttcccctgatgctcaaacagcttgagttgatgttggtatccggtgagctcaacccacgccaccagcactgtgtcacgctgtatcacaatggtctcatttgcaaagcggacacgctgggcagttgtggttatatctacctcgcaatttatccgggggaaccaccagcagcgtaa

SEQ ID NO: 148129 - DNA, 366 bp, Enterobacter cloacae
atgcaaacccaatctaaccctgtacgggcggcagagtcctgcccgtcgcctgtcgtcgtctggcagacattactaacgcacttgctagaccgccactacggtctgacgctcagcgatacgccctttggcaacgatggcgtgattcaggagcacatcgacgcggggatttcgctctgtgatgcggtgaactttatcgtcgaaaagtacgatcttgtccgtattgatcgtcgcagttttagtgcagaaacatcgtctccgcttatcggtcgcattgacattcttcgtgcccgtaaagcctgtggactcatgacccgcatcagctacaaagcggtacctacatcactaccggcaaatacagcgagataa

SEQ ID NO: 148130 - DNA, 333 bp, Enterobacter cloacae
atgtctgtcacaattcaggggaatgcctcaactgccattttaaacaactccgccccggaaggaacatcaaaaatagccaaaatcatgagacaaattcaagtgctgactgaaaagcttgggaaaatctcatcggaagaggggatgacgccagagcagaaaaaagaaatggctgcactagtacagaagcaaattgaaagcctcagagttcaacttgaacagttgttacggcagcaggcagagaaacagaataaggatgcgaaagttcagcctgataacaaagtagagagaaaggacgatacaaatactgccggcaccattgatatttacgtctga

SEQ ID NO: 148131 - DNA, 267 bp, Enterobacter cloacae
atgtgcggacgttttgcacaagctcaaacgcgtgaagaatatctggcctatctggcctatctggccgatgaagtcgatcgcgacattccatacgacccggaacctctaggcaggaacaacgtctcgcccggtaccaaggtgctgctcctgagcaaacgcaacgagcagctgcatcttgatccagtcctgtggtcttacgcgcccgaatggtgggataatacgccactggttaatgcgtgtgtcgagaaggcaaccactcagacgtaa

SEQ ID NO: 148132 - DNA, 324 bp, Enterobacter cloacae
gtgcgcaacgtgatgatccctattcttagtgctctgtttctttttctgagcggcattctgattattaactggcagctatggcagatggcgaaactgagttacacttcccttcccgggaacggcgtgttgattataccgctgaccaaagggttgatggcaaaagtggtgacccagcttaagtcgcttttgcctaagctacctgacgggtttcatatcggggtgaacatcagcgccagacacatcaatgcgccttcatttatcggtgactgtcgcgtcttcgggaagggtttcagggtaaagaggtcaaactggttctcgaggtga

SEQ ID NO: 148133 - DNA, 300 bp, Enterobacter cloacae
atgctaaaggtcattgccgaagattttatcaaacccgaatgcgttgaaaccgtcctccctttataccgtgagctcattgcgacaacgaaacgagagcctctatgtattgcttatgatttgtatcgagatgaaaaggatccggggcattttattttcattgaggaatggcctgaccgggcggcactcgatgcacattgcgccagtgagcatttcactcggcttgttcctttgattgatcaacacgcgcgtaaagcagcgcagtacatactaatggatggacaggtggatcctgagagataa

SEQ ID NO: 148134 - DNA, 447 bp, Enterobacter cloacae
atgcttaagctaattgtgacaaccttatcattgttaactgcaactgctgcctatgcgcaaactgagatgacagtaagcagtctagcgacggatagtgaaaccagcaaagctttccataaaatgtcgaagggtcataacctgccagactgggtgatgaaaggcggtaccagtacacctgcgatgagggtaaccgtggacaataaagcctaccaggtagtttctgcctgcaaaccccatgattgtgcagcggaacaaatcgcgatcttgtactcacctgataccaagagtatgtcagcggtattttcaaaacaatccgaagagggatatcagcaaaacctggtgtggttgaattcaggaagtgatatctcgatagatggtaggacggttctttttgctgctctcagcggtagccttcaaaaccatcctgatgcttttaacttcaaataa

SEQ ID NO: 148135 - DNA, 222 bp, Enterobacter cloacae
atgaatgaagctgtaattctttccctcttcactgccgtcacattatttactgcaggatgcgctaaacatacatacagcattgtcactcaggacggtcgaaccattattagtgaaggaaaacctaaagaaaccagtgccggtttagtagggtatgtggatgcgaatggtgtcaaacagcagattaaccgcgcagaagtgaaagaaatcacccagataaggtaa

SEQ ID NO: 148136 - DNA, 1344 bp, Enterobacter cloacae
atggattttatttcagaattggatgaaataattattctcgggacgcaaggtcatattgaatcttcaattctaggcatggataccgaagctttctatgagtttacagaaactctatatcttgttacaagacattattttaatataaatccaaataaaaatgaaaatttttcatttatagcaaacacctctttaagcggtggtcgtcatccatgttccgccgcagaatgccgaattaataaaatattacaagtagcatcattctctgcactctatagcgatgaggtttatattcaaaatccgtatgaaaaaatcattatagacggactcgaaaacgtcaacagcatgtcaaagcaagatgttattgctggtatatacaactacctttatctaaaaccattaattaaaagaggcataatcaaatatgcacttaataaagtcgcattatgccacgaacacggactatcattagccaccccgctttctgaacaattaatcaaaaaagagaaggagttatatgaattacttcatgaagaattaattcacaaatgcacggttagttttgatattactgccgacggcactcctttctttgagataaaaggacccgatagttttatcgagcatggggtaatgtattttcatctcatggaaccagttggtgattatattaaatcactcttcaataaaactttaccctatagattttcaatgaaagaagtagctcaagaacagatccttgatttaatcatatcaccaataattgaagacttatcagaacaagagtggcacacaaaattttatggcacatcatatttatgtgacaaccagcagcaaattaaaatagcaacaagcaccaaccccaccatatacaaagtaaactcaacaagtttcaactcttcaattgaacactacttaccaacaatacaaagtaaaaatttagcaaacatactgaaaatcagggagaaagaagaagagtcgtttaaggtttacagagacaaagtcaataatttaattagaaagagtacatattgggaacaaagagaaattgcagaaatatttagagaccaaattctccctgagatcaacattattgaaaaaaaagtaagtgaatggaagaaaaaaaccaaagctgggataagagataaaatcattattggttctggtgctgtttctttcgggttatatgcaggaattctaccaaatgatcttagccacttactggctgctgtaggaggtggagcagcaattattagtactgccattgactatactaaaaccataagagggaaaagtgaggctagatcaaatgatttttacttcctttggcaaatgaaaaataaatga

SEQ ID NO: 148137 - DNA, 264 bp, Enterobacter cloacae
atgatgcacttcgcgcgcaatgctctccccgcctgcccgcttaaggggtcgcttttaatgcaggtgcatgaccggcctcagagcgcgccagtgctggcgctggcggggaattcggtgtcgttaaaacgcattcaaaactatgcgcctatgcatgcatggcttttatacgtaaaaatggcgggattttcggggatttttaagcggactactgcacggccagttctgcacgacggcgggtataattcaggttctgtgcaggtgtga

SEQ ID NO: 148138 - DNA, 165 bp, Enterobacter cloacae
atggagattctggttggctatccggggctgcataattctcaggtgaatttatccagctcaccagaaagccttttcattctgttaaataatgacttcagcttacgttttccgacgctggtgttgcagaaatcgttatgtactttttcagaccagactcccgtttaa

SEQ ID NO: 148139 - DNA, 2346 bp, Enterobacter cloacae
atggagcagcatgggaacgagtttgcggtagtcgttgaagacattcgcctgctcacgcaggatgaaggtgattcgctgacgatactgtgggttctggaagggcaagccgaactgcaaaccgccgcaggacgcgagacggtgtcaaataacggtcttgcggtgataaaccgctatcagcgctggcggttcagtagccagagcgcgaacgtgacgcttcgtgtcgttctctccgggcggtgggtaatcaagctgtacaatgacttttttgcccatgactacgcggttccgacagagtccggtggaaactggccgcagtgtgacgaacttcggcacctgctgcgtcagcttctggtggtgacgctggtgaacgatccgcaccgcttcaggctggaggcaaatcgctggctgagcgagatcctgctgctgctgattggccgctttcagcagcctgcccgccagaaaccccgggaccagcacgccgacgttagcaagcgcattgcccgcgtgctggagcggatcaacgccagctatacccggcgcattacgctggccgaaattgcagcgagtgagttcgtctccgaagcgtggctctcccgcctctttcgaaaagagatgggtgtcagttttatgcagtacatcaccgccctgcggctggaaaaagcggctgacgccctgcgcctcaccagccgtcctttgcatcagattgcgctggagcacgggtttgccagcacgcgcatgatgaccgatcggttccggcgctatcacaatatgtctccgggcgagtttcgtaaggccaggcggcatcgctccgatgcgtctccgcagcgggcaggcacgggcgagcagcgctttcccatcgcggtggataggctgtttagtttgcttagaggcgctgagaaccgcggctgggaacccgctccgctaacccactctccgcgtcaggagcgaatagttgatctgcagcagctttatccgctctcgtccgcgctgcgccgcgcgcgtctggtcgtcaccctgcgcgagctcgacgatttactgcgggaggatgttcgccagcatctggaggcgcttcacgaggcgatcccaattgaggggattgatatcgctgaaccttttctcagcagccgtctgttcgccacgggatgggacgatccccatatggcgggttacgcctgctggtacaatttgcagcagctgtttacctgggtagcaaaaaaaggctggacgatcctgctgcacacgggggtcaccacccgatgcgatcttctgaagcgctttttgcagctgtcggttaaccgatttttacccgatattaccgcaggctggcacgtcgtgatgcactggtctcttcaggcaagcgcggaaacccaggagcacgcctggcaggctcagcgggcgacagtcgggacctaccttccacaggcaaagtttggggtgtggcatcgcttctctcccgtgggtactgaactcggcgacgacgcgctgttccattctggcattctggaccaggccgatttccttgcctgccaggcggatgccaacgagctgctcgatctggcgcggctggatcctgcacatctctcctcgtctgaaaactatcccgtgctgaagatccgccaaatactcgccgcccttcgccagcggcagcgtacgctgccggtatggttactctcgtggaatacccttaccgggaatacgcgggcaaccaacggctggttttttcgcggcgcgctgcttatgcaaaatttactcgggctttcagaacaggtctggctggcaggattctggctgaattccggtttgcagggggaagccagggcgaacaacaccctcgatacatcgagccttgcgcttcagtataatcacggccttccgcggcccatctactgggtgctctggctgtggcaacgcctgcggggagaggtgctcatcaacgacaagagcgtgctgctgctccgccatcaggggggctatcagctgctgctgcgtaacgtggtggtgttcaatccgctgctctccagcgaggaggctttcatccaacgttttcaacagcaatatcatctgcagctacaggggatgtgcggcgagtggcgcatcaggcgccatcttttcgatcggcacaatggtgcgctctacccgctgctggaaggggtacgcagcgacagcgggcctgatgaagagatgtggcgctggattgcgcacaaagcgcgtccaacgctttccttacgcgatgaacggcttaatgacggctggcaaatgacagaatcactggaaagtaacgcgctcgtgctctatgagttcatgccgctaaacgggcgtgatgaagaggatcactctccgcgatag

SEQ ID NO: 148140 - DNA, 462 bp, Enterobacter cloacae
atgaacaagctaaatattacttcaaaaaacgtttgtttttataatgaaccacagcttattgaaatttcagtaagtgaacaaaaaacacacactctatatgcagggtacgtagacttacataatttagttgggtggctaatagacaatgaacaggtaatcaggaaggaaaaatttccttcagacttgactgaacaatgctttatagcaaaaaaagtagctgaattttatgagtctctggatacagagaatgatgaattaattgacttaatgtttgagtatcggtcatctcattgccttaggtttggttgccgaggcactgattttcccgaaatttacatcgggaaaataaataataattatgaagtttcattgttaagtgaaaatgacgcatggagctatttatttgatatagatgacttttattgcaaggttaaagccttgggcaaagggctggggttatga

SEQ ID NO: 148141 - DNA, 1548 bp, Enterobacter cloacae
atgataaacgcaattaaaagcgaaattaaacgcttatcaaaaaaagcattccgtaaagaacgcattcaaaataatagggaagaaaagtatcgcaaccaatttgaaaaacgcacaggaattaatgctgggttatcaaaaaaaagaataaaatatattccgcataaacattttgatgcttcttactgtgctcgaaatgctaattttcttgccaagtcaatttggcataaagtattatctcagcagtatgaaccaattcctgcaataaattatttaatccctaagccggacggttcaaaaagaagcattatggctttttcaatacccgatgcggctcttgctaatgtggttttacgaagggccagagatagaaatctcaaacgtttatcgccttcatcttttgcatatcatccagataaaaacgtttttgatgcaatcatcgctctgaattcctatgaaagaaaagggaaaatttttgctgtacaaattgattttgaaaaatatttcgactctattccatcttggtatttgaaaaaacaaataaatgatgcttcaaaattaagcttaacacctcacgaaaagcagattttcacatcatttttgcatcataaatactcagaattcgatgtatatagcaacaatcaacacaaacgaagaaccatcggtaccccgcagggctcttcaatttcattattgctggccaatattgcaaatcatgatcttgacgctgcactctctgcttcatcggggaaattcgtccgttttgctgatgatgtagttgctctctgtgataattatgatcaagcaaaatcaatagaagattgtttttttaatcattgtcaaaccagcggccttaaactcaacataaaaaaatcaccaggcattgctattatttcttcacaaaatcaggaaatgcgtcattatgaatattttgactacttgggatatagatttaatgacgatggattatcaattcctgacaagacaattaataaaataaaacaaaaaatctcgcgcttaattaacatttacctattatattatctccgttttggttttaaccctaatcgttcttcttcgaaaagcaattacgactgggatttattaggtctaatatatgaaatacgtaattttctctatggcggcttgtctgaagaagaaatctatatttttctatcaaacggaaagagattaagtcgcatgcaagggttaatgggtttctattgcttaatagaaaatccaaaaaaacttaaagagcttgatgggtggatggttaatgtcatcaggcgagcaatgaaagtacgtaatgacaacttaaataagatatatcatgctgattctgtaacaccaacaaatttcgatttaattaatggtacatggctaaacatgagttcatggaaagggacaggctccgccccaaacgctaaaatgccaagttttatgagaggctggcgtgctgccagaaaattctacttcacttttgggctagaaaatgtagcaccacctgcatatggccattcttctgatattgaaacttttaataattactaa

SEQ ID NO: 148142 - DNA, 1068 bp, Enterobacter cloacae
atgttattacacagaagcaatatagatatatgccaatctttaaatatcggtaacgataatgacgggcataacctaagaataagaattgataagttaactttagttagtgattttctttctgaagaggaaaaaaaggaagcgtatagtaaactggagaaaatgaatcagcggagtgaaaggaaatatcgagttgaatacattaaaaacaaaaaggaaaaaccttatcgcaaatcactaaatatatatagtagaaagaagaactccccagttctattgcacattgattatgttaagaagcatcctaatacaggtgggctacgcttggattttaatcctcaacatatgactaaagtaaaaatagatgaattagtatcatggataaatggcaacttaggtgagatattttatcgactacttgttcgagcatgggttacaagaattgatgtagctcttgatgtatataactgcaagctagatgattacctatggggatttaaaaacacagggaagagcacgtattacgatactgaaaatggattacctggggttagaataggcagcaatcgctctcttctacatattcattgttatgaaaaagttaatgcacgccgtgacagaaaactcattctgaaggatcgtgccaaacttattaatatcaatctggatgagcataagcgcttcttgcgtatcgaagctcgatacaagccaggtgctaaaccaaccagtaagaaaaaggatgccttgatgctgtcccaactcctggagatgagaaacccattcaaacggctgcaagtctattctaacagcttaggaaaggagttgcttatgagagggtgtctttctaccctcccaaaagaacccagcgttatagcgctgaaagccagtctcagacaacagttagggcgttcacgcttgactgccttacttgctagacatagaacagtgcttttcgatgaacgtgaggtctggaatctgtggccacgctgcgttgagcaattaagcagcatatacaacatagcatctgcttacggtgtacttaagggtgtagctaatcgaaaagacgattag

SEQ ID NO: 148143 - DNA, 519 bp, Enterobacter cloacae
atggcaaaaatggaaaagcgtttggaagatgatgaagtggcagcccgaaaacagagagacaaagattatcaaaatagacgtcaggaacgactgaaagaattaggcgagaaaaaaatatcaattaggattgataatgatgcctatgaaaaattggcggacttatgtgaaagtttggggcataaaagaccagtgccgggaatgcacaatcttatagaaagttattctgctgctttagtttatttgcttcgtcttgaaaatatgcagcagttgtatcaacctcaatcaaaagcatcaaaagaattatatgatttatataagacagttgatcatttcaaaaatgatctgggattttctgattctcaaataatcagtagtatgaaggaaagaaaaattcgacacccacgtgcagtatttaatggtgaggacacatataactggaaagaaacacatattaagaaattgttgaataagaagcttcttcttagacggctatctatattagatgaagaagataaataa

SEQ ID NO: 148144 - DNA, 381 bp, Enterobacter cloacae
atggcccagttaccatcagatagtgcagacaaacaggtaggccaacgcattcaaatgcgtcgtaaagagctgggattgacagcccagcacttagcggagcttgtggatatatcccatcaacagctttcgcgttatgaacgtggaacaaacaagatcaacgtagcccatcttgtgaacatcgcggttaagctcaacacaccgattagctggtttttcattgattgtttctcgacgtttgaaaatgacatccagaaacaacaggatttcgcacctgtaaaagatgcagacttgaagagtcgacttgataacatatggcctcgcttaacacatgagcagaggcgcatattgattatgtttcttgataaatataccaaacaataa

SEQ ID NO: 148145 - DNA, 564 bp, Enterobacter cloacae
atgaaaaaacaggaagtattgattattgaatcacgtagtgatcaggatatttatgatggcagaggtgaaggagaaacattaaagcgtatacttcaattacaaggtatcaatgccaaaagcattgaggctatcaatgagaaaatgctcattaaagcgttaaaagtcgctcaaagagaaaatataaaatatgtccacattagtgctcatggatatgatcgaggctttgctctaactgatgatgctattattacatggcgagattttgatcgacttgcctggccgatattaagagggaaatgcatttgtttctcaagttgctctgttggtaatggtgcagaagagttatttaccctacacaaatcattctgcaatgcgattattgccccaacaagagatattagctggggggaaggcttggtggcatattctgcattttaccatcgagcacaattacgcgaaaaatcatctatccagaatgtaaaagtaatgaaccatattgttggtgcggggacgttcagggttattgagtctccctatgtttctcatacatatacgattggttga

SEQ ID NO: 148146 - DNA, 7743 bp, Enterobacter cloacae
atgatgccgtctcatcagttgtttaacaggggatatcattccttcaaccagcttttgcccgaacttgctgttcaacaaactactcagacggcatttgaattcgtccgcagcgccagtgatattcagagccaaagctatgaccagttacaccagcgcgccgcgtcgcttgcacacgcattactgcaatacgggcaacggggcgaccgggtaatattgctttatccggatggcgaagattttattggcgctttttttggatgcctttatgccggcagggtggcagttcccgtcccgatgcccgcaaaatcatcaggaagcgcgtgggagcgttttgccggagtattacgtaatgcgcaaacggaatgtattgttacgacagcaaagggagcagaaacgctaggccagctattacttccgttatccccgcttatttttaccttcgacaaaccagacacagctgcgctaccggcgggctatcgtctgcatcctcttgatcgcacgttctccggggcatttcaccccgttccggtagcggaaaacgatctggcttttttacagtacacctcgggttcgacgggctctccgaagggcgtgatggtgacccatggcaacctgtgggctaactcgcatgccattcaccgctttttcggccatcacagcgaaagccggggcacgatctggctgccgcattttcatgatatggggcttattggcgggctgctgcagcccgtgtttggcgccttcccctgtcgggtgatgtcgcccatgatgctcatgaaaaacccccttaactggctcaaacatatttctgactatcaggcgacgacctccggcggccctaatttcgcctacgatctgtgcgtgcgcaagattggcagagagcaggttgaggcattggatctttcgcgctgggatgtcgctttttgcggcgcagagccgattcggcccgccacgctacagcagtttagcgaacactttgcgcccgcaggttttcggccgggcgcgttcctgccctgctacggcatggcggaaaccacgctcatcgtcaccgggatggagaaaggacaagggctccgcgtttccgacgaggccggagcggtgagctgcgggcaggctctgccggataccgaggtgcgtatcgtcgatcccgaacgccatcagcctcttgctgacggtgagagcggggaaatatggctgcgtggtccgagcgttgccgcaggatactgggacaatgacgccgccacgcgcgaaaccttccaggcgtctctgacaggtcatccgcacccgtggctgcgcagcggcgatatggggtttctccagtccggccatttgtacgtcaccggacgactcaaagagctgctgattattagcggtcagaatcactacccgacggatattgaagagacgatccgccaggccgctcccgcgctggcggaagcgacggtttgcgtgtttgccagtgaagacgagcgcccggttgcgctgcttgagctgatgacgcgccataaaaacgatctcgatatggcgacgctggcatcgtccgtgaccgcagcggtagcggagcggcacggcatcacgctggatgaaatgctccttgtcggacgaagggcaatcccccgcaccaccagcgggaaactacagcgcacccgcgcgaaagcgatgtatcagcagggaatcctggaagtggcctggcgcagccgtcaggacgcgtcgaaacctgttgaactcgcgggggaaaccccacccgcgctggcggcgctgatagccgggataatcagcagcgcgatgaacacgacgatcggcgaatcccagtgggacgatgcgtttaccggctttggcatgagctctctgcaggcggtgggcgtgattggcgagcttgaacagcggctgggccgcgagctctctcccgcgctgatttatgactaccccaccatcaatcggctggcggccgcgctgggacaacccgctgcggcccggccggtcagctcagccgtcgcagagagcgtcattgcggtgattggcatcggcgtggagctgccgggacatagcggcgtggaggcgctgtggtcgttgctgcagcagggccacagcacgaccggcgagatcccggcgcaccgctggcgtacctcgtcccttgacggttttaaccgtaaaggcagtttcttcgacgaggtcgacgcgttcgacgcaggctacttcggcatctctccccgtgaggccgtctatatcgatccgcagcatcgtctgctgttagaaaccgttcaacaggcgctaaccgatgccggccttaaggcgtcctccctgcgcggtagcgatacggcggtctttgttgggatcagcgccagcgactacgcgcttacctgcggcgataacgtctcggcctacagcggcttaggcaacgcgcacagtatcgcggccaaccgaatttcttatctttatgatttaaaaggtccaagcgtcgccgtcgacacggcctgttcttcctcgctggtggcgatagagggggcaatgcagagcctgcgggccggacgttgcgctctggccattgccggaggcgttaatctggcgctgacgccacatttgcaaaaagtcttcaccgaagcccagatgctggcccccgacggccggtgtaaaaccttcgacacccgcgcggatggctacgttcgtggtgaaggctgcggcgtcgtggtgcttaagccgctttcgcaggcgctggcggatggcgatcgggtttatgccacgctggtggcgagcgccgtgaatcaggacggccgcagcaacggcattaccgcgccaaatggcccatcgcagcaggcggtcatccggcaggcgatggcggacgccgggttggacagcgacagcattgactatatcgaagcgcacggtacgggaacggcgcttggcgatctgattgaatatcaggcgctggaagcggtgtttgcggaccggaaaaagaccgcacctgtccaggtgggttcgatcaaaaccaacattggccaccttgaggcggcggcgggcgtgctgggcgtggtgaaaacgtctctgatgctgcacttccggcaatacgtacctcacctcaattttcagcagaaaaacccgcatattgcggcgattagccgtcatgttgaggtgagcggcgcgcagcctgcctcatggcatgccgatggcgaagcacgctacgcgggcgtaagcagctttggcttcggcggtaccaacggtcatgtgattttgcgcagcgcgccagcggtggaaaaacgccaggagcccgctgcgccgcacggcctgcttctggtcggttcacatgataaaggggcgtttacccttcagcgggaggcggtcaaaaaagggttatcgacgtgccaggagagcgatattgccacctggtgtcggctggtgaacacccgctacgacgcggcccgctatcgcggcgtggcgtatggcgcggatcgctcccagttgacggaaagccttgcgcagctcaccgcctgcaaggcgggtaaagcccagccccaggtctggctcttcccggggcagggcacccagcaaatcggcatgggtgccgagctgtatcaccatctgccgcactatcgcacccagtttgacgcgctggcgacgactattcagcagcgctatcagattgatattacgcaggcgctgtttgcccgtgacgacagctggcagcgctgcgccagaacgtgtcagctctcattatttgcctgtagctacgcgcttgctcagagcgtgatgcagttcggcccgcgtccggctgccgtaatggggcacagcctgggagagtactgcgcggcggttatcgctggctatctctcgctggacgacgggctggcaatggttcatcagcgcgcgctgttgatgtcagccctgacgcaggaaggggcgatggctgtcgtcttcagcggcgaagccgacgtccatcagatgatttccccctggacgggcgacattgatatcgccgcattcaacacgccgacgctgaccaccatcgcaggcagccgggcggcgattgacgcctgccttcaggccatatcttcaaaaggcggtcacgccagaaaaattaaaactgccagcgcatttcactcctcgatgatggatccgatcctcggcgcctggcgcgagtggctggtcaacaacgtcaccttcacccgcgggacgatcccgttttacagcaacctgaacggtgaggcgtgcggccgcaccgacgccgactactggacccggcaaattcgccagcccgtgagtttccttcagggcgtgcaaaacgtgctggcacagggtgagttcacctttatcgatctgagcgcggacggttcgctgggcaaatttgtgaccgcaactgaccgccgtcaccgggtgctggccgcaggcgaccagcgacatgagtacaaatcactgctgacgctgctgggtacgctgtggcagcaagggcacgacatcaactggagcgggctgtaccacgcgaccacgcgggaggcgctagccctgcccgccatccagttctgccgcaaacgttactggctggcgggtgagacgccagcgcagaccccatctgcaaaagaggacgctatgtcaaatcaacaccatttagccgctgaaataaaagcgattattgccggttttcttgaggcggatcccgccgcgcttgacgactctctgccgttcctggaaatgggggcggactcgctggtgctgctggatgccatcaataccattaaagaccgctatggcgtagccatcccggtgcgggcgctgtttgaagagctcaatacgctggacgcggtgatcggttatgtggtggagcacgcgcagccggcggcggctgcggcggctgcgctcaccaccccggaaaccgccggcctggcggcacagcctgtcgcggcaccgcagggggccagcaggccggtgcctgatacggttcaggatctgattgcccgccagctggagctcatgtcccagcagctaaatttgcttaacggcacggcgcaggctctcccgatgccagccgcacccgcgacgccggacgttatcgcgcctgcgcccgtcgtggccccgaccgcaccggtgaaggccagcgcgcacaacagctggtttaaaaaagagaccaaaaaggtctccctcggcgctgagcgcgaccagcatctggcgcaactcacccaacggtttgtcggtaaaacgggcgggtcaaaacgcaatgcccagcaataccgcgccgtgctcgcggataaccgggcctctgcgggctttcgtttatccaccaaagagatgctttaccccttagtgggagagcgctctcagggttcgcgcatctgggatgtcgatggcaacgagtatattgattttacgatggggtttggcgctaacctgctgggacatgcgccggactgcgtgcagcaggccgttgccgaccagctggcgcggggcatgcagattggtccgcaaagcgccctggcgggcgaggtggcaacgcttatcagcgagctgaccggccagcagcgcgtggcattttgtaactccggctccgaagcggtaatgagcgccgtgcgcctggcgcgagccgtgaccgggaaaaataaagtcgcgctgtttagcggctcgtatcatggcgtgtttgacggcattctggggcgacagcaggggggagaaacccccgagcgcgcgacgccgattgccgcaggcacgccgccatcgctggtggacgacctgctggtgctcaattacggcagcgaagagagcctggcgcttatcgcccgctatgccgccgagctggcggtggtgatcgtcgaaccggtgcagagccgttatcccgatcatcagccacgcgaatacctgcataccctgcgtgagctgacgacaacccacaacattgcgctgatgtttgacgaggtgatcaccggtttccgtctggcggccggtggcgcgcaggcctattacggcgttcaggcggatatcgcctcctacggaaagattgtcggcggcggtatgccgatcggcgtgattgcaggctctgcccgctttatggacagtatcgacggcggattctggcagtatggcgatgactcctggccgcaggctgaactgatcttctttgccggtacgttctccaagcatccgctgaccatggcggcaagcaaagccgtgctggagtacatcaaaacgcatccggcgctatatgaagacatcaaccaaaaaaccgcgcgtctggcgatgtcgctaaatacctggttctcagcgaccggcacgccgattgagatcgtctcagccggcagcctgttccgtttcaaattcaacggtaactacgacatcctcttccaccacctgatgctgcgcggcattttcatctgggaagggcgtaactgttttgtctcggtcgcgcacgcggatgaggatatcgatcggtttattgcggcggtgaaagagagcgttaacgccatgcgcgtggacggcttctttggcgaggcgggattgcgccccgacacgcgttatgccgttgcagacagccagcagcgttttctgcagctggccgcgcaggatgaaagcgggctgttggccgggacgatcggcggcgtgatcgaaacgccgcgcaatgtagatggcgacatcatgcgcgccgcctggcaactgctgtgcgagcgccatgacgcgctgcgtatgcagttcaccgacgcgggtgaccttcaggttgtccaggcgcccatcgtcgatgtctgcgaggaaaacgctgcgcctgccgcctgtctcgctgaatttgctgcgcgtccttttgatcttaccgccgcgccgctggctcgcctgctgctggtccgccacgaggggaaaaccacgctcgccatctcggcacatcatacggtggcggacggctggtcgtttatggtgatgctgcgcgagctgctgcatctttacgatgccctggcgtcgggtaaacgtcctgacctggcggcagcggcaagctatttgcaggctatccgcgcgcagaacatcgtcagcgaggctgagctacctgcgcgtcttgcggcgcttccagcgcgccgggtaacgccggaagctctgagcgtgcaagatccctccctgacgtatcaggggcagcggctggtacagcgcctgtcgtatccgggcctgaccgggcagcttcgcaaagcctccgccgagctgcgggtgacccgcttcgcgatgctgaatgcgctctttaccctgacgcttgagaaggcggtcggtcattccccggtgccggtcggcgtgccggatgccgggcgggacttcgggcagggggacgcgcttgtcggccagtgcgtcaggctgttgccgctgtgtatcgacagcgctgcctgcgcgtcggtgtccggggttgccagggcaatccatgacggtatcctcgcgcagcgcggcgagcccgcactgccgtcacgctgcttccacggtcaggatgcgccgcttcctctgctggcgacctttaacgtcgagccgcatgctccgctggctgagatgcgtcagtgggaggccagcctgtcgctgctcccgatcggtgccgtcgaattcccgctgatggttaacattctcgagacgaaagaggggctgtccgtcgagctggattaccagatgcgctatttcaccgaggaacgagcccgcgcgctactggagcacttcctgaaggcgataaccgtgctggccgagcagggagaagaggctgccgaagcgttgttctcgtcgtcagaggcgctggccgcatcatga

SEQ ID NO: 148147 - DNA, 1017 bp, Enterobacter cloacae
atgaaaaagctgacgattttcgtcctcctgggcgccgtgctggcgttcgccgttaatctgctgatcgatgccggactgttttaccgggtgcaggagagcggcggggaacagtgccaaaaaataacgggcattgagggcgcggaggatatcgctcccttattggatggcggggcgatagccagtagcctcaaccgacacggcagcacgcccggggcgctgtattacctcaacggcagcgaccggccgcggcgattggccggcgactatccggatgtcttcttcccgcacggcatcgatgtctggcagcaggagggcgagacgtggatctacgtggtgaaccaccgcccgcaggaggacagcattgatgtgtttcgctttaatcgcgcgcagatgcgtcttgagtatcagcccgccctgtcgcgcgctgtcggcaacaacatcaatgatatcagcgtcattgataaaacccgctggctgctgacgcgggaccaccgctggaagggcttcgcgggacgcctggaggactatctgcggctgccgctctccagcgtcctgctggcagacggggcggggctgcataccctgatcgatggcctgcattttgcgaacggcatttactacaaccgaccgcaggggcgtctgtacgtggcggaaaccacccgcggcgcggtgagcagttggtcgtggcaaccgaacgaggctgcgcccgtcctgctggggcgcgtcagcggtctgcatggcgtcgacaatattctgccggacgggcagggaatgctggtggcggcgcacccgcagcttctgaagctggccgcctatcagaaagatgcccaggcgcgttcaccgtccatggtgtggcggctgacaaccggcccgcagggagagatcgctcaggccagtatgctctatcagagccacggcgaggcgctggcggcaatcagcgtcgccgcgccggtgggtggaaagatgatgatgggcagcgtctttgacgacgggctgctgctgtgcggggaacaataa

SEQ ID NO: 148148 - DNA, 1056 bp, Enterobacter cloacae
atgctgaagagatggttttcccgacgcggtcattttcaggggacgcttgagggacgggaattccccctgacgtccggccatacgctcctcgaaagcgcgctcaacgccggcgtttccctgccgtataactgccaggtcggctcgtgtaaatcctgtctttgccgggtgacgaacggcaaggtgcgttcgctcgtcgacctgagctatttgctcagccaggaggagattgccgccggccacgtgctggcatgccagtgcctgccggaatcggatttaacgctggccgcggtctcgacgtcctggacgccagcgcgaattacgcaggctgtcgcgctctcatcaacggtatggcgcgtgacgctgctggcggaacaggcgttgcccttccagccaggacaatacgttcaggtcggtctcgaaaaggataaggatatccggagcttctccgtcagctggccgagccgggggcgagagattgttctggatatcacgcgccgggaagaggggcggctatccccgctgctgtgtgatgaacagggcgctggccggaaggtgtggctctcagactgccgggggcagttcggccagaaggatgacggtaacggtccgctgctggccatcgccagcggatcggggctgggagcgacgctgggtctggtccgcgccgcgctggcgcgtcatccccaccgcgaggtcatgctggtccacgcggttcgcagacggcaggacaaattcgacctgcaagaactgcagcgtctgcgtcagcactaccccggtttccactttctgcatgcgttatcccgggagcgtgaggttcaggagcgagagctggctggccgtgtgacctgctggcttgacgactggcgcgccctctatccccgccggacggcggtagccgaatggcgcgtcgtgatttgcggtaatccagcgctggcgcaggcgtgccggcaaaggctgctcgccggaggggtaatgagccacttgcttgaaatggactgcttctcgccgccggtcggtgcacaaaacagtcataacaataaggagcccgtatgttga

SEQ ID NO: 148149 - DNA, 1170 bp, Enterobacter cloacae
atgttgagttatctgagatttgcccttgtcccctgcgtttttttaccgctcaccgcgctaaccactctgctcggcggcgtgtggatcgtcgtttccatgctctgcgtgacgctgagctatgttctcttcgataacgcaaccacgcacgacaccgccgatcgccactaccggcttccggcgctgctggaaatcatcccgtatttacagctcccggccgcgctgctggcgttgttcactcttgtctggcaggccgctcccggcgatctgctcgggtttggcgcatggctttccgccctgacgggtcacaacattatggcgctgcataaccttaccctacctgagctgctgcttgcggcggcctccaccggctataccatgagcaccaataccgtggtggctcatgagcttatccacaaaacccacagtctgatggcgatgatggtcgggcgctggcttctggcgctggtcggcgatgcgcagttttcgatttcgcacgtctattcgcatcatcctaacgtggcgaccccggcggacggggcgacggcgcgtcgtggggaaaatgtgtatcgcttctttatccgttcctctctgtcgcagtatgttgaatcctggcaggttgaagcacagcggctgtcgcttcagaaccggcgcggcgccatgctggtgaaccgggtgataagcggggtgctgatgagcctgctgatcgtggcggcctgctttacggcggcgggcatcaggggcgcgctggcgtgcctggtgaccatgctggtctctaaattcctgtttgaaacggtgaattacattcagcactacggtctggtccgccttcccggcacgcgcgtggagccgcgacacagctgggattgcaataaccgggcctcgtcggccggtctgttgaacctgacgcgccactccgatcatcacacccatccccgccgtgagtactggaatttgcaggcgcacagctatgcggtgggaatagagaaagggtatgtcgcccatattttttacgcgctgataccgccactgtggtttaaacgaatggaagcaaaactcgcgtactgggacgaacacgttgccagcgacgcagagcgtgccctgatccgtcagtctgaatcatccgcggttaattccactgttccctgtgtttctggagaatcccatgagtga

SEQ ID NO: 148150 - DNA, 948 bp, Enterobacter cloacae
atgagtgagcaatttgatcgactgatcgagcaagcctaccagcagtatcgtggacccgcctacctgcgctcgccgatggtttcatgcgtgaaggccgggattcgcctgatggattgggttgtgccgggggcgaccgccgactggctgggcaatcggttttttacgccgcgccgggtgccgacgcgcgcaagcgataaagagatgacggcgctggcgagccgcattgaatccctccctctgagcaatggtaaacatgcggtggtgtaccgctggggcagcacgggacctaccgtgctattagcccacggctgggagtccagggcttcccactttggcaggcttatcaaagcgctggtcgaaaaaggctttcaggtcatcgggtttgacgcccctgcacatggtaacgcggcaggttgtcagagcagcatcgtcgagttcattgaaatcattgaacaactcgcgcagcaggatggcggttttgacgcgattgtggcgcactcgtttggcgggttatccgtcatcaatgcggtaaaagcgggattgcggacccgcgcgctggttatcgtaggtgcgccgacgcactttagcgggctggtcacgaaatatgccgcgatcctgaacctcccgggacgccagcagcagaggctgcgccggtatattgaagagtattttggtattggcgaggcggtctggcagcgctttaacgcttacgaggggctgcagcaggtcgatcagcccgcccttgttattcacgacagcagtgatgacatcgtattgcgggtcgaagcagaatgcctggtcaacgcctggcctggcgcgaggctggcagagacccacggccaggggcataatccgctgcgccgtccgggggagggcatcgatatggtgatgacgtatcttgctcccttgctgacgtcaggcaatgagcgtgataacccggttgcctga

SEQ ID NO: 148151 - DNA, 714 bp, Enterobacter cloacae
atgtttactgcgataaacacggattcagcgcccccttttattcactccgttgagatgggcagcgtcgaccctttccccgccctgcgctactgcctggtctcattcaccgcgcgtgattaccatgacgggctctttgataaatggggcatcccctttcccggcccgctcaacagcgccgtggttaaacgcagggcggaatatcttgcggcacgctatgccgcgcaacgggtgctgagatccttcggctgtgacgctacgccgggcagcgcgccggaccgttctccggtgtggccttccggctggcggggcagcctgtcacattctcatgaatgggcgctggcggttgttgcgccagaggcgtcgggcctgacgccgggcgtcgacattgaatttcttgcacccgagatgatgcagcggacagcgcacctgtttaccacaccccaggagcgggagcgccttgccgccagccggatcgacgaggccagagcgctattaatggccttttccgcgaaagagagtctctataaagcgctctatcctgacgttggccgcgtcctcgattttgaggcggccagcgtgtgccacattgcgcctgaacagcaggggatcgccctggagctgacccggacgctttccccccaacgcgtaaagggcagccggatccagggctattatcagctatcaggcaaccgggttatcacgctcattgcctga

SEQ ID NO: 148152 - DNA, 2574 bp, Enterobacter cloacae
atgaagttcactctcaaggactaccagcgcgatgctgtacgtgattcgctggtgaatcttagaaaagctcgccgttactggcataacgaaaatgacaagagcgccttctctttaacggctgtgaccggtgcgggtaagaccgtcatggctgccgctgcgtttgaagcattgtttcatggcgacgacgagtttaatttcgatgccgatcctggcgcagtagtgatctggttcagtgacgatcctgcactgaacgagcaaacccgctttcgcttgatggaagccagtgaccgtatcaactacaacgatatggtggtggttgaacatcctttcagtcggcgcaaatttcaggctggaaaaatctatttccttaacactcagaagtttggcaaaaaaagcctgctggtgcgcgggttcgatgataaaggcgggctcttcgaagcagctcctgatgcacaggcttatacgctatgggataccatccagaacaccattgaagatccggatctaaccctctatctggtgctggacgaagcgcacagaggtatgggttcgtcaacggcttccagtgaagctgctaagagtaccattgtgcaacgtctaatcaatggttcggctggagtgaaaggtattccagtagtgtgggggatttctgccacagttgaacgtttcgacaatgctattgccaatgccggtcatcatgtcaaactgccgaacgtggtggttgattcggctaaagtgcaggaatcgggacttatcaaggatgatatcattcttggtgtaccggatgaagccggagacttcgatactgtgtgggtacgccgtgctgccgacagactcagggaagtgaccgatgcttgggcagagtatgcaaaacagcaggaaactgtgcgtgaagtagtgccgctgatggtattccaggtacccaatacgcctgacccgaacgaagtagggcgttggctggatacgctattctctcgctaccccgaattgcccgttgacagtgttgcccatgtattcggtgaacataccacacagcgtttcggccaacaccaggtaccttatattgaaccgcagcgggtgcaggaatcaacctgggtgcgcgtactgattgctaaagatgccatcagcactggctgggattgcccgcgtgccgaagtaatggtttccttccgcgctgccagcgacaggacgcatattacgcaattgctagggcgtatggtgcgtactccactggcaaggcgtattccaggtaatgagcgcttaaactcagtagaatgcctgctgcccaagtttaatacgaataccgtgagagatgtcgtcaataccttgtttaaaggtgatgatacatctcctccgagcggacgtatcctggttaaccctgtggagatgaaacccaacccggcggcttcagctgacgtatgggaagtatttgaatcgctaccttcgcaaacccgaccacagaaaggagccagacccgtcagacgtctgaccgcgctggcacaggaactggtggatgacggcattcttgatggggcagtcaggaaagcccatgctgctttgcacgctgtcctggacaaattccagacagaaaatgctgaaaaaatcaaaaataagcgcaatgaagtgctcgttgtggatggtaaaacggtggttgccagcctgaagaacaaagtaatgaccttcaacgaattttgggaggaggcggacatagcggtgattgatgacgcctaccggcgtgcagcccgaatcttcagcccggatgtttcacgtacctatgtcgaatatctagccgataaggtcgcggatcgagaagaagatgctgaggagtatttggaagcaatcatggaagctcgtgtgaccattgctggtttggggctagtgatggaggtgcaagattacttcgatgtcgaggctgataaactggcgaaggcgtggctggctgagtacacaccgcagatcaagtctttgaaagatgagcgtaaagaggcttatcgtcaaatcgtcgaaatgagtaccgaaccgcaggatgtggatctggtaaggccagagaacaagtttgaaatgaccaaggcgcgtgaaagcgagaaggtaactgaccttcccgtctggaaacaccatttgttgtgtgacgaaaacgggaactatccggctcagttgaaccattgggaaaccacggtttttgagatcgaaaccaaacgtgaaggctttgctttctggtatcgaaatccacaatacacagggcagtcgtcactaggaatcgcttatgttgaagccgaacagtacaaaattgttcgtcccgatttcctattctttgccgaacaggatggcgaaatggttgtggacatggtagatccacatggcctgcatctggctgatgccttgcctaaactgaaaggactggcgctatatgccgaacaccatcctgatgcttatagacgaatcgaatccgtcgccgaagtaaagggtaaattacgagtgttagatttgaaacggcaagatgtacgaaatgctatagctgtagctgaaaatgcagaatcattattcagcagcaattttgctggctattatcagtaa

SEQ ID NO: 148153 - DNA, 2148 bp, Enterobacter cloacae
atgtccaggctgactgatttaatagctaaagcgaaggccaaagacccacagttgggcgctgacttggatcgagaaatcaagatcctgtcatcacgtcttccctttggtcttaatttcgaacgacatagccctgaagtagttgagttgccattgcggcctattcgcaaaggggacaaggttcgcattctgccagagcgtggttctactaagaaaggtgatcagcggttatggcaggttaaaaccatccacaagacaaagaaggtcgctgatctggagttactgggcacggttgaggtcgagactcagactgtagcgctgagcgaccttgtagttatagctgaatttcgtgacacgatctggccgggactagttagtacaggaaaagtgcaacgcggcggagacaagcctttccattcagtgatcaatggcgagaactaccatgtgttgaaagcgttgacatacactcataggggaaaggtagacgcaatttatattgacccaccgtataacacaggggctaaagactggaaatacaataacgattacgtagaaggtgacgacatctatcgacacagcaaatggctggcaatgatggaacgtcgcttgctagtagctaaggaactgttaaatccggtagattcggtgttgatcgtcactattgatgagaaggaatatctgcggctgggattgttgctggagcaaatattcccggaagctaacgtgcagatggtctcatcagtcataaatccaaagggagcttcccgtggaaacggatttcgacgtactgacgaatacctctattttgtaatgtttggagcttcatcacctgcacgccttcagcttggtgctgattgggctagttctgcgtcaagtacagtagacgatagtgacgaagggaaagcaccatcaacaccagaatggacctcaatgatgcgacgtggttcacacgccgcccgtgcggagcggcctggactttttttcccaatatatgcaactcccgatggaaaacgaattgttgaggttggcgagagcattccattaggagctgaactcccacaggacagacccggactgacgactatttggcctctacgttcagatggttcagaaggtgtttggcaagttggacctgcggaattacgaagccgcattgagcaaggtagggttagactaggacgagcgacttcctatggttttgtcgtaaattatcttcctgatggtgcgtatgcagcggtattgtctgatcttttcgaaatacatggtcgtgctgaggacggctcactgatagcaacaggtcgtcgcgatactcgacgagtcgccccctcacagtggaaaattgcttctcataatgcctctgagcatgggaccgcccttcttcggtccttgttaccgtcgagaacttttccattccctaaatcgctttatgctgtcgaggacgctcttcgcttttttgttgctaacaagcccaaagcaaccattctcgatttctttagtggctcaggaacaacagcccacgcagtcatgcgcctgaacaagcaggatggcggttgtcgtcagtgcatctctgtcactaataacgaagtcgctgccgacgaacagaaaaaattgctacaacagggccttcgccccggagactcagattgggaaaagtggggcatctgtgactacataaccaaaccacgtgtacaggccgccatcacaggaaaaacgccgaaaggacaacctattaagggtaattataaatttatcgatgagttcccaatgtctgaaggcttcgaggaaaacgccgaattcttcaccttgacctacgaagatgaaaaatcggttagtcacaacctagcctatgcgcgcattgcaccgttgctgtggctacgcgcaggtgcacgcggcaagcgtatagaaaaactgcctgctgagggatgggtggtgactgatgcttatggcctgctgtcgtctgtggatcaggccacacctttcattgaagccattagtcatgctagtgacgtacgggtggcctttatcgtcactgacgatgaccgccacttccaggctgtcaccaggcgtctgcccaaaggtgttgagccggtacgtttatacgaatcgtacctgaccaatttcagcttcaccagtggggaattaacagaatga

SEQ ID NO: 148154 - DNA, 141 bp, Enterobacter cloacae
atgttgattcacagaaggaatcagaacgctaaaaaattggcggtaatattaacactatgcaatgagttcggcgatcctaaaaccgagagtttcgggggctggatacacatatgggtaatgttggtgttcgacctccgctag

SEQ ID NO: 148155 - DNA, 1026 bp, Enterobacter cloacae
atgttgggtatgagccagaaggatttggctcagattatcgccatttctcaaggaaccttgtctaagatcgagcaaggccttaagccggccactgatgagcaaatcgatagcatcgcaaaagcgctcaactgccccgttgagtttttcatgatgtctgaaaggctttatggtggacctataagtgcaaatcccatgtatcgtaaaaaagcgtcagtcggtatgaaagtactggacaagcttgttgcggaagtaaatgtacgcatagcccatctcagaaagcttttgcagttcgttgattttgaacctgaatatgaacttccgtactatgatcctgacgattatgaagacaatattgagcaaattgcgcgtaacgttcgtacagcatggcacatcccacgcggaccaataaaaaatctagtcgaagtgttagaaagggcgggagtcattatcatcgactgtgatatggaagatacgagtctttccggccttagttataaccttgctggactgccaccactgatctttataaataaaaatcagccaatggaccgctaccgatttaccttagctcatgagctgggacatttagtcatgcatcgtgctcctactcctgaaatggaagaggaggcaaatacttttgctgcagaattactaatgcccgcttcagatatttataatgatttaagaaatgtaagcattgaaaaggctgccgcacttaaaccattctggcgaacctcaatggctgcgttgttctacagagctaaaacattaaaagctattacggcaggccaaagtgattggatctggaggcagatgtccatcaaacgttacaaggttgatgagcctgtaaaactcgatgtaaatggggaaaaacccactttactgaatgcaattattgatcatgcgaaagaagagctgggttatgatcagaatgaacttgcatctatattcaacctttttttacccgaagttaaccagttgtactcactgagtacacaaaatcaacatttacgtttagtgaattaa

SEQ ID NO: 148156 - DNA, 543 bp, Enterobacter cloacae
gtgtcgcccaacaggctccagcgacagttcaatccggatgctccggatgagcgttgggtaaccgacataacctatatcaggacccacgaaggctggctgtatcttgccgtggtcgttgatctgttctcacgcaaaattatcggctggtccatgcaatcccggatgacaaaggacattgtcctgaacgcactgctgatggctgtatggcggcgtaatccccaaaaacaggtgctggtctattcggatcagggcagtcagtacacaacccatgagtggcagtcgttcctgaaatctcacggcctggagggcagcatgagccgtcgcggtaactgccacgataatgcggttgcagaaagctttttccagttgttgaaacgcgaacggataaagaaaaagatctacggaacgcgggaggaagcccgcagcgatatttttgattacatcgaaatgttttataacagtaagcgtcggcatggttctagcgataagatgtcaccgacagaatatgaaaaccagtattatcaacggctcggaagtgtctag

SEQ ID NO: 148157 - DNA, 2607 bp, Enterobacter cloacae
atgtcttatgaaaaaaagtacgcaatgtggaccgtcagcctgatgagtctaaatttactgtcattttcatcagtggcagccagcgtgtgtgcttcagctggcgataatgaagctcagaccgttaccagtcaggaaaccgaacaatgtacggtttcgccgtcactgggttttttctcggtggctcagggggcttctgttgatgttacccgtgagggcgtgggtggcgtcgcggtctatattccggacaacaatctggaagtgtttggtaatggtggcaccatcacttctgcttacacgggtatacgcatagccagtaacgggcctggggtgtcaaacgaaactcacattgatgactttattaatgatggacttatatccgtgaccggagggacaggtattgccgccgtttataacgtttcagggtttattggggattttacaaacagcggcacactgcagaatgattccctgatcaccaatatagccctcaacagcgatctgaccggaaacgacaattacaccaccgccctttataacctttcatcaattgacgcggtttttaataacgggaaaatcaaagctgcgacaggtattactaaccttacaacgagtggaataaccaaccggataggtaaaattgacaatacgggcaccattacgggctccgtcggcaatggtcttctcaacgaaggaacgattggcagtatcctcaatgagtctggtggaatcattcagggggcagacacgggtataagcaatgccggtaacatctctcagattgtaaacagcggcacaatcagagggggaaactggtctgtatacaattcaggcaacattagcggcggtattcacaactcaggattgctcgatggctctgtttaccttggcaactcagctatttatatcagtgggaccagagcggttattaacggcgcattaaccggtcaggcgggttctgcagtgttcgtgggggatggaaacacgtccgcagcgttcaccgccacgaataacgcaagcgtggacaatattaccgtcacgtccggcagttcactgacgctctcaccatctgcccgctggtccgccgctaacggcacggtaaacaacggcaccctgaggctggaaagcggcagcattcttgacggggccctgtcccagaatggcacgctgcttttcagtacggagaaaaacgctgcttctgtcatcaatgccagcctgaccaaccgcggaagcctcgtgctgaatcccacccctgccagcgcaggcaacaccctgaccgtaaacggtgactacatcggtctgccaggcagttcggtgtcgctcggcagcgtgctggctggagatgactcactgaccgaccgtctggtggtgaacgggaacacgcgcggtgccagcaccctcttcgtggctaacgagaacggcggcggtgcgcagaccctggacggcattcagctcatccgcgtgggagggcgctctgacgcggtgttctcgctgggtaaccgcgtggtggccggtgcctatgactacagcctgcgcaaaggaaacgtttccggaactgacccggctggctggtacctgaccagtttcacatccgtgtcacctcagcccactccggagctagccagaatgtaccgtccggaggcagcagcctataccgccaacctgcaggcggcgaacaccctgtttgatttgtcgctgcgtgaacacagtggggaaacgcgctataccgaccctctgacgggtgagaagcggacaaccagcctgtggatgcgtaacctcggcggacacgggcggacatcaatggctgacggacagaacagcacgcagactaaccggtatgtgttgcagctgggtggtgacgttatgcagggttcaaccagtggcaccgatgcggttcacgccggcctcatggcgggatacggcagggcagacagcagctcgcacaacggcctcagcgggcgggacgcaaaaggccgcgtgagcggatacagcgccgggctttacggaacctggtaccagaacgcggaggcaaagtccggcgcgtgggcagatacgtgggtgcagtacaactggttccgcaacgaggtgtccggcgacacgctgccgacagagcgttacaacagtcagggaataaaggcgtcggctgaggggggctacgcgtggcaggtgacaaagtgggtgagcgccgccggtatggaaaaccgggtattccttgagccgcacgcacaggtcctctggtccggcgtccgagcggatgaccacacagaggcgggcggcacccgcgtgcagggtattggaaacgacggcgttaccacccgcctcggtctcagagtgtacctgaacgggaaaagccgggcagaccagcagaccgtgcgcgagttccagccgttcgtggaagtgaactggctgcacaatacacaggtgtacggcgtgcgcatgaacgaggacgcggatgatgtgcgggggagccggaatatcgccgagctgaaaacgggcgtggaggggcgcctttcgcagagcctgacgggcgccgtggtattcacgcagcaggccggaggcggcggctatcgcgacagtcagggttcgctgcaggtgagctaccggttctga

SEQ ID NO: 148158 - DNA, 510 bp, Enterobacter cloacae
atgttttcttcggtcccacgcagcctgcggcatttttttccgcagcagaactcatcacatgcactgctgcccctgcctgttaagccgtccggcgacctgacgacgggcagcgcctccgtcgacctgtgcctttacgatggcgcggggctgaccacatcacggtacatgctgacgtttcaggaccagaacgccgccaacaccggcccttactttgcggtttacaacaacagcggaacgggaaaaatggactacagcgtcagcctgaccgacccgtccggtacgcccaaggccgtgaccaaccgcacgccttttttctggagcaacatgcagaacggcggcgcggcgcagggccggctgaagtatgtacagctgccggacggcattcagggcctggttccctgcgttccttcggtcgtgaccgttaaggtaaagcgcgtgccctacaggagcctgcgggcggttaactacaccggtcacctgaatatcctgttcactccctccaccaactga

SEQ ID NO: 148159 - DNA, 162 bp, Enterobacter cloacae
atgattaactttccggcgggctcgcgcatctggctggtcgccggcgtgactgatatgcgctgcagctttaacgggctggcggcgaaagtgcagaacacattgcgaacggcccccttcagcgggcatctgtttatcttccgggcaggcgcggcgatatggtga

SEQ ID NO: 148160 - DNA, 222 bp, Enterobacter cloacae
atgttgcttccacacaacagtgagccggtactgcttcctgtcatgctgtccgccgaaccgggcagaaccgtcaccgttccgtcctccgggccggaaaatacgtccggtgaaacactgtgctgcgaactggttcttccttccggtaccgtgagactgataggcacactgacgccggagctgctgcgtgcgctggtcagcgaactcagggatatcgaggcatga

SEQ ID NO: 148161 - DNA, 309 bp, Enterobacter cloacae
gtgataccgatgagtaaaaacgcggataccggacgggccgagggcacgttcagcgcaacggacctggccggcaggctggggcggtatggcttcaccgagtgcagcacgctgcgggcttttatactctgcatctgcggcgacaccccgggccccccggagctgggctacatccggcttaagctcagggagtgcctgggccgccacgacgacggcagcgcctggtttgcggacctgcgcgaggcggaaaggtgggtgggtgcaaccagcaggacgagccgcgggcaagctgctggctccccctgcggctga

SEQ ID NO: 148162 - DNA, 528 bp, Enterobacter cloacae
atgaaagcacgtttactgaccgcccttgttgcagccggctgtttcagccagatggctgtggctgatgacacactgacaacgggcgacatcactaataaaactaccgccactgccacgctgaatataagccagcccgtaacgctggaaaacacccttaccccagagcccggagtgagggccggccttaaaagcgacggctcgaaagaggtggttcttgcaacgggtaaactagcgattaaggaggccggcgcaaaggcgcggctggccttgcttgggatctctacttcaagggcactatttgaaacgtatgcggcgggccatgaaggcgacgatgagtacaagctaagctatgtggtagcacctaacgacagagacgatagctatagtacgttcacgcaaccagatggggagtattttgtcaaaaaaaatgcagtgaatagtatcaattattctgttcttgccctgtttggtacccccaaagcgggcaactacgtcatcagcgctacgggcgccgtctacaatccgtaa

SEQ ID NO: 148163 - DNA, 447 bp, Enterobacter cloacae
atgaataacgcaaccgccagcgcccggcgctggcaacttgccctgacggggctactgctgaccgtggcgggagccgctcaggccggccctgtgcttcagctgaccgccacccccggcctgcaggccgggccggtcagggatggcacgctgctgatgcgggggcgcgtcagcagcaacgacccgcacggcggcttccggttgtggtgcgccacacatgcgccgggtaacagctcagtccgctgtgtactgatcgggcagcggcatgccgggaacatcctgcgggtgcgcctgagcggcgagggatggcagccggggccgccaccggaaggcggaatgatgacggttaacgctgagcgcagcgttgcgttccgcattgaggccgatggcgaccagcaggccgccgtcgacacgtgggccgttgcgctgagcgcggccacaacagactga

SEQ ID NO: 148164 - DNA, 2475 bp, Enterobacter cloacae
gtgcgccgtgcagctttcatcgcggccctgccggtagcgtgcttcacctctggcgctgccgcacagcagtatcattttgacgcctcgctgctcggcggcgcggcaaaaaacgcggacctgtcgctgtttgaacagggtctgcagcagccgggcacctaccggatggatgtcctgcttaacggcgaacaggttgacagtcaggacatcacgctgcggcttgtgaaagcgccgtcgggagacagcctgcagccctgcctgagcgtggcacagctgctgcgctggggcgtcaacacagcggcctggcctgcgctggcggaaggtggaaaaacgtgcgcccgcctgtcggccataccgcaggcgcgggtgacggcggatgtggcggcactacagctgagactggacattccgcaggccgccctgcgcccgcactacggcggtcttgcgccggaggcgctctgggacaacggcatcaccgccttcaggatgaactacagcgccggcacctcacgcacggacggccagcccagcggtccggcggaaacctcgtgggcacagctgcagccgggcatcaatgccggcccgtggcgcgtgcgcagcagcctgagctggaagagcggggaacgctggcagcgggcttacacctgggcagagcgcgggttcatgaagataaagagccgcctgacgctcggtgagcgtaccacctccggcgacgtgtttgatggcgtgccgttcaccggtgccatgcttgccaccgacgaggccatgataccggcggacgagcgcggctacacgccggcggtgaggggggtggcccgcacccgggccaggattgagatacgccagcacggctatctgctcaggatgctgcaggtcgcgcccgggcctttcagtattgaggatttgcctgcgggacagggcggagaggacctgcaggtcacggtgcatgaggcggacgggcataaccagttctttacggttccgtggcagacgcctgccgtggcgctgcatcagggatacctcaggtacagcgtgactgcgggccgctaccgcccgtctgaggcgggagttgctccggcgacgttcgcgcaggccaccctgatgtacgggctgccccgcgggctgaccctctatggaggactgcaggaggcggcagactacagcgcagcgtcgctgggactgggtagctcgctggggcgctggggtgccgtctcggctgacgccacggcggcccgggcccgcaccccgtacgacggggcgcaggcgggagccgcctggcgggtgcgatacagcagcaggctgggcgacacgacaagccttgcgctgtcgagcgtgcagtacaactcaccgggctaccggtccatgtctgataccctggaccgctggcggcgcaacggtaacgactccatgggatacgcacagcggtccgtgcgcggtcgaagcacgctgcaggtgagccagtcgatgggcgcagcgggcgggctgggtctgaacgtcacccgcacggactggcggggtgacggtggaccggactacggttacggcgccagctggagcacgtcgctgcacggcgcgtccatgtcgctcagctggcagcagagtcgtactgggcgcggttgtcgggacagtctgctgagcctgtggctgagcgtcccgctgggccgtagcaccaacgccagctggagcctgacggccccgtatcagggcgtacagtctcaggaagtggcgctgagtggccgggcggtgaacgaccagctggactggagcgtgcgagaaaactaccgttccggcagcgggtcagacccgacgggcggcagcctgcacgcgggatgggccggggcctacggtacggccgctgccggctacagctacggcgcgtcgggccggcaggccgacgtcagtgtggcgggcggcgtgatagctcaccggcacggagtgacgttcagccagccgctatcggacacggttgcgctggtgagtgccccgggcgccgctgatgtggccgtgggcggctggcccggggtcagtacggatcggcgcggctacaccgccgtgtccgggctggcggactatcaggacaacacggtgagcctggaccctaccactctgccggacgatgcggacgtgccgcagaccgacgtgagagtggtgccggcggcaggtgctgtagtaatggcgacattccggacgcggaccggcgcccgggcgctggtcacgcttcagcacccggacgggacacccgtgccgttcggggcgcgggtgagcgtggcgggacaggctggcagcgcgggccttgcggacggcagcgggcaggcctttctgaccggcctgccgcctgcgggccgcctgatggtgcgcgcgggtagcgaacgctgtcaggcggactacctgctgcccggagaaaagggcccggctgggctttacaccttcaacgcggtctgtcgccgggctgcacaacacggagaagaacatgaataa

SEQ ID NO: 148165 - DNA, 735 bp, Enterobacter cloacae
atgaacaactcactcatcaccacagccctgctgaccggggccttgtttactcagtgcttctctgcaacagcggcggaaatgctgccagcaacgagccagaacaccttcagtgtgacgctcggtaccacgcgggtcatctacccggaaggtgcggccggcgcgcaactgtcggtgtcaaacccacaggaccgacccatgctggtccagtcctcggtgaccggcgaggaccgcaaaacgccggctcccttcctggtcacgccgccgctgttccgccttgaagcaaaccagcagagccggctgcgcattatccgcaccggaggcagccttcctcagacgcgggagagcctgtactggttgtgcgtgaaggcgctgccgccgtcgggtgaagcatcggacaacgcgtccggggtgtcggtgacagtgaacatggccatcagctcgtgtgacaagctgattttcaggccgtccggcctgaaaggcagtccggaaggtgcggccggcgcactcacctgggtgcgggcgggtaaggagttaagggtcagcaacccgacaccattttacatgaacctgaaggcggtgagcgtgggagggaaagaggtcgataacctgacctatgtccctccccaagggagtgtgacgctgccgctgccagcgggcgcggacggggccgtgaagtggagcgtcatcaacgaccagggcggcgagagccgccgtttcgaggccgcagctgactga

SEQ ID NO: 148166 - DNA, 996 bp, Enterobacter cloacae
atggataaggataataaccgtggtatgcgggactggcttatcttcatccgcacggcagaagccggaagcatttcagaggctgcccggcagttgaatatcagtaccgctgccgtcagcaaggccgtcagtcgctttgaggagtatctgggtgcggtgttgtttagccggacgtcacagggaatgaacctgaccgaagcgggccagacaacgttaaaccgtgctcgggagatcacagagtcctttcattcgctgcttgaggacatccgtaacccggacaatgaaataaaggggcatatccgtcttacggcacccgccatcgtgtgtgagtttctggccaatgaatgggtcttcgattatgcgcagatgcatccgaaggtgaaggtgtttctcgacgcacgtgaacgtagcgatctcagccgggaatctcccgaactggatgacctggtattacgaagcggcaggattgaaagtgaagacctggtgcacagaaaactttctcctctgaagcttgtgctgtgtgccagtccccgttatcttgagcagcatccggccatttctcatccgcgcgatctggaaaatcatcagcttctggggctgcaccaccacggccttgctggtccgatcctgtttttcagaggagaagagtcctatgcgctggagcgtgatgctgaagcaggcatttcttcaaacaatctgttcgctatgttgaacctggcgattcagggacgcgggatcagcgtcgccacgcccggctggctggcttccggttatttagggcgtggacaacttgaaatcattctgccggaatggaatatccctgacctccctgcatggcttatctggcggcagcgcccccgacagaccaggattttcaccgatttctgcaattatatagaggagcgctggaacacgcggcctcagcttcttgctgataaccatgcggcgcctcagctgcagcccgattttcttgctcggcacgacagcggaaaaccgtaa

SEQ ID NO: 148167 - DNA, 441 bp, Enterobacter cloacae
atgtcaacgtggaccagtatctctatcggtaacttcactctttacgatacgcagaatgactattatcagtggtattttcagcagggcgaccgtgtcagggagattgtcaaagaggaggacggaagctggtcagaagagacgtttatcggctatcggacgaccgtagcgcagatgcgccggcggttacagctgaacggatatgaccggacggctctcgaaagggatttttctactgccattgagtcctggaaagcggattctattgcggaacttgaaagcgaactccattccgaagaagggggcgcttatcgaggtggcaaaattgcgtggctggagcacatcatcccggttcttgacaatgcgacgctggatgactggcttgaccggttaaaaaaggcggcgtgttggccaagcacagagagtgatgacaaccgtatatga

SEQ ID NO: 148168 - DNA, 675 bp, Enterobacter cloacae
atgacaaacgcaagttatgcatcaaaagcccgtgctcaacacaaaagcgctgagcacactgaaatccagctgttactggcccgcatccacaatgtgggaaccaagttcgttgaggcattgcaggaactgccacgcgaacagctgatggatatgcttacgttgcaggatgaagaattctgggctgagttaagaaagcgggctcagctgatgacgctaattaatgcaagaactccggaaaagcaggaacaggaagatcgcgcagaagccagagagctgtttcttaaatctctggagaaatccggaggggtacataagtcttccgccgtcattaaaattctgtccacaacggttccgacccttataaagaaaggcaatcgtggggaagtgatatttatcaaatggggcgctgaaaatctgtatccggtatttcagttctgcacccgtgaagaaaattcagaaagcggtatgctggccggtgtcccggaattattatccctgattaaacacaaggtcagtgctgtacgtaaatgtcacttttttacccgtaaggtcgatattccgggaactgggaaacatatctctattgttgaagcactgcgtcgtggtgccacacctgaagagatggcccatttcagaatactggcggaaaactttggtaccaaccataccatgtag

SEQ ID NO: 148169 - DNA, 696 bp, Enterobacter cloacae
gtgaagctcagtgtcagattgcttgaagggtttaaaaaaacatatcttcccttgcagttcagggccttctggaatgatgaagggtactgctatttgaaagttcagatcattgacgggaagatgatttttttctgtgctcaattgttaaattattataatacctcgataaccaacgctgttgagagtgtgcgggcatcagcggtaaatgcactcattaatgacggtgcaataaaaataaataaccagcagggtgtttttgatttatttaaatcacaggaacgtaaaggtaaagaggtgctgtctattctgtttgagtatattcgtcaaaattctgtatgggtagaacattacgaatctcaaatcagcataacccaggatgatcgatatagccttgtacactttaaccagtatcaggaacctagctggtcttttatttctaaagaaaatcttgaagaaaaatatccggaatttgattttcatgtttccagaaaaaccctggaagactggcgcaatgcccggttatccactcaggcgataaaaaaaatattaaaagaaaagaactggaccatgaaagaagttgctgtgcggtggaaccgctcagagtcatggatgagtaaagtcgttaatgatgagcaaagggaactctattgggaagacgcctttaaaggtctcccttcaaaaatacatcaagaatga

SEQ ID NO: 148170 - DNA, 321 bp, Enterobacter cloacae
atgggtgataaacttttgagtcaggtctgggtgtttctcaccaataattacgtgggacatacggatttatggctgagcacccgcccctggcctgccagcatggaatctgcaccgatatctctcagcacacaaagacaatgggtggtggtgtcgaaatcgaacagaccgcttgcttattactgcccggccagcgcgatgtggtgctacggttcagggatttatccgctgacctttgacccgaacatcgattcggccagcaaagcccctcccggtatttatctgggtgaagatgtcatttacggtcttgattatttcatctga

SEQ ID NO: 148171 - DNA, 321 bp, Enterobacter cloacae
atgattacctttccgatgaaagagctgataactctgctgacagacactgaaccttttaaaaaggacttcgtattgtcagagggaaatgcctccttctcagagactttatttaattactcacttcaccgtctttttcgggggatccgtcatcctgaaaaagacatcaaattgctctgctgtggtgatgtctactatcctgccagtgagacgtgtactggcggaatactgggattttacacgatggcccttatgctgctgcgtaagcggacaatcgtattcaaccacctcgagaaaaggatgccggaatacttttctctgtag

SEQ ID NO: 148172 - DNA, 258 bp, Enterobacter cloacae
atggaacgagaacagaacacttcactcccctatgaaatcctgacaggtgaatgtgaagccgctatcagaaagcatctggccagaacggagatccttgacggcattggcctcgcactcgagcaggcaaaggcgtatgccgtgttatcactctggtccagtctggccgtcgcggcaaaagccccccgggaggtcatcgacgcggacagggaacgtctgatgctgatcgttgcaggaaaccagaccatgaggctgcattaa

SEQ ID NO: 148173 - DNA, 834 bp, Enterobacter cloacae
atgacatctgcaaaaacgattttaatcaccggcgtcagcagtggctttggccgtgcactggcgcaggaagccctcgccacaggccatcgggtcatcggtaccgtgcgcagccgcgaagcacagcacgatttcgaggcgcttcattcgcagcgggctttcggccgtctgctcgatatcacggactttgagcatattgatgaggtggttgcggagattgagtctaccgtcggtccggttgatgtgctggtaaacaatgccggttacggtcatgaaggcataatggaagaatcctcgctcgcagagatgcgccgccagtttgaagtcaatgtgtttggcgcagtggcaatgatcaaagccatgctaccgggcatgcgccagcgtcgtcatggccatattattaatatcacctcgatgggcagtttcattaccctgcccggcatcagctattactgcggcagcaaatttgcgctggaaggaatatcagaaacgttaagtaaagagctggctccgttcaacatacacgtaaccgccgtggcacctggctcgtttcgcaccgactgggccggacgatcgatggtacgcagcgctcgcagcatcccggactacgacgctttatttgatccgattcgtcaggcacgtgaagaaaaaagcggtaagcaactcggcgatcccgttaaggccgcacatgccatgctggcaatgattgagagtcagaaccctccaacgcatttattgttaggcagtgatgcattaagtttagtgcggcaaaagctcgaggcattaggtaaggaaatagaacaatgggaagaaataacacgttcaacggatggctga

SEQ ID NO: 148174 - DNA, 603 bp, Enterobacter cloacae
atgaacacatcaccgtggaacaaagaccgtatcatcggccaaaaaagaccacttcagatatctcatatctgggggatccgaatcaggcttgaactggaaggtaaaacgcgcgatttggctctgttcaatatggccctggatagtaagcttcgaggctgtgatctggtaaaactcaaagtatctgatgttgcatatggtagctctgtttcaagcagagctacggtgctacaacagaaaaccggcagccctgtccaatttgagataaccaaagggacaagagaggctgtttctgcattgataaagcttggcaatttacgcagtaaagactacctgttccgatctcgggtcggtattaaccaacacatatcaccccggcaatacaaccgaatttttcatgggtgggtagcaaaaattggtctcgaagattctctttacagtacacattccatgagaagaacaaaaccttacctgatctacaagaaaactaagaatcttcgtgtgattcaactcctgttaggtcataagaaactggaaagcacggtccgttatctgggtattgaagtcgatgatgcgttagagatttctgaatcgattgaagtctaa

SEQ ID NO: 148175 - DNA, 522 bp, Enterobacter cloacae
atggtcggatacaggcaggtgaagcgctctaaccggcacgtccgaaatatgttccagcagtactgctgccagcctcgcggttttgctgtcaggcgaataaacatgttcctgctctgccagaaacagaacaagctcacggaccagaggactaatcgccagggcacagcaggtttccggcatcgctgccgcgccgggttcgataaacagaaagcaggtctctgcattctttgtgacccggcagctgtgagggatttcacccggtacccagacagcatgtcccggtggaacaagccacagcgcatcctcaacctcacagcttactgcaccgcgcaaagagagaataagctgacccttacgatgagcgtgcggactctgcccggcatactcgccagacgaagacacttgcagggcgatagcagcctgactgaaagcatcagcatcaaactcatccggtgtggtcaccgtccttttattaactggcatgatttagttatatgttgtcagtttatctgtattatgtaa

SEQ ID NO: 148176 - DNA, 1191 bp, Enterobacter cloacae
atgtcctacactacgaacaagtggtcttcagtcatacttgtgaccggtatcctctttatcgccattaacctgcgtgttccttttaccgctgttgcacccgttttagagttaattcgccatgattttgggctaagtattactgccgttgggttgcttaactctctgcctttactggcctttgccgccttttcccccctgagcgcctccgtctccaggaagtacggtctggaacgcaccctttttggtgcactctccgtgatttcagccggtattatgcttcgctccacaggcagtgtctgggcgctttatggcggaaccatattgataggtatcgggattgccttgggcaatgttcttctgcctggccttataaagcgtgatttttccggcaacgtggcttccgtgacgggggcctattccatcaccatgggcgcggctggtgctattggttcagccattgtcattcctctgacgcagagctggggctggaacatcgcgttagccatgctggtgattgcgcctctgctggcgctgcttttatggttgccccagttgaaggaaaagcatcagcttccagctgtgggggagaaaaaagcggcgaccgttgcggtctggcgctcgcctctggcctggcaggtcaccctgtttatgggcctgaatgcgatgccgttttatgttgcggtcggctggctaccagccgttcttacggacagtggactctcctccgctcaggctggtgaggtacacggcatccttcagctgaccaccgccattcctggcctgattctggccgccacgctgcgtcgtcttaacgatcagaaattagctgctgctggcgtgagcctgttaaccgcggtgtcctatatcggcatcctgtatttgccgaatctggcaatgctgtgggcggcgcttcttggcttcggttcgggcgccagcatgatgctgggtctgaccttcatcggactccggactaaaaacgccggagatgctgccgcgctgtcaggcatggcacagagtgtcggttatctgatggcggcaatggggccactgttactgggcaaagtacaggagctgtccggaggctggacggtaccgttactgatgactgtagcaatcgccatcgctggtgcctgcaccggaatggctgccggacgaaacgctcacctggaacctgcacagcagccggactga

SEQ ID NO: 148177 - DNA, 600 bp, Enterobacter cloacae
atgacaggtaactttttagaacttgccagaaaacggcgcaccatttatgcacttggaaaagatattcctgtcccagagaacgagttgatcggcactgtcattgaagcagtgaagcaagctccttctgcttttaactcgcaaagctcaaggcttctgattttactgggtgatcagcatgctcgcttctgggaacttacgcgtgagcagttacgaaaaatcgtccctgcagagagtttttccgccacctccgaaaaaatagacggatttgcagcagctgctggctcaatactttttttcgaggatcaggatgttattaagtcacttcaggagcagtttgcagcctatgctgacaatttcccggtatggtctgagcacagcacaggtattgcacagtatgctgtctggctggcgctggctgaaaaaggaatcggtgtcaacctgcaacactataatcctctgatcgacgacgatgttcgcaccgagtggaatgttccttcatcctggaaactccgtgcgcatatgaatttcggtgccatccttttacccgctgcagaaaaagcctttatgagcgacgaaaagcgatacatcgttgcaagatag

SEQ ID NO: 148178 - DNA, 576 bp, Enterobacter cloacae
atgaaatatcatgtactttctgcttcactgttagtttcacttctttttactactgctgcacaggcgaaaacagcgagttataagctggatgaatcgcatacgtctgtgattatcagctggaaccacctgggtttttcgaacccgacggcatccgtccatcacgtggatggcacagttaagttcgatccggcaacgaaaatcttatcactggttaatatcaacattcctgtagccagtattgatactggcgttccagcactgaataaagagtttggccagccagattattttgatgcggagaagtatccagtcgcaaatttcaaaagcaccagtataaaaagtaatggcgataagtatgatgtgtacggcaatctaaccattaaatccataacccgaccggttattcttcatgcaaccctgaataaagcaggtttccaggctatggagaaaaaaaacgcagtagggtttaatgtcactggtatgattaagagatccgaatttaaaattgataaatacgttccatatgtaagcgacaacgtcacactgaccgtgtcttcggaggcatattcagaataa

SEQ ID NO: 148179 - DNA, 387 bp, Enterobacter cloacae
atggaaaaatacaccccctgttttacgctcgataacaaaaatcccggtgatgtattaaaagaagcttgtcctgcacgggaagttctggaagttctgatcagcaaatggacattgctcattattcatgccctttctgacggtgcatcgaggccgggtgatttgcgaagaaaaattcagggcatatcagaaaaggtgctgtcacagaatcttaaggaactcgaaagcaggcatcttgttacgcgcactgtctttcgtgaagtaccgcccaaagtcgaatatgcactcacggagctgggaacgtccctctggcaggcagcaaatgaactcaaccggtgggtagaacaaaactgtcactttctggttaaagacacagatccttctctttga

SEQ ID NO: 148180 - DNA, 573 bp, Enterobacter cloacae
gtgtctttacagccagttgaactgaataaagcataccgattattgcagatcggcccaactacaatgatttccgctaaacataatggtaatgccaatgtaatggccgccgcatgggtgagtctggtggggatcaataaagtcatggcgtatatcagtccgcaggcttacacccgtggattggtggaagaaagtggtctgtttgccgtacagatacccgtagtcagccagatggaaaccgttttgtacgcaggtgagcacagctaccgtgacaggcctgacaagaatcataaaataccgatgttctacatgaaagagttcgatattccgctggtacagggctgtgctggctggcttgtatgtaaagtaatgccaaacgcggaatacgagctggaacataatctgttcatgggagaaattgccggggcgtggagtgacaatcgggtttttcgcaatgggcactggatatttgatgaagcaccagacgaattacgaaccatacactatgtcgccggggggcagttttatgccatcggcaaaggaacccgctttgaccatggtccgggcaaagactga

SEQ ID NO: 148181 - DNA, 516 bp, Enterobacter cloacae
atgaaaacaactgtatttgttacccaccccaacattaatcagtcacgggtaaactcagccctggcaaaaggtgcagcatcactgaccgacttggaagtgcgttatctgtatgacctgtatccggatggcaaaatcgacgtggccgctgaacaggctgcactggaaaagacggatcgtatcgtgctgcagtttcctatgcagtggtacagcacgccgccactccttaaacagtggcttgacgatgtactgacgtacggctggtcacatggtggagaaacacaggcgctgcgcgacaagcaactcatgctggccgtttcgctgggtggtgcagagtctgcctatcagcctgatggcgctgccggacatacggtaggcgagtacctgctgtcttttgaaaccatctccgggtatctgggtatgaactacatcaagccgtttattacaggcggaagcgcgacgataactgacgaagaaatcgcagctcaggtcgaacaatataaaacggtattagcctga

SEQ ID NO: 148182 - DNA, 966 bp, Enterobacter cloacae
atgaaaatgagaaggttaggtagccagggacttcatgtctcggaaatggggctggggtgcatgggcatggaccatggctatggctattcagttgaaatccgtgagcgaacaaagctgatagacaaggctgtagaactgggctgcaaccttttcgacactgcccccatttacggatttgaaaacgaagaactgctgggtgttgcgctcagcaaacacagggacaacgttatcatcgcgaccaaattcggcgtgaccggaatggaaaacattgatggacagctggtgccggtattagacagccgtccggcgtctgtcagagagcaactggaaggttcactcagtcgtctgcaaaccgaccatatcgacctgttttatcagcatcgtgtcgatccaaaagttgagccggaagtggtggcgggattaatgaaagagctgatcgcggaggggaaaattaagtactggggcttatccaatgcgcccgtatcttacatacgccgggctcatgcgatctgcccggtcaccgcggtcgaagaccagtattcaatgatgtggcgtaaacctgagcaggatttgttcaaagtctgcgatgaacttgatattggctttatggcctacagcccgctgggtaatggattcctgagtggtcaggttaccgctgatacaacttacggggaaggcgattaccggggcatgatggggcgcttcaaacctgaagtaatggaaaataaccaggcgctactggatttgattgctcaaatcgcggaaagaaacaacgcaacttcagcacagattgttcttgcctgggagctggctcagaagccttacatcgtaccgatcccgggaacaacgaaattacaccggctcgaagagaattttcacgccgcaaatgttcagctcagtgacgctgaattaaatgatatcaatcaagctttatcccggcttgaaattgacgaaacattcttctga

SEQ ID NO: 148183 - DNA, 897 bp, Enterobacter cloacae
atgatgaataaacttgatgcgctgaaattttttgttgccgctgcagaaacgatgaactttcgtgaagcagcagtcagactggccatttccccttcagtggtgacgcggactattgccgaactggaaaatcagctcggcgagcccctttttaagcggaatacccgatcaattgtgctgaccagctttggtgagcttttcctgccgaaggccatgcggctacttgaagattcagaggctctttttcagacggcccgagatgacaatgacatgaagggcgttgtgaggatcacgttattccggtttcccggccacgagcaggtgttatatgagcttcttacctcgctcgatccttatcctgagctgtttatagactggcggttagacatgatgaagctggatactgttcagaaccgcattgacatggggatccgtatagagcgggagccaaacccgaattttatcgtcaggcccattacgctggttcatcacgcgctgatgacatcacccgggctcattgagaagctgggcgcgccgaaaaatttcgacgatctgcgccagcgctatcctttcagtggtctgctgaatcctgaaaccggaaaagtattcgaatatatgctcgatggcgttgatacttttgtaccgcgccatctggagttttttaccaccgactcccagtcggagatccaggctgcgttagccggtaaagctgtcattcagtcgagtaatctagcctgcagggaataccttgaagacggcaggctggtcaatgtcctgcccgaactgaaactggaaacctggcagctttatctttacaggccctatcagaccctggtaccgcagcgcatcaggaccgtttttcacatccttgaaagtattttactcagacacttcagttga

SEQ ID NO: 148184 - DNA, 888 bp, Enterobacter cloacae; identical to SEQ ID NO: 107955

SEQ ID NO: 148185 - DNA, 720 bp, Enterobacter cloacae
atgacagctgagcacaataaatttctggaaatgcgcatggccttagctgaggctggctttgttgttgcagctgcagaatacaggacaatcccggatattttccctgcgccattaatagatgctaaatcagcagtaaggtaccttcgtcaacatgcccccgattatggaattgacccctcgcgaattggtgtattaggtgattctgctggaggatggctggctcagatgctcggtaccactaatggcgataaatcatttgatcacggcaatttcctcagccagtccgctgatgtgcaggctgtgaccacgctttatggaatttcagatctgcgtaacataggtgacggctttcctgagcatcgtcaaaaggtgcatcagtctcctgcagtaacagaatcattactagttaatggtgtggctttcagggattttgaaggtacttctatcagctccacacctgaaaaagcgattaatgcaagccccataggacatatcaagggatgtagacctccgttcctgataatgcatggaagcaaagatacgttagtatcacctaatcagagcgtaacgctttacaaggcacttttggagtcgggaaacaaagcggactatgtactcattgaaggtgctgaacacggtgatgatcactggtatcaacccgttgtcataaatagggttgttaactggttccgcggacatctttttcctaaaaatacatga

SEQ ID NO: 148186 - DNA, 324 bp, Enterobacter cloacae
atgaacatgtcaccgtggaacaaagaccgtatcatcgggcaaaaaaggccacttcagatatctcatatctgggggatccgcatccgtcttgaactggaaggtaaaacacgcgatttagctctgttcaatatggccattgacagcaagcttcgaagctgtgatctggtcaaactcaaagtgtctgatgctgcatatggtaactctgtttcaagtagagctacggtgttgcaacagaaaaccggtagccctgtgcaatttgagataactaaagggacaagagaagcagttgctgcattgataaatgcttggcaatttgcacagtaa

SEQ ID NO: 148187 - DNA, 972 bp, Enterobacter cloacae
gtgataaccgcaagtctaaccagccatctggtgcaccaaatttccctgtctcttccgctgttcatacttatcgttgcaggttatgggcttggccgcttttcgggctggccggcaaccgtaaacgaggggttaaaccgcttctgttttaacgttgtgctaccgtgcatgctgtttaacgtcatgagcggtttttataaaactccgtccgttgatccccggctgctgatcgcgttttttggcagctgcttcgttgtttatgcgcttggccggttaatcgccaggcgtgtatttaacctcgacccggtatcgtcatccgtttttgcgttaggtggcatcttttcaaacaacaccatgctgggtttaccgctggccacgattttactggggccagcctcactgccctccatcgcgctggtgttgatcttcaacagtctgattttgtggaccctgctcacggtatcggttgagtggacccgaaacggcaatatttcaccacgtggagtgatcaacacgctggtcagcgtttttaaaaatcccatcattatcggcattgtggctggttcagcctggagcctgttacaccgacccttgcctgaagccattggtaagtcggttgaaatggtttcggatatggccgcaccactctccctgctggcgctgggaatgagcttatcttgctatagcattcgcgaagggctgagagaaagctatgcaatttgtctgttaaaacttcttatacagcctttggtcattgccttgattgcgttcgccacgggccttcctgcagccgaaacaaaagtagtggtattgctgggttcaatggcattaggggtgaatgtttacttgatggcgcaaaaatttggcgtgatgcagggtgcatcggcaaccagcacactcttcagcacagctatctcagcattcacaacgcccttgctgatgatgttgatcacccggttctatccctgtagctaa

SEQ ID NO: 148188 - DNA, 987 bp, Enterobacter cloacae
atgttttcacgtcgttctctgctaaaaacgttgccgctggtcggtgtggctgccggcatcaatgcaaagttaagttgggctgctgctatctcatcagataactttgcgagcaagctgacattcattccgccaaaggacagctgcgactgccatgtacacgtttttgatcctgagcactttccgtttgctgaagcgcgcgtttacacgcccgatcgcgcgccaatcagtgacctgcaacgccatctgaaagagctgcatatggatcgggtggtactgattcagccaagcccgtacggcaccgataaccgctgcatgctgaacgcaattaaggtgcttggtcagaagaatgcgcgcggcgtggccgtggtcgacgatgaaattacatctgaagagttgcataagctggatcaagagggcgtgcgtggactacgtctgaatatggaagcgcgtgcagggggcaaactaagcgccgaagagagcggcaactatctgaagaaaatggcagataaaatcagtgctcttggttggcacctgcagatctacaccaatcttcatgaaattgccgatttaagtaaaaccatcagccagcttccggtgcctgttgtcattgatcacctgggtaaacttaaagctgaagagggcatccagcagcccggtttcaatgaactcctcacgttactcgattccggaaaggtttacgtcaaactgtcagcgctctaccgcgtgacgaaagatacaacatggcaaaacgtccgaccgtttgttgaggcgctggtcgcccataaacctgaacgtttgatctgggcatctgactggccgcataccatgccggcaccgggtaagaagcgtacaaaggaagggatagagtatttctacccgatcgatgacatctcaatactgaatgcgtttggcgaatggctgcccacggaaaaactacgcactgagatatttgttaacaacccaacccggctttactgggcgaaatag

SEQ ID NO: 148189 - DNA, 1623 bp, Enterobacter cloacae
atgacaacgctttctcgtataaaccagcagttagcgaattatggtattaccacctctgctgagattatttataaccctgattacgccaccctgtttaccgaagaaacgttgcctgaattaacaggtttggaaaaaggtaggataaccagcactggcgccgtggcggtagataccggggagttcaccggacgatcgcctaaagacaaatatattgtcagagatgacaccacgcgcgatagcgtctggtggtccgatcaaggcaaaggtaaaaacgataaccaccccttgtctcaggagatctgggatcaccttaaaaccctggtttgccggcagttgtccgataaacgccttttcattgtagatgcctggtgcggcgcgaatgcggatacgcgcctggcagtgcgttttgtcactgaagtggcatggcaggctcactttgttaaaaacatgtttatttcgcctgaagccgctgaacttgaaacctttacgcctgacttcgtggtaatgaacggtgctaagtgcaccaatcctgactggcacgcccagggactcaactctgagaactttattgccttcaaccttacggaaaaaatccagcttatcggcggtacctggtacggcggtgagatgaaaaaggggatgttctcagtgatgaactacctgctgccacagcagggaattgcctccatgcactgctctgctaacgtgggcaaagagggcgatgttgcgctgttctttggtctttctggcacgggtaaaaccacgctttcaactgatcctgtccgtcagttgatcggtgatgatgaacatggctgggatgacgatggcgtcttcaactttgagggcggctgctacgctaaaaccatcaatctcaacccgcaggcggagcctgaaatcttccaggcgatacgtctcgatgcgctgctggagaatgtggcagtaaacgctgaaggcattatcgatttcaacgatgcttcgaaaacagagaatacgcgcgttacctaccccatctggcacattgaaaatatcgttaagccggtttccaaagcaggccatgccagcaaagttatctttctgacggctgatgcatatggcgtgctgcctccggtctctgtactgactgacgaacaggcgcagtatcacttcctttcaggatttacggccaagctggcgggcaccgagcgtggtgtaacgaagccaacgccgactttctccgcctgtttcggcgcagcattcctcagcctgcatcctgttcgttatgccgaagtgctggttaagcgtatgcaggcatcgggcgcgaaagcatacctggtaaacactggctggaatggccagggcaaacgtatctctattaaagatacccgtgccatcattaacgccattctgcacgacgaggttgatcaggccgtgactttcaacctgccgattttcaatctggcagtaccgcgtggcctgaatgccattgagtacgacattttagatccgcgcgcatcctgggagagtgaagagcagtggcgggataaggcgcttttcctcgctgataagttcaccaccaactttgagaagttcaccgataccgctgaagggcgtgcccttgcagccatcgggcccctgaaaaaataa

SEQ ID NO: 148190 - DNA, 303 bp, Enterobacter cloacae
atgattcatgttctggccattattacggcgaaacccggattacgcgctgaaattattaagcatattcaagagaacattccgtctgttcaggctgaagagggatgcattgaatatcgcccggtcacagatttatcaccggatgccgaaaatggctttggccccgataccgtgttaatcgtggaaaaatggcaagatgaaacctgcctcaaaaaccatgccgccgctccgcatatgaaacgttatgcggaaaatgtgaaggaattaatccagaagcgcgatgtccgtatcctgaaagatatctga

SEQ ID NO: 148191 - DNA, 192 bp, Enterobacter cloacae
atgcctgagattgtggtttatgcggtagaaggacgttctgccgagcaaaaaagaacgctgatggtgaagatcactgaagccgtggttgaatccttcggcgtagataaagaccgtgtagtggtctctgtgattgaaaccaaagcagcggataaaacacgcggcggtgtgctttacagcgaacgtaaaaaataa

SEQ ID NO: 148192 - DNA, 1074 bp, Enterobacter cloacae
atgaaatttctcgttctgccgggtgatggtattggtcctgaaatcatcgaatcagccgtcgctgttttgcaagaaattgataaaaaacacggtctgggtattgagtacgactaccaggatatcggtttcgccagcctggaaaaatatggcacaacgctgcgtccagagctgctggagagcgcacgtagttatgaaggtattctgctgggcactatttcacacgctgattatccgaaaccagagaaaggcggaatcaacgtctctggcgcattccgtgtaggcctggatctttacgccaacgtgcgcccggcccgcacccgtccatacatcaccagcaatctgcgtgaaggtaaaacgatggatctggtgatcatgcgcgaagcaacagagggcttctacccggaccgcaacatgtctcgcggctggggcgaagtgatgccaagcccggatatggccctctctacgcgtaaaattacccgtcactgctcggagcgtatcgcccgtcgtgcattcgagctggccgccaagcgccgaaaaaaagtaaccgctattcataaagcgaacagcttccatatgacggatggcctgttccttgaagccgttcataccgtggcgaaagacttccctgacgttcagctcgacgatctgttagttgatgcctctactgcacacttggtacgtaacccggagcgctttgatgtaatggttgcagagaacttttatggcgacattctttcagacctcgcgagcgagctgtcaggaagtctgggcctggccggctcagtgatggcgggcgataaccagtgctgcgcacaggcgcaacacggttcagcacctgatattcagaatcaggataaagccaacccaacctccatgattttgtccgtcgccatgctgctggagtggatcggtgagaaaaaagaactgccagtctggagtgaggcgagcgcgactattcacaacgccattgaaaaagtgctggctgagcccgcacaccgcaccgttgacctgggcggcagcaccggtaccaaagcttacaccactgcggtaatcaagcagatccgcagcctgtaa

SEQ ID NO: 148193 - DNA, 414 bp, Enterobacter cloacae
atgattaaaaccgaatcgaattcatatctgctgcatccggctgatattaaaaaacacgatcgcgggggcggtgccagtaccacacctttggtcaccgcaggtatgggtgctacagccttcattaccggttacaccgaatttgttggcggtgcaaaaatcccattccattttcacaactgtgaagagagcgtgttactgattgaaggtaatgccattttcgatatcgatggcaaagaatttccgatcaagccgcaggatgtgacattcatccctgctggtgttcctcaccggttcagaaacgcttctgaaaccgagccgatgaagatcatgtgggtttacggttctcaggatgcaaatcgcacgctggttgaaaccggagaaacgcggccaattgcggcagagcacatcagttaa

SEQ ID NO: 148194 - DNA, 1371 bp, Enterobacter cloacae
atgattgttactgttaaccctgccacgggtcgcacgattgcagagtacccgcttcactcctctgctgatgttgagaaacgaattgcagatgcgcatcacgtgcagaaatcctgggggaaaaagcccgtttccgagcgcgcagccctgctcattaacgtggctgaggtacttcgtcgcaataagtctcgctatgcagccaccatcacagaagagatgggtaagccgattgctgaagctgagtcggagattgagaagtgtgctgtcacttgcgagttttatgcagaaagcgcaggaaagtatttaggcgacacgcacgtagcgagcaacgccaccgatagccgcatcgtttacgatccacttggtgttgtactggccatcatgccgtggaactacccgttctggcagttcgttcgcttcgctgcacctgcactggctgcaggtaacggcgcattacttaaacatgctaacaacgtcgcagcctgtgctattcagcttgaagagcttttccgcgaagccggtacacctgaaggcctggtgtctacgctgctgatcaatgcctcagatgttgcagctgttttagcagatgatcgcgtggcagccgtcacgctcaccggctcaactgaggtcggtaaaattgtggcgtcacaggcagccagcctgatgaagaaacaggttctggaactgggcggctctgatcctttcctggtgctcgctgatgccgatgttgaactggcggcaaaaatggcggttaaagcgcgcttctcaaatacaggacaaagctgcatctcttccaaacgcttcattgttgatgcctcggttgcggacaaattcgttgccttgtttgttgagggcgtgaaaaaactcaaaaccggtaatccaaccgaccgcgacaatacgattgggccaatggcgcgcgctaatctgcgcgacgccctgcatgctcaggttgagcgcagcgttcaggaaggcgcaaaactggttatcggcggtcaggcagtaaacagcgatggctattactacctgccgaccgtgctggataacgtcacgccacagatgaccgcggcaatcgaagagacattcggtccggtggctgcggttattcgcgtgcagtctgaagacgaggccattgcggttgctaataacaccgagtttggccttggtgctgccgtgtggactggcgatgttgagaatgggtaccgcgtagcacgcagcattgaagctggcgcggtgtttgtaaacggtctggttgcgtctgatgcccgcctgccatttggcggcattaagcagtctggttatggacgagagcttggtgagctgggtattcgtgagtttaccaacgtcaaaaccctctggatcggtccggcgaagtaa

SEQ ID NO: 148195 - DNA, 870 bp, Enterobacter cloacae
atgtcagcgcgaaagtcagcatcagatttgcaggataaaatttatggtgcctgcgactgtcacgtacatctctttatgcccgacattttttcctactcaaatgaccggcgctacacacctgcttctgccacgcttattgatctcgccgcccacaatgaaatgctgggcgttacgcacactgtgctggtgcagccgagctgctatggcacagacaatcgggcagtctgtcacggcctcactgctttaggtgcggagcatgcccggggcgttgtggtgatcgatgttgatcacattacagataaagagcttcgtgcacttcacctgaaaggcgtgcggggcattcgtcttaacctctctgtatctggccagggtgatatcgcacgtatccgtgcagagatgaatcatgccgctgaacgcattggtccaatgggctggcatatgcagatttttgccagtccgacgcagctggccctgcttctaccgctaatccgggacagcaacgtgccgattgtgctggatcactttgcaggcggcgccgcgctggctccgcagatcgctgaattacttgagcgccctgatatatggatcaagctttcggcaccgagtcgtgtgtctggcgttccagagtatgccgacctggctccggtggtcacccgattcgcagacgttgcccctgaccgcctgatttgggcctccgactggccgcataccggtggtcatggccgccgcagcagctcgattgaagacattgaaccttttgctgccattgacgatcggcaggacctccaccacctggccaggtggatcgataacgacgaattattccgccgtattctgactaccaacgcatacaccctctacgatttctag

SEQ ID NO: 148196 - DNA, 870 bp, Enterobacter cloacae
atgccccagacgctgtcaacgcaattggttcagagcattattcagtacattaataatcaatcactgccggtgggttcccgtttgccggaacgcgcgctggcagagcacctgcgtgtttcgcgttcaccggtgagaactgctttggcgaaaatggctgataaagagctgataagccggcatccggaaggtggctatgtcgttgcagaaggcgcgctgtcatgttcgccgtttactgagccagtaaaaagcaacgcggatgagatctatttcagaattgcgaatgacagactgaacggggagttacctgagaaagtcactgagaatgaaatgatgcgccgctacggcgtaacgcgtagtttgctgagtgacatcttattgcgcattcaccatgaagggtgggttgagcgcctgcccgggcatggctggatgttcgcagaatcaatgtcgtctggcggggcttataatgagagctaccgtttcaggaaaatcattgagcctgctggcatcctcgaacccactttcaaacttgatgaagcgagtattctccaatgtcaggaagagcagctttggttgtgtaatggggcaattttctccgtaacgcctgcccaaatttttgatgcaaacacccgtcttcatgaagcgattgcagcgtgctccggcaacatgtttgttctggattccttgcgccgtttaaaccgcatccgccgtttaatggaatacaccaaagccgtagatcgagagcaagcactacgtcgctgtaaggagcaccttgttctgatcggcctgctgcttgaaggcgcacaggaagcggcatcagattacatgcgtatgcacctgtcagacgcatcccgcgagaaacagcctaaataa

SEQ ID NO: 148197 - DNA, 1350 bp, Enterobacter cloacae
atggtcaacatcactgaaaccaaagataaagccgcagaaaaaggcaccgagaatcaaccgggctgggttaaaacttggtggaaactcatggacttcgatattggcattatccctttgcctgtctatatcgtaatggtcatcctgatggttagctttaccgcgattaacgggattactaaagagttagcgatggttatcgctatcgcggcaacgttcgcattcaccctgggagagataggcaaccgtctacctctactgagaaatattggtggcggagccgtactggttactttcgtgccttcacttttgggtttccttggctggattcctcagccaatgatcgatagcgtcggtgagttcttcaaaaccagtaagattttaaacctctttattgcagcagtgattgtgggttctatcctcagcatggatcgctctctgctgattaaagggttccttaaaatcttcgcccctcttgcggtcggttcgatctgcgccggtttggtaggtacgggcgtgggcgttttgatgggcattgatattcatgaagcctttttctatatcgttgtccccatcatggcgggtggcgtaggtgaaggtgcgattccgctgaccatcggttattcacaaattctcggacacgaacaaggtgaaatgctggcgaaagttatgccagccattatggtgggcaacctcacggcggtgattcttgctggtttgctggcaaacatgggaaaacgcctgcctcacctgagtggtaacggcgtactacagccgggcgctgaagatctgttgggtaataaacaaaaaatagaaaaagcatgtgatatccgcgcggttgcagccgcaggtatcgtcgctgttatgctctatctggtcggcgtgctgatgcatgacctgctgaaatggccagcgccggtggtgatgcttttcctggccgtgttgttgatgctgtgtcacctgatttcgccacgtatccagacgggttcagcagtggtgtataagtttgcgctgactgcaatggccttcccgattttgttcaccttcagcctggtattaacaccgtgggaaagtctgattgcaggcttcgcacccgcaaacctgctaaccattgtctcaaccgttgtggccatggtggcaggcggcttctttaccgctcgcttcgttaatctttatccaatcgaagccgcgattgttaccagcactcacagtggcatgggcggtgccggtgatattgcaatcctgacggcaagtaatcgcatgcgcctgatgccctttgctcagattgctacccgcatcggtggcggcatcaccgtcgctctggcgttaattatgatgcacttgatgtactga

SEQ ID NO: 148198 - DNA, 3135 bp, Enterobacter cloacae
atggagcatctcaccgagtacttacttaatcaaatattaaatgggaatgctattttatttttaggcgctggtgcgtccctggagtctcattcagaggacggaaaatacaaaggtttgactgggaaccaactaaaagatttaatttgtgatgaattcctatcagggaaatcaaaaaataaaagcttaagttatgttggtgcagttactaaagaccttgcaagcactgggccggttcatgaattaataaatagacataccagcgagcttctcccaacagttggacatagtataattccgaagattaaatggaaggcaattgctactactaattacgatgagttagttgagaaagcttacaagaataattcaaagcccattcaagtattaaagcgaattgtcggcgataatgatgatatacagagtatactttcagatgaaagtgccgttcctcttctgaaattacatggctgcatatcacggttaaatgatcatcaactacctctaattctgtctagccatgattatcataagtttaggctaaacagaagttctcttttttcaacgttgaaagaactcgcgtataatcatccaatagtattttgcggttacagtatttctgatgaaaacattagggatcttatatttgatgtaagtgagattacaaatgaacggccaaaatatgttttggtagatccaacccttgaaaagcaagacatttcatattggagctcaaatcgttttgaatgtatcccactgacatttgttcaatttatggtatcacttggtgaagaactcaatgataacatggcaaagctaagctcagctataagagagacaacaataacttttaaaaaacatatagcttcgcatgatacaccaagcgataatttattaacgtatgtagtgcgtgaattactgcatatacaccccggacttacctcggataaaataactccaaataatttctacaaaggtaatagtcgtggatttagttggttaatgaatgattatgatatacctcgtagaatcttcgatactattatagaagatactgttttcgatactcataatgctgattcgcaaaaaactctattttatgttgttaaaggttacgcagggagtggaaaatccatatgtctgaaacgaactgcgtgggagataggagtaacctacaacgctccaactttttatctaaatgaaggagcacaaataagaaaagaattcattttcgaactatgttatttaataaaggaaagaatttacatttttattgatgatatactcgaccttagcaatgatgcgctggagttaataagagaagcaaaaaaaaaccttcttcctattacatttattagcacaggtcgtactaatgagtggaatactcatggagagtacttcgaacaagaggtaaatagcacttttgatttattagatcttaatgataatgaagtccgaaatttactcgaaaaattaacgcgatataattgcttaggatatctaggaaccctacaagagaatgaaagatttaactatctaaaaagtaggttggataatcagttattagtggctttacatgaagctactgaaggtaaaacttttgaagaaattattatagatgaatatgaaaatatttatcctcttgaagcaaaggtagcatatcttgatgtttgctctcttcatcgatttgatattggtgttagagccggtttactctcaaggattgagggcgtaaacttcaacgagttttacaagaaattgatggccccacttgagaacattgtcaacgtaaattatgactatcgagttggtgactatgtatataaaagtcgacatcaacatatagcaaatattgttttttcaaaaacacttccttctgccgaagaaaaatctcaacagatcattaaaataataagatatcttaacgttagttatgaaactgacaatttagctatatcacaaatgattaaaggaagaatcttagctgatgagttcactaataaatctcttgtaaactctatttttaacgttgcagaagacgctggtattcatcctgctgttataaatcatcaaagagctgttttcgaattgcatcaccctggcggagaccttagaacggctctaaactatataaataaggctgaagaagaacccggcaacttatctcgaaaaacactacaacacactaaatcaaatatatacagaaggcttgcattagcttctaattttgatgtcgagaaacggaagttaagacaggatgcgctgactattctgaatcgttctatgtccggtgctcgtgactcactaccttattttacaaaaggtcaaatattatttgaagaacttaaagaacgtatggaccttataaaggaaagtgatagcgacactgaggatgaagtaatcaatgaattaacaaaacaaatggagtccaaccttgtcacaggcctgcagttatttccctccgatgataagctattaatgcttgaatctgattactcaagttatatcaaggattcacctcgtgcattaaaagctttagaacaatcttttagaaagaataaagatagcatttatacagctgttcgactggcgcgatcatatttctcaacaaatagaagagcagaagctatatcccttcttcgttcaacactatccaatcatccaataaataaaacattgcattatgaaatagctaaactattgattttaatggatgaattcacaaatagagatgagatacttactcatctcaaacgtagtttttctactggtgatacacattacgaagcacgctatacttacgccaggcatgaatatctttacggtgatattgcaaaatccaaaaaagagttcgctgagttggctaaaatcccatatccaccttctgctttaaataaggttagaggcgatatgaaaacgcctgagggaaacaaaattatttatcatggtactgtaagtagtgtacatggttcattctgtttcataaactgcattgagttttcagaaaatatttatgtccactatactgctttagttaatagttctgactggccaaaaataattccgggagcaagaatatcttgccatataggatttagttttagagggattgcgggacattctctagcagttatttga

SEQ ID NO: 148199 - DNA, 684 bp, Enterobacter cloacae
atgtgggaagcagtgcttaaagcgctcctggtaatacctgttccactggtaacggcgatgttggccagtatcgttccttacctgacttaccgccaaaatggcgataagaataaacttgagttgataggcacattagccaaggaaattgagaaaccagaaccctgtgcgtatcttgtcgaatcctgtgtcgcccgtatgcataatatccgcccgcttccatggtcgtttttaaggctagtgctaccctacagtaatgccgtagagatcattcagcttgtatcaacaggaaggcgtgtgctggatttatttgaaatttcagtagataacggacggccctacgtgaattacgctactgcgctcagcagaccggtaacaagatggctaacgatggcgacatgctttatgtcaggggcgttttttttagtcattatgtcgattactgagtgggacttactcaaaatgttgtctgaacaatccggaggtcaggcgatgtatggtgaagcgatatacaaatttgttcagatgcttttttgcgcagtagctttctgtgttttcaccgtacagggagtgatactcaagcgcgcaaataaacgactggccaaaatacaggcacttattgctgtcaattatcccgcttcctatgaaaagaaccatagtgatacacagcaaaacacgactgactga

SEQ ID NO: 148200 - DNA, 1068 bp, Enterobacter cloacae
atgattgatatcgaaaacaatgtcttacaggatttaattacaaatcttgggaagatccttgaaggaaagaatgcaaacctgtgttatacgggacaagattttggtatcgactatgtgtttgaaatagatacagttcagggcaaatggattgtgcccgttgagataaaaaaacaggcatatccaagagatgtaaaacaggcgatttgggcatttgatgaatatcgtcaagaaaataagggaaaacagaatgttgtacctctttttgtcgctgacttgatcagcgaaggtgcacgtgaagtattgaaaaatcataacattggatactacgaactcagcgggactctatatattaaacataaacaaacacttatcgatattcagagaccacgcaaacgtgccgccaaaactggtgcaggtgacctctttaccggtgcaagagaaatggttgttcacgcgttactacattcccgaggcgagtggttttccggtgaggaattaagcaagttttcagatacgtcgtcctttaccgtttcgggtgttctgaaggagtttgaacggagagagtggctcacaaaatccagtgaagggggacgttcacaaagacggaaactgaccaatcccagtgcagtgcttaactcttgggctgaatcttttaagcaacggaagaagaagagtttttacggctacctgtttgcaacagacgcggtggattgtgcaataaaaatagatcaaaggacacgccatttagatctcccagtaaaatgggctatcactggagcactatcggccaatcaggcctcccccctacttaccggtgtgaatatagctgaaatcattgttcctcttggtcaagctgaccgttttatgcagtcagttgatataaaaaaggccgaaaagggatataacgttgttatacatgaatggcctccggcaggcctgcaattcattgatatcgataatccgttcccttgcgccagtaacttcatccagtacttatctttgttagatgggaaaggacgaaatgctgagcttgcagcgcaattccgaagagacatactggagatataa

SEQ ID NO: 148201 - DNA, 915 bp, Enterobacter cloacae
atggtggttcacaccaaacctaaaaccagatttggttactcagcaattaacactgaaacgtgtgagcgcgttttagtcactctgctgactacttttggaacaatgaagggcactctacgcttggttggcgggttagtgccacggtatttaacacccgagcaacctcctgtagtccctgcacattacggcacatctgatgtcgatgttgtgcttaaccttcaggtaattgcggaaggtgagaattacgcctcgttacacgaacaattggtgggaagaggtttcagaaaacacgaagataacaattcatggcgctgggagtttcctgttcagggtgaggcgccagtcctggttgagttcttacaggggaataattcagatggtcgtcccggaagatcagtacctatcgacggagaagatgtctctgcacttgtgatacctttcgccgaaatggcatatgactggtaccgagagtcggaaatacaagcggaactatttggcgaggatggcgtttcgggggcaggtatagctattgaaactatacggtatgccgatgaggtggccttcattttgcttaaggctatctcatttaagaaccggaatgaacctaaagatgcagctgatctgatccatgtcatgcggtatgcaggcactcctgaacaagttgcagagaaattcctgaaccgcattgcaggtggcgaacatgcatcagcaatagcggctggtctggacgcattacagaaatcgtttgctgagggcaatggggataccgaagggtacaggttaactggcccggttcgttatgcgcaatttatgcatggtgatgatcctgagctggaagacgaaaggctgcgagaccagcgctttgcttcaggtctggtaacagaagtattgcgtataataaacgaacgaaattaa

SEQ ID NO: 148202 - DNA, 573 bp, Enterobacter cloacae
atgacaattacacaggcagatgtaaataaagatatttgtatgttggcttctagcatagaagatgaaaatcggccattggttagtcctatacaagctttaaagattagtatgctatggccattaagttgcgctgctgtttatgcaatttctgtctcctgggctatatataactttacgccacatattgaccatttcgacaatatgacgaccctaacaggcgagtatgggtttgtccttgcagcctgtgcattagctatcgtattttgtctgttcataggtgcgtcactttatggacctgcgcttgcatacctatcgctaagcgaagaagctagagacaaatctctaatcataggccgattaaaaaaagtcacaatgaagctaggtatgttcttcctcgtctgtaacatagggatagcggttttttcaattaaattcccttcggttttagtcatttcacctttttcaattattgtgtcatttttgatcacgcaaggtgttgttggtgctgaggtttccagatatggaattagtgcaatttttggcaagttgaataaattggctaaaaatatctaa

SEQ ID NO: 148203 - DNA, 492 bp, Enterobacter cloacae
atgacaaaaacacttttcaccctcatccgtgatgcagggcgggcggccctgtattccttagtctttggcccggcactggtgctgtatgtgtttgtgatgctggctgtatcagacggctcactttcccggcaattcctgacgaccttttatgacctgactgacggtgcgcctgccggcaaggtcatggggtgtgttaatgaaaatgtgatggcaggacgcttcttgccacctgaacccggagagtcattaaagcctgtgcctcctgccttagcgaaagcaccgcctgaaatgttgtgtcggcgtggcccggtggacagcgattcctgggcgcgtgcgacagatgcaacgttacgcaacacctggattatggcggtgatgtttggctttggcgtgtggtttgtattccgaggcctgaaccttgccgcccgaaagaaaatttcaccagactcgcattcggttctggcacggcaaaacaaggagacacacgaatga

SEQ ID NO: 148204 - DNA, 624 bp, Enterobacter cloacae
atgaaaactgcattgcttcgggcgctgatcttcagcgttctcgcaggtgtattgcctcaggcgcaggccagtgcacagaccggcatttctgtcagcgaccgggactggatgaaggggcaacaggactcgctggaagccctgaaagggagcctgaataacctgccagccggtgtgtcggtattgccgccggcgcagcaggaactgattaaccgcctgcagggcgatatcgcggcccaaaccaacacgatgggagaaaaagacacctttccggccatctattttgtgagtctcggtatcccgcgtgaaggcctgctgcccatgctgaaggatgcccggcgttttaatatcccgccgacactgcgggggttgcttaacaatgatatgcgccagaccgcttccgccatgtttgagctgagcaaggaagacaaggatgccggtgtgcaaatcgatccaaccctgttcactcagtacaacatcagtgtggtaccggctctggtagttacctgtccggggcactttgatgttatccggggaagcctgccgctgcagcaggcgctggagaaagtggctcagggcggtgactgtgccgcaacagcacgcagattactggaggccgcgcaatga

SEQ ID NO: 148205 - DNA, 1014 bp, Enterobacter cloacae
atggcgttaatcagctgcttcaccggccctcagggcttgcagggagtgctcacctgtttgcgcgataccgagggcatgaccggtattctggtcgtcgttgcgctactcgctggctggattgctgttcagtattttgcagatgcacggcgtgtacgtctggcgtgggagagcagaccgggattacctgtccctgtggcgcaatttggcagtgcccggcatgccgaagcggttcatgcatttgctaatcgggaatactaccagttgctactggctgaactggaaaaggcattgactgaagagggctatgtactgacccgtgatgaatcactgcgcgtgacgatgccagagttcgatcggcaaaaaatcagccgccggattttccgggcgcgccagtgttatacatcaccgagagtaactgaacagacgatgcaggacagcgaagatgcggcagtgaacgatgggtacgccggctcctggctcagcgtacttatccggggcagtgagcgggaagggtggtacatcagccgacagatgacagactggcaaaaacagatgtggcccgtcaggcaggtgatcatcaatgtgacgtctgatacgtcgacaatcacacgtgatctggttcggggattgaaagaggccgtgcaaatggtgagtcgcacaccgttccctgaaaacgataatgttatcagtctttgcactgtgcccgtagcatccccggatctacaggtaacgatgatgcgtcagttgtgcagtacgcctccggggttctttcctggatttgccgggcggaacgtaccagaggagctggcgaagttgattgctgtaccacaggacgaagaaaagcgggttgttgctgtcttcgcgcagataacctccccacattcaacagagaggttagtccggtatctgaatactgccgctgaccgtatttccgccggggaggaacatactgctgaatacgatgatgacaatggttatgccttaattgtcacacgtactattaaagctcactga

SEQ ID NO: 148206 - DNA, 276 bp, Enterobacter cloacae
atgaaaacaacagcgcaggggggcgggccagactgcaaagcaaaggatgtgaaccgtcgagtaaggataaccattaactggttgtattcgatcctttggtggctcgggtggatagcggcaatatggctaaatataaaagggttagaggaggtgtatgactaccgtcgtttgggagcacagctgatagccatcatccttattttattaccctggccaggtggctccaccgtccccctgaagggattgaatgacgataacaaaaaggagcgcaaatga

SEQ ID NO: 148207 - DNA, 480 bp, Enterobacter cloacae
atgtcgtttaaaactgagctggatgttatcgaagaagacctgaagaaatggcgtgctgggaaaaagctacataagtaccggatattttggtgcgcagcagccctcccgtgcagcatgtttctcggcggtgttttttatcaacagcctggatttatcattatgggcgtggtcctaggtttcctcttgttcctggcagcatcacgcaaaatggacgctcccgatagctgggaaggccgaatcaatcaggcattgcagtcggttagcccgagagataaagacgcgttcgaaaaactgtgccgcacagtgaaagagaagagggcaatagagcctgatgacattgctgcatggctcaaagacgaaaaagaagcgcgtgcgcttttcgagcgtcaacgagatgagcagcaacgctacagcttcactgaatggctggataaacgggagcctgaccagaaggccgaatgtaatgaggagggcaaatga

SEQ ID NO: 148208 - DNA, 732 bp, Enterobacter cloacae
atgatcccgtcctcacacgcgctcgtttccctgaagcccgcccgtcaggctgcaatacaggctatcagccatgttgagtctgcccgcgaacgcggcgcacgactgcccgccatgccgtatgtgcgtacatttctgcgtcttcttacgggcagcgggcgtctcaacgccacggtggccaataaaatacctggcctgcactgggtgccaaataaccgtcattcgaacctgaaacaggtcgaggaggcgcttaacaccatgatcgccaccagtggcgaagcctgcccgctgccgctcacgattgacgtacaggccgaactgtttcctgaagtcatgcacacccgcacgggtcgacggctgcacaggtctggcattaagaccacgcgccagctgcgccgccagtctcgtgattacgaacagcgctggaaactgcgccagaacctgctggagcaggcaaaaatcgacctgaattttcagtcaccggaaaccgtctgcacctggtacacccggtggagcgacgagtttgacgcggcagagcttgccggaccgttctggcgctggcagtcgcggttcgcgtcgctgaaggaacttgactggcttcgcatcagcggcgagccactgtatacagtgatgtacgatatcccgtttatcgtccgggaaacgccggagaacatccgcatggctgaacgctggcaggttccgaacaagttgcggtatcagcagggggctgaatga

SEQ ID NO: 148209 - DNA, 528 bp, Enterobacter cloacae
atgtactgtactctcacatctcagggaggaatgaaaatggcaataccagcttatctttggcttaaggatgatggcggcaatgatataaaaggatccgttgatgttcaagatcgtgagggcagtatagagattttatcatttggtcatggtttacttgttcctacagataacaatactgggaagatcactgggactcgtttacattcacctctcacatttgaaaaagagtttgattcatccagcccatatttttataaagctgttgcaactggtcagacgcttaagagcgctgagttcaaatggtacaaaataaacgatgcaggccaggaggttgaatatttcaatatatttcttgaaaatgtacgagttgtgagtatcaatcccgtgatgcataactgcaaagaaccttcaatgaaaattcataatcataatgaaggcatacaattacgttatgagaaaatcacatggaaatattgtgatgggaatgttcagtttgcggatgcatggaatgaacgtcaaacaggttaa

SEQ ID NO: 148210 - DNA, 465 bp, Enterobacter cloacae
atgttaaacagcatcacctttaaggcgctacactggatcgtcactatcattatgggtgttatgattggctgtcatttttattttgaatacgagcaacgcataacggtacgagataagctctacaatgctcgtcaactcacaccgcgtacatggttatatatcactgaatacgcgggagccaatatgactacaggaaacgtataccgctatttcttagcgggtaaattaaacggcaatcccctattcatgctggaaaaacaaggcatagcccctacgctgacagccaatacccccagcgcaaaagtcgatggcataggcaataatgtctcattcacggtttatggaacggtatacgacttttcgaccaccgcttttttctatgataccgacgggatagcggttgccccttcgatcgatctcacggcgcggggagaagggtgggataaaggaaaatttagtcgataa

SEQ ID NO: 148211 - DNA, 906 bp, Enterobacter cloacae
atgagctctctaactaaacaactctaccgatacacgcataagcgcaatatgcgccataacgaaaatctgtggcccttcattaaattatcacgcaatgaaacaggggagatttctgatttaaactataaaggccagagcattaacctcaccacgcttacctcgattcaggataggtttgagggtgagatcctgatagccgcaactggcccttcaatcaaaaatattaattttgaaaacctgtcatccaccgtagttaccgctggtgtgaacggagcatggcatctcaatgaccagctacattttagtctctattttgtggtcgacatgacgttcatcgaccgtcagactgcaattttaaagcaggtcattggctgtaaaaatgtcattttgtttacaaccgtaatggggatcgttaagcttataaaccgtttttcatatgaaaatatccgatgcgaaatatgcattattgaagatatttgctatgagacttataaaccctcgattaaacgggacaatttgcaccaggcattaggggatacgccagggatcgtcttttccgatagccatcccaatattgcttttagtcgtgatgtgaggcgcggtgtggtagatgccggtaccgtaatgtattgggcactacaggtaatttattttctgagatttaataagatttatatcgctggtcttgatatgaataatttcaatcaaccgcgattttatgaaaacggtaataacatgttgccttcattccttggagacaaagtacagaatactgtgatccccgcattcacactagcaagcaatattatgcaaaaagacaacatcattgttgttaatctatcacctcaaagcgctattcctgactttgtatttcccagaaaggattttacagatgttttcaattaa

SEQ ID NO: 148212 - DNA, 1164 bp, Enterobacter cloacae
atgttttcaattaattcccaacgcattccgttctatccttttacgctttttgtattttttagcgtgattttctgtggggtttctcgcgtaaataccttattccatcttgcactcgggctatttatcattgccacaattgctagcaatgaattcagagtgcgttttatcaatgaccgtacctttctacccgctctgggcataacgggtgcctttttaatatatttttcactttcgaatctttgggctgaatcgtctcaggtaagctctgccttaacacattcattctatttatttattttcatatgtctttaccgtcagtgtgaattgcagggaaagaaaaaattcgtcattggcgcagcttatgcaggtattgtcgcactcgccatactcaccctgatttatgttgataaagcgaacattttttataacagactttcgaatgcattcccttatgcgcctgataacgtcattgacctcggcggatatatggcactaggggttttattaagcgctatattggtgcgggaaacgcgtaacgtctggttttatcttccagtcccgttgctgctggcctgcttaatactgactcaaagtcgcggaccgttcctttccttggtggtagcctcaacagtagcgtttctttgtaaacccaagtggaattttaagttactgataagttcggttattatattgttattgatcggtctcgctttctattttagcggcgcaatcgatatatttatcaatcgagcagaagagtcttcccgtgcaagcaccgtgcgcttaggtatttggcaacacgccgttgaagtggccaagcagaaagcgattttcggatggggcttcaacaaggagattcagttcattaacggctatggccagaccgtttccacaacgcacagcctctatatagcaaccttccttaagggtgggatcgtggggcttctgctactcgtaggtatgatcttatatgccgccagacagtctcttcgtcacctcgcggccgatcataaggcggaaatcgctgtcattgtcttcgcactgatgttctatatcactcagggtatgtttattatcagtaacccacgggaatattgggttctgttctggctgccattcgccattattttcagcactcccgttaaaacggttctgcaaaaataa

SEQ ID NO: 148213 - DNA, 2139 bp, Enterobacter cloacae
atggatgttgaaatcagtcactgtaacaatattgatcatgcccgtatcacactttcagaaaataagctgaacattaaattcgctccgaacggtactggcaagagcactatttctcgcgcaatactgcacagcgttgttggcgatacagagaacctgaacgccctgcttccctttaagcttcgcacgtcgaatccctctaatttccaaccgagcgtgagcggtgcggaaaacattcacgacgttatgtgttttgatgaaaaatacgttgcgcaatttacctttcaaccagatgagctggtcagtaacagttttgaaatttttatcaaaactgaggcttatagccagattgaaggcgaaattgaaactatggtcatggccatccggcaggagtttaccgcaaacgacgagctagaacttttcattactcatcttcaggaactcagtggggcgtttaagctcaccaacaggggactatccagagcttcaacggggatgagggggctggctggaggcaataagctacagcatatccctgctgggctcgaactctaccagccatttatacaaagccctcgcaacgtagagtggatcgaatggcagactaagggatatgaaaacttctctggattgtcagaaggctgctgccctttctgcacaggtgattcccgcgataaaaccgagcagattcgcagagtcagtgatgagtatgacaaggccgtaataaaaaacctcgtcgtcatcatcaatgtgcttggcgaactgggggactacttttccgacacagcgaaggcacggctgacggaaatcacgaccctacagggagggttagaacagcaccacgaggattatctcctttcaatcaagcggcaaaccgacaatctactcacactgctgagtacgttaaagacccttaatagtttttcgttcagtgatgcaagtaatgtgcgtgcgtctctggcagcctgtcgactggatctacagttctttcctgacttacagtcgaatcaaactcaacgaatagtagaccggctcaacacttcgctagatgtactcatgacgcatgcaggccagcttcaaggaaaaattaatatacagcgtgctggtatgcaacgactgatctcgaagcataagactgacatcaatacattcctagcatatgcaggctatcgatatcaggtcgatatttccggggatggtgcagaatgtaggctcaaactgcggcatatggatcacgagaaccatctcagcggtggaagtcagcatctcagttacggtgagcgtaatgcatttgctattgtcctctttatgtacgaatgtcttgcccgcaaaccggacttgatcgtcctagacgaccccatttcctcgttcgacaagaataaaaagtttgccattcttgaaatgctattccgtcgtgacacaggggagtgtctgaaaaacctaaccgtactaatgttgacgcacgatgtagagcccatcattgatacgctcaaatcagttagacaaatgtttaacaatcaagtcatggcatcgtatcttcgttatagtgcaggaactataacggagttgccaattcgcgaaagcgatataatgacgtttgcacaaatatgcaagacagtgactgagtcaaactgcgacgatctaatcaagctgatttacctgcgccgacattatgaaattctggacgatcgcggagatgcttatcaggtgctctcaaacctttttcacggccgtgcttcacccattgactcgcgcgaaccagcagaggaaggtacaggttatcctcctatggctactaataagttccaaatcggccacaatatgatcactgagcgtattcctaattttaactactcttacatgctaggtattctaactactccagagtacataaggactctctaccaaaattgtagaactgggtatgagaaactgcaggtattcaggttgttagagccagaagttaataatcgagtaattcgcaaatttgtgaatgaaacttatcacattgaaaatgaatttatctgccaactcgatccggctcgattcgatctgatccctgaatacgtcatcttagaatgtgacaggcttcttatcccgactcaatcagccaatgatgagataggacaggagatcatataa

SEQ ID NO: 148214 - DNA, 600 bp, Enterobacter cloacae
atggcgaaggcaaaattaaacaatgagcatattgctacagtggctggtgatataacggtgtttaactacgatggtgaaacgggagaatatctttcttcatccgttgagtatttggcggaaggagtaggaattccagccttatcttgtattgatgcgccaggagaagttaaggaaggttttgccatttgtcgcaactttgacttaaacgcatgggagtacctcgccgatcatcgcggtgagactgtgtatagcacgaagaccggcgagcgagtcacgatttctcatcctggtgattatccgaaagatacgactacacaagctcctgtaacgccatacgataagtggaacggcagcgagtggataaccgatgcaaaagcgaagcgcgcagcggatgtggcaaaggctgagcagcagaaaaccgcattactggctgaagcttctgcatttatcgcaccattggctgatgctatggctggcggctacattgatgatgttgacgtcccacgccttacagaatggcagcggtaccgatatagcttggccaaggtcgataccagcaccgcgccgaaccttatctttccacctaagccggaagtgtag

SEQ ID NO: 148215 - DNA, 696 bp, Enterobacter cloacae
atggatctcaacaaaatcaatgcatttttagctacagccattggtggcctgatatttaaatggcttgctggggcagtaaaatccacttggtcatggctaaacaaaatttatcctgaagagcagtttttagtagatgaacttggcatcaaaaaacatcatatacgactaagctatactaaatacaaacgaagcaccaaagaacacacacacaaacaatcccttgtaatcaaagcatttggcttgtgcgtaatactcattagccttgcatttgcttttgcatatttttactttctcataaccaagcctatctattggattgaatacgagtacaacgttacaaatgaaactgtatggctacgacctggtattgctaaaaacccacaaggaagcccatactggagaataaattcagacacatgcatcaatagcaaagcaatggaacgaatcacaaccattagtccaaaaacaaaagaaatggtatgcaactatatttttgacccacaaagccaaatagatatcgcaaaagctatagataaaaattcagtcgcaatcatggtcgttacgccaatagttttattatctctgttttttttcctatcccttggcattggtgtattcattgagttgcgaataacgcagaaaatatccgaatacaacaaaaaagagttggcaaaaagctatcaataccttacttaa

SEQ ID NO: 148216 - DNA, 450 bp, Enterobacter cloacae
gtggataatctgcataaggtggatgagtggctggcggcgctgctggcgaatctggagcctgccgcacggcagcgtatgatgcgcgagctggcgcaggaactgcgccgtaatcagcagcagaacatccgactgcagcgcaaccctgacggtagtgggtacgagccgcgaaaggtcacggccaggactaaaaaggggcgaatcaagcggcagatgttctcgaaattgcgcaccacgaaataccttaaaactgccgccagcgcggattcagccagcgtgcagtttgaggggaaggtgcagcgtattgcacgggtgcatcattacgggttgagggatcgggtgagtcgtataggcccggaggttcgctacatagaacgtcgtctgctgggtgtgaatgatgaaattaaggtcatcattcttgacgttatgctaaacaagttgaaaatgctataa

SEQ ID NO: 148217 - DNA, 789 bp, Enterobacter cloacae
atgggaccacttgtcataatggttgttctcgtatgcgggttttggtacacagaaaatcactatcaatcccgcatacgtcacgccagaaccaacggttggacctcttacttttatgtcgctatgcacggttgtaagtttgttgttcaaggtttcgccgtcatttttgcgctctacatcattctttggctgttcagcttaattatctcgttgcctcacctattttggccgacatacggcatgaaagacatttactcatggcttacagtcaaagaggtcatgaattacccattgttgtttgctttctccatggggatgtcatgcttactggcctatgccgcaggtcagaatgcaaggaagtcactcgagaaagaagaggtaagacaagccgcatatagagaaatggcttcaatggatggtgtcgaatctcttcttgtacaggctattgatgaagatatgctgatcttcgttacgcttaaatcacgaaaggtatatatcggttatgtcgcggctccacgtattgaacacagccatacccaacatttggcgataattccgtacatcagcggctatcgtgataaagatactcttcgctaccatgagcagcatagatactacgagctgtacttggcgaaaggcattactgcggattcagagggattgaatttgcagcatttcaggcacgtgattcctatggatcaggtagaagctgtttccctgtttgatactgggacctacctgtcctttgatgattgctctgagccagaagagacaaaggataagaacgcataa

SEQ ID NO: 148218 - DNA, 195 bp, Enterobacter cloacae
atgactaagatttttggaaagcttgccacagcaccagggcgttggatgcagaatgttatccgccaggacattgagcagtccaacaatagcaaaattactactgatgctaatgggaatgctgttctcaacatgaacaacaaagaagttcgtgattctatgcaagccagaatgaaggaattggcagctaaacgttaa

SEQ ID NO: 148219 - DNA, 234 bp, Enterobacter cloacae
atgcgcattgaaataatgattgataaagagcagaagattagccaggcaacgctggaaggtcttgagtcagagctttaccgcaatctgccccctctttaccccaaaaaagcgatccgcatacgcaagggaagcgccaatggcatagaacttagcggtttaaaactggacgaagacaaaaaacgagtgatggagatcatgcagcaggccagggatgatgatggttggctgcaataa

SEQ ID NO: 148220 - DNA, 258 bp, Enterobacter cloacae
atgcagtttatatccatggagttcgcgggctggcgtcagaaagaatttcaggcaatgattcgcggtggtgtgcacactgagacaatctggatgaataacccagaggggcgtccctactcgtacacctttgcgggaaaggattacaacgacagggagtgcatcaaacgcaaggcgaagcaatggcgcgataagttcgcagctctgccccatgttgagcgactggcaataatgacggcgctgagcgaagttaataattaa

SEQ ID NO: 148221 - DNA, 192 bp, Enterobacter cloacae
atggaagcgtttgaaggcgttgaacagaacattttcaaaggagatctatcgcatatcaaattcactggaactaatattatctttgacaacaataaagctattttagtcaaagataatactaaagaagaatggtctaatactgctgtagatgcagattttaatagaatattcaggattaaggatatcgtatga

SEQ ID NO: 148222 - DNA, 465 bp, Enterobacter cloacae
atgactggcaaaataagctggacaaccactcatcctgatggaacggtatcaaagtttgaagctgaaagcgcagcattgaacaacactgacatggggaaccttaagtccttcgtagaatcaatccccagaacaacttcatcaccagaaaaaaaggaagctaagcattccaaagttgttggaatttcatttcttatattatttatagcgttaaacattggatatatgtttacccctgaaaaattcatacaagatcataatctactaatgatattcatattcttatgtatcatagtagtggggatttattccttatgcgcacatttgatttttgaaaacaacactatctctattagcattctcattttaagccttgtatgcattgctttaacaacaaaagtaaccactataaataatatttacaaaacaactgaaaaatctatcattgagaaaacgaaagataaataa

SEQ ID NO: 148223 - DNA, 858 bp, Enterobacter cloacae
atgagcactatcctgaaatgggcgggaaacaaaaccgccattatgtccgaactgaaaaagtatctcccagctggcccgcgattggttgaacctttcgcgggttcctgcgctgtgatgatggcaacagactatcctcattatcttgtcgcagatatcaatccagatttaattaatctgtatcgttctattgcagaagatacagaaaactttattaatcttgctaaggcggtttttgaaagttttattgtcgctgaaaattattatcgtgtgcgtgaagcgtttaaccacgatccgcaattagaccgactgcaccgtgctgtatattttctttatctaaaccgccattgctatcgtgggttatgccgctacaacctaagcggtgtattcaacgtccctttcggtaattataaaaagccgtattttcctgagagtgaaattcgcgcatttgctgtgaaagcgaagcgagccacctttgtttgcgctaactacgaagaaacgttgtctttgttgcagacgggcgatgtgatttattgcgaccctccttatgacgggacttttagtaattaccacactgccggttttacagaggacgatcagtatcgcctggcgtctattcttgagcgccgcgcgtcagaaggccatccggtcatagtttcaaacagtgacacctcacttactcgctccctttatcggaatttcacccatcaccgccttaccgcaaaccgcagtatgggcgttgcggctggtgacggtaagtctgccgtggaaatcattgctacctcaaaatcgtgtcactggcttggatttgatcctgcaaccggacctgactgcagcgtgaagtatgaggtgcaggcgtga

SEQ ID NO: 148224 - DNA, 228 bp, Enterobacter cloacae
atgctgaataaagaaccttcattcgcttcgctgctggtaaagcaaagcccggcaatgcactacggtcatggatggattattggggaaaccggtaagcgatggcacccgtgccgtgatcagtccgaattattaaacgggctgacatctaaaacggctaagccgtcagcctttttaattattcgcattgttcgcttgattgttaaaggagtgaaacatgtctcgcaatga

SEQ ID NO: 148225 - DNA, 1047 bp, Enterobacter cloacae
gtgcttttaaatgattatacccaacagtacccatggataccgtacttccttatctctctgtacttattgtatttaggcatcgaattatatatatgcatttcaaaaaaatgctttgatatgaatgaaaggccattaacaagacaatatctatttaagcaatcgatcagaatcccattattttcatcattatattttggtgtattttcctggctaggacactctccccagttcgatagcgatggttttaataattttattgccattagcaaactccccatcgcgttgctttccttgtccataccatttgttgcagtagtggcaaacatacatcgcacagttcaaacaaataagcagattgaggaatcaaaacaaaaaaatctatctgatagtcattatagccatttaaaattcgttaccgattattttactaacctacccggcaaaactgtaaatcgcaaacgaaattatggcattaaagaagtcagctataaaattaactacccaatacatttatatagatatattttcaaaaatagcacaccggagagcgggagaccacaaaactcaaataaagaatacatgcaaaaagtcagcgatcattgggttgaaatagcaaaaagcttagaaattttaaattctccattagatgaatccgagattaaagaaattataattcgccaaatgaaatcactatctttaattgagtaccatttattaaaacttagcagattactttgcttaactccagcagaattgaatgaacatgccaccttcgcatctcaaggatatgagatatctacaaatatcttatctgggtatgaacttggcgagacaatagaagcctattttaagtttaccattgatatattcgatatttctgacaatttcttttcatttaaagatgatgctacatctggccaaataatttcacaagcaagacttctggaacataaagaacctaaattgtttgagctaatcataacaagcaaaggaaagaaagagccagaactaacctataatggcgacaaattggcggcaaagcattaa

SEQ ID NO: 148226 - DNA, 696 bp, Enterobacter cloacae
ttgaatgccattggtgcaccatttgatttttcaaaaatgaccatcattgatattgacaaaacaattagagataaagttgagaatatatcatcaaaaaaaccagactatgtattttttaatgctgcttatattttgggtggaccaaaggttaactttggaagattcttagaggaaaaaaagaatgatattgaaaaaaacatgattattaggatgataaaatttgttttttataatcaagaaaaaatagtaaatggcgtaaagtcttcggcaaatcagttcgaagtatttaaccatcttaagtcattttcaggaattggtgattttcttgcttatcaaatttttgtagatttaacatacataataaactttccttttacagaaatgaattttgttgtttcaggtccaggatgtgaaagaggaataaattggattttttctgatagagacggaatgaatagcgaagagtgcctattttggtttactattaaccagaataatattgcagaaagatataatgaacgatgggacatggatgagatctttcacttcctacctaaagaagaaagagtctatagtttgatggatatggaaaacagcggcgcatgtgagatagataaaagatgtaggactaagtttggtaacaaaagaccaaaacaaaaatatcattacaaaaataataacttaagattactttga

SEQ ID NO: 148227 - DNA, 492 bp, Enterobacter cloacae
atggctaaagaaattaaaaaaaatgtttttgttagtcatcatcacaaagatgatgctagtgttgatggcgtttctcgtttggctgcagcaaaaggttatcagctgcgtaatagttctgtcagaatgaaacctgaaaaccagagacgtgcagatgaaaaaaagattagcgatagaacgatagcacgcctacttagaatgaaaatgagatgggctggtcaagtcatagtggttatcgggaaagaaacacatacaaggccttgggtaaactgggaaattcaagcagctcatcaacttggaaaaccaatcataggtgtgtatgagaatggtttaaaaggagaagtaaaactaccagaaaatctcgaaaaatatgcaactactatcgtagcctggagaagcgatgccattatcaatgcattagaaggaaaaacgagctttgaaaaacctgatggaacagaacggggtaaaggacaaggaggtaatgtcgtatgctaa

SEQ ID NO: 148228 - DNA, 666 bp, Enterobacter cloacae
atgctaattgaacctaactctcatctttatgcttatataataacgcgagattttggttttgcgcctaacccatttcatggttattgtactttagcaacatgcaagcctggaattagaaaatctgctaaagtgggtgattggatattaggagttggaggagctaatttaaaaaaagttaaacataaatgtatcttgttaatgaaagttactgaaaaaattagctttaatgattattggagagataccagattctctatcaaaaagcctgctagaaatggtagccatgtacagatgttgggagataatatctaccatcaagatgacaataatcaatggattcaagaagactctcatcatagcaatgctgatggctcatttaatatgaccaatctaaaacgtgatactactgccgaccaagtgttgatttcagatcatttctattatttcggtgataaagcaattgaagtagacttagactctattggatatcatggaggtataggctataaaaagatcctcttagagcaatctatacccgcaaatgatcttataaaaaaaatagagcttgaatttcgcagtgacaaaaattttgttatatctgacccatgtcaattttctgattactataagcgtgttgatcagggaacgggagagatctatttataa

SEQ ID NO: 148229 - DNA, 570 bp, Enterobacter cloacae
gtgatagagatatttctatctgccagcgtacctttgcccaatcgtgatcgagtatttttcgatactgctgatgttcttgctattagggaagcgataaaagcgttagttgaagtagtgttgccgattggacgaattacgtgtggtggtcatccagcaataactcctctcttggcgttattttcacgtgaggccagcttggatcgtaatcggttggcaatttaccaaagtaaactatttgaggggcgcttgcctccagaattggaaaatttcgtcaacgtacacatggtgcctgcggttaaaaatgacagagaggccagtttgacagctatgaggcgtgcaatgatcgaaagtcaaaatttcaacgcagctgtgatcatcggcggcatggagggcatctatgaggagcataaactatttacggaatcccaccccaacgctgctgtgctgcctctcgcaacgacaggtgccgccgcacgagtcatttatcaacaggggcaatatgatccgctatttgcgcgtgatagaacctattctagcttgtttcgtcgaaaactgctgtctatcagttaa

SEQ ID NO: 148230 - DNA, 1188 bp, Enterobacter cloacae
atgagcgatacttcaaatataagatctccataccagctgattatgcttggtgcggccaatgggcatgataatggcctacgtcataatattgattcggcgcttcagaaactggggatccctgcttgctcgatcaagtacttttacgaattcaacgctgctgaccgcagcttaaagttgccgacgatggcaatatttttcggctctccagaaaatactgccgatacagcacttgttacagaattgattgacgattcgaacgttatcgctccgatcgtctcagatttgtctcaagtacatgaagaaattccgccgcagctaagacacataaacgctattgtgttgggctccaatgatgaaggaatcgaccgtctagtcacgttagttctcgaaactttccggttgttacgacgtgagcgacgtttgtttatcagctataagcgggctggctctcagcccctagccgatcgattgtacgatgctctagatgctcgcggttttgacgtttttattgacgtgaggtcggtacctccggccgcagatttccaatctcaactttggcacaggatgtcggattccgatgtcgtggttctgatcgacactcctggattcagagaaggccgctggacttccgaagaactggctcacgctaatgcgaccaatgttcaaatcttgcatcttctatggccggggcaaaaggaagatccagcatcatctttcagtcacttcatgaagcttaagcgtagcgactttgttggatgtcttcctatgcggggtcgttgggtaacaaagggactggtgaaaagaatatgtgacgaggtcgagcgactgcgcgcaccggcaatcgctgcccgccaccgatatttggttgataacttttgcgacgcagcccgcgatgaggggtttaatccaagcgttcagattgaaggctggatttctcttgaatccaagtcagaaaggggactcgctatagtgccagcagtgggtatacctacctctgatcgtatcaatgaggttttcgaagccatcactcataatgctgttgaaacgaaggagatatggatgatttatgacaacagaggcgtactgaaaacttggctctcacatctagattggcttgattcctatttaccgatcagggctgtacagatgtcgaaggttccccaacgtctgaaggagttcattgcgtga

SEQ ID NO: 148231 - DNA, 603 bp, Enterobacter cloacae
atgccacgtagaacatttttttcctttcactatgggcctgatgtctggcgcgcttggaatgtccgtaacagttgggttgttagggaagccaatgaggaagaccggggtttctttgatagcagcgtgtttgaggcatcgaaaagagagagtgacaatgcactaaaaacttttctccgcaagggattagacaacacttctgttacatgtgtccttgctggaacccaaacatgggaacgtcggtgggtacgctatgaaattgcccgtagcgtcatcaaaggaaatggattacttaccgtttacattcacggggtccaaaacaaagacaaggagacatctataaagggggctgatccattagcacagatgggcctttatagaaccgagcatggcatctatctcgccgaatggaaaggcggaaagtgggtatcttatgcagattatactcttgcaattccggagggggatctatggttcactgcgccaaaaacgaacaacgtagtcccactgtcaactcactgcctaagctacgatttcattggacaagatggcagaaaaaatattggcgggtggattgaaactgctgcggaaatggctggtcgatga

SEQ ID NO: 148232 - DNA, 441 bp, Enterobacter cloacae
atgacaagaaaagtattttttagtttccagtatgaagacggacaacgtgcgatgaatgtacgaaacagcaacgtgatcgcttctgacaccaaggtgggtttcatcgacaaagctgatttcgaagaggttgagcgtaaggaagattctgccattaagaaatggataaacgatcagctttacggtacgagcgtcactgtagttcttattggagccacaacagacaagagcaaatgggtaaagtacgagattgagcaaagcattgagcgcggcaatggcatcttgaccattgatatcagtaaaatcgcagatctgaaagggaacactaccgactgctgttcgcttcgtgttcctggtgcccctcactatttatggaacaaaggaaatggtcgagaaaacttagggaagtgggttgaggccgttgctgaagcagctggtaagtaa

SEQ ID NO: 148233 - DNA, 1434 bp, Enterobacter cloacae
atgaaaagagaacttctgcgcctcatcgacagtctgtctaaagagctagacgagggaaatcttgcagtttttgcaggtgctggtttatcccgatcagcgggctttgtagattggaagtcactgttgaaaccaatcgctgacgacttagatcttgatgttgaaagagaatgggacttggtgacccttgctcagtaccatgctaatgccaatgcggcaaaccgctcgaaattgaatcagatgcttgtctctgaattttcatctggtttagcaccaactgagaatcatgaaattctagccagactaccaatccagacctattggactacaaactacgacaagctcatagagagctcgcttgaacgaaatggtaaaattcctgacgtcaagtacaccaataagcaattagcaattacccgtcccaagcgagatgctgtcgtttacaaaatgcatggagatgttgatcacgcatcagaggctgtgctgatccgggatgattatgaacgctatcacataaagatgcagccgttcatcactgccctcagcggtgacctgatagctaaaacttttctttttttggggttcagcttcactgatccgaaccttgagtacattttgagtcgagttagaattcaatttgcgcaggaccagcgtcagcactattgcatcctgcgtaaggctagcagacgggaaggtgaagaactggccgatttcgaataccgtgaacgcaaagaagatctcttcaggcatgaattgctacgggttgggatcaaggtcgtaagcgttgatgagttttctgaaatcaccaatatcctgagagaaattgaacgccgccacaaacgtaaaaccatttttatatccggtgccgctcatgactacactccctggagcgcgtcagaggcggaacagtttgtttacagactaagcaaagctatcagtaaacagcagtaccgtgttatctcaggattcggtctggggatcggcagtgctgtcatcactggtgtactcgaagaaaccattatgaatggtggtcgtctcgacagtgatcaattagtccttcgcccttttccccagactcagtcaggtgaacgtgctttacctgagctctggaccgagtaccgccgtaacatgcttgcacacgcaggtgttgctctctttctatttggtaacaagttggataagacaggggctgtagtgccatccaatggcatgcgtgaagagtttgatattgcaatagctaacggtctttttgttattccggttggtattaccggttcgatctcagccgaactgtggcaagaggtaattaatacctacgacgaatcgaagtaccagcaaggcaagaagatcacccctctacttcataaactgggttcccaagatactgacttggctcatgcccatgacgccatactctctctcctatccctgatctaa

SEQ ID NO: 148234 - DNA, 498 bp, Enterobacter cloacae
atgccaattcttcagtcagaccttcttaacgcaggcctacgccgctctgcgcagaggcaattaaccaaacgccttagtcagcccacagcctttctatgccacagccataaggatgccccgcttgcgctaggactacaggaattgctgaataatcaaggatgggatatctacatcgactggcaagatcagacaatgcctgagaagccgaactctgatacggcctccaatatcaaagcagccattgttcgcgccgattggtttttctttctcgccacacggcattcaatggcatcgcgctggtgtccatgggaaatcggttttgcggatggtaaaaaaatctatgaccgcatcgctattgtccccacccaagacaatctgggacatttctatggtaacgaatacctgaatctctataacaaaatcgatgtatctactggtacttctgaccttgccttttttgatactcgtggcaatggcaagtgggttcgctacctttaa

SEQ ID NO: 148235 - DNA, 789 bp, Enterobacter cloacae
atgtcgttgtatgataaggaaattccagaaaatcttcatgagtgtttttatagtattcatcgacagacactaaagccgactgaaataatttgcgtctttgatggtccgataaaaaaagttttatctgatgttgtttatcaatggcaaaaagaactaaatatcgttattattagattggagaaaaatgtcggtctaggttcagctttaaatctaggtcttaagcagtgtagttatgacgttgtagctagaatggacactgatgatatttgtgaagaaagtcgtttcgaaatacaaatatcctatttccaaaaaaacaaatcaatctgtctattagggtgccagatagctgagttttcagaaactttgtcaaacattactggtaagagaacagttcctttaacatgcgcggaaattaaaagtttagcgaaaaggaaaaatccatttaatcatatgacagtagtgtatcgacgccatattatagaggccgtaggtgggtatagagaccattattttatggaggattataacttatggctccgagtgatctcttctggctattattttgaaaatttgaatgaaacattagtgtttgcacgagtcggcaataatatgcttgcgcgcagaagaggtattaaatatattaagagtgagttccagttagctctcttgaagtataaactcaatatccaatcattccccatgagttttttgtggttttttttgcgttctgcagccagggttttacccgtaaactttttatccaaaatatacaagttgaatcgtgactaa

SEQ ID NO: 148236 - DNA, 264 bp, Enterobacter cloacae
atggctttcttttattgtgtttttttatttccggttataaatttactagagagatgttcagaaaaacgttttcagctacacttctttcaaacctttatcttttcaaataaaaaagatggtcgctataaatattacatcttattaatggttgttgcaggtgcgctattaattaatgagaaaatttgggttaacttagtcttcctgtttttttcatcctactatttcgcctatagatggctcattgtgaaatctaaattggtttga

SEQ ID NO: 148237 - DNA, 468 bp, Enterobacter cloacae
atgtacaggaaccttatcggtgtttcattattgatgttagcggaaggaagttctgccaacgataacataactattaatatgctcgctaacaattcatcgacgcgaaactgtgttcatcagatggtgaaggcgaataagctgccgacttgggtgctccgtaacgcatcgaattatccaactctcgaaatgaccattcgtgaagagcgttattacgtcatgaaagcctgtaaccctgatgactgtgaacgcgaaaaaatcgtaattgcttactctcctctgcgtaatattctatctggcgtgttcgccgtaactgacgcccctgaacagcagcaactgaagtggcttgggatcagtgataaactcccggacggaaaggctctgctgtttgccgcattgtcagggagccttgagaacctatatgataattttacaggtatgaatattgtgcctcagaaggcggcagattaa

SEQ ID NO: 148238 - DNA, 1413 bp, Enterobacter cloacae
atgtcggcaggcaccatcaccctgacaaacgggtctgctattgttggcggttccggaacctcattcgcaactgaactcgctgcaggtgattttattgtctccactgttggcggcgtgtcgtatacattgcccgtaaaatcggtagagagtaatgcgcaacttacgctggtcagcaattttaccgggccgacacaatccggagcggcctggtcagcggtcccgcgcgtggcgctgaatatggtcactgctgcgctggtggcgcaaagtgctgaagcgctacgtggactgaattacgacaaacagaattggcagcaggtttacagcgcggccggaaacatcacagtgaagctgtcagacggcactaccttcaccggcccgtcatggaaatacctgtctgacaatatggcgactaagagcggcggggcagtgcctgttaaccagggtggtaccggatcgacaaccgcatcaggcgctcgcacaaacctcggtttaggcacattcgttacccaggaagatcagagcatcgtctatggcccgtcgcaggatcatgcgcttgtcgtacgaaaagacgaatggggcgtcgttgtttcggataatggtaatccggtaccactcggaacccgttatggtggaacgggtgcaaccaccggagattactggggggcctgtactaacattggagccataagacaaaagacagcacggtttgcgcctggtgatacaccgacgaacatttactggaaaaacagcaccggcttcattactggacaggttgaaggtggggccgtaggggcatggattgatattacctctgccgatgaagccgcccgaatgcagttaatcggtttttatggcgacaataatggtaaacgtgggttcggttataaggtctataaccccaactctcagtcctggtacaatctcgccgtagtgcgtgatacaagcaacacaaccgtagatagcaacgggtttatcaaaatcgcgtcaccaatcgtgaagatttacggtgacggacggtatgaaactaacgatgaaacagaaggcgttacggtcactcgtctggatgtaggccaatatctcattgatgggtgcgaagcactcaattctgatgctgtctggggcggcattaatggtggttttgatatccccacagaccgcaacaaacagcccctgatctggctggattatgaggttaatgctgccggttcagtgttagtgaaaacctatcaccgcacgcatccagacgcaccatcatttgccagaaatgaaaaggacggagtgagtaatggcgatcctgtcgacattccgcgcgaccagtttgtgtccgttcgtgtcgaaatgccggctgattccttatacaacaaaaaacacagagctgcagagcaggccctcactgccgataaagttgaataa

SEQ ID NO: 148239 - DNA, 714 bp, Enterobacter cloacae
gtggcgggaacggtcgcagccggcgatgattcgcgcttgaatactgtcgatcagaaagcgggtgggaaaattacgagcccaattacagtccagcctgggattaacggtaaccccggatttgccgtcaattctggggataatggtggcggtggattgatgaataatggcatcagcctggtcgtggccagtggctataacccaaatacaggtaattacgtcaacctcatcaaaggcacctggtatacaggagaatggtctttcgggggagcccgtggtggcggggctaattttgataatgtcacactaaacctgaaagggtcgaatcaggaagggatggtcacttgggttttccattccaatggcgctgccacaggcaattgggtaacagcatctgatgaacgtatcaaagaaaatgttacggtaatcgctgatccgctaatgaaaatgcagcaacttcgaggcgtcgaatgggaccgcctcgatactcctgcgcacgggtatgggttcatagcccaggaagttgagaaggttttccctgacgcagtgaaatcatatggaaaaacaaccttacgagatggctcagaaatcgagggtgtaaaatctgttgatacgttcggcgtggcggcagctcttcaccatgaagcgatccttgctctcatggtcaagattgatagccttaaaacacaggtagataattttttactggccaagtaa

SEQ ID NO: 148240 - DNA, 1371 bp, Enterobacter cloacae
atgtcggcaggtaccatcaccctgacaaacgggtccgctattgttggcggttctggaacctcattcgcaacagaactcaccgcaggtgacttcattgtttctactgtgggcggggttccgtatacgctgccagtgaaaacagtcgacagtgacacgcagctcacgcttgtcagtaacttcaccgggccaatgcaatccggcgctgcatggtcagccgtcccccgcgtggcgctgaacatggtaactgccgcgctagtggcgcaaagtgctgaagcgctgcgtggactgaattacgacaaacagaactggcagcaggtttacagcgccgctggaaacatcacagtgaagctgccagacggcactaccttcaacggcccttcatggaaatatctgtctgacaatatggcaacgaagagcggcggggccgtacctgttaaccagggcggtaccggttcgacaaccgaatcaggcgctcgcacaaacctcggtttaggcacattcgttacccaggaagatcagagcatcgtctatggcccctcgcaggatcatgcgcttgtcgtacgaaaagacgaatggggcgtcgttgtttcggataatggtaatccggtaccactcggaacccgttatggtggaacgggggcaaccaccggagattactggggagcctgtactaacattggagccataagacaaaagacagcacggtttgcgcctggtgatacaccgacgaacatttactggaaaaacagtaccggtttcattactggccaggttgaaggtggagccgtaggggcatggattgatattacctctgccgatgaagccgcccgaatgcagctaataggtttttatggcgacaataatggtaaacgtgggttcggttataaggtttataaccccaactctcagtcctggtacaatctcgccgtagtgcgtgatacaagcaatacaaccgtagatagcaacgggtttatcaaaatcgcgtcaccaattgtgaagatttacggtgacggacgatatgaaactaacgatgaatcagaaggcgttacggtcactcgtctagatgtaggccaatatctcattgatgggtgtgaagcgctcaattcagacgctgcctggggcggtatcgatggaggttttgagattcccaccgacaggaacaagcaacctcttatatggctggattataaggttaattctgacggttccgtgctggttaaaacctaccaccgctcctacccgtcggcacctgaatttgcaagaaatgagcgggcggggttagctgatggagatccggttgatataccgtctgaccagtttgtaagcgttcgagtggaaatgcctgctgattctttgcaggccgatagctaa

SEQ ID NO: 148241 - DNA, 303 bp, Enterobacter cloacae
atgacgtggggcattcagacatgggatgccaatggtaacccgaataattacggtattaagccagtatctgtggtcggacgtattcaactttctgaggggcaaaactccggaagctggtcgtttacaattccggcaggaatgaaggtcgggtttgtcgtttctctggataggggtgcggtctcggtggggcgccgtatcgtcgccagcggaaatacgataactcttggcgcggcaaacagcgttgggattggaaactatccagcctctgaatgtgagctcgtagtttttgtggagaaggcataa

SEQ ID NO: 148242 - DNA, 2505 bp, Enterobacter cloacae
gtggacagcagccagttcaacggcagcgcgccgaaagtgacctgtaagataaaaggcaagcttattaaggttccggataattacgatccgacaacccgaacctattctggctcatggtccggcgggttcaaaatggcctggtccaataaccccgcctggatattttacgatctggttcttgatgaaatatacggcatgggcacgcgcgtggatgcgtccatggtggataagtgggcgctgtattcaattgcccagtattgcgacgaaatggtttccgacggggccggtggtaccgaaccgcggtttacctgcaacgttttcattcagagccaggaggacgcctggcaggtacttaacgatctcgccgcggtatttcgtggaataacgttctggggcaacgatcagatttatgtccaggcagacgtcccgcaggacgatgttgactgggtttataacgcctcaaacgttatcgatgggctgtttacttatgcgggcggctcatacaagaatcgctacagctcctgcctcgtgtcctggtctgatccgcagaaccattacagcgataccgttgagggggtctacgattcagagcttgtagagcgttacgacgtcaggcaaacgtccctgaccgcaatcggctgcacctcgcaaagtgaagcgcaccggcgcggtcgctgggtattactctccaatgccaaagacgggaccgtatcgtttggggtggggctggacggctatattcctctgcccgctgaaattatcggtgtcgccgatcctttccgttccggaaaggagaacgggggccgcatagtggcggtcaatggccgccagatcacgctggatcgagaaatagattacgcagcgaaagaccggctggtggttaacctgcccgacggaaaagcccagacgcggacaatcagcgcggtgagcgccgataaaataacggtgacggtggctacggccttcagtcaggcacctgccgctggtgctgtatgggcgatagacagtgataacctcgcgatacagtacttccgggtcacttcaatcgctgccaacgatgactgcacaggcggtttcacaattacggccgttcagcacgatccaaacaaataccgttacatcgatgacggcgttcggatcgagtcgcccccgatcaccgtcacgccgataagcgtcctgtctgctccgaagaatatcttggtgactgagagcgatcatgtgtctcaggggctgactgtagcaagcctggacgtgtcatgggataaggtggagggcgcaatccggtatgttgcccagtggcgtaaggacaacggggactggataaacgttccggttaccagcgcgcagggtttctcggttcagggcatttattcgggcagctatgacgtgcgcgtccgggcgctgaatgcgcaggatacgtcgtcaccatggggatacggtgaaacaacttatctttccggtaaaacgggaaaaccgggtactccgctcaacctcctggcgtccgaagatgtggtctggcatatcgacctgacctggaaatttccggatggctcaggcgatacggcctatacagagattcagcgcgccacaactgccgactacgccaaccctgaactgctggtcctggtgccgtacccggctgcagattatcagcatggccccatgccagccggcgttcgccagtggtaccgggcccgcctggttgaccgcattggtaatcagagtgattggaccgactgggttcgcggtatgtcaaacgataacgccgatgattatcttggtgatatcgcagacgatttccttacctctgccgacggggagcgcctcaccggtgacatcgataccaacattgagggaattcttcagaacgccctggcgaaccatggaacctttgaacatcaatgggcgcaatacggagaggtacgtgccgatatcctggttgtgaaaacgactattgcagaggtggataaggcaatggccgaactatcaacgcaggtacaggcgcggatagaggacgtcactgcttcactggaagacaaacttacagccgtcgtcgatgcctccggtgcttctgcaatctacaccctcaaaacaggcgtgaggataaacgggatgatgtacaacgccgggatgtcgattgccgtgcttgctgaggccgggaagccggtagttacccgtgttggttttaacgctaatcagttcgtgctgatgagtggcagtagtaatacgcaatattcaccgttcgcggtggttaatggccaggtctttatcagttcaggttttattcaggatgggactatcaccaatgccaaaatcggcaacttcatccagtccaacaattacgtcccaggacaggccggatggaaactggacaaagggggttcctgggaaaactacggcagtgacgggcagggcgcaagaaagaccacgaacgttactgacagcatcagggatgcgaacggcgtcctccgcgtacagattggtaaacttacaggggtattttaa

SEQ ID NO: 148243 - DNA, 474 bp, Enterobacter cloacae
atgaagatatcctggttagcaatatataggttaaataatattaattggtttgttaatcttggtgtggcaacgacactcactggtgttatacaagttcagtcctttagcttatttataaaagggctgaatagcgatgaatgggaaagagccaccctggcggctggtaatgaaataacgggttatctcgcaaaaaaacacactaacaaatatcaatattggaattctttggtcaaagaagccaagaatgttgtagagaatgatattatcccaaaaataaccttcccggagtcagtgaaaggctcaatgactgagacgttaaaatgggatcttgtgaattacttgcttgaagatgcgtatagtaattttcttcaagagccattcttttttgacggattaattaatgtttatgaagctgggcatatgccctgtggatggtcaggtacttggccagcgggcaaactagtcacctattga

SEQ ID NO: 148244 - DNA, 540 bp, Enterobacter cloacae
gtgtttgcgttcaagtatccgggctctctggatagtatgtcctactccttctgcgaaaattatggtgatctggtatttgtcacaacccaggcagccaaacccggcacagaaaaatatttcgcaatgcggggagatagatttattacccctggaaatatcacctgcgcatcactgacacagacttcagatgcggataaaaaagacgatgtcaaagccatcgagaacgcactcgacaaagtaatgagcttaagtggagtgacattcaactggaaggatagcggtcttccatctgctggggttattgcccaggaactcatcaaagttctgccggaggctgtcgggtcagtatttgaagatcatgatcagtatgagtccgttgaagaagttaatgaggctggtgaggtgacattcacccagcaactgacaagaaaaagagatgacagtaagcgcagctatacggtggaatatgcaggtgttatcgccctttgcctccaggccattaaagaacttaacgacaaaatcgaaggcaggtcgagttaa

SEQ ID NO: 148245 - DNA, 546 bp, Enterobacter cloacae
atgaataacggcatcagcctggtcgttgccagtggctataacccaaatacaggtaattacgtcaacctcatcaaaggcacctggtatacaggagaatggtctttcggaggagctcgtggtggcggggctaattttgataatgtcacactgaacctgaaagggtcgaatcaggaggggatggtcacttgggttttccattccaatggcgctgccacaggcaattgggtaacagcatctgacgagcgtatcaaagaaaatgtaacggtaatcgctgatccacttatgaaaatgcagcagcttcgaggcgttgaatgggaccgcctcgacactcctgcgcatgggtatggcttcatagctcaagaagttgagaaggcttttcctgacgctgtaaaatcttatgggaaaacaaccttacgaaatggaacagagattgaggatgtaaaatctgttgatacgtttggtgttgccgcggctcttcaccatgaggcgatccttgctttaatggtgaaagttgaaaaccttgagcttcaactaggaatatcttaa

SEQ ID NO: 148246 - DNA, 582 bp, Enterobacter cloacae
atgcagttaatcggtttttatggcgacaataatggtaaacgtgggttcggttataaggtctataaccccaactctcagtcctggtacaatctcgccgtagtgcgtgatacaagcaacacaaccgtagatagcaacgggtttatcaaaatcgcgtcaccaatcgtgaagatttacggtgacggacggtatgaaactaacgatgaaacagaaggcgttacggtcactcgtctggatgtaggccaatatctcattgatgggtgcgaagcactcaattctgatgctgtctggggcggcattaatggtggttttgatatccccacagaccgcaacaaacagcccctgatctggctggattatgaggttaatgctgccggttcagtgttagtgaaaacctatcaccgcacgcatccagacgcaccatcatttgccagaaatgaaaaggacggagtgagtaatggcgatcctgtcgacattccgcgcgaccagtttgtgtccgttcgtgtcgaaatgccggctgattccttatacaacaaaaaacacagagctgcagagcaggccctcactgccgataaagttgaataa

SEQ ID NO: 148247 - DNA, 582 bp, Enterobacter cloacae; identical to SEQ ID NO: 148246

SEQ ID NO: 148248 - DNA, 582 bp, Enterobacter cloacae; identical to SEQ ID NO: 148246

SEQ ID NO: 148249 - DNA, 135 bp, Enterobacter cloacae
atgttatttctactttcatgtattgtcttattgatactgatagttgctgttgtttacgttatgctatttaataaaaatagcatggatattacgcaattcatagatttactatataaagataatgaagagaaataa

SEQ ID NO: 148250 - DNA, 885 bp, Enterobacter cloacae
atgctgacttctcaacagaccctggaattgcgtgacaacagtcagcagcagcatgccatacaacagcgaatagtttccctgaaacctcaggttaaaagtgcagaaaagcgtctgtcacttgccgtgcatcaggctgcgctggccgtgtctgttatggagcgctataagaaacttgctgatacgcattacgtatcagatatcgaataccagcagaagcagattgacgtttcaacgtcacagcaaaacgttgaggatcagcgtcaggggcttctgcaactgcacaccgcgatggaggctgctaaagacgaccttgaccatctcatcgttcagggtgaaagccggaaggctgaaatggacaggcagttgcaggtgatcaggcaacagcaggacgaactggcaggtaaggaaaatttcacgctgacttcaccggtatccggaaccgttgctgccgtgctggtcagacagggacagtctgtcagggcatctgaacctgtcatgaccctcattcccgacaatgcccgtttgcagatagaactctatgctaccagtcagaatgctggctttattcaggcggggcagcgtgttgccctgcggttctctgccttcccctatcagaagtttggtgtgcagtacgggactatccgtgaaataagccatacaacgctgacatcttctgatttactctccgtatctcctgtgacctggaaggagaatgaaggtcattaccgcgtcatcgttgaacctgaaaatacttttattctggcttatgggaaacaggaagccctgcgccccggcatggttcttgagggggatgtcagcctggatacccgcaatttgtgggagtggctgactgagccgctctggagcctgaaaggaaagctgtga

SEQ ID NO: 148251 - DNA, 1293 bp, Enterobacter cloacae
atgagtaacgtttttctgcctaatacaatgatggggactctgcgctataaaagggtgtatgagtttttcgaagaaccgcgtttcttttcagcagaaaatgaagttaattcattatttgttgtttattggattggtgaagacgaggacgccgatagctggtatgttatccctgtatctccaacgcgattggagttgattgaaagaaaaagaattgatttgcgttcagttttaattgatcaggaacaatcattttactatgaagtacgcgccccttatgatcgggaagttgcgcctacatggaatgttaaaagtgtagatgccatctatgataatgctttgccagctcaggggctgtttattagctctgtggttcctgtcttagaaaatggtcgaatcggtgaagcaattaaatattcaacacatgagattcatttagaaaaaagctcaaagaaaagcgctggaaatttggtgctaagtcacgtttctaatgtgtgtgatagctttagtgcgttatatgatagtttgctggagtttagcggtctcaaagataagctacgtccagttgatgctcgtcctggttcgttcattctttcattccaagctgaaaagctgaacgcctatgaagagattttacgtgatttgagcgctcttattgagcgtcgtgctgatatagttgatttcatacaaaacaaagggatagacatccaagccttttctgatttgctacagtcaattgtatcgactggaacaaatatggaattaaaaagcaatcagactggtgaggttgtatttctgctgactaaagcaggagccgagttctatcttagggtaataagtaggatgtctgctcttgcagttagtggacatcaaattccgcaggcagatactttagaaaaggtttttaaagttgttgaagtcaaatggagtggtgagccttgtaccgtagagaatacaggtttgcaagaaagacacgtctattattaccttcatgctgcaaaagttttaggattgctgaatgctaatggccatgtaactgcgatggggcaaaaattaattcaatctggacaagagaaccaatataaaattgctgcgagatgctttgaggtgagtcatattggttgggcttggattaactggtccgaagttgagaatttatcccaaatagatcctgatacagctgaggaatttttacttgaacagtgcaactcattaagtaaagacactattgccagaaggtcgcgtactcttagacattggggtaaagagcttaaggaaaaatataccccgctctaa

SEQ ID NO: 148252 - DNA, 357 bp, Enterobacter cloacae
atgaaaaaggttttagctttagctcttggagtaatgatgttggccgggtgtagctctcgcgttgcggatctgactgtagcgagcacaaaaaattacaatcttaactcaaacaatttcgttaaaggtgcgcgcgttaaagcagaagactctgctccagtcgtgattttcccgcttgggattccgaatgtgaaaacggccattgatcgtgctattgaaaagaacagatgctctgttgctctttctgacgttgttgtgactcaattcaaccactctttcctgttcggtaaattcggatttattgttgagggaaccgaagttatcgaccgtggacagccgggttgcgagaacgcgaactaa

SEQ ID NO: 148253 - DNA, 267 bp, Enterobacter cloacae; identical to SEQ ID NO: 121044

SEQ ID NO: 148254 - DNA, 195 bp, Enterobacter cloacae; identical to SEQ ID NO: 121045

SEQ ID NO: 148255 - DNA, 228 bp, Enterobacter cloacae
atgattaaagtccttgttttctttaatgctgaatcctgtaaagtcatgaccgttctggaaggtatatcctctatcaggcaggaatatccaaacagtgaagaaacacatcttcggattatgtctgcaggttttccttccttaactggcgatcatggtattgtttacgtggctactgacagggagttaacgtcacaggagatacttgatgcggccaggaaatatttatag

SEQ ID NO: 148256 - DNA, 129 bp, Enterobacter cloacae
atgaagaagccattttctgacgaacagatcatcattatcatccgcgatgactcccaacgaggagttatggtacagagagtctatgtacagataagacttttccgcaaacttggttttcatcgaagataa

SEQ ID NO: 148257 - DNA, 186 bp, Enterobacter cloacae
atgacaccacgcgaaatagctttattgaccaccgccaaactggagcacgaaggccaccagcttaccccggcagatcaacgggagatagaacgctcagttaatgccgatatagcccggcgtgacaaattccgcgaaatgatgcgatcacccgcctaccagtggaagaagcccgcgccgcgcaggtag

SEQ ID NO: 148258 - DNA, 831 bp, Enterobacter cloacae
atggcattaccaaagagggaatattatacccttcaacaagccgctaaaaaatcaggttgtgaagttgaagaccttctgcactatgcagcaattggcgtattacaactctgcgtacattatgaggagagcaaaaaatcagatagcgcttgttatttttatgcctctctatctgatgatttattagatgagttaaatgacaatccagaaggttttactatgcattattcctctaaatataatcttatatctatggactctaatgcttatttcttcactgccgaggatgatcagccatgctgggccgataatgttaagggatggtttgctatcccacataccgaactaacattacctgcgttcgagaactccaaaaaagctgatgtttttcaacttatacatccgcgaaataacttgaataaaaataccgaggggtggggattttcaacggaaggatttgatgtgagtggtccttgtttttatgaggcgaagacattctcatcagacgattttgttataatggcggatgagttagatattctaatcaatggtgggatgaagattgatctctttggcctagctgatgaatctgcccggattaaaaatgtcgtaacggaaagtgttggaaataaaacattaacgtcgatggctaaactgattaaatcattactttatctttgttataaagatgaagatgttataaacaacccccgaaagcactttgataacagtcaaagtgaaatcaataaggattttgatacgctcgggcttaaacttccatcaggaaaaaccatcgacaaatggctacgaggcgtcgatctcgataagaaatga

SEQ ID NO: 148259 - DNA, 1371 bp, Enterobacter cloacae
atgaagcgcctgataccgccagacgactgtccggaggaaattgcccgccgtctcgacgtcatacagcagcaccgggcgctcaacgcgatcctcggggttaaccctgacgccatgtctcaggcggaacagcatcagcagcagcgtcggcgtggagagccgatcggccccctgcacggcgtgccgctgatcgtcaaagataatattgcctgcgcgccgatgccgatcacccttggctgccgtgcgctggcctcacttaacgcgacagcggatgctcgggtcgtgcagcgattgcgcagagcgggggcgattattcttgccagggccaatatgtccgagttcgcgttcgatgtgcgctcgcgtagctcgctggggggtgatgtggcgaatccactttgcccgacactcaccgccggaggttccagcggaggatgcgccgcggcggtggcggctggaatggcggatggcgcattgggtaccgataccggcggctctatccgcattccctgtagctataccgggctggtggggctacggcctgcctttcgccgttcacagctggacggcgtggcgccgctctcacccagcaaagataccgttgggccaatggtacatagcgttgaggatgccgccttgctgcatgcggtgatccatggcctgccgccggttgcgcttcctgtgcgttcgctgaaaggcgttcgctttggcgtggtgaccgcgttacagggagaggatgaggtacagctggaggtctggcagtcggcgctgcacacgttgcgccgtgccggagcgacgctggtggaggtttcactccccttccttgaagaggtgaggcaggccacctgcctcagtctgtatgaatttcgcgtggcgattgacgactggcttagcaaacagcctggcgctccctccggactgacaagcattgtggactccggcgctttcctgccagagtttgcgccgtttctacgtcagatgctggcgagtaacacgctgaaaaccccgctctggctggcggggcgtcgctttcagcgcctgttgcggcagaacctttgccaggtggcggaggtgcagcgcatcgacggatttgtgtatcccaccgtacaacgattaccagaaagtatggcgaagatgccgccaggctgcgcgccggaactggccgccatcagcggcctgcctgccattacgttgccctgtggcgtaagccgtatcgggctgccggtagggatggagatgttatcggcgcaggaggatgagacgatgctgatgacgctggcgctggcatgtgagggggcgctgggcgggataaatgaggtgctgaggtttaaggcaggatatcgccagagcggtaccgtttgtcagaacctctcttaa

SEQ ID NO: 148260 - DNA, 783 bp, Enterobacter cloacae
gtggaaactctagaaacaaaattgtttggcgaaatctctgtgccgtcaagtttaggtgagctgatcgagataactgaaaatcatgcgaagcatagagccaatgtctatatgtggcgtgggcagggagatattgaatggccgattcatagtgctgcttacagacgattatacctcactcatcgtcatgtaaccgaaaaaaggatgagactctatgaactcgaaattttgagaaaagcacgacataaaggatatggctacgaggaaggtcgacgattagcagattttgaggttttggcaaaacttcaacatcatggtgctgccaccagattgatcgacttctcgaggaatattctcgttgcattgtggtttgcctgccattcagaacccaaaaagacggggttacttttcggtatccaatccgattttattcgcggtcaggaaggtgaggcagaggagcgggaatatgaccaaatattcatggagggcataagtgaggggggagctacaacttgggagccgccagctgtcacgaaaagaattgcggctcaaagtgcccagttcatgtatagcatcgtcagtgaacaccctatgggtagcttagatttcatccaaaaacctgaagcctaccttcctataggtataactccaaaaatgaagaaaaaatttttagaacttcttgaagggactttcgatgtaaggcagctaaccttatttcctgatcttgatggcttctgtcaggctaatacagaacatcataggcgttgggataatgaaaggtggtga

SEQ ID NO: 148261 - DNA, 513 bp, Enterobacter cloacae
gtgttttatgaagatgaggtggatatccacctcaaccccaaactgggtgcggactggatgcttcgcggaaagcagaagaaagtggtgacgccgggccaaaatcgcaagcattacatcgccggtgccctgcatgccgggaccggtaacgtgacctatgtggcgagcgatagcaaagacacggacttgttcttgtcactgctcaagacgctgaaacgaacctatcggcgcgccaagagcatcacgctgattttggacaactacatcatccacaagagcaagaaggcgcagcgatggctggcaagcaatccgaagttcatcgtgctgttccagccggtgtattcaccgtgggtaaaccggattgagcgcctgtggcatgcgctccatgaaaccatcacccggaaccaccaatgccgaacattcggtgagctgttacatcgtgtgcgctgcttcctggataatgccgcgccgttccctggcaatggacatgggcttatgcaactggagcggaattag

SEQ ID NO: 148262 - DNA, 780 bp, Enterobacter cloacae
gtgctggaagggcttctggagcagcagacggggctgaatccggtggagattatgacggacactggagggtccagcgacattatctttggcctgttctggctgctgggctaccagttttcgccccgcctggcagatgccggtgaggcggtattttggcgtgcagataaaaatgcgaactacggggtactggatgagctggcgcggggatgcgttgaactgtcaaagatagaaacccaatgggatgaaatgatgagggtttccggttctctgaagctgggtacagtccacgcctcagaacttgtgggctcgcttttaaaaagttcccgtccgtcagggctggcgcaggcgattatggaggtgggacgggtcaacaagacgctgtacctcctcaactacattgatgatgaagaatatcgtcgcaggatactgactcagcttaaccggggagaaggccgtcacgccgtggcaagggcgatctgttacagccaacgtggtgagattagaaaacgttaccgtgaggggcaggaggatcaactgggtgcgctggggcttgtcactaacgcagttgtattgtggaacacgctttatatgcaggaagcgctatcacatttgcgcagcgctggtgagatcccggaagacgagcatatctcacgcctgtcgccactgatgtacggtcatatcaacatgctgggacattatacgttcacgctgccggaaaatattctgaagggagagttgaggccattaaatttcaattcaaacaatgaattattgccttaa

SEQ ID NO: 148263 - DNA, 300 bp, Enterobacter cloacae
atgcagggaactatctctttcaatgacgttattcaaggcttggcagacaatgcgttcgctaccgtcaaagcggccaaaactgccctcaacgcttctcaggacctctatcacttccagatggcagtccatgagcatggggaaaaagctgtcgtcaatgaaaccgctaacgtattgcagcagcgttatcgttgcacttatacagaggctgttgttgatgcaggcaatcgagtccgtgctgcattggaactggtatctggacaggataccttccagaccgtgcgcgataatctcaacaagtag

SEQ ID NO: 148264 - DNA, 297 bp, Enterobacter cloacae
atgaggagactgtgggctatcgcgctcgtaggcgcaattgtgatactcgtcgcagtgatgatcctcagcgacaaagcaccagacaaaccgaaagagggtgagttgaggagcatcaacacccctagtcatggagtgggggttctcttcggctcaccaaagtatcaagccaagggtgagctgctagagggggggttcctagataaggaagaagccggtgagccagcacctctccctgaggcgagtaagaatgcccagactctcggggtccccagccaagggagtgctatcgaggaatag

SEQ ID NO: 148265 - DNA, 1641 bp, Enterobacter cloacae
atgagaaatgtggcaaggaaaggtgatccgactagcacgggtgggatgatccaagagggagacagcagttggctcagcgaaggctctccaacaacatatatcggaatgatagcgacttgccctgcttgcaaagtaggacagggccctatcgttgccgttggccctcgctccatcatcggtccaggtgggcctgtggcgctgcaaggagactatgttgcctgcggttgcccatcaatgagcaatgtaattcttccagcacaaggaacaaccgttggcgataatatggggccccgagccaaaacagccagcacaccagtagaaccaccggcttccacactagcagactcacagccagcttctgcactcgctgactccgtaacaactcctctcgttccgaaaccccttccgctggtggatctcttagagacccggatcggcgtctttttcgatggcacccagaacaacatgcacaacagcaagttcagggagcaatgcgagagagccagtgatgccgtgtgttcgtcaatagagaagttgattggcgctggaacgtcatacgataacggccttaccaatgtggcacgtctacacaatgcctacacggggaaggccatctacatcgaggggatcggaacccaatccggtttggcggacgacacaaagggtctagctcttggtatcggtggaactggtgtgatcatgaaagcgcaaatgggcctggatcagctcactgcccatgttcaatccctcccccccggcagtgttgtcgttgatgtattcgggtttagtcgcggcgcagccgctgcgcggcacttcatcaacaagctgctcgcactaaacctgggaaggcctcttcgagtggggtttgtcggcctgttcgacactgtagcggctatcggctctgcggcagatggtctggatacctccgatgacaacaatttgggggtatcactctacctggcccccggatgtgccgatcaggtggttcaactcaccgcgcaccacgaataccgggtcaacttcgccctcaactcaatcagctcgatccatcgtgagatccctctatacggagcccatagcgatataggtggcgggtatcttgccggtgaagagcggatccccatagctagaccctatgaggtcactatgatggtgggtgatcaagaagccttgaaggcattcaagtccgaagcctccaagcgctactatgaagctcagaaggtctatcaggcctatctggcaacaccgtcacaactcaaagacgagctccaccaatactcgatccctacaccgtcgggcggcagaactggctacattgcaaacacggttatgacccggtacgtcaaaccagagctgcaattgcttgcaggccacctcatgcgacagcttgccgcagagtcaggcgttccgatcctggagcttacggaaaccattccagacgagcttgcggcaatatttactgcctaccaggcagcggctacaacgggtgggctgccgacgctgactccagagcaggaacacctgatcatgactcagtatgcccactgctccgacagttgggttacatcggcagggatcttcgttaacgcaccagcgccatccagaatacgtcgggtctaccagcaacagcaggggaagtag

SEQ ID NO: 148266 - DNA, 939 bp, Enterobacter cloacae
atggagtttcgctatccaacggcagcggcagaagttaatgcagccaagctgaaatatctgacaaagaatttgagcgaccctatctcgggaaaaaatgaatttgagcgcctgacgaaagaactgggtaactcaatagacggatatgcgacttggcatccggtgctaacgatccctagagatagactaaggccaaatgaagatcgagctggtgatttgttccgtctatacaaaggcctcgatcatgtagtcaagttcgtcaaaggctttgtttcatgcccttatagtgaagaggctgcaaattcgctagtagagcaagtgcgcaatgttccaggtttagatgcgtatcgtcttgataaaccactttaccatgacaacgcttatccggtcgttgtggtggcgacccaagtcacccttgaggcggatggaacaatccgcagtcgtgatgccatcgcatggtgcgttcaagagctagttagaaatgctcgccaagcagaagtggctgaaacatggtggaacctcaaaagtgaaattcttggtgaaccacatggttcgcgttcatcactgctggttaatcagttcactggtgggcacatgcgaaaaatcttggacgctttaaacagcagtggtatgtatggcccggttaaagaatggtctctggaaatgctctcgaagaaaaagagagttctgatagctgagaccctgctccgcacagcactcaaaaactatgatgtcaatcaccaagcatttgaatttgaactaaatggagaggtatgccaagccgaagtgcgagacacatggagtgatggcgcagaattgtttattcaggtcacaattggtaatagtgacctagtagtaagtggcttttactaccgggaaaatgactgtttggaatcatcggatcccaaaggaaaaagagctattgcggaaaaattcttatag

SEQ ID NO: 148267 - DNA, 495 bp, Enterobacter cloacae
atgagcgaagaaagcgattttggtgaaagcatcaaattctattcggatgggcaacgggatccagtcaagcggacaggcctgaacgtccagtacaccatgacgaaggcgaactacccgacagtcagcatcgaggttgctccgatctcgatgccacgttcttccccaaactgggagaaaaaaataacagtgcagcttaccaagggagagttgaacgcagtctgtggtgtgttgtttggtctccgaaaggaggctactgggtcttaccacggggacgccaataacaagagctttgcggtttacaacaatggtaaatcaggggtggctcttatagtgagtcagcgaggagagcagcttcaccatttcctgtctgccgatgatcggatggaggccgccgtattttttatccggcgtttggcggaagcttggaaagtgagctcatctgatgcgattgcgttgttacgacaggcggcctggatggataagcacctcatttaa

SEQ ID NO: 148268 - DNA, 1314 bp, Enterobacter cloacae
atgaaaatgcagacgctaacagtggcgatgaatggtgaggtcgtaggcacactgtaccgagataacaaaggggccatgtcatttcagtatgccccggagtggatctcggaaccaggttcacgcgctatttccatgtcactgcctttgggtcatggcaggatcacaggaagtgaagttttcaatttctttagcaacctcctacctgactcagaggcaattattgccaggatgcaggcccggttcagagttgagacaacacatccatttgatttgctggcgagtgttggccgggactgtgttggagctatccagctctattcccctgatgcggacatcccaactgtaatggagacgcttgcagagcctctggatgaagctcagattgagcaactgcttgaaggctaccaggaagctccccttgggatggctgaggatgctgattttcggatctcgattgccggagcccaagagaaaactgcactgctttggtatcaggatcgctggcaacgccccctggggagcaccccaacaagccatatttttaagctacccattggtaagattgttcaaaataacatcgatctcagtgagagttgcgagaatgaatggctctgtttgcgcattgcaaaggccttcggttttgacgtcgccaatgcggacctagcaacgttcggcaagaagaaggtgcttgtagttcagcgttttgaccggcgctggtctaaatccggcgaatggcttctgcgattgccccaagaagacttctgccaagctcttgggatcgctcctgcgctcaaatacgaatcacatggagggccaggtattgctgacgcaatgaagttgttgttggggtccagatttgcggccaaggatagagagcaatttttcaagtcgcagatcctattctggatgttggccgcgattgatgggcacgggaagaacttctccattttcattgagcctgcatcgtcatttaggatgacacccctctacgatgtcatgtctgcttttcctatcttcaaaagcgggggaattgctgctcaaaaggcaaagatggggatggcgctccaaggcaaaaaccgccaataccgttttgcgatgatccagcctcgtcattttatcagtaccgccgcccatgtcgggttcccaccagataccgcagctcaactcatgctcgacatggctaccaagacagaggaggtggttgccacagtcgcggctgagctgccagccggtttcccagagcacatcagtagtgccatcttcgaggggctgtccagccaggcggctaagatcttgaagggagtagccaaatga

SEQ ID NO: 148269 - DNA, 252 bp, Enterobacter cloacae
atgaaagtgacatctccatccttacttgcggctgcggtgcgcgaccaacgcaagctcagcaaactaacgcagtcagaggcggcgaaacaggtcggaatcaagcagacgaccgtctctgattttgaactacggccagaatctaccaagctggagacgctattcaagctccttgctgcactggatctggagcttcatgtcgtgaagcggggttcaacattggacgataataaagtctgggatagggagtggtaa

SEQ ID NO: 148270 - DNA, 1005 bp, Enterobacter cloacae
ttgcacgatacgaacaatgaccgagagggctcgctttcacatgtgaaagcgaatgttccatcagaacaaaccgttcgcagtgaactactgccgtcatcgagctcgctccgaaacatccaggacaaccctgccgtcgcctatctgatgagtctcgggtcaaagcgaagcaggcagacaatggggtcattcctcaacattgtcgccaagatgatcgggtttcagaaccttcgtgactgtgcctggagctcaatgaggcggcatcatgtccaagctgtgatccaaatactcagcgactctgaccgcgctccggccacgatcaatacctacttggctgcgctgaaaggagttgccctggaagcgtggacaatgaagcagattgataccgacagttaccagcatatcaagcaggtccgttcggtgagaggctctcgcttacccaacgggcgagccctcgaaaagcacgaggtcagagccctttatttcacatgtgaaaacgatcggagctccaaaggattgcgtgacgcagccatccttgctgttttagtcgggtgcgggcttcggcgctcggaggttgtcgccctcgatatggaatgcgtcatcaccagggagcaggcgcttcgggtgctcggtaagggtaacaaagaacgcatcgcttatgtgcctgacggggcttggcagcggcttatgcgttgggtgaatgaggttcgtggtgagcagcccggagctctgtttcagcggatcaggcggtttgatgatgtcaccgccgacagaatgacggaccaggctatctatcacattcttgaaaccaggagaattgaggctgggttggaaaaattcgctccacatgatcttcgccgaacctttgcatcggccatgctggacaatggtgaggacatcatcacggtcaaggatgcgatgggccatgccagtgtcacgaccacgcagaagtatgatcgccggggagatgagcgcttgaaacaggccagtcggcgtctcgaattctga

SEQ ID NO: 148271 - DNA, 453 bp, Enterobacter cloacae
atgaaaaataagaaattgatagctttgataatatccgctgccacatcatgctcgtcagtttacgccgctacattaccggccaatgaggtgggctcatacatacttgcaatgaacactatgtcaccgatcactgcaaagtacaccatccagtacaagcaagctattgagcagaaatgcaatacggctcttggtgttgaacagctcaactcgacggcatttaccaatgttgttcaggcaatggtgagtagtgagactgtcgatagaatggggctggatgctgctggtggctctctccaagatactttgtctatgatcgggaaaaacgtcacttgtagcgacctgaacgcgccatttaaagctcttctggatgataaagacttcactagcaagcatcagcacttatcgaaggttttgcatacatgggatgatgtagtttcgcaaagcaaaccttga

SEQ ID NO: 148272 - DNA, 600 bp, Enterobacter cloacae
atgagttttgctagcttaatgagagacaaggttaacgtgttgaaagctgatggcaccaaacacgaggggatcaagtgttcagtgtccggtagtgacaccatcacgattatgagccctacgtttactgttgatcatgatgacctgattgtgagaacaaccagccttggccaagatgaaacctataaagttattgatcctaagtttagtgaagggagcggcagtggcgctattcctcgacactacaagttgaaggtcaaaaagttaggcatcccagaagccaaagcagctgtccagagcatcacctataacttcaatggccacaatgctcgggtcaataacagcagcgtagacaactctgtgaacactgtgcagatagacaaccgtgcgcagacctatatcaatgagctacgcgaggtattgaagaatgctcagttgagtgattctgaacgtgaagaggctcttgaagtagctgatgcgatagaggctcaatttgagtcaggaaagcccaagaaaagtgttattggtgcattgctagctggtcttccgtccattgaatctgttttgtctatcgctgcaagtatcgctgaactagtgcaataa

SEQ ID NO: 148273 - DNA, 726 bp, Enterobacter cloacae
atgatgatattgaccaccgtctctaaaaaaacatcaaacaactcagctcttgttttttggcgcgtcggcacaaagcgaaaaggcatcctcgatgttcatattgattttgatcacgaggaggctgacctattggctgagctcgtagccattcgctatctggccttggataagcaggttttttgccgcgaacctggtgccggttcgggttacaagttggtggtgtctaaaggcgcaatcaagaagctggcgatgggcaaatccagcaagaagtttgctttcaagtttgcttcttgtctcaccggtcgtctgaaaggcgcaaccattgaggtctcgcagagtatggagttcatggatgagccaggggagggtaatgtcgagctcctcgatgtggacaagcaggcctatacccagacccatgaggaaatctctacaccggccattggccccgtcctggttactcaacatgccatcgatcagtatcaggcccggataacctctggagaccccaaaaaaccgtgggcctcactggttggccgcctccagcatccggagctacaggtccagccttttgacgagaaggttgctcgccataaagccagaaagtatggccgcgtcgataacgtagaagtctggggccaccgcgattccaagttcaagtacctaatggtgatcaacgatgacaacaagaagcgcgttctcgtgacagtgtttgagcgaaatgaatga

SEQ ID NO: 148274 - DNA, 240 bp, Enterobacter cloacae
atgaaaaagtttttgcgtattaagacgtggtttgtgcgcctgttctctcctgacaagaagacgctgggagctatcggtgaagacctgcgcaaggtcgccgtaacagctatcggtgttggtattgtaggattggctgtatctggggacaccataaccgtcgaagaggccggtttggtgttggtcattggggttatcctgtggatctatggtataatcttaaccaaggtcagcaattcctaa

SEQ ID NO: 148275 - DNA, 279 bp, Enterobacter cloacae
atgcccgtcattgatgtcacgaaggttgatacaacgcctggtaacgacgcagtatgccccttctcaccccctgaggggtgggggggggactctgcggcctatgttgagcttatgcggtctcggtatcgccatctgatgcacggccagagaatgatggtgacagcctccttcgcaagaagggagcctattcaagttaccggtccgttcgctgatgaggcgatgaagatcattagctcaatgaagatgaacaaggcaaagccaacagctttgtctgtctaa

SEQ ID NO: 148276 - DNA, 1728 bp, Enterobacter cloacae
atgtcttactacaaagctgacaccgttcgtgaagctgcaaacggaaactggctattcatcctggcggctctagcgccccatcttgaaccagctctccgtaaacccggtcgtcatgtttcttgccctatccacggcgggaaagatggcttccgcctgttcaaggatgcccacctgactggtggcggcgtatgcaatacatgcggtgctaatcatgacggttttgagttgctgatgtggctcaataattgggactttaagcagtgtctgagcgaggttggtgattatctgggagttgagaaagagcaaccccagtgtcaacaagccgctgcaccgacacgagctcctgcacaggccaaagcgcctgttcagcaagggcccatgaaggtaaataacaaggtcctcgattccaagaatcgcaaaaaatccattgccggtactctgattgcccacggtaaagctccctatgagcataacgaagacaatgagctcagctactttgccttcatccgtgacaagagcggtttggaacgcaccatttggggcgtggatcttgaaagagccatcggtgaaagcgaagccaagtatggtgatgaggtcgtcatgacaaacctcgggcgcgagcctgtaactgtcgtcgttgaagttaaggacgatcaggggaatgttgtgagagaacaacctatacaaacgcatcgcaacacctggctggtggaacgtcgtggcgctacggtgacgcagttccgcgcacgctcaaacggtggtgttgagtcggtgagtcaccatgttgagttgcccccagtggtcaaccgcacggtagaagctccggcaccgcaagcacaagctgcggccatacaaccggaagggcaatgcagcgaaaacaagccgaaagttgttccaatgtttcgtgaacaacccaagccttggttgcttgaactccaagaggaaatggagaagagaatggagcgtgaacgcgcttacagcgctcgcctccgtgagaaaattgagaaggtatggaacgagtgtttgccgttctctagtcgtgtgactgaaccaatgcgtctgtatttccaaaaccgcgagctgctgttcaacgttgatgaagtagaaaaaacagactgtttgcggttcaatccggctatgccctactacgacgaagatggcaatgaggttgggaaattcccggctatcgtctgcgctatccgagatgtggaaggcaacctggtaacgctccaccgcacctatctcacccaaaacggtaaaaaagccaaggttggcaacgccaagaaaatgatgcccattcctgacggtttggatgtcaatggcgcggccatccgcctcggtgaaccgactgagggtatcctgggtgttgcagaagggctggaaacagctctgtcagcttatcgagtcactcaaatcccggtttggtccacggtcaatgccaccctgatggagtccttcgaggttccggaaggtgttcacaccgtactgatctgggctgacaaagataagtctgtgactggggagaagtcagcgaacgtgctgaaagccaagctggagaagcgcggcattcgtgtgtacgtcctgctgcctaaactcccgatcccgcccagagcgaaagggattgactggaacgatgtcctgatgagtcagggaagcctcggtttcccgaatgctcgctacctgcgcgatttcattgcgagaaggagagctgagtatgcccgtcattga

SEQ ID NO: 148277 - DNA, 387 bp, Enterobacter cloacae
atgaaccaagtagctaaattggacctcgcccaaatccgtcaacaagccatcaatgatggactgctggtggaccaatcctccatcggcacacaagctggtttcctgaccaatgtggcagtgaccccagccattgttgatggagtatttggtgcggatggtaagcactcggcagaagacttccttctcatgtttttgcagctttgtgttgcccaaacaaaggtcgcttttaccgacaacaagaactggggaaagattcgcctctattaccccatgcccactgtaaatggctttttcaaacccactgaggtggtgattaagtcagaccctgtaaccgcagatgtcacaatcatgatggcctcggaagagggcacccatttgtgcttgtga

SEQ ID NO: 148278 - DNA, 861 bp, Enterobacter cloacae
atgattaaacagcattttcaaaacgaactgatcaaatgtggataccctgatgacctgaccattgagtaccgtcttgggtactgtcagggtgatggagtggcattctacggatgtttgggcgttgataatgctcaggcgttgatgaagcgcttgttaagcaccacaaaggggcgagtagatgctgtcagcagagtgaaaaacctgatagcacaaaaagacattgacaatatgtttcttgtccttcgtgagtatgctgaactccagttctgcgaactggacatcaacagaaacagctacggccatcattacagtcactggaacaccatgcgtattgatagcaacgtagacttcactgggatctttcctgatgatgacaccatgcttggaacaggcattgaagggattgaccaagcgatgttagagcgttggcaaggcatctgggagcgtttcgtgttggaactgtcgggtgatgttaaacagctttccaagaagctcgaatccgacggctatgcgttgatagaagcctcgccacacgaagagaaagtggtttgggaacggactactcaaaattacttggtgcgagtgacagaactccctgaacgggatttcgacatggaccactgggatgacggcataagagaccaaacgattcgttctatcctagagggaaaagagcgagtgcttggcctacgtgttgaggtgctctctcgtgaaaacgagattgttctgggtgaagagagtctgcacggtttgaccgttgccagtgatgacaagagctacgctggctacagacgagaactcctccggggcgctatccagcaaaccagagattttttctctcgccacctcaaagcggcataa

SEQ ID NO: 148279 - DNA, 273 bp, Enterobacter cloacae
atgactaatccaatcgctggcgacatcaagattaagaactttggccgtgaccggaaatttcgttcggttgatgagcttcaaggcactttgtctgaacagtacaaaggtcagcatgtcagtgtcgtttaccctacaaagccttatggattactccgtaccgtctttgtcagtgttgatgatgccggtggcataaatgagacttacggaaagcagtctccagtcgattttaatgccatcaaagatgagctgtttgtaccaagtgtactgaattaa

SEQ ID NO: 148280 - DNA, 606 bp, Enterobacter cloacae
atgtctaattcaaatttcggctttctagctctggccttgcgccaacgcctgatcaagcgctggtcgctgatgcactctgttcaaccagagtctgtgttggagcacagtgctgttgttaccctgctttcctacctggctggcaatatcgccattcagcaagggaagtcggtggatctggcaatcatgctggctcatgcgtcgttgcatgatgcagccgaggttctttgttcggatgttgtcacgccggtcaagaaagcaaatgctgttttgcagcgtgagtttgaacgactggaaaaggccgcagaggacaaactcatccagactcttcccgaagaactccaggatgcagtttccagagcctttgctcccggtggctatgaacaatcactggttaaggcctgtgatacctactccgcttacatcaagtgcaaacttgaggtggccgcaggtaatggcattgagttccaggatgctctaagcaaaatggagcgtattgttgctcaggtgaaattggacttcccggaaatcgacgctctggacaaatggtttggtgacggactaggccattcagtagataaattgctggcagggggtaacgatgactaa

SEQ ID NO: 148281 - DNA, 204 bp, Enterobacter cloacae
atgagcctagacaagttaagtcggctggtggaccaacagcgaaagacccaggatgaaatcaacaacgaagtcattctggccgtcaaagaggtgttgtctacaaattccatcagcttggcccgtgagcttgttgggtgtgttccgcaagatcatccattccatccgtttttgctcgccatagctaagcagcttgacccgagataa

SEQ ID NO: 148282 - DNA, 2454 bp, Enterobacter cloacae
atgcaacaagaattaaattttgacctaccagaacaaccaaccccagtgctcttgcgaggcgataagtgggactctgtttggtcagaactgacagataacgaggatttgaacttcgttgatgccagtagaggaaccagcttgtcatcgttgatcacgtcatcggttgaagccattcacacggccttgatcgatgggtggaccatgatgatcggctattccagtggtaaagattctgaaacggttttgcatctgttcctgatggctcttatccgggcggttaggagtggagcaaccatcagccaacaccacttcatcttgcacactgacacactgatagaaagcccagaagtaagatggctggcggatcagaaactggccgagttggagcgtttcattgtgaaggaaaaccttcctctgaccatcgttctggcaaagccggggattacgcagagttggacgggccgaatccttacggggagggggttgcctacattttccaactcttcggcccgtcagtgtagccaagagctcaaaatcacctcagccaaaagagcgaaggcggcttatatgcgagaactccccaaggatgttcggcagaaagtgtgcctccttttggggagccgtgatgctgaaagcgctattcgtgcagccaacattgcaaagcagcgaggaagctcaaatcgcgtcattaagacgaaagatgggggggagctgtatgtggtgaaaaactggttggcgagtgatgtctgggagttcttgctatctgctggcatgggctcaccataccccctgccaagttacctggagagcaatgtcactacggcagagctctacaaggcagcgacgggggagtgcgtgtggtcggcaacagagaaaaaggccagtgatgcgtgtggtgctcgcttcggttgctgggcctgccaagctgtagggttggataagtcgatggagacattgcttgccacagaccctgaaaggcatggctacatgtctgggctgaaccgcatccagcgctacctggcaaaacgccggtacgcttgggaagatcgccatcccgtaggtcgaacgatttatgaggggggttacatcaaaatacagccggacgtttacagtcctgttttccttgagcgattgcttcatgtctgttgcagcatggactacatggaacaaaaaagagctgatgagctggcttacaagctggctactgggcaagccgaggataacgactggaaccgtcgaatggcagaaccgcaattccggatcatatcggaagaagctttagtccatatcgacttcatgtgggccttccatcatttcaatgataagcctttccatgccctggagatttaccacagggtttggtcgatgggtgatctggatttgctggaagatgagccgcagtgcgaaaccgttcctcagtcaccaattccgaaaccattgtggttgagagttgggcgctggggcgatggttcgctgtctgatggcttggccgacccgttagcggaaatggcttactttgacgggggggatgacccgttggcagtgaaagttatcaataccgcagacggaaagagaagggtggtttgtttcgcagaggatgatgaggtgaaggtcgatcccgactccgctgcattcatcatctggaatgaatacccgcgacttagggagtcggtactaaagggacattatacgcccggtagtgctgctcagttctaccttcggttcggagccatccagcttgcgaaaggaaaaggcgctttgtatcaccgcatgatgcaaagaggtcaaacctaccaccagatgggccttacagggctacagacgatggaaggaatccaacagcgcaaggacctcaaagtgctttgtgatgacaagtacaaagatctggtgaagcgaaaaatcaagggaagactggctacggtacgctggtggatcaacttgcacttaacgttcaagtaccacctccaccaccggactccgacggggttattcgtcgagaggcaacttgaccaggaagcaatggaagagcagaagcggcaccaggaacgatggtttaactacgtgactgacgcgatgctctgttactccagcgcattctgtatgagcgtcatggaggggcgagagggaagcggaaacgccaacatccgccgttacatggccgcgaccagaagaaaggcttatacggccctctgtgagctcctaggccacactgacgccctctgggcaacagatgtggccttgagtgctgtagggaagtatgaggagatacaggcagccctaaccgaaggttccgcgctggctacctacctcgactggatcaacctactatcaaaacgtcatccagcctctttgaagcgacatgtcagaacgatgatcaaagtggttcaacgactacatcgccgcgacgacacagagttgcaaagaggacagcaaggcttgtccttggccgcataa

SEQ ID NO: 148283 - DNA, 387 bp, Enterobacter cloacae
atgtctaaaaacgtcaatgatgttttttcaaaccgagcttccttggagtgtactgtgaatgcagcgctggaccgtcgtattggtctgcgtgtcgggttccctcattaccgagaaggagcaaacggtgtggtttgtgagatcgaagcagagtacccattgctgaacactcattcgggtgttgcatggactcagctcgataaactcaacagttacaccatcaaaaaaaaccaatcactcattgatcacattgataatgcggtcgctgaactgttgaaacacaaggctcgtctacagcttgatattcaaaagctgcaagacggtgacattgatctggtgaaacaggccaagcagcaatacgaagacaaccagatgtcgagtacccgctag

SEQ ID NO: 148284 - DNA, 555 bp, Enterobacter cloacae
atgaacacattagaacaacttgtaaatcagagggtgcttgaggaaggcctgaaaaaggcgaagccattggccgcgcaaatggggcttgaatcagtgcctgatgagatgcttgagatgatctgcccgaacttgaactactctgggcaatttacgccagctctttacgcaaggttccaaagcgtaaagcgattgctgaaagagttgtcggaacaaacctcacctaagcacgggcatattgtgaagtttaccaaccaatatgggagctacgatgagtcagctttgctgttcaaagagggcgatgtcagaaaccagaacttggttgcttgtgtgggcgggaaaacgctaaacctcggagagctagagcttcaagattacgggctcaatatgcacatcggttgcggtgggccatttgagccgatctcagaagcgcagattcagtctttgtctgagtttgacctctatgagacgacttacaggttctggggccagagtccatgtggaaacggaatgttagacatcaccgtacctatgaagcgctggttcttgactgtgtag

SEQ ID NO: 148285 - DNA, 300 bp, Enterobacter cloacae
atgatcgtaaatccagagaccaaagcaaaggttctccgatatgcgatgggcaacccagggaatttatccatcaccaagctggcggtagcgctggattacgatgcggttgatgtcctgggggttcgttttaaagacactgtaaatcttgaggttcgcagagccaggcgctgggaagtatggcagtggttctggaaccatccggatcaaagtgttcaactgtcaatcaaactgggcgtggttggcgctgtgttaggagtcatgggcttcttgaccggcgtagccccgtttctcttgggataa

SEQ ID NO: 148286 - DNA, 1626 bp, Enterobacter cloacae
atggctactatcgtaaacaccaagttaggagaacatcgaggcaagaagcgcgtctggctggaaggccaaaagctgctgcgtgagggttactatcctggcatgaagtacgatctggagttgaaagattcccaggttgtgcttcgcgtcaaagaggaaggtaaattcacaatcagtaagcgtgagcgcaatggccgagtgtctccaatcatcgatctgaccgcgcaagagctcgctaccgtttttgacggtgttgagatgctccgcgtgttcattcggaatggcgcaattgtaatctccgctcatcatcaacaagagcgagtgatcgagcgcgtcaaccggcttatcagcaagctggagaatggagaatcgctttcggtatgcagcctctttcatggggggggggtgcttgataaagcgattcacgccggttttcacaaatcgggaattgccagcgccatatcagtggccgtagagatggagggtaaatacctcgattcgtctttggcaaataacccggagctttggaacgaagattcaattgttatcgaatcgccaatccaggctgtgaatctcagcaagcggccaccgcaggtggatgttttgatgggggggataccttgtactggcgcatcaaagtcaggtcgcagtaagaacaaattggagtttgccgaatcgcatgaggaggccgggtccatgttctttaacttcctgcaattcgtagaagctcttaacccagccgttgtgctgattgagaacgtgcctgagtaccagaacactgcttcgatggaagtgatccgttcggtactctcttcgttgggttactccctacaagagcgcattctcgacggcaatgagtttggggtgattgaacgccgcaagcgtctttgtgttgttgcgctttcccacgggatcgacggttttgaacttgaaaaggttcagcctgttcgtaccaaggaaagccgcatccaggacattcttgagtcggtgccgctcgattctgaacgttggaagtcatttgactatcttgctgagaaggagttgagagacaaagctgctggcaagggattttctcgtcagcttctgactggtgacgatgagttttgcggcaccatagggaaggactatgcaaaatgcagaagtaccgaacctttcattgttcatccggaacagcctgagttatctcgcatttttacaccgacagaacattgtcgagtgaaagggatacctgaggaactcatccaaggtctgtcggacaccgtagctcatcagattctcgggcaatcggtagtctttcccgcgttcgaggctttagccctcgcattagggaacagtctttggagctgggtgggaatgatgccaatcatggtcgaagtcgtggatgaatcacagccggtgatcggtggtgatgacttccattgggcaacggcattggttgacgcaaagggcacgctaaagctgtcaccggcagctcaaaaacaggggatgcccttcaacattatggacggtcaattggctgtctattcacctaacggaacccaaaagagctgcggccataagccttgcgaatatcttccggtaatgatgtccggagacgcaatcatggtcacttcatctttggttcattag

SEQ ID NO: 148287 - DNA, 303 bp, Enterobacter cloacae
atggaaaaacataacctcaaatctggattcagcatctatttcgctgacatccatttcgagaaacaggtctacgcattcggctcaggacttggcttcacctctgtgatctacgcctactcgctgggccgagatccggaagaagctgaaaagctggcgcttgagaagtacgactctgacgaaacgaaggtaaaaaaggtacatgtcaatctggctcgcagccaggacatcaaccgctacacctttccagaacaaatggctggctttgctaatgccattcagtctcacggcgcggctgtgaactga

SEQ ID NO: 148288 - DNA, 345 bp, Enterobacter cloacae
atgactactcttgccaactttgcgaacccgatttctgttattcaacgctctccaaccagtggggtgtttggctcaaatcagttcgtaggagacaaagagggatttgtacaaaaggtgatcggaaagtggtactgcactccagggaataccattcctgttgagagcatgtcccaccttgagcaggcggagaaactttatgacttctacgtcaagtatctccaagtaaaagaaaagacctctgtgaaccttggccgggtgctgcacaagctgtacagcaccggttctatccaggaagcagagatcgctcttgaagcaataaaaactcaagctggcgtcacggcttga

SEQ ID NO: 148289 - DNA, 354 bp, Enterobacter cloacae
atgaacgcagtgaagatgattcagaagggaaaccagctagagctgccacttttcttcttggatgaagagccgaaaaccgcagaagtcattccatttgagccaaagcccgcatggaatgatgatgaggtaaggttgttacgtgatgggcttttatggcatagccttagagtccttgctgatggacgagctgggagtgaaatcaagcaggaaactatgacttgggtgatgtccgatgaggtgcatccattctcatttgtggtctgctgcgatgaagccggttacgatccatctggagtcagggaaggcgtaaagtctatcctaaaacgcttagcgcggattaaagcggggggttaa

SEQ ID NO: 148290 - DNA, 192 bp, Enterobacter cloacae
atgacagatcacagtcacatgattgtgttccctgggagcaatgtcgaatcacttgctgaggctaacgccatgttgagcgcagtgtcggaagacgcacgtaaagccagcaatatggaagacaaacgtgaccttgaatcgcttcaaggctggctggaagagaacatcaattctcaactggcaggcgtgaagtaa

SEQ ID NO: 148291 - DNA, 453 bp, Enterobacter cloacae
atgcagcttaaccgatacacggccagagagtctgacaaaggtcgggttcttcggaccattggttggtgcaaacgcaaccaccttacacttgccggtcttccatatgacgacaaccttgtaggaaacgatgggatcagcatagagatcatcactcctccaggtatgtctcgggaaatgctggagcaagccgtcaaagaggggtactcagagcgagatgtcgtaaggcatcgcattttggagtgccctatcggttggttcattgaagctgatggcaaggcatttgatcatgaagtattccacgattacgtggctgctcatggttatggtgagccttccagtgaagcctatgaactggcggagcggtggttctggcagggcaacgattatgcgttgatagctgcggaaatagttgctcgtgatctttgtgttcgtgatgacgaagatgaggactga

SEQ ID NO: 148292 - DNA, 390 bp, Enterobacter cloacae
atgtctatcaaaaccaaagttgaacaaatcgcatacggccatgctactgctcaagtgctcagtgaaatgggtccacaagagaattggtataaggcttatgagtatttgtcggagtgtgtagaactgggagacgaccctgaggatctggtcgtttggcaaaagtttgagcactgggaatggaaagacattctggagcaaatcgagagcgaagctgagtctctgctttcgactatcaagttggttttaggcttggcccacaaaggcatcattcagtcagcaattgactgctctctcgattcggacatgacccagcttgacctgattggaatggtcgagctcggcagtgaaatcgaagaaagggagtgtgctggaggtggctatgcagcttaa

SEQ ID NO: 148293 - DNA, 225 bp, Enterobacter cloacae
atgaacatacaacttcaagccaacaacattgttctgttggcgcaaatcgaaaacaaaggcctcactgttgaaacccattgtcgcagtggcttttgtggcatgtgccgggttcgtctaatcgaaggtcaggtggcctacgaagagacccccatcgcacttgtcaaagaaggggaagtgttggtttgctgcgctaaagcaaaaaccgatgtgaccttggaaatttaa

SEQ ID NO: 148294 - DNA, 885 bp, Enterobacter cloacae
atgttcaaatcatcagtatgctcctacgaaaatagggggccttacggaaacaacaagtaccgaggcaactgctctggcttcatcataaaagactttattgagtcctacatgaggaggccgaatgggctggtggcagaccccagtgttgggggcggctcaagcatcgacgttgccaatgaacttggaatccgtttcaaagggacagacttgcatcagggtttcaatctgttgcgggatgacttcctttcgttcctcggagagcctgcacaccttatctggtggcaccctccttactgggacatgatccagtattcaggtaaacagtggggcgaacccaacaaatgggacatgagccgcatgagtttgcctgagttcgttgaagcccttgagttggctgttatgaacattcatgacgcttgtgagcaagggggacattacggaatcctcatggggaacctgaggcgcgatggggattacttcaacctgtccagccttgtggaacgtatcgcacctggaaagctggtggatgaaatcatcaaaacacagcacaactgtgtgagtgatcgaactcagtattccgggaagctagtgcgcatcgcccatgaaaagctgttggtgtttcgtcgtaacgacgttgcctcatcgctctgtcttcttgctgccgtacaccgccgatcaaccaacatggtttcgactacgtggaaagctgcaatacgccgaaccctacaggggaaaacgttgaagctggagcagatttacaaagagattgaaccctatgcaaagcatcgagagaacaaccactggcaagcaaaggtcaggcaagttcttcaagatgccaggttctttagtcgtatcgaggtaggtgcctatgcacttgctgagtag

SEQ ID NO: 148295 - DNA, 501 bp, Enterobacter cloacae
atgaaaaacctatcagctttggaagcagttcttgactacgacaaaccttctcggcgttttcttgatgagctcaacgaaaaccagatgaaggacctgtccggggaaatcttcgccaagctctactggagcaagcggaatcctcagtggtacgagaaagacaccaacagactgtttgcacgacttcgttgggttcggcgcatcatcaagaagcgcttgagttccggccaggttaaacctgaactgactgaaaatggttcagtgatggatcgcttcaacttcccttgcggtgacactctcgatttcttccatcggtacttgcaacatcccaaatgggttgttgtgtatcaagagtcgggttgtattgccttttggaaaaatgaagcaacgcttgagctatgcacctactgcgaaggtgatgtggtcatgatgaaggcacctgatgaaacggccttctttcgtgattgcaatcgcctgagctggtggtatgcagataacgcttga

SEQ ID NO: 148296 - DNA, 540 bp, Enterobacter cloacae
atgtctatccttgaaaagatgaaagcagaaatgcttaatctctctcaaaagctcaagttaccggaggtttatgccggtgatgtagagcaagatctaaccctgattgagcagttcagtggctatcaaatgttatgggtgctcagaacctgtggttcggcattgataccgttaaaggccggagttcaccctgttcatgttactcactggatctggggtaattcagggcaacaaatctttgtgtttcatgtcaatacacagcacggaaccatagagaaagttgacttcgaggaagctgaacgtctcatcatgcagcaaccttgccatttgagctcttcaatgaagcgcgaagagataatcagctatgttgatcgtgttctatctaatggctgcaaccttcgtatatggggtgtttttgactcaccgaaacactcttgttcggtcggggactggtcacaatggcaacagtatttcagatcgtcaggtaatcacctgatggccgattttattggtaaagccattcgattcacgaaccctcgataa

SEQ ID NO: 148297 - DNA, 333 bp, Enterobacter cloacae
atgaaccaattccatcggttggatttgtatcatcagaacaagggtagaagagcatctgagcctgatacacctttcttactgcttgccaaacgcatccctccaatgtactggagactgttccagggtgtaacactggatagtcgtatggggtacaccggcaagcggcagttccacggtcttgggcaagcaatcaactgggcaaaatcatcagttggttattcctggtcaaacaagcactttcataagcccgtagacctcgatcttttgctggcctgtactgcgagtcagttgcctgaacatctggtcgaagatctgaaaagacggggcaattga

SEQ ID NO: 148298 - DNA, 489 bp, Enterobacter cloacae
atgtctgtacttacttttaaaatccatgatgtgaaaaagttgattgaagagcttgatgcagcaagcagtttttcaccatcaacggacgatttgttcaatcctgaaatgtactctgacggcatagtcagggataaaaatggaaggactgagcaggaagctgaaaaacatggcgggatgttctggccttcagaagactttattgaccagagcaaagttaaacccgccttgattttggtaggagatcatggggtttacctcatcactaatgcaaaagctgatgggtctccaatctctcgcggaacagtcgcttatgctaagggctgtaatccagggctcgatgatgatttctacgaaaataaatgcaacttgtttggtggtgatgatggttcggttcgcatcccttctgaatgggccaggtgggctatccagaaccagaaggcgtttcggatcaaattgaccacaaactcggttgagctgatgcaggggtaa

SEQ ID NO: 148299 - DNA, 1782 bp, Enterobacter cloacae
atgtccaaaaaacgcaccatttacagcgctctaccaatcgtggccgcagcctatggtgaaaaactcggtgtcaaagtcgccatcggtaacgatgacgcatacaccgatggcaagaccatcgtggttccgaatattcccgacgactatccgcacatggatgctgtctggggatatttggcccatgaagctgcccatgtccggtttacggactttggtgttgaacgccgcagaggccttcatgctgagttgtccaacattttggaggactgccgcatagaacgcgccatgatggagctcttcccaggtacttcacagaccctgaatgaagtcgctcgctacatggctcaagccggtcattacgaacacgtcacagataaagaggctccggcctccattctgactgggttctgcttgtactggctgcaaaccaaggctgtagggcaatccgtccttcaaccctatctcgattcggctacctccgtattcgagcgcgtgtttcctcaaggggttgttgttcggctgaacgctttgctgcgtaaggctgtgaacactaagtcaaccgcagaggtgacatccttggccgacaaaatcatcaagatgatcgaggaggaaaaggagaaggaagagcagaagcctaagaatggtgaggatggtaacaatcagcagaatgctggtggcaaccaatctcagaacaatcagggcggaggtgggaacgatcaaaaccaagggcaaggtgccaatggtggtgatcagcaaggcaaagaccagaagcaagacgatgctggtggaaagtctgatccgaaagggcaaggcgaccaaagcaagtcggatactgatggtggcagcaaggctggtggcaattcggacgcagcaaagcaagatgcggccaaaatgctccagcaggttctgaatgccggtgccggtgacttgcgtggtgacgcgcatgatgcacttaaagctgagctcaaccgggtggctcaagataagggtgacagtagttatatgactgttcgctctgctgtgaacacccaggataaccctgctgttggcaaaagcctcgtaggtgatgtgaagagcaccacttcaaagataagaacgcagctttacggattggtccaggccagccagcgagttgctcaccgcaaccaacgatcaggaaagcgtgtggatgcccggaagctacatcgtgtagtgacaggtgatacccgcgtattcctcaagccggaagccaagaaacgccctaacacggcggttcacatactggttgatatgagctcctcgatggcctacaaggccgccaatggaaaggagcgtcaagatattgcgcgggaagcatccttagctatttctatggctctggaagcgatccccggcgtaaatccggcagtcaccttttttggtggcaaccggaaccagccagtgttcagtgtcgtgaagcatggagatacggttcagaatcgggccggtcggtttgggttcaaagcaactggcggtacacctatggcggaagctatgtggtatgcagcctttgaactcaccaagacccgtgaagagcggaaaatgttgatcgtagtgactgatgggcagcctcaaagcgcccctgcatgtcgctctgtgatcgacctctgtgaacgaagcgatgttgaggtgataggcataggggtagagactaccgcagtgtcaggactgttccaaaagaacattgtcattgacgatgcggcagctctgcaacgcacactgtttaagctgatggagcggtcactgactgcttttgcggcctag

SEQ ID NO: 148300 - DNA, 1278 bp, Enterobacter cloacae
atgactaaagtgaaccatctacaaagcctctgtgttatccacgttgactttgacatttggagtggacaaacccgtttgtctgcatctgatctcaagctgggcgaaggtggtgaaattccaccggagaaagtagctcaactggggagtaagaagatctgtgatccggcgaagctgaaaggctttcaccgcctgaaaacagaaacccgtcgtctcctgttgaaattcggtatgccgttcatgaacggatttgccgtcccagtcagcaagaccgatgaaatctgtaacaagctgaatgagatcagctttcagttcaaccaactgaaacaggacttcatcaacggttacaacaaagccgtggatgaatggtgtcaggaaaaccctgagtacgaacgagctatccgtgccggatctcttccaaaggaaacggtcgaggagcggattggctttgagttccaggtgttcatgatccagccggtgaacgatgatgaggccaacgccaaaagccttaaccgtaaggttgagcgcttgggtgacgatctcatctccgaagtggttcaggaagcgaataagttctatatggaacgtttggccggtcgagaccaatgtgctgtcacgactcggctgactctccgtaatatccgcgacaaggtggatggacttagcttcttgaacagcgcttttaaccctctggtaacgctgctcgaccaaaccctccggggatatgagcaacatgccgatggtcgaaacatcgttgcgcctttcttctatcaggtcgtggccgctgtgctgatcatgagcgagagagaccgcatcgagcagtatgccaatggctcaattactgtagagagcatggctaataacattggcggttcggaagcccaaatgggggactgttccaaagatgaaaagcctgaacggaaaagcgatacatccggtgagcccactcttgcatttgaggggggcgaaaccaaggcgcaacaggtaggcggaaacgactctgttctatccgaacagactaacagcaatggtaacgttgttgacctggatgaagacatcgacaacttcttcaagagttttgcagagcgaggcgagggtgaatcggaagatgaatccaaggccggtgatgcgattcaagaagagcgagttgaagttgaggatgagcctgttttgcctggggatactccggtagagcaagaacctatccaagagctacccactgaggaacccctcatccaggtgccgcctaaaactgatgatgatgacgactgtttcttctaa

SEQ ID NO: 148301 - DNA, 1011 bp, Enterobacter cloacae
atgaaaatagtcaacctatcgcaacgcgaggaagattggcttgcttggcggcgtcaaggtgtaacagccactgacgccgctatcctgctcaatcggtctccgtacaaaacccgatggaggctatgggccgagaagactgggtatgcgcgtgaagtcgatctgagtctaaatccgctggttcgccgggggatagaaaacgaagatgctgcaagacgcgctttcgaggagaagtatgatgacatgctgctccccgtctgtgtcgaatcggttcaatacccgctcatgagggcctccctggacggcctgagagacaacggggaacccgtcgagctgaaaagcccgagtgcgactgtttgggaagatgtttgtgcagagaaagcaaacagcaaggcatatcagctttattacccgcaggtgcaacaccagctcctggtaacgggtgccaagcaaggctggctagtcttctactttgaaggtcagattcaggagtatccaatactccgagacgaagccatgattcaagaaatcttggccgaagctaaaaagttctggcaacaggtagtagacaggaaggagcccgacaaagatccggaaagagacctgtacataccgcaaggtgaagaggtcaatcgctggattgctgctgctgaggaataccgcctctatgatgcagagattcaggagctgaaacagcgactggttgagcttcaagaaaggcaaaaacctcatctcgacactatgaagttcctcatgggggaatacttccatgccgactattgcggtgtgatggtgacgagatacaaagcggctggccgggtagactacaaaaggctgttggcagataaggcgtcgggcgtgaagcctgaggatattgaccaatacagagagaagtcatcagagcggtgccgcgtaacggttactggttcggtgaagccacggtacattgttgatgaggacgtattggctcctcttgatgatttgccggaagaagtagagacattctactggtga

SEQ ID NO: 148302 - DNA, 996 bp, Enterobacter cloacae
atgtcaactgatagcaaatcccttataacccgcattgcctctcggtacggtgttgatagcaccaagttttttgaaaccttgaaagcaacagcgtttaagcaacgtgatggctccgctccaaccaacgaccaaatgatggttcttctggttgtagcagagcaatacaaccttaatccgtttactcgggagatctatgcgtttcctgatagacaaaacgggatcatcccggtagtgggtgttgacggttggagccgcatcatcaacgagcatccccagcatgatggtgtcgagttcgtgtatgcggacaagatggtcagaatggagggagcaaacgttgattgccctgagtggatagaatgcgtgatttaccgtaaggacagatcgcgccctatccggatcaaggagttcattgacgaagtttaccgagggccagcgtataaaaatgggcaaaatggcccttatgttgtcaatggcccttggcaaacacacaccaagcgtcaactccggcacaagtcactgatccagtgttctcgtgtcgcgttcggtttcagtggtatttacgaccaagatgaagcagaacgtatccgtgaaatggagcaggcatcagccattaacccggccattgcaaacctcccttcaccggcacaagttcatagccaagagcctttggctattgagcacaaagagcttgacccgatcctgatcaaactcgcaaatcgcgctattgctgaaaacgcatggtctgcggcgcatgagtatttgaagggacggtatgagggttcggagctgcaatatgcgactcaattccttcgtgagaaggagatggatcaaatggagcctccgaaacctgactaccaggaagcgcacgagcaagcctccactgctggtggttctgcgaatgccgaacctgctgccgccgaagacgtgccacctttgagtgacgaggacatgctccatgttgcagaagaggagggtgcgcaaggctgttattactaa

SEQ ID NO: 148303 - DNA, 906 bp, Enterobacter cloacae
atgaagaaaaatgactgtttgtgccgtcgttacacattcacggatgcgttaacgtcggaaacattcgaggtatttattggctacaaagttctccgagaacccagcccctcggggccaggccaattcacgatggtgaagctaaaccgaaccgtcacggatgggaaagctgaaaactggtctgagacaaagctcgaagtaccatttgaagcaaacggcccggacacgatcccaatgtcctacaaggacaaagaaagccagtatgtgtcacagtttctcagccaggggtacacctttctggatgaggtgctggtaaacgcagagacacagactgtgctagaaggggggggtgtttcagccggacaagcagccagcttggggtctatcaactggctgttatctccgccttctgagttacctccaggtgacataaacctcttcaaaggttttgttactggggtttttgccaaaggagccagtttaatcggctttgaggttgctcggaacgaaagctcaaacgacttgctacccagtgtgctgatgcgtactgatagcggttatgagcttggggttagcactgggctaggcgagaacactatccatccagccacgctggaaggcgctggtgaactccgcccggaacatggtcacaaacccctgctgatgctggtttacctgcaacaacgtttcgcggatgacttttcaaacgtagagaagccgctggtggcattctgtgatgaacagggtgataccttcgactacgagcgttttgattcactaaaacccctcattgaacggtttggtttcagctatgacgaagtaagagcagatgcagaaaggcttggccttgtatctgagctgattcgcctagcagagatcgacgccgaacaagaggatctctttttttaa

SEQ ID NO: 148304 - DNA, 969 bp, Enterobacter cloacae
atgtctcaatactctcaattttcagtaagcaaggttttcggtatgccaagcattccggagaaggtaactgccatcggctacgctgacggttcaaaccccttcatccctgccactgatacaaactacgttttccgcaaagagtttctgcgagaggtcttggcctatctcaaagagcctggcggtgacgcattgttcgtaaccggacctaccgggtctggtaaaacctctggtatcaccgagatcgctggtcgtcttaactggcctgttcagcaaatcactgcccacgggcggatggaactgacagatctgattggacatcacgctctggtcgcggaaaaaccgggtcaaccacctgtcatgaagttcatgtatggacctctggcagtcgctatgcgtgaaggccatcttctcctcatcaacgaggttgatttggctgaccctgccgagctggctggtctcaacgatgttcttgaaggacgtcctcttgtgatcgctcagaatggtggggaaatcatcaagccacatccgatgtttcgtgtggtcgttactggtaactctacggggtccggtgatgcttctggtttgtaccagggggtgatgatgcagaacctcgcagctatggatcgctatcgttttaccaaagtagggtatgcggatgaggaagctgaactcagcattcttggccgtgttactccaaaacttccggaaaatgtgcggaagggaatggttcggattgctaatcaggtccgcaaactgtttcttggtgaaaacggagaagatggtcagctcagcatcaccatgtccacccggacgttggtacgttgggcaaaactgtctcttgcgttccgtggtgcccccaacgcccttgaatacgctctggatcaagctctgcttatccgggcggccaaagaggagcgtgaagccatcctgcgtgttgcgaaggatgtgtttggggatcagtggcgctaa

SEQ ID NO: 148305 - DNA, 186 bp, Enterobacter cloacae; identical to SEQ ID NO: 52328

SEQ ID NO: 148306 - DNA, 321 bp, Enterobacter cloacae
atgcacatcatcactttcattgtagttctgcttgcatctctgggcgcattgtacgtgggcgcgaaggcatttgcttattccttcatcgttctcgctaaagtgttccagcgtatcggtttgttcctttggaacaaatttgcagttcctgcaatgcggtctgtgcaggccgtcatcaaagaacgcgctgctaaggctaaacaagccaaagcagttgttgggcctgaggtaactcaagctcaagaagtcgctaaacaagaacctgattgggattatctcgaaattccgacttacctgcgtaaaggaaaggaccttgtttggtaa

SEQ ID NO: 148307 - DNA, 651 bp, Enterobacter cloacae
atggcagaagcacaagcagcagtgggcacaagcagcgaccgcaacaaccactactctcgccctgttttcaaacaagctctgaaagtaaatagcctccaggcccagcgcgtcatggaacgcagctttgagcgagtatccaactccctgttttccatcgacgttattcttcggatcatcggtgagcaggacgaaattgaccaggttgaaaccgtcatcctggagcacatcgccaaggtttccgaggacttggacaaagctaccgcccagctcaacaagctgatggaagacaacggcatcgacatgatgcccggctacaccaacccgaccgaatacaccatcgagatcaactctccccaagttgcccagtttgcacacctgatccgcaagctggataccctgatggggatcgttgataccctctggttgaacactgtactgaccagcaaacagcgcaccgacgccacgtatcaatggcagcaacgtctcattaaactggccggtcgcatcatcggcatcgagaaacgagcccgcatttccgcccacaccaagggcaaagaaggggaagtagcccaggccgccccggaatctgtaaccggcgacaacgaactcgcagccgaagctgcaaaaactgatgacgagaaagccgcataa

SEQ ID NO: 148308 - DNA, 861 bp, Enterobacter cloacae
atgaaacatgcttcaatcaccactgtggctctagttgtagcagctctgtctggctgtgcatccaccagtagttacgaacccgcagcgtacaaaaccaatcacagtcgcgcttacaacatcgcagaggccggtggcctggtaacaggcattcaagacgcttcggttccgcgtgacaagctggaacgcttgaccgacaccaaaacgtttggtgctgcctacgtgctgtctggctatatgtcccctcagattggtatgaccgactggcaaggtggcttagtcaaccttgccaactgggccatcggtcctaaacagcacggagctcgcaatagcttgatcgcctggatgcctgctaaagaagctgcgtcaccggcagatgctcagggcaaacttctttcacatgtgaaagtttccatcgagtcagctctgactgacttgggtgcgaatttcacacttctgtatgacaaagacggtcgtctcacctatcagttctacaagaacgaatggggttgccctacgtgggtgaacggacaaagtaaggtggctgacatgtgttcagtcaaagtaaatatcgtggagcctcgcattgggaccgcgcctgattttgtctctggtgtccaaggcacagcgtatgccttcacatcaggccatgagactgactacaactttgtgaaagtcggcaatggaacagcaagccatgctcctcagcaagcgatctacgccgctattagcaaacagctaccagcttggtcctatctttaccttgctccaaaatcagtggaactggagagtggcgacaaagttgggttcccttaccttcttggtcagggaaaggctgagttatttgtttacccagaagcatga

SEQ ID NO: 148309 - DNA, 2739 bp, Enterobacter cloacae
atgcgaagtcacaccctagtcatgagaaccgtcgcctcattgctttccataaccatttccgcgttgccggtacatggttatgccagtagttcgagtgcggcggatatagccactgtaggcaaagatgctcaatcatttggacagagcttatctaactcattcaagtcaaactctggaactgttcaggatggcactatttcaatgcctacgttgaaagatggtcagttccaaatgaatggtggtgaacaagttaatgttaatgatctgttcccagggacaagtagtaaaaataacaaaccagacagctattatttccccgacgccaataagccaaacgttgataacctacagggcatgtatgattctggtagcgacatggataatgttggcaactcttctcaggggacactctggtccgatgctaatagctctaatccatcaatttcgggtgctgcatataaagtcctgcttgacgcaacaaatcgttctcgcccggacttttctaatgatccagttttgaatctaagtaaaaaaacctatgaaaatatggatcttattgctggtggttttggtgattgttctgccgaaacaactattaatgaaggaaccataaatgctcacgtccctgagtatgagcgttgtcagcgagtagtaaaacctgctggtgattgcgatattatccattccttgggaataacaagtgatgttcaatatgtatatgtcggttctgtaggtcgaacttgggtcactgttaaatttgaccttaaaaatggtacgtgggaaccaattgcaccctctgatggtgctcaaaaagttgcgcaaataccaaaagtagatttcaatgccatgtgcagtggtgccgttaattttaagaccgatcttgttggttcttgggattgggctgagcatggcctacccggaaagatcgactcgactgttatctatagagttaaccaatatccaacttgtgagaatggtttggttggggttgtacagatccaggacactacggaatcagatgacctagagtggattcttggtgggaagtttgcttttcgattcaccaagcaagttgaggaccaatggactccgcagacttgtattgatgatgcaaagaaattgaatgatgggttttgtaagggaacgataagtgttactgagggggccagaaatgaaaacgactgtattacagttaatggctccagcatttgccctggtgatccattcttcaattcactgaaaccatcgccgttgccaggtattccaaggctcgcacagaaagtcagggtatcaaaactccagtgcgactttaatgtggggcaaatggaatgctggactgaccctcaaggggtaaaacattgccctaacaatgatggtggaaatgtaaacagttgcgcggcactagaaggcaatcctaaatgtggcttcatcagctctgagtgtattgatggtgcccaaggcccatccggccaatgttatgtatttaaggatacttacgattgtggtgtggatgtcaaagtcccaactctcgataagaacactgagtacaagtgtggtggtccgatccgttgcatgggggatgattgcttagcaataaataaatctcagagtaccgatttcgccagagcaacagccttacttaatgctgctcagtttttgacacaagatatgaagtgtaccgatagcgcaaccgaagaggggggggatggaaatattgatcaaggatgtacggtttttggcggcgaatccggtgaatgtaaaatagctgtaggtggtgtatcggattgctgtgaaaaaccttcaaatatatctctagctgattacctaaacttgattatggctgttcccaagctagatggcgcggtaatggggttacaagatggtaatgccatgaagggcgcttatcaggttcttcgagatcctgtaatggaaggttggactgaggtaacaaagccatttacgagctatattgaaaatatatccggttctgtagactcatttatggaaccagtgaaccaggtgatggatcaacttattgagcagctaaaagagcaggttaaagaagtcatgatggacgtctttaaatctgctgggcaagatgccgcgacagagcaagctgctgctgccgcatcggaacaagccgcagaacagatgatgcagaccgcaacgacatggctcagtacagcgatgacaatctatacggtctatgttgtcacaatggtaatgatccaaatgatttataaatgtgaagagtctgagttcacaatgaacgccaaaagggcgttgaagaattgcacttatgttggttcttattgcaagtccaaagtattgggtgcttgcatagaggagcgtgaggcttattgctgctttaactctcctctttccagaataattcaagagcaaattcggccacaactcggccaatcttttggtgatccaaaaagtccccagtgtggtggtatttctctggagaaaattgcagacatagattggaacaaagttaatttggatgagtggttggggattttgcagcaaaatggcaagttccctacgcctggttcaataaatattgactcgctaactggcgctggtagtgacttcaatattaatggggatcgaaagaatgcccaagagagagcgttacagaggcttgatggaatagacatcgacgccaagaggaaagaggcaacaaatcgcgttaatcctcaaacaggcgcgccaaataataatggtggataa

SEQ ID NO: 148310 - DNA, 1005 bp, Enterobacter cloacae
atgctgaaattcatgaaattaactgtgtttgcacttgcactgtttagtggggtggtgaaagcagagccaggttgccagaatgccgaggtgattggtgggaagttgataacagatatatgttggagttgcctattccctataaaaattgcaggggtgtcaattagtggtggaggcggtgttgtgcctagtgatgcggttacatcacccctatgtgcctgcaatgataatctgggtgttccaaggccaggggtaactacgtccatgtgggagcctgcaaggcttattgagttccaaagagtcccaggatgctcctctgtgttgaatggcactcgtttcccatttgatcgaacaaatcaaggtcatcatggaatgggggatatggatgggggtgatggctcttttatgcactaccactattatgcgttccccctgcttattatgctcgatatgttcataaaagagagctgtaatgcggatgggtacatggatctagacatcatgtatctttctgaggtggacccgacgtggaacaatgacgagctcgctttttttactaacccagaggctgcggcagtagcaaatccaatcgccgcaacagcctgcactgctgatgctatttcttctacggcaggaaaaccactcaagcagcttttttggtgcgctggttcatggggggcgctataccccctaagtggaaaccaaaatggcggtaagggggttatacgtgacagcagccttctaactactcgtgttttggccgcgttgcaccggagagggttggcgtggaagactatgggctcagatgcaatgtgtcgtggagtgattagcccgacacttccaaaaacacaatacaagttcacgttgctacatccagttcctgagacaaactcatctcatgtgataggggagtcggccttgacttgggggctatcgaggacaattccatcaataggccaagaccctatctataccatttggaggtggaacgactgctgcaataattga

SEQ ID NO: 148311 - DNA, 678 bp, Enterobacter cloacae
atgattttttccccggctttacagcaaattaaggacgtcggaacaggctcgtttgttgcggctgaggttttggctcgttggtgctgcgaaggccagatgcttactccatcggagttgtcatcacctcctaattggggcttggtagatattgagattgccaggttcattcaagataacctttgccattgcagtgaggaatatcaggctctttttgttaatgtgtcagagcagactttgaaatctgacatcatctttcatacgtgggctcagataattagggcaatcacgaagaattatccattaaggcttgtcatcgagatcactgagggggttcaagacaaatctctagcatttagatggagctctcttactgcgatgggggttaatctagctcttgatgattatggagacaaaaactcgtcaatggctcgcttgcttagctacgactggaattattgcaaattcgatgcgagaaaactgagttcatttgaagattattcagccattcttcattgccgacgtaaaggcatccatcttattgcggaacaggttgagacaccaccattggaagagaatgccaaattacttggtttggtatggcaacaaggtttccttcatgggaagccgactgttatagagaaaagtttgaatcgagcaaaggtcttaccattatgctga

SEQ ID NO: 148312 - DNA, 918 bp, Enterobacter cloacae; identical to SEQ ID NO: 102546

SEQ ID NO: 148313 - DNA, 348 bp, Enterobacter cloacae; identical to SEQ ID NO: 102547

SEQ ID NO: 148314 - DNA, 144 bp, Enterobacter cloacae; identical to SEQ ID NO: 102548

SEQ ID NO: 148315 - DNA, 663 bp, Enterobacter cloacae; identical to SEQ ID NO: 102549

SEQ ID NO: 148316 - DNA, 378 bp, Enterobacter cloacae
atgaaagtaaccaataaattccaactgctggcactggggctgtttatggccggtagtgccatagcatctcccgatgtactgaatgacgacgcaaagctcaagaaccttgagaaggtgtgtcctgactgtgagatggttgcaagagatgtactcaaccttcgggttgaaaactgccagctaaaaaacacctccagtgcaatgatgatagccactatgcaaagtgatcccatgttttcgtttatgctggcggtacatacggcggctggtggagatgcctataaaacggtgctgggggctgctgccgcccatgttgactgcgaaaacccgttgagctgggtcaagttgacccaacaagcaattaaaggaggcaaagcctaa

SEQ ID NO: 148317 - DNA, 447 bp, Enterobacter cloacae; identical to SEQ ID NO: 102551

SEQ ID NO: 148318 - DNA, 2964 bp, Enterobacter cloacae
atgctgaaagccctgcacaaattatttggtgggcgaagtggagcgatcgaaaccgcgccaagcgccagagtgttgccgcttaaagacgtggaagatgaagaaatccctcgatacccgcctttcgccaagggcctgccagtggccccattagacaagatactggcaacccaagccgaactgattgagaaagtgcggaactcgctcggtttcacagtggacgacttcaacaggcttgttttgccggtgattcagcggtatgccgcgtttgttcacctgctacctgcttccgaatcacaccaccaccgtggtgctggtggcctattccggcatgggcttgaagtagccttttgggcaactcaggcatctgagtcggtaattttttcaatcgaagggacgcctcgggaacgccgcgacaatgaacctcgttggcgactggcgagctgtttctccgggctgctgcatgacgtgggtaaacctctctcagatgtgtccattacagataaagacggttcgatcacatggaatccttattcagaatcacttcatgactgggcgtaccgtcacggaatagatcgttactttatccggtggcgcgataagagacacaaaaggcatgagcaattttccctgctggcttggcatcgaattattccggctgagacgcaagagtttctttccaagtcaggtccttccatcatcgaggcaatgctggaggcgatctcgggaaccagcgttaatcagcctgtgaccaagctgatgcttcgtgctgaccaagagagcgtctctcgggaccttcgccagagtcgtctcgatgtaaacgagttctcctatggtgtgcctgtcgaacggtacgttttcgatgccatccgccgcttggttaaaaccggaaaatggaaggtcaatgagccaggtgcgaaagtttggcacctgaaccaaggtgttttcatcgcctggaaacaacttggcgacctctacgacttgatcagccaagacaagatccccggtattccacgagaccctgacacgctggctgacattctcatcgagcgtggttttgctgtaccaaacacggtgcaggagaagggggagcgtgcgtattaccgctactgggaagttttgcctgagatgctccaggaagctgctggtccggtgaagatcttgatgctccgtctcgaatcaaacgacctggtgtttacgactgagcctcctgcggctgttactggggaagttgttggcgatgttgaagacgctgagattgagttcgttgacccagaggaagctgacgaggaccaagcagaaggtgacgctggtctgaacaatgacatgttggccgcagagcttgaagctgagaaggctttagctggccttggctttggtgatgcgatggcgatgctgaaaagcacctcagacatagccgaggaaaagccagagcaagaggatacagaatcaactgaattgcctaagcctgacgcaagcaagaagggcaagcagcagagtaaaccgggtaaagcaagagcggagaaacaaccccagaaacctgaggtaaaagaagatttgtcccctcaggacattgccaaaaacgcacctccgttggcgaatgacgatccgttgcaagcactcaaggatgttgggggcgggctgggagacatcgacttcccatttgacgtattcaacgcatcggcagaaacagcctgcactgacgcaacaaaccttgaaatcccagatataacagagcccgaaaagcaagaggaacaaccaaaaccggacttcgttccacaagaacaaaactccctgcaggacggtgacttcccaatattcagtgattctgatgaaccgccatcgtgggcaattgagccgctcccgatgctgactgatacaccagaacaaacaatacccgcgccagatatgcaacatgcgggcaaacctaaggagcttgagaaagacgcaaagaccttgctctctgagatgttggccgggtacggagaagcatcgacgttgcttgaacaggcgatcatgcctgttctggaaggcaaaacgacgttgggagaagtcctatgcctgatgaaggggcaggcagttattttgtacccagaaggtgctcggtcgctgggggctccgtcagaggttctctctaagctgtcccacgccaatgcgattgttcctgatcctattatgcccggtcgcaaagttcgtgatttcagcggggtgaaagcaattgtgctggtggatcagctttcagatgcggtcgtggcggccattaaggatgctgaggcttcaatggggggataccaggaggcctttgagcttgtctctccccctggctcgggcgtaagcaagaacaaatctgccccgaaacaacagagcaggaaaaagccgcagcaacagaagccggaggttgatgccggagccgggcctgaacaaaagacgaaagacaagagcctccagcaacagccgaaagaaaagcagggcaacgttgtttctttggttgaagagcaggggcgcaaaccggtccaagacccagaaaaacagaacgtggctcgccttcctaagcgggaagctcagccagtggctcctaagccaaaagttgagcacgagaaggaattggggcatgtcgaggtgcgagaaagggacgagcccgaggttagggagtttgagccgccgaaggcgaaaacaaacccgaaagacatcaacgaggaagatttcttgccgtctggtgttacccctgaaaaagccctcctgatgctcaaggatatgatccaaaaacgctctggaagatggctcgttactccggtcttggaagaagacggctgcttggtcactagcgtcaaagcctttgacatgattgccggggaaaacgtcgggatcagtaaacacatcctctatggattgctgagcagggctcaaagacgccctttgctcaagaaacgtcaagggaaattgtatttagaggtagataaagcatga

SEQ ID NO: 148319 - DNA, 582 bp, Enterobacter cloacae
atggccgggtgtgcctctaacacttccgagccaaaaactcagccccagatcgcctctgccgaaaatgacaaaccggcccgagttagccgtgaactgtctatgtcatgggacaacatggggcgcggtggcgctgcattacgccaacctggttatatccatgtgctgggcgacggtaatgtcagcgcaatggtgaacaaggtcaaagatgactccactggttcagataaggctccagtgtggatcaaccagaacgaggatgtgaacgaagccatcaataccttcaagtccatgaataaaggcaaaggctattcgctgtacgagttgtcacgctgggaacgctattgcaatggcggcaaaggtatggatgagcacgactggcgttttgtagaagccgagggggccacaaacatccccaaggatgttgtgaccggctgcattccacccacccatacctatcaaggttatctgaatgcctggacgcatttttgcaccagccagtctgtaaccgacgcagaccgccgcattgtgcgcgaatcagtgcgtccctattcagtggtgaacccatgcaaagctctgaaataa

SEQ ID NO: 148320 - DNA, 402 bp, Enterobacter cloacae
atgtttggatcaatattattggcctccatattaacaacctcagccattacccaaaataccagtagcggtatttcatctggattaatggctacgtcagcaagttatttggcacaaaacataatgcctcttaccctgggactgaaaagtatccatagctatcagaccacggaagcagttgagatggctaaggctttgggaagcctaaaagatcttcctgaatatatttatgtcattactgatgtgaatgcccgtatggccgatatgtgtaatcgtgtttgggagccacaatcattggccctaaccccattcattgttgaaatggcagagctgcggaaggcaaatgaaaaaagcgcctatgaaaaggcgctatccgatctcgactgctcgcttttagaaaattaa

SEQ ID NO: 148321 - DNA, 417 bp, Enterobacter cloacae
atgagtaaagagctttctctggcggcggagaacggggctgaagtgagcgagctccctaatggactatcctttaatgcctcaacaggccagtggcgggcgcagtacaagggtcagaggatcacttacagcactgcccgctatggggacatggctaaggatttggcgcatagtgcgctgaaacggatgctggccgggaattttgacccagtagctgatgatctacttctcaagtattcatggcgcatggacgatgcggctacgcagttgggcctatcgcttggtcagcttagacagtggatgctgacggggatagtcaacggtaaggagattcgctcccccaaacgtgatgttcagggggtagaccggatcagcgggcatgagctaatgatggcacaagagcgtttgcggcttgagtaa

SEQ ID NO: 148322 - DNA, 141 bp, Enterobacter cloacae
atgctgttttccttaatcatctttatgggcatagccagcatcatcgacgatgaaccatccccctttcggtatcctgacttcaccgcagttctggtgaatgatcagttctccatctttatggtgaaaattatggtctggtag

SEQ ID NO: 148323 - DNA, 234 bp, Enterobacter cloacae; identical to SEQ ID NO: 52342

SEQ ID NO: 148324 - DNA, 252 bp, Enterobacter cloacae
atgagcgagttttttttcaaggaaccactagccggtagtgcggccatagctgctgttatttgtctaattatcaggatatacataggtcgaaaacagatggatccgcttaaaccaaaacaatctgaacctgagtgggcggaaatgttaaataaaaatatgggagataaacagcaacgcaaagaaactttctggcgcaatgctgttatcttttttgtgttgctggggattgttctgcatttttttgggaaatga

SEQ ID NO: 148325 - DNA, 618 bp, Enterobacter cloacae
atgctttttgataaaaatgtagaatgtcactcgttcgtaatgggagccagtggtaaaggtaagtctgtcttctccgaacaagtacggaagaatgcgagactacgcggagatctgctggtggatactgatatgctccgggaagggcgggggttgagaccatacgagcatgagtacgctcgccgcttagttctggggctaagtggacccttgccgcgtgaactgcgtgggaagccggtgacgcttatctctgatgtatccaggcctaagaaggtaaaacgtcagccaaagcaatttgttaagactgcgaatggagtcgcccttgaccgccaattggtggctgatgcaagagaacagttggaaatgcaaacaggcatctggctcaaacagccggagctcatcgcgctgatggaagaatctggcatagatgaaacattggccgagtttggtgaggctgagacgcagatcagagaaatgttggcggatgcgttggctatgaaactggtgggccgctcctggcctatgtgtggcgctctttgtaatgcagcagataagtccaacgtcagcttctccgccgaacttgatgttgctgccaaaaaagctggatacatggttcgttaa

SEQ ID NO: 148326 - DNA, 507 bp, Enterobacter cloacae
atgattgacctgacgtgccgcctctgtgctggttccggtatttatgacttgtccccttccaaagaaacctgcggtatgtgccaggggcatcggagatttactgatgccaaggcaatgttggttgctgccatcgagctggcgaagaagcaacgcgaacctgttattgaagtcgtggtggagctggtactcaaaggggttgatgttagagggaaggagcctggagagctgttcaaagctgcacaggcctttaatgccccagggcacaacttattgcgatacgggtgggatgcctgggagctctatgccctccatgaaggagtaagccctgatcttgcctcacttggccgaagtgtgatgcgcgagtggtatagccattcatggggccgattcagtgaggaagtaggttttagcgcagccgagagcatgatcagacaggccaaagacaacccggaaaaagtagaagagcgctgggagttcctgcttagtgaagaatggatggtggagtaa

SEQ ID NO: 148327 - DNA, 675 bp, Enterobacter cloacae
atggacgagaacaagctcaacattgaggcggtcgatgggcacaacgagctggtagtcagcattctgtccagaatggtatgcctgagtgacgaggagaagcagacaatgttgtcctgccttcctgacaccggcaatcaaacaatcacccaactctatgagacgctacgttctcaagggcacctggagctggctgagaaaatcgaaccatgcgcactgcggggggcctatgggccggtcttcgataacactaacgcgaaggtgttcgttcgggacgaagcgccttttttcctcatggatgaaaatcctttgaactggaatgacgctaaagcattcaatcgcctacgtatgagtacgacctgtgttcttggccgtggcggttggactatcggtgagcgatttgatgaccgctttgataccgaggtgggcggaacacagcttatcgtcacccagtcactcaacgaaaaaggtgagattgaaggaggacttcctacctcaatgtcgctgaatgactttgctgagttccctaaacagccaacgcctcctcaaatagtcgattaccaggaaaacaagcgatacacgcttgaggaagcggaggctatccctgagctcgctccagtggttcagcggctgaaagagcgtgttgcagagtatgaagagagacgcgcccatgattga

SEQ ID NO: 148328 - DNA, 465 bp, Enterobacter cloacae
atgcgtatgccaaagctaaagcaagaaaatcacctccgtttgaagaaaccttgcgccaactgtccattcaagaaggaaggcgctatcgagctggcccctgggcgattagaaggcatcatcaacgacattgttgaaaacgacatgacgacgtttcattgccacaagacagtgcattcaaagtcaggtggtgaatgggatgaagagggtaactatgcgccgtctggacaagagtctatgtgtgccggtgctgcggcctacttgatgaaaataggcaggccgacagtggcgatgcgaattgcctttgcgtttggttatgcaaaggtgtccgactgggacgaagctcaaacgctggtgatcgaacctttggtacaagggggcgtaaatgagtcggcgagcatggaatccattgaatttatcgaacctataactgaggaaaaaaatggacgagaacaagctcaacattga

SEQ ID NO: 148329 - DNA, 450 bp, Enterobacter cloacae
atgagtttaagttttatagcaagagtcttgcgccaattggcaattatgtttgtcttcaccgtgctggtgggggccggttttatctactatgccggtaaacagcatcagcaggcagcaattgacttttggggggagcaataccagcctgatgccatctcgacccaaattgattgggggtttatcggtaacttggttattcctcgcggggggccaattatttctccgagcattgctggagtgtgccctaatacaccacttcccgttgtgcctcttaaaatcggtcctgatggccggagctacgttctttgcggcattggaagtgaggccgtcgctaccagctttgatgtcaatgccatcgaagatgaagagatgcggaaaacattaaaaacgatgtttgaggaagaattagagaacggcgttaagggggataaatggacgtccaagagctga

SEQ ID NO: 148330 - DNA, 369 bp, Enterobacter cloacae
gtggaacacacagaaggcacttgggtcgtcaacgaaaagcaccctgctcgtaacaacgacgctgaggttattatcgagcagaagggggggagtgcccctatcgcgatctgcccacctatttatggtagccagcagaaagctaacgctcggcgcatcgtggtctgtcagaaaatctgccgaggttactcgacagatgaactcgaacagagagggctcgttgccctcgtcggtgacgagctgctgaaacaggaaggactgctcaagagcatcagggagagaatacgcgactggtcttcgatgaccccagcggacatgaaagctgctctgtctgacattgaggacgagatctccgcagccgaactgctgtga

SEQ ID NO: 148331 - DNA, 195 bp, Enterobacter cloacae
gtggctgacaatcacaatcaagagtttgccgagcaaatcgtggccgcagtggcgagccttgggaccagtgaggcgttgaactgcatggctcgcgtgatgtgctgggtcgctgctgactacggccaggttatcgagtttgaatgtgatcttggtgtcgtgacagtagaacccaagcagcaaccgctgcaaagttga

SEQ ID NO: 148332 - DNA, 237 bp, Enterobacter cloacae
atggaaatcaaggcaaacgctctgatcatgtccctatgcgacgagatgtttgagcgtaaatcaggatatggtggtcgcaattggccgccgcactggaagaagaaaacccgcgaaaagttggtagctgctggactggttgaatcaaagggtcatgagcccaaggtcggggaggtttactacttcactgaggttggtttgtcctggtatttggggctgcggccagagcgtaaacgttag

SEQ ID NO: 148333 - DNA, 198 bp, Enterobacter cloacae
atggctcaagtgcaatgccctgcttgcaaggggtctggaaaagaggtggctttccacaataccgactcggactaccgcaagcatttttcatcgcaggatacctgcacgatctgtaacggaagtggaaaagcctctacagaagaggcggccaagatcgaaaagcgccatcagttctgggacaagattctgagcaactga

SEQ ID NO: 148334 - DNA, 168 bp, Enterobacter cloacae
atggctttgatagtgatcagcgtagacaggtcctccctgccgtcccatacggatgaccagtttgaggaatgggtcgagttcaacgtgggccatcgagggggcctcagtgaggataatcccctcgctgacatcgacatggaagcgagggttcgagagattagcaagtaa

SEQ ID NO: 148335 - DNA, 231 bp, Enterobacter cloacae; identical to SEQ ID NO: 52352

SEQ ID NO: 148336 - DNA, 393 bp, Enterobacter cloacae
atgactccagatagagaaagcaggcttgaggctgccctcgcggcgctgctggcagaggtagtgaacatgcgggaagactaccccgccgaagcgtggcgctttagcgacgaggctatcgccaatgctgaatctgcgatggagctacctcagtcggtggcgaatagagcctcaatcttggggacggtcgagtttagttacagtgacagcgatacaaagtgcgcttgttgccctgatggtcgccatgcctatggccgatgcgttcgcctggatgattgggagagccctgcgccagcacatttacctcgtgatccagaccgcttcgttcgtgacttcgcggccaagcatgagcacgtagggaagcgcgtaaaaatcagcgttgaaattctggactga

SEQ ID NO: 148337 - DNA, 555 bp, Enterobacter cloacae
atgggtgagcatgtacgccagtcagcaccgatagcgaagattagaatcttcccgagtttcgtgggtttccccttaccgtcggcgctactgataggtgctgggctcctcaatggcattttgtggggcttggctgcatttgtcgttcacatagtcctcaagcggtacatctacagagaataccggagtttgccatatccgatgccaaccagctcaaggcctatggatgatttgaacgagctccttgtaaaggggattccggagaccttttttcaacagcttgacgcagcttgcggctctgctatgtcagtacaaataacctgcccaaagaaataccggctgctcaaaatgtcgttgaatcgctatgccaaccgagctggttgttacccgcagttcagggaaggggatgagatagcgattgaggtaacacaaccaaggcttggaagtcttgacgaactgcaaaggggcgatgccaaagagcctgaaattacatccacctcagaccaggaagaactaaacactaccaagcgagagaagagaaagatcattctggactga

SEQ ID NO: 148338 - DNA, 429 bp, Enterobacter cloacae; identical to SEQ ID NO: 101161

SEQ ID NO: 148339 - DNA, 1185 bp, Enterobacter cloacae
atggtgacaagaaggatagggcgtgccccccttcttatgctggttggtctcatggtcgcagctcctgcggcctttgccagtgactttgtgactggcgtagttgtggggcaaatgctctcagatgactcaggcagcaagaaggtagagaacactggccctgagagtaaaacggtcattgattaccatgatggtcagccggttgtaaccagagtggaggcctttaaaaataacaaatggcgcaagatggatggccctcagggaggctactttgtttgtccaggtgaatatcgtagttatgcgggaaggctgcgttgtcgcgtcaatgatgatggcttcaatggttttgtaggagggatgactgatgctcaggagctaccgctccaagaggctctgagcaaaatggaaggtaaacctatctccctgcaaaccatcgagatccacgacaacaacttggcagtcaaataccaattagcgccaccagcacaaacacacattaaaactcaggacctgggggtgattaagcaagaagatgaagtgcagaaggctgcctcccagcgaacagctccggccagcttgagcgtttcaaagactgagcctaagcaggggctcgcaaccaacaacacggacagcaagaccagtgcatatcaaaatccatttgagcgcgccagtgactccatgattagccttctggatagcactttgatgaaagtgttggctatagcaatgctcatgttcggtattttatcgggaattatgaggcagagcctgtcggccttagtggtggggataatgcctccaataatgatgatgactatcccatcatttattagccccttgcttagcaatgctggcacaaccagcaccaatccagttgaagagagcggaagttcgtttcccttcttcttggtgttagtggtgccgttggtgattttctttgtctatagggttgttacaaacaaccggagcgactccgaaattgaggcgttgttaagagaagcccgacgtgctgaaagggctgaacgacaaagtaatgagcctccatcagtagatgaactccgcgagcgtcagcaacaaaacacagagagagaaccggtggtcgtcagctcgtcagctccagcaccgaaagcacaaaaagaagtgccaatcgaagttcaacagggcaagcgcaaaattattttggattag

SEQ ID NO: 148340 - DNA, 933 bp, Enterobacter cloacae
atggaaaaagcgattcaaagatacttggctgatgaccggcaatatcaagacagggttgccgtggccatcggcctggttgaagagaaaggcgctgagtacgaagctctttgccaacagagggctcagttggggtcctggcaaaaaattataacattccggcagtttcgtaggcacatcgccgctatacgttctgcactgaaaggacataacagcgatttgcggtatttgcgccgagggagaggccagctaaaagatgaattggtttctcgggtcgtgaagcaagcgattgatggtagccagttcttggaccgaatcatccatgctcaggaacggcttgatgccgcatctcgactccacaagagcaacacgcgactggtggacatggggcaaaaagccttaaacgaaatccgtgaggcttcttccagtgtttcgtcagcacaaacaatggaggtgctcgatcttgtgactgacaacaaggggatttccgtcatgtcgtcgatgtccagctcatcggccagcagtgaaatagatgatgcgaagagagcagtcaaagccttctcaagtgcgctgggagagcatcgtgacatcgtgggctctctacctcactcaatgtcaacggagtttatcgatctgggtatggactttgccggtttgaatgatggcttcgacttggggagcgtcttttcgctgttcagcttgtcgtctgccagttcgtctctggacaaagtagagtcttgcgttgaattactgatgccaacattaaagcgagctgtctccaattcggaagcagagtatgcccgtgctaacgaagagttctttggtctaaaacggcaggcctgtatccaggtatatgagctcttgctgacaaatgatgtagaggtgtcagtcaaacattttgagtcagccgtggatagctacagagttgggaattga

SEQ ID NO: 148341 - DNA, 729 bp, Enterobacter cloacae
atgtttgatacgactttatcttgtgtgaatgtcgctcttttttgcgccgcaaacagtatcatgtgggtgcagagcaggttcgttaaaatatctccaaattcccctcccttgtggattgtgctaatgagtccagacacaacctatccggtggtgatactcacaatgctggcaatgccgggaatagaattaatgaatggtgctgagtttaacgtctttatgttgagcatctttgtcattatcggactctttcacttgctggcccggcagggaaagtcaaagggggcccgacttgacttggttggactcgacccgatgctttcctggtggctagaccggcaaggtaatgtctacccccacctgatgagtggcaaagaaggtgttcccgccctgtgttgctccaaggattcagccgaactcctgcttagtcagtttctggctttcggctctcagttcgataaccccatcaatgtccgcactccgttcaagctccttcgtttgataaataaattgaccagcaagggatggcttgttgacaccttaccttcgacacgaactccttttcttatacgagcaattctggtgctacgccgtcgaaccgcagattgttcttgcaaagacaaatctcggaaatgccttaaaaagaccccttttccctggcgagcacagtggaaacagtgcgccatgcttcatgctgctgttttatatcctccggcaataagccgtaactaa

SEQ ID NO: 148342 - DNA, 342 bp, Enterobacter cloacae
atgaaacatgtactgaatatcgcgctgatggctgttgttgttcttggcctggctatgcttgaggataccaactggggttacgcattgctcgctatcccgacagtgatttgggcaaagccagcgcttaaccttctgcataaactgccggttctggcaactgcattttgggttctggttgctgttttcgcatggcaaggggcgcttgctggcatcctgttttatggcgtacttgccactcctaaagcaccagccccagcacacaccaaaggcaagaaaaaccgcaaagccaacctgatcggcacgtatagctacgactttaaaaccggcgaatgctttagctaa

SEQ ID NO: 148343 - DNA, 195 bp, Enterobacter cloacae; identical to SEQ ID NO: 101167

SEQ ID NO: 148344 - DNA, 513 bp, Enterobacter cloacae; identical to SEQ ID NO: 148261

SEQ ID NO: 148345 - DNA, 1752 bp, Enterobacter cloacae; identical to SEQ ID NO: 26691

SEQ ID NO: 148346 - DNA, 363 bp, Enterobacter cloacae; identical to SEQ ID NO: 59977

SEQ ID NO: 148347 - DNA, 354 bp, Enterobacter cloacae; identical to SEQ ID NO: 59978

SEQ ID NO: 148348 - DNA, 261 bp, Enterobacter cloacae
atgcagacagacctgtatccggcatgtctgctggttaccagcttccgggaaaatataatgagcctgaatcctcgcgacttaacgcagggcggtcaggtcgcttttatgcgcctgaaaatgttcctgcaaataaataacctgatttcttattacgttattatggggacggtattatttggtattgccgtactgctgatgcgtatgagtattcagaatctgaccaaggggtctgagggccaatggaacgaaaacgtacgctaa

SEQ ID NO: 148349 - DNA, 738 bp, Enterobacter cloacae; identical to SEQ ID NO: 77298

SEQ ID NO: 148350 - DNA, 561 bp, Enterobacter cloacae; identical to SEQ ID NO: 77299

SEQ ID NO: 148351 - DNA, 2898 bp, Enterobacter cloacae; identical to SEQ ID NO: 77300

SEQ ID NO: 148352 - DNA, 1362 bp, Enterobacter cloacae; identical to SEQ ID NO: 77301

SEQ ID NO: 148353 - DNA, 612 bp, Enterobacter cloacae; identical to SEQ ID NO: 77302

SEQ ID NO: 148354 - DNA, 777 bp, Enterobacter cloacae; identical to SEQ ID NO: 77303

SEQ ID NO: 148355 - DNA, 1854 bp, Enterobacter cloacae; identical to SEQ ID NO: 77304

SEQ ID NO: 148356 - DNA, 615 bp, Enterobacter cloacae; identical to SEQ ID NO: 77305

SEQ ID NO: 148357 - DNA, 360 bp, Enterobacter cloacae; identical to SEQ ID NO: 77306

SEQ ID NO: 148358 - DNA, 996 bp, Enterobacter cloacae; identical to SEQ ID NO: 77307

SEQ ID NO: 148359 - DNA, 636 bp, Enterobacter cloacae; identical to SEQ ID NO: 77308

SEQ ID NO: 148360 - DNA, 465 bp, Enterobacter cloacae; identical to SEQ ID NO: 77309

SEQ ID NO: 148361 - DNA, 2592 bp, Enterobacter cloacae
gtgaaaaaatttctgaacgtactggaaaatctgcagaacgccttccggatgccggatggcgcgtcggagatgacgcgcaatctggccagcctggactttccgcagctgaccagcgtcctgccataccgtgactatgaccgtgacagtgggctgtttgtgaaccgcagtacggtgggttttctgctacgtgcagagcctcttatcggcgctaatgaacagattgtgtatgtgctggaagatctcatcaaaagcaagctgccgcgtaagacgccaatatcgttccacctggtctccagcaagctgatcggtgatcagcttgaccggggcctgtctgagttccgctggcaggggaagcatgcggacaaatttaaccgtatcacccgggcatattatcagcgcgcagcgcagcagcagttcaacagcccgaccggcctgccgctgaccctgcgtgactaccgtctgtatatttcttactgcgtgaaggcgaagaagcggacggcggccgtgatgacggaagtcgctcataccctgaaagtgctgcgttcttctctggacgcggcaaaaatttacacgcaggcggccgatgaccaggagctggccacactggttcacgggatgctgaatgcccgtcatgatcagctgtacccggatgaggttcgtgtcggcaaatttgatgagctgcatcagcgctgtgttgaccagcgtatcggtatcgatgtgcgtccggatgatgtcctcatcagtcttgccgaccgtcagggcagcgtgacctccacgcgggccatgaacttcatgctggagaacaacccggatatgttcatgctgtggatggggggcgataacctgtccaacctgctcagcccggacctgaccatcgccagcccgttcgtcatcacgatggtgatggaggccgaagaccaggtggcgacgcagggagaagccacgcgcaagtatctcgaccgggagaaaaaagcaaactcgccctatgccaccctgtttcccagcgtggccaaacaggccaaagaatggaaggaaatccgcgagcatcttaacagcaaccagacctgtattgtccgctattactataacgtcaccacgttctgtccggatacggatgaggatgcgctggtctgcgaacagcaggtcattaataccttcaagaagaacggcatagatctgttttccccgacctatatgcagttccgtaactggatagcgatgatccccttcattcatgcggaagggctctgggaagacatcaaaatgggcggagccacttgccgggcggagagtatccaggccgtgaacctgctgccagtagtggccgacaaccggttgtgtcaggggggattgctgacgccatcctaccgtaaccagctggcattcctcgatatctacggcgacgggatgggtaacaccaactacaacatggcggtcaccggcacctcgggggcaggcaagactggtctggtccagcctatcctgcgcagcgtgctggattccggtggtatcgcctgggtgtttgacatgggggacggctacaaatcgttctgtgagaacgtgggtggcacgtaccttgacggtaagtcactcaaattcaatccgtttgccaacatctccagtatcaatgagtccggggaacgtatccgtgaccagctggctgtgctggcaagccctaacggtacgctggatgaagtccatcacagtctgctgctgcgcggggttcaggaggcatgggaagcgcacagggaaaaagcccgaattgaccacgtagtgcagaagctgacgaccatccgtgaggatgataaataccagaactcaccgagtatcaccaaccggctggatgaaattatcgaactgctcggtaagtactgctcctggggaatttacggcgaatactttaacagcgacgagccgtcactgaccgatgatgcccgctttatcgtcctggagctgggggggctgcaggacaagcctgacctgctggttgcggtaatgttttctctcatcatctacatcgaagacaaaatgtaccgcacgccgcgcagcctgaagaaatgttgcaccatcgacgaaggctggaagctgctcaactttaaaaatgagaaggtcggtcagttcattgaaaccggctaccgtacggtacgccgccaccgtggcgcgttcatcaccatcagccagaacatcaaagactttgacgccgatgatgcttccggagctgcaaaagcggcctggggtaactcagccttcaaggtgatcctcaaacaggatgcctctgagtttaagcagtataaccagaaccgtcccaaccagttcagcgagctggagcgtagtgttatcggcaagttcggtgatgccaaagaccagtggttctcctcctttatgctgcgcatcaacgatacctgcagtttccatcgtctctttgtcgatccgctcagtcgagcgatgttcagttcaaagggtgatgacttcgagtttatccgccagtgccgggaacaaaacatggatatccatgacgctgtataccagctggcacaacgtaactttcctgatgagatgcgcgaactggaagcgctcgcggaggctgcatga

SEQ ID NO: 148362 - DNA, 615 bp, Enterobacter cloacae; identical to SEQ ID NO: 77311

SEQ ID NO: 148363 - DNA, 225 bp, Enterobacter cloacae; identical to SEQ ID NO: 77312

SEQ ID NO: 148364 - DNA, 1362 bp, Enterobacter cloacae; identical to SEQ ID NO: 77313

SEQ ID NO: 148365 - DNA, 741 bp, Enterobacter cloacae; identical to SEQ ID NO: 77314

SEQ ID NO: 148366 - DNA, 564 bp, Enterobacter cloacae; identical to SEQ ID NO: 77315

SEQ ID NO: 148367 - DNA, 306 bp, Enterobacter cloacae; identical to SEQ ID NO: 77316

SEQ ID NO: 148368 - DNA, 360 bp, Enterobacter cloacae; identical to SEQ ID NO: 77317

SEQ ID NO: 148369 - DNA, 234 bp, Enterobacter cloacae; identical to SEQ ID NO: 77318

SEQ ID NO: 148370 - DNA, 450 bp, Enterobacter cloacae; identical to SEQ ID NO: 77319

SEQ ID NO: 148371 - DNA, 384 bp, Enterobacter cloacae; identical to SEQ ID NO: 77320

SEQ ID NO: 148372 - DNA, 456 bp, Enterobacter cloacae; identical to SEQ ID NO: 77321

SEQ ID NO: 148373 - DNA, 531 bp, Enterobacter cloacae; identical to SEQ ID NO: 77322

SEQ ID NO: 148374 - DNA, 834 bp, Enterobacter cloacae; identical to SEQ ID NO: 77323

SEQ ID NO: 148375 - DNA, 348 bp, Enterobacter cloacae; identical to SEQ ID NO: 77325

SEQ ID NO: 148376 - DNA, 405 bp, Enterobacter cloacae; identical to SEQ ID NO: 77326

SEQ ID NO: 148377 - DNA, 375 bp, Enterobacter cloacae; identical to SEQ ID NO: 77327

SEQ ID NO: 148378 - DNA, 204 bp, Enterobacter cloacae; identical to SEQ ID NO: 77328

SEQ ID NO: 148379 - DNA, 354 bp, Enterobacter cloacae
atgaagtggcgttactcgttgcgctggagactgccccggacaccatgtcccggaccgcaggaactggtgtcagaagtggtggaggccgggaagcccgctcctgaatcggtgatggcccgctgggtggcaggtgtcgggtatgcggtgtgtgtggatttcctggatgacaggcagatcaggcgctggagcgatgagcggaaagcggctacccgcagacgaaatctggagcgccgcgtaaaccggatcgcgccactgtttgctgatgagcttatcgagcgggaactggaaacccgaccggagtattttcagggaaagaccatgaatatgcctcccaaaggagcggagtcatgctga

SEQ ID NO: 148380 - DNA, 729 bp, Enterobacter cloacae; identical to SEQ ID NO: 77330

SEQ ID NO: 148381 - DNA, 432 bp, Enterobacter cloacae; identical to SEQ ID NO: 77331

SEQ ID NO: 148382 - DNA, 2034 bp, Enterobacter cloacae; identical to SEQ ID NO: 77332

SEQ ID NO: 148383 - DNA, 309 bp, Enterobacter cloacae; identical to SEQ ID NO: 77333

SEQ ID NO: 148384 - DNA, 555 bp, Enterobacter cloacae; identical to SEQ ID NO: 77334

SEQ ID NO: 148385 - DNA, 165 bp, Enterobacter cloacae; identical to SEQ ID NO: 77345

SEQ ID NO: 148386 - DNA, 972 bp, Enterobacter cloacae; identical to SEQ ID NO: 77346

SEQ ID NO: 148387 - DNA, 1827 bp, Enterobacter cloacae
atgcgactcagaaaaataaaactgacaaatttcaggggctacagaaacacaacggaaataaacattgatgagggaatgacgggtattgtcgggcgtaatgatttcggcaagtccaccattcttgaggctctggctattttttttgaaacggaagggatgaaggctgacagaaatgacatgaactgcttcagcctgagggaaggcgcgagccgttttgaaatcgcgtgcgagtttgatgatctgccggagtctataattatcgacgaacgcgtgcagaccacactcgcctctgaacatctgctcaataaagacggtaatttcgagatcgtaaaatcctttaaagccacaacgacaggtaaacctgaacaaacctgcatccgctgcatgcatcctgcgcacgagcccctgagaaatttaatggggatgaaaatggcggagctcagggccgtgggaaaagccgttgaagaaaatgtggcagataaacgcacggcatccttatggcgccaggctatcagggaagccgccgttccttatgactgcgcggaaattttactggatgtcgacaaggagtttggtaccgacacaaaatcgctgtggggcaagatcctcgatttactgcccacgtttgcgctctttaaagccgacagggagagcagcgacggggattccgaagccaaaaatccccttcagcaggcggtgaaggatgctcaggctgcactgcaggataaaatcacagcgcttgaaaacgaaattcaggacagtgtgctggatgtcgcccggcgtacgctggataaattacgggaaatggcacctgaactcgccagtgaactgacgccacgatttaaggagaaaccgaagtggaccttcagtttcaccctggacggggaaaatggtatccccatcaataagcggggtagcgggataaggcggctaattctgctgaattttttcagggctgaagccgagaaaatggtggcgaatacgcagcgaaatgtcatttacgccattgaagagcctgaaacatcccagcatccgaactaccaggttctgctgatgaaagcgctgctggcgttagcctgccagccacaccgtcagattattgtcaccactcatgtgccggcacttgccggactgatccctgtcgacggtgttcgttatgttacccgggatcggtcaggagaacctgtcgtaaaaatgcctgatcacgcggtactgaaggaagccacggaaagcctgggagtgctgccggaaaccggcatggaacgcgcgaaaggcattgtgctggttgaaggaaaatcggatgtcaccttcctgaggcatgccgcacgttcactgaagcagtccggtgtactgcccgcctgcctggaagatgtcagcgttgtgcctgttctgataggggggtgcgggagtgtcaagcactgggtcaccttaaacctggccaacgatctgggcctgccctggtgcgtatttctggactccgatacgggcggagatccctctcaggcccagtcaattcagaagcgaaagaaagaagtcgaggaggccgggaggatgttttttgccacgcgtaagcgcgagatagagaattatctttgcccggatctcattcatgaactcaccggcgtacaggtcacctatacggacacctgtgatgcaaaaaaaattatcggcagggcggtcggcatgaagcctgataatgtactggatacattctggccccggatgacgggggataaaatcctcgccagatccacctatcatgatggtgtgcaggaaagagtggagctgaaagagatcctgaccgaaattatctccatgacgcactga

SEQ ID NO: 148388 - DNA, 432 bp, Enterobacter cloacae; identical to SEQ ID NO: 77350

SEQ ID NO: 148389 - DNA, 1479 bp, Enterobacter cloacae; identical to SEQ ID NO: 77351

SEQ ID NO: 148390 - DNA, 354 bp, Enterobacter cloacae; identical to SEQ ID NO: 77354

SEQ ID NO: 148391 - DNA, 1293 bp, Enterobacter cloacae; identical to SEQ ID NO: 77355

SEQ ID NO: 148392 - DNA, 198 bp, Enterobacter cloacae; identical to SEQ ID NO: 77359

SEQ ID NO: 148393 - DNA, 561 bp, Enterobacter cloacae
gtggcctataaattcacgtcaggtaaatttaattacaccgcttatcgtatttcagacaagaaattctacaacctgtcggataccggcagcagggccggactggattatccgctgccggtcaccgcaagactcagttcacctttcaacccggcccgccttaatcctgtgtcggggaaggtcagtccgcataatggtattgattattcaatgccaatgaatacgaaaattgtcagtgttatcaacgggaaagttacccgggccgaatacaacagcaccatgggctattttgttgaagtgtccggcaaagacaatgttaaaacgcgttatcttcatctcagtaaaatcctcgttaaaaaaggaacgtcagtttcccggggaactgctatcgcgttgtccggtaacagcgggcgctcatccggtcctcatcttcattatgagctggtcattaacaataacccggtcaattcactggctttcagggcggcagggcctgcggataacaataaactcgaacagcacgcgtacgcccatgcccgtgactatgggcgatatctggactga

SEQ ID NO: 148394 - DNA, 1818 bp, Enterobacter cloacae
atgcagttaaaaacgtcacgacgaacatttctgaagggattaaccttctctggcgtagccggaagtcttggcgtatggagctttaatgcgcgctccaccctgagtctgccacctgcagcgtccctgcagggcaccaattttgacctgaccattggagaaacggcagtaaacatcacaggaagcgaacgtcaggccaagacgatcaatggtgggctgccggggccgaccctgcgctggaaagagggtgataccatcaccctcagagtcaaaaatcgccttgatgaacagacgtccatacactggcacggcattattcttccggccaacatggatggtgtgccggggctcagttttacgggtatcgaaccagatgatacctacgtctataccttcagggtcaggcagaacgggacgtactggtaccacagccactcagggctccaggagcaggagggggtttacggtgccatcattattgatgcccgggaaccggagccctttgcttatgaccgcgagtatgtggtgatgttgtctgactggacggatgaaaatcctcacagcttgctgaaaaaattaaaaaaacagtcggattattacaatttcaataaaccgaccgtggggtcttttttccgggatgtgaacaccaaaggtctgtcagccaccattgccgaccggaaaatgtgggctgaaatgaaaatgaacccgactgacctcgccgacgtcagcggctatacctacacctatctcatgaacggacaggcgccactgaaaaactggacagggctgttccgccccggtgagaaagtacgcttacgctttatcaacggctcggcgatgacctatttcgacattcgcataccaggcctgaaaatgacggtggtagctgcggatggccagtatgttaatccggtcaccgtggatgaattcaggatcgctgttgccgaaacctatgacgtcatcgttgagcctcagaatgaggcctataccatcttcgcacaatcgatggatcgtaccggttacgcacggggaacgcttgccacgcgagagggtgtaagtgctgccgtccccgcactcgatccgcgtccattgctgacaatggatgatatgggtatggggggaatgagccatgatatgtcagggatggatcacggccagatggcgggaatggataacagcggagagatgatgtcaatggacggctccgggatgccggacagcgcggcaccctccacgccaatggatcacagcagtatggccggtatggatcattccctgatggctggaatgccgggaatgcagagccatcctgcgtccgaaaccaataatccactggttgatatgcaggcaatgagcgtctccccgaaattaagcgatccaggcatagggcttcgcaacaacggtcgtaaggttcttacctatgccgatctcagaagccgctttgaggatccggatggaagagagcctggccgcaccattgaactgcatcttacagggcatatggaaaagtttgcctggtcctttaacggtatcaagttttcagacgccgcgccggtggtgctcaaatacggtgaacgactcaggatcacgctggtcaatgacaccatgatgactcaccctattcacctccatggtatgtggagtgatctggaagatgaaaacggtaatttcatggtgcgtaaacataccattgatgttcctcccggaacaaagcgcagttacagagtgacagctgatgcactgggccgctgggcttaccattgccatctgctctatcacatggaaatgggaatgtttcgtgaagtccgggtggaggagtaa

SEQ ID NO: 148395 - DNA, 894 bp, Enterobacter cloacae
atgcacatgaaaatgaatacctgcgccatatctgtgcttgcagctggtttgattgcatcacctgtcgcgtttgctgcgggaacgcccgccgacccgcactccgggcatgatatgtccactatgcagatgtcagccgatgccggtcttactgaaatgacggccatggagcccgtggtcactgagagcagaacgcctgttccgcccgttaccgaagccgatcggaaggctgcgtctggcaatttaaagggccatgctgtccatgacagcgcaattaattacctggttcttctcgatcagcttgaatggcagcgttcagacaaccggaataatttcaactggagcgtgaacagctgggtgggtggtgatatcgaccggctgtggatcaagagcgaaggtgaacgaagtggtggagagacggagacggcagaagcccagtttctctgggggcacgcagtaggcccatggtgggatttggttgccggtataagacaggatttcagaccgggatctgcccggacgtgggctgccgtcggtttccaggggttagccctttacaactttgaatccgaaatcacggggtttgtcagtgatggcggaaaggccgcccttcgcctgggaggagaatacgacgttttactgactaaccggctgatactgcagccatcctacgaggtgaatatctacagccaggatgatgaatcgcgggggcggggcagagggatatccgataccgaacttggtctccggctacgttatgaagtccggcgtgaatttgcaccttatattggcgtttcctggaatcagctgtacggaacaacgtccgacatggcgaaaagggaaggcgaaaaagacagtcagatagtattcctggcgggcgcaagaatctggttttaa

SEQ ID NO: 148396 - DNA, 381 bp, Enterobacter cloacae; identical to SEQ ID NO: 77364

SEQ ID NO: 148397 - DNA, 930 bp, Enterobacter cloacae; identical to SEQ ID NO: 77365

SEQ ID NO: 148398 - DNA, 681 bp, Enterobacter cloacae; identical to SEQ ID NO: 77366

SEQ ID NO: 148399 - DNA, 1401 bp, Enterobacter cloacae; identical to SEQ ID NO: 77367

SEQ ID NO: 148400 - DNA, 435 bp, Enterobacter cloacae; identical to SEQ ID NO: 77368

SEQ ID NO: 148401 - DNA, 426 bp, Enterobacter cloacae
atggaaatcaagattggtgaacttgccaggcggacaaaatgcgaaactgtcactattcgttactatgagaaagaggggttattgccaaagccagcgcgcagtgatggtaacttccggctctacagtgagtctcatgtcgaacgcctgcaattcattcgccattgtcggtctctggacattacgttggtagaaatacggacattattggcgctgcgggacaatccgggtcaggattgcggcgaagtcagtttactactgaatgatcatatccagcaggtggaggcacgcatagaagtattgttgcagttgaagaaacacctgtccgttttgcgcgaaaggtgttctggcacccggcaggtagatgagtgcggtatcctgcaagggctaacgaatcactcttgccatccagttcgcattccaacttga

SEQ ID NO: 148402 - DNA, 2406 bp, Enterobacter cloacae
atgagtaactgcagttcaaagggatgcggttgttcgaccataccgatgagccaacccgcttcgcaagcccagccaacagctgaagtggctcaggccgtctaccgaatcgagaacatggattgccctacagaagaggcgctgatccggagcaagttggctacattgacgggtgtgattgaccttgacttcaatctgatgcagcggacattaaccgtgcggcacgaattgccatcgttatctccggttgaacaagctttaaaagctatcggaatgcagaccgaacgcctggatagcgcttctggcgaacagacgaccaggctggtaattgccaaaatggattgtccaactgaagaggttttaatccgtaataagctttcaaagatagccggggtgacccgtctcgatttcaacctgttgcagcgcaccctgtccgtgcatcatactcctaacacgatgcccgaggttctggatgcgctgaaaactctggattttgaggctcagatacttaatacagagggaaccaccttatcttcggcagtatcggcacgggattctaccaactggtggccgcttggtgtttcattggtagctgcactggctgcggaggctgtctactggttcctgaatggcaaccattggtcagtcattgttctggcactggtcgccatcttaactggcggtctttctacctataagaaaggctggattgcacttaaaaaccgcaacctgaacatgaacgccctgatgtcaatagctgtcactggggccatgttgattggccactggccagaagcggcgatggtgatggtgctgtttgcacttgctgaagtgattgaagcaaaatcgctcaaccgtgcccgtaacgccatccggagcctgcttgatcttgctcccgaacaggccacagtgcagcagccagatggctcgtggcgggaagttgaggcaagccaggtcaccatcggcagccgggttagggttaaacctggtgagcgaatcgccttagatggcgaagtgaaagtgggacgttctacggtaaatcaagcgtcgatcactggagaaagcctgcctgttgaaaaagcaccaggtgatcaggtgttcgcagccaccatcaatgagtccggttccttcgagtatatcgttacggctatcgccagtaactccacactggcccgtattattcacgcggtagaagcagcacaaggcagtcgtgcacccacccaacgttttgtcgatagttttgcacgctggtacacgcctgtaatattcattgttgctatcgcggtagcgctaattcctccgttgttctactccgccgcgtggctggactggatttatcgcgcgctggttttactggttgtcgcctgtccgtgtgcgctggtgatctctacgccagtgactatcgttagtggcttagccgccgcagcccggcatggaattctaatcaagggaggtgtctatcttgaagaaggtcgtaaccttcgctggctggcactggataaaaccggcacgatcactcacggcaaacctgaacagaccgatttcgccgcatggggcgaagcgtcagcggccagtagtcgaagtattgctgcgagtctcgcggctcgatccgatcatcccgtgtccagagccgttgcgcacgcagcaaatatcgatggtattacgctacgtgatgttgccgagttcgtggcattaccagggcgtggagtgagtggcagcattgatggcgtaacttatcatcttggtaatcatcggatgctcaaagaactggactattgttcacctgaactggaacagcgcatcgatgcaatggaacgtgaagggaaaactgtagtcattctggtgagttcaaagggggctcaagccctgttcgcggtagcagataccatcaaggatagcagcaggagcgctatcacggagctgcatgcactgggcatcaatacgatgatgttgactggagacaaccagcacaccgcgcacgcaatagccacgcaagccgggatcgatcgtgcacggggtaacttattgccactggacaaattacacgagattgagcaactgactctgacgggcaaagtcggtatggtgggagacggaatcaatgatgcaccagccctggctcgtgctgacatcggatttgcaatgggtgcggcgggcaccgacaccgccattgagacggcggacgttgccctgatggacgatgatttacgcaaaatatcgacattcgtgcgtctgtcgcgtgtgacggctaagacgttaaagcaaaatatcgtgctggcattaggcattaaagcgatatttctggtacttactttctcggggcactcgaccatgtggatggccgtatttgccgacatgggggccagcttgctcgtggtgggcaacggtcttaggttgttacgccgatga

SEQ ID NO: 148403 - DNA, 1089 bp, Enterobacter cloacae
atgaactggaaattcattttctatgactggtatggtctgaacgccgagttattcgaggccatcaatgcggggatgcctgtcacgctgggaccgcttgtgtggttcttaagtctggtgagtaattactggactgcgccattgatgctgcttgggctgtggggatggtcgagatttgccctccttccggcccaggctaatgcggtctggtatcggttcatcatttttagcaccgccattcttcttgccttgttggccaccagtgttttgaagctgtggctcgatttcccgcgcccgactgccgtctttggcgagttggtaagcatcgcaggtgagcatgagaaaaactacagttttcccagtgaacatgcgacttattcggcgctggttgtcggcactctttggacgctggtcgggtaccgtggacaaatctctttggtactatatgctgtcctcgctggatgggcatgcattgctgccgggatatcattcccggctgatatacttgcaggctggggcataggtttgggctgcattgttattgcaagaacgctgatagcatttattgctcctgtatggcagacaactcgccacgcatcgtccttaatctggtatggagtgactttttttgctttcatcaccgatcagctaacaaaattcgttatcgttcgcatatattcttatggcgaacaggtcgaagtaacgccattcttcaatttagttcatgtcttaaacccgggggctgcattcagctttctggcaggagcagggggctggcaacgttatttcttcatcacttttggtttagctttctctgcctggctagcgtacatgcagaaaaaacagctttcacgccctgaggcactgggatatagcctgatgctcggaggtgcgcttggaaatattgctgatcgcattctgcgcgggtcagttgtcgatcttctcgacgtccactggcaagacattcactggcccgccttcaacctggctgatgtgtttgttgccgcaggcgtaacctgtctgatcatctccagtttgtatcagaccaggttagcccgaactgagaaaaagtcagacggagttatcccttaa

SEQ ID NO: 148404 - DNA, 462 bp, Enterobacter cloacae
atgctggacaagaaagataaggagctactcaggctgttacagcgcgacgttaccgtgtgtctgcaggatcttgcagcggctgtagatttaacgcctaatccttgctggaagcgtataaaacgtcttgaagatgagggggtcatcattggtcgggttgccctgttgagcaaggaaaaacttaacttatcgcttacagcctttgtgatgataaaaacacaaaaccacagtcatgactggtacaaacattttgtatctcaggtcaatggcatgccagaagtgatggcttttttccgtaccacgggagaatatgattatcttcttcaggtagtggtttcagatatgaagggttacgacagtttttacaaaaagctggtaagttcagtaagtggattgagtgatgtaacatccagtttttccatggaggaaataaaatacacaactcagcttcctctgtctggctaa

SEQ ID NO: 148405 - DNA, 948 bp, Enterobacter cloacae
atgcgcagagtgacgatatcggtattattcctgctggttgcactgacctgggggaccacatggctggccatgcgtatagccgctgaaactatccctccggtatttgccaccgggatgagatttatgtttgcagcaccatttttaatcagcattgcatggttcagaaaaacaccacttttatttccacccggacaacgtttattccagatcataatttgtgttttttatttttccatccctttctcattaatgatttatggtgaaacttatgtcagttctggcctggcatcgataatattttcgaatatgcctgtggctgttttgattacatccgttttgtttctgaatgaaaaaacaaaccgaatgcaggtcactggtttaactatcgcaatagctgcactgatgggtattcttctcgaagagacaaaaaccattacggagagccactggcagggtattcttgctcttgtttcagctgtgatcatccatgctataatatacactcaatgtaaaaaaagagactgtagcgtctctgttataacatttaatgcgctaccatgtttttttgcaggattactcctctctgctgcgggatggttattcgaaagacctcagatttcaactttctcaacgaactcaatattagcgaccatatatttaggttctttcgcaggtgtttttggtattctgtgctattttgctcttcagcaaaaggcgaatgctttccaggcctcacttgtatttcttatttttcctctgattgcggtaagtctggaaaattatatttatggatatgccatttcaacacactcaatgctacttattataccgttagctatcgggatatttctgactcttgtcttcagggaattgcctggaactgacaggctgcggggtaaattatcgataacaagcaatccgatgaataatgatgtaaaaaattcctga

SEQ ID NO: 148406 - DNA, 1752 bp, Enterobacter cloacae; identical to SEQ ID NO: 77379

SEQ ID NO: 148407 - DNA, 1023 bp, Enterobacter cloacae; identical to SEQ ID NO: 114158

SEQ ID NO: 148408 - DNA, 951 bp, Enterobacter cloacae
  misc_feature (936)..(945): n is a, c, g, or t
atgctcagcagtataaattcctttaatttctctgaaataaaaaaagaagaactccttgagtttttgaatgagaaaatatcaactaagcggggtagttacaagaagtatatagaaagagttgaaaatgtaatccatactaaaccttacacctataaagataaagtcgttaattatctaaaaatagttttagatggcgatattttcataaataaaggtgaagaactacatgttcagtcggatggcacgaactctcacaaatatcttgaaattatacttagcctattaatttcattaacaagaacagaatttatcaatccaattatatatattgatgaacctgaaattgggctacatccaaaacttagcgagaactttattgagaacataagcctgacatataaaaagtatgataaaacccatgaggaaattgagcctggaaaatattcaacaccatatccaactcttatatttagcactcattctccgagtttactaaaactcacgctaaaatctttcttacataaacagcaggttttgcatttttcaaaagaacgtgacaactcgaccaaaatttcaaaattaaactctaaatataatgacattagatttataaatatgcttagcgataatgaggcccgtctattctttagtgaatacattctatttgtagagggcgccacagaagttgaattgtttagaaattataatctgcaaaagctgtttccagtacttaaaaggttagatgtgtatgattgcgatgaagtaatgttgaaaaatataaaccccagctactcaaatgcagccatcccatttctagtagtaaaggatattgatcagattgccgttgttgacttcgaacatgaacaatttaaatttaattcgaaagggaaatcaattattaataaaatcattaagagagataaactacactatttnnnnnnnnnngcctaa

SEQ ID NO: 148409 - DNA, 1041 bp, Enterobacter cloacae
atgggaaaatacgtgcgtgagactatgaaaagatcacctttggatttactgctccttgcagcgctcacgctaggggcatcacaccaagcttgggctcaatatgacacaagatctggcttttatgagcgcaaagaagagggttggttctggtacaaggaagaaccaaaagagccggagaagaagccagaaaagcccaaaccaaaacctgtgccagaagcgaagctaacaccgccgatgcctgctgctccgctaccaagcggtccagaaatgttttcggcagaatggttccgagaaaacttacccaagtacaaagaccttgcctgggataatcctaccgttgaaaacgtcaggacgtttctctacttgcagagatttgcgatagatcgctctgaacagttttccgatgctacagagctggcggttgtgggtgatccgttcctggatgagatcactcgacgtcctgcggccacatttgcctcacaacaggttgatcgtgacgccggtaatgccaaaaacaagctgctcaaaagcgtagccgaccgagtgggaatcttcttcttctacaagtccgacgatgaatacagtgacttgcaagcaccgctaatcaagatgcttgaacaaggagaaggcttctcgatcattccagtttctatggacggcaaacctctcccgaacgggcttttcccccactacaagaccgatgaaggccatgccaaacaacttggcattgtgaccttccctgctgtttacctcgcatctccagacggtcagttcgcacctatagggcaaggaccaatgtctcttcctgagttgaatcacaggattttggtcgccgcaaaacgcaacggctgggtcacagacgaagagttcaatcgtacacgcccggtactcaacctagaaaacaacatagccgaacgcttggcctcaccagagctgggctctgacctcaagcagttatcccaagcgagcggtgataaagacaactttgtgccaccggagcaactcatgaagtacatccgggaaaaattacaggagaactaa

SEQ ID NO: 148410 - DNA, 294 bp, Enterobacter cloacae
gtgactggtagcaaatgggatgggaaaatatctaatctgaacatatcggagcaagctttccccgagctctatcgtgaactgtcccagatgcagcataaggcgcgtagtgatcggctccgcgcccttgctctattgggtctttattctcttcgattttctggcaacattgggctttttgagcaacagagttccgatattcaacctacacagcatcaaaccaagccagtgcaggctgatgaaaagctgaactctcaacgtgattcacttaaaggaaaactgatgggctccgtgtga

SEQ ID NO: 148411 - DNA, 435 bp, Enterobacter cloacae
atgttggattttgttcttttggtgtttgtgggtttgggaatatctatggtgcttgtgcgccggtcttcccggaaggggatggatctagagctgacatggttccagtcgctgaaagtcgtgctggtacgtggagttgttgcattgggtctggggtttggcattggtaggctcgccttgctggggatacagcatggcttcctgagtgagtcagttctaagagagcatactctggtctctgtggtggtagtgctgctttgtgggcttggttcgtttgttgcgtttcagtggatcgtcgggaggatctctggaagatccatcagcgcaacctccctgatcaaaaccatcatgtacgagtctggttactttgtgctgtcgatgatcgccttgttggtgatactcgtcctatttgggattgcatacgagacttttttctaa

SEQ ID NO: 148412 - DNA, 474 bp, Enterobacter cloacae
gtggcccagcttaaacataaccgcttcgtcatgttgggtgccttggtagcgactgttgtagctgccgccaatggtttgagttttatcacccttatggctggtggaataacccttctccagttcgtggcatggaagcaacaagatgcgatccagagccggtttaaagccgcgaaggatgcgtttgaagcgttgaatgtcatagcgtttgacaagcactgggtaggctcaaccgcgaaggtcgccaaggtgtcgagcacgagcactcctcccgaacgactggataagccttgggcggtgcaagttctggccgtaaccagaggtggggcgtggttcgcagtggacctgcaagtgaccggcaccgacaaggttcagatgctttacctccaccaccttagtgaaaagacagcaaagacaatgctggccttcgatctcgaagtgtatgagcgatttttcggaaaacctgatgttgcatga

SEQ ID NO: 148413 - DNA, 519 bp, Enterobacter cloacae
atgacgacgaatactcaaaacgcgaacaccaaccgggatatgtctttacgcaacatgcttgttcccgctcttttgttctacgtgatgatgacggccatgcttctgggacttgacgcattcatggatcagaccaccagcatgaacctgccattcatgccgttccttatctcgatggtgtgctttaccagtgatgcacgtcgagcgtgggactggcgaaatgggatcaaagttgtggccgtattgactgtggtagccatgctgtttgcattcgcctatcagctcgcggtcggaaagatgagtctctttggggttggtatatacccggtcacggccttccttttgttggcaatcacctgggtgattcgcgctatcggaaagacggcaccattccagttccttgggaggcacctggcgcggattggtgcatcgaagtgggtacagcgcaccgtcgcagtcatggtgctcgctggggggcttgccatcaccgtttatgcgtactggcttaaccacgggagctga

SEQ ID NO: 148414 - DNA, 519 bp, Enterobacter cloacae
atgaggttaggtattttgggggtggcagcctccctagcagcaatgctggtggttgcccctcaggtatgggcagaaaccttcaatgcgagggttgtgggcgtttctgacggtgatacagtcacggttttgactgaacgagactgtgactcaggggaagattgccagagtggcaaagtccagtaccgggtaaggctggcggaaatcgacacccctgagaagaagcaaccctacggctctaaggcgaaacaagtattgtccgatctggtgtttggtcgaatgctcaaggttgagaggatcgacaaagaccgttatggccgcttggtagccaacctttatgttgatggcaaatgggtcaatgccgaaatggtccgctctgggagtgcgtgggtatatcggcagtacgccaaaacaccagagctgttccagctagaagccgaggctaaagccgataagcgaggcctttgggcattaccggaatcagagagaactcccccttgggagtggcgaagaaagcactaa

SEQ ID NO: 148415 - DNA, 324 bp, Enterobacter cloacae; identical to SEQ ID NO: 101169

SEQ ID NO: 148416 - DNA, 426 bp, Enterobacter cloacae
atgtatctggtggtctatggtctgcgtaatgccggactaacagaatacctctccggtgtgttgaacgtgctggcagataaaggactttgggccgcgacgtttggtactggcttcctgacggctttcctctcttccatcatgaacaatatgcctaccgtgctggttggtgctctctctattgatggcagcactgcaacaggcgttatcaaagaggcgatgatttttgccaacgtgattggctgcgatcttggaccgaaaattacacctattggtagcctggcaacgttgctctggctgcatgtcctttcacagaagaacatgaccatcacatggggatactatttccgcaccgggatcgtcatgactctgcctgtgctgtttgtaacgctggccgcgctggcgctacgtctctctttcactttgtaa

SEQ ID NO: 148417 - DNA, 426 bp, Enterobacter cloacae; identical to SEQ ID NO: 59974

SEQ ID NO: 148418 - DNA, 2052 bp, Enterobacter cloacae
atgtcgccttttactgaaaaaatggtcagtcagcctgtctataccatccgttattacgaacataacctgcagtacagcgccaggcaggtgttgagtgacagttacaccatgtactgcggccaactgctgaaacaggaactggttattgcaggatgtgccgcgctgctgatcgcctttctggccacgctggccgtgtactggtatctcgggcgtgctggccgtaaacagagtgaggatgaaattatcgggggccgggtactctgcgaatcgccaaaagaagttgcccggatgatgaaaaaacgcggggaagcatccgatattcgtatcgatgacctgccgctgaagctggattctgagattcagaatatggctatgcatggcacggtatcaaccggtaaatccaccctgatgcgcaagattttaaaacagcttcgtgacaggggcgatctggtcattatctacgacaaaggctgtacgttcgttgaggacttctacgacgaatcccgggataaagtacttaacgcgctggattcccgttgcccaaactgggatttgtgggaggaatgccgctctatcgccgaactggagaatgccagtacgacactgatcccggccagtagcggtgaagatcctttctggcagggcagtgcgcgcaccatcttcgcggaaggtgctgagcgcatgcgtaaggacgaagatcgcagctacaacaaattcctgcgcacactgctggccataaagctggaccagctgcgggctttcctggccggtacgccagcctccactctggttgacggaaaaattgagaagacagccatctctatccggagcgtgctgacaaactacgttaaagcgctgcgctacctgcagggcatcgaccgtccgggacgggagaagtttaccatccgggaatggatgaaaggccagaccgataaatcgaagaatggctggctttttattacctccgatgaacagaaccacgagtccctaaagccgcttatttcactatggctcagcattgccgccaccagtcttctcgctatggggccgaaccggcagcggcgtgtctggttcttctatgacgaactggcgtcgctgcataaattgtcctcattaccgaggattatttcagaagcccgtaaatttggcggttgttttgtgctgggttttcagaacatcgcacagatggaagaaatctatggtcctaaagccgccgcgggactgtttgacctgctgaacaccaaattcttctttcgttccccgagtgcggaaattgcgcagtttgtggaaaaagatctgggggaaacccggcgtaaaaaattcaacgaacagaccagcttcggccatgagcaggtccgtgacgggatttccttcggcaaggaggaagaacgtgtcacggtggtgacctattcagacgtccagaaacttaacgatctgcagtgttatgtcaccctgcccggtgactatcccgttgtaaaactctctatgagttatgaggctatgcccaaagtggctgatgccctgttgctgcgtgacgtacagacgagtcttgatcagacacttgaggatgagattcggcggcgtagtgaagaagaacggcacaagtttgccggattgtttgagggagaatcgttaattcaggctgttccgggcggtgcgtttataccggagggtaatctttcgaatactcctcccccttctgccgacctggtggctgctgttcttgcggaagcgaacacgcctcctgcgacgtggccattgcagacaaagggtgcttccggcgatgcagataccgaaaacacggcttccactgcagttgccgctgaaggcgcctcagcctcgaccggagggactgagcgggatatcgaacaggatttaccacaggatattcccccgggcctgaacagcgacggtgaggttgtggatttcgcagcgtatgaggcatgggctcagacctcacaccagactcgcgatatgacccgcagggaagaggtcaacattaaccatgcgaaagataaaacgcatgagatggatgacgggagggaatactga

SEQ ID NO: 148419 - DNA, 5298 bp, Enterobacter cloacae; identical to SEQ ID NO: 77296

SEQ ID NO: 148420 - DNA, 567 bp, Enterobacter cloacae; identical to SEQ ID NO: 77295

SEQ ID NO: 148421 - DNA, 732 bp, Enterobacter cloacae; identical to SEQ ID NO: 77294

SEQ ID NO: 148422 - DNA, 342 bp, Enterobacter cloacae; identical to SEQ ID NO: 77293

SEQ ID NO: 148423 - DNA, 564 bp, Enterobacter cloacae; identical to SEQ ID NO: 77292

SEQ ID NO: 148424 - DNA, 237 bp, Enterobacter cloacae; identical to SEQ ID NO: 77291

SEQ ID NO: 148425 - DNA, 681 bp, Enterobacter cloacae; identical to SEQ ID NO: 77290

SEQ ID NO: 148426 - DNA, 174 bp, Enterobacter cloacae
atggtttttcagccagtttttaaacgcggggaaacacaaaaaccgccagcggcggtagaggaaaaacgtggagtgaaagttaagttagcctggtggctcagtgtcaaaattgagcttgatctgacgcaggtaatggtagaccagcaactcgaaatcatccggagtcatgcctga

SEQ ID NO: 148427 - DNA, 192 bp, Enterobacter cloacae; identical to SEQ ID NO: 77289

SEQ ID NO: 148428 - DNA, 219 bp, Enterobacter cloacae
gtgctgttgtttctccagccctaccagcggtccgaggttagcggcggcatcaggattcgcttccagataaccgctccaggctcccggcagctcaagcatgcggatggtgtgaccggttggcgcggtatcaaatacgatatggtcatatttttcccgcagctcatgattggtcaacagaccagtaaactcatcaaatgcagcgatttctgtggtacatga

SEQ ID NO: 148429 - DNA, 180 bp, Enterobacter cloacae
atgacgaagcaggaaaaaaccgccctcaacatggcaaaattcatcagggatcagtcgctgctgttgctggaaaagctgaacgagctggacatggacgacccggccgacatgtgcgaacgacttcacgaggatgcggaaaaactctggctggtaatgcggggtaagctcggggaagaataa

SEQ ID NO: 148430 - DNA, 531 bp, Enterobacter cloacae
atggcgctgtacatggtttttattgaggatgtggaagacaaagacggcgagcgctgcattatgccaaccagcgagcatctggaagacatggcggtcatggcctggcagaccggggcatatgtattccggtttgaagatcaggcccagcatctggcgatgatgaagtttatcggcatgtatcacgaacggctgaacagcgatgacaaagccacgtattacttcaccggcaaaaatccggcgtgggaacgtgataaaccgtccggaatgaagctgtgtgattatctttaccgcaaggttgagcagttcgccatcgagaacggcgtgcaggtactggacgcagggaagtacaccccggagcagatcggcgcgatgattgacgtggtgagtgagcggcacggtgagagtgcggtgaacgagaagctgaaagcggagctgatgcgagagtataacagccggtattttaacgagccggtgcccgtattgccggaggataaacccgcccgccggtggtggccgttcggcaaaaaataa

SEQ ID NO: 148431 - DNA, 333 bp, Enterobacter cloacae
atggagaagcagtacaccaatgaactgaccgcggagattctggccggaatggatcaatcaccttttactcctgaacaactggctgcgatgagcgatgaagcacgcgcgttgattgaggagcaggaggcattctgccatgcgcatccggtgacgaccatttaccgactggcggtggcgggctgtctgacccggcgcggtggtaccggcgatgagttcaatccgaaccctgaggaaggccataaaatccggctggagaacgggttgtgggtcagcgtgctgactgaaggttgtaccgtgacgtatcctgatggcacgcaagcccggattctgtag

SEQ ID NO: 148432 - DNA, 252 bp, Enterobacter cloacae
atggccttagtacagaaaaaaacgctgaatgaactggcaacaaacgccagcgatgacttcttcggtaagcgattttcagccggagatgaagttccacactcggggatctacaaatgcacgaaatgtaatcgtgaagtgacggtaaatgcccactccagagacaatacatttccgccacattacccggaaagcccgtgtaaatcaccgacgtggaaaccctatgtcattgcagacacaaaagcggaatggtga

SEQ ID NO: 148433 - DNA, 255 bp, Enterobacter cloacae
atgaactttaagcaactcatccccgcacaggactggtattttcgtcattttaccgaccagtctgattatccggtgatcgtttatcagcttgctgcatgggcactgactgaggaaggaagcattaccggccttgtggcgatatacgatccgaaagaaggcaaagcaaaactggtgacaccaccgccggtaaaagggaactatctgcaccgagatcagctgacagatgaagagctggcggcatccagaaaaccttaa

SEQ ID NO: 148434 - DNA, 519 bp, Enterobacter cloacae
atgcaaaaagtaaccgatctgtatcctcctgaaattgctcgccataagctccagaatcacttcgccggtaataccgttatgctggagttaatccagaaactaaataaaaccagcctgtgtacttttgcggcgctctgtgacggcaacgtcgtgaccacttccggctataacattacggccgatctgtgtgttaaccgtgcgtcagccgtggcccattcgcttaagcaaaaatatctgccggttacggccagaacgatttcgactaaggccgatgtaggtggtgcggtaaagcaggcggctttctgtatcgatgaagacgatcttgcaaggctgaaatcagagccggaaaagatgatgaaagagtgcgaacgtaacctgaacagccagaagcgaaccaatgctcagaaggaaatgagtcggttgtacaaggagtttggtgaagacggcatactggcgctgttacgcaatgttgcccggtcgaacggtacaccgccgccaggcgcacaccctgcaagctga

SEQ ID NO: 148435 - DNA, 567 bp, Enterobacter cloacae
atgcgcatcggttacgcccgcgtttcgacccaagagcaagacaaccaagctcaaatctctgccttgcaatcggcagggtgtgagttgatcttccaggagaaggcctctggtgggcgctgggatcgtccagagctgcatcggttgcttggccacctgcgcaaggccgatgtggtggtggtatggaaactggatcgcttgtcccggtccttgaaagacctgctgctgaccttggaaaagattgaagaagcgggcgcgggctttcagagtctcactgaatctatcgacaccacgacaccggctggacgaatgatgatgcagatcgtcggttcattcgcggagttcgagcgggcgatgctacgcgagcgcacgcggcacggtctggaagctgcgcgcaaggatgggcgcgtcggcggccgacgtccgaagctgacgcagcaacagcaaaaagagatcgtcgccctgatcacgtcggggcagaagacgggggctgatgctgcccgcttgtttcgagtccatccttccaccgttgtgcggctgctggccaagcatcggcaggggccggggtag

SEQ ID NO: 148436 - DNA, 939 bp, Enterobacter cloacae
atgaatttgctttcgcttatcctttccttgcctactgaaaacgcgaccgtccggcaacggacgtggcgtgccctcaaagcctccggcgctgcggtgctgcgcgacggcgtgtacctgatgcccgaccgcgacgaatgccgcgcggtgctggataacttggcctccgatgtgcgtgaaggcggtggggtcgctcatgtgctgcgtatggaagaccctgaaggggtcaacttcgtcgcattattcgaccgcagcaacgattttgctgccttgctggtcgatgtccatcatctcaggcagacgctgacattggataccgtgcaagacgtgctgcggcaggtgcgtaagcttcgcaaatcctttactacgctggttgaaatcgacttctaccccggcgaggctcagcgtcaagcggacagtgcgttgtgtgaactggaacaagcttgcgcccgcacgctgtcgccggacgagccgcacgctgtagaggggactattacccgcttggatcgtttggattaccaggcccgtacctgggccactcgcgcacgtccttgggttgatcggctcgccagcgcatggctgatccggcgcttcatcgacccgcaggcgcgcatcctttggttggcaacccctgcggactgcccgccggatgcgttgggcttcgacttcgatggcgcgacgttcagccatgtcggcagccgtgtcacgttcgaggtcctggcggcgagctttgggctggaacagcccgccatcacaaggattggccttgtggtgcattacctcgacgtgggcggcatccagccgccagaggccactggtatcgaaagcgtactggccggtttgcgggaaacggttgaccacgacgatcaactattggccatcgcctccactgtgttcgatggcttactggccagctttgaaaaagggaccctcaccgtatga

SEQ ID NO: 148437 - DNA, 507 bp, Enterobacter cloacae
gtggcgaaacgaggccatgccattaacactggcaaagtgcttcgtggcgcgccatggcagatcgtcatcttctctctggggatgtatctggtggtctatggtctgcgcaacgccggactaacagaatacctctccggtgtgctcaacgtgctggcagataaaggactttgggccgcgacgtttggtaccggcttcctgacggctttcctgtcttccatcatgaataatatgcctaccgtgctggttggcgctctctctattgatggcagcaccgcaacaggcgttatcaaagaggcgatgatttatgccaacgtgattggctgcgatctgggaccgaaaattactcctattggtagcctggcaacgctgctctggctgcatgtcctttcacagaagaatatgaccatcacctggggatactatttccgtaccgggatcgtcatgactctgcctgtgctgtttgtaacgctggccgcgctggcgctacgtctctctttcactgtgtaa

SEQ ID NO: 148438 - DNA, 426 bp, Enterobacter cloacae; identical to SEQ ID NO: 77381

SEQ ID NO: 148439 - DNA, 1128 bp, Enterobacter cloacae
atgctcgaagagctatgcgccagtatcgtggacagacaccaggtagccgtcgatgcctgtattcatgcaccgcatactggatctggtagtgatgaacgcaattatcacgcgcatatcctgatgagcacacgcaaacttactcaggaaggcttcaccgagaaaacccgggaactggatcagaaacacagtggagaaatcgaacactggcgcgaacactttgccgatatctgcaatatgcacctggatctggctggatacactgcccgagtcgaccaccgcagctacaaagaccaggagaatggtttagaagccacgctgcacgaagggccgaaagtcaccgaactgcgccgaaaagggattgagaccgaaatcagccgaagcaatgacgaaatcaaacagagaaatcaggctcagctgcaatacagcaaaaatatggatctgctgattgctgaaaatgagatcaaactcagcacactgaaaacagaacagcagatccaaatcaaaaatagcgctaaaacgccaccaattgacgaaaaagccctgtttgaggaaaaacagagggaaacccttggcaaagtgctaaaacgcgaaatcagcgcaaaagacgcgaatctagacctggatttcatgcagcgtaatctcaaacaagccgaaataaccctgaccaagcaccacaaacatcaaaatgagttcaatcagcagcttgcccaggagatcgtgaaaagcggactcaagcaaagtcatgacaaattgcaaagcctggtcgatcaacacaacgaattaactcagaacaaacccttactgtttggaaaaaaagcctgggaagcccaacgtgatgcgatttaccaggagcacaaaaagctgaaaggtcagcatgaacaccagaaaaaacatggtgtgaaggatttattggaaaatgacaaattcaaagaacatgcctggaagcagtaccaacaacaacatccagccaaagccaagcaataccagactctatacccatcctatcaagtcattaaaaaatgtgtggatgagatcaaagcagaacaacagatgaaactcagacaggaacaacagctcaaagcacagcaacatgcgcctaaaatgaaatctcgtggcatgagtcgctaa

SEQ ID NO: 148440 - DNA, 477 bp, Enterobacter cloacae
atgcctattttcgcttttaaattttcacgtagtgaagtacaaccgtggatacggttgtcggggtattggggagaccccaatcgtacttgcaaacgaagtttgcataagtgcgctcttcgaggaaaacattactatacatatagcaccttgaatgcatattcaagtgcgcttatgttagggatggtttcccaggatgatggtattggattaatgagcgttactgaaacactagacagcaaaatcaaagcacaggaagaaaagctaaagcagttaaaggctcaaagacaggcagcactggcaagagaacgtgctaaagagaaagaacaagctcgaaaggatgataccagacgcaaaattttaattggatcctgtatgctaaagatcactgaagatgatgaacaagccagagctaaattaattgctcagatggataagtatttaacagatgagcgtgaccgaaagctttttaatttataa

SEQ ID NO: 148441 - DNA, 1272 bp, Enterobacter cloacae; identical to SEQ ID NO: 51516

SEQ ID NO: 148442 - DNA, 543 bp, Enterobacter cloacae; identical to SEQ ID NO: 84313

SEQ ID NO: 148443 - DNA, 204 bp, Enterobacter cloacae
atgcacccacgcgagttcattgccaagcacatcaaggcaacgctggagaaggaggaatttccccctcatgcggtctcgctgggggtgaaagaagccaccttctttttcgaccgaacacccagcttcgcaaaggggaaagtgttcgatgagtgcctcaaggcggcccgtgcagtagccagggtcgcgaagaaggccaagccatga

SEQ ID NO: 148444 - DNA, 906 bp, Enterobacter cloacae; identical to SEQ ID NO: 6034

SEQ ID NO: 148445 - DNA, 1239 bp, Enterobacter cloacae; identical to SEQ ID NO: 6033

SEQ ID NO: 148446 - DNA, 585 bp, Enterobacter cloacae; identical to SEQ ID NO: 6032

SEQ ID NO: 148447 - DNA, 693 bp, Enterobacter cloacae; identical to SEQ ID NO: 36184

SEQ ID NO: 148448 - DNA, 219 bp, Enterobacter cloacae; identical to SEQ ID NO: 36185

SEQ ID NO: 148449 - DNA, 555 bp, Enterobacter cloacae; identical to SEQ ID NO: 77334

SEQ ID NO: 148450 - DNA, 309 bp, Enterobacter cloacae; identical to SEQ ID NO: 77333

SEQ ID NO: 148451 - DNA, 2034 bp, Enterobacter cloacae; identical to SEQ ID NO: 77332

SEQ ID NO: 148452 - DNA, 432 bp, Enterobacter cloacae; identical to SEQ ID NO: 77331

SEQ ID NO: 148453 - DNA, 729 bp, Enterobacter cloacae; identical to SEQ ID NO: 77330

SEQ ID NO: 148454 - DNA, 354 bp, Enterobacter cloacae; identical to SEQ ID NO: 77329

SEQ ID NO: 148455 - DNA, 204 bp, Enterobacter cloacae; identical to SEQ ID NO: 77328

SEQ ID NO: 148456 - DNA, 375 bp, Enterobacter cloacae; identical to SEQ ID NO: 77327

SEQ ID NO: 148457 - DNA, 543 bp, Enterobacter cloacae
atgaacgcacaaaactggttattgctcacctacaaggtgccacccgaaccggccaagaagcgcatcgcgctgtggcgcaagctcaaaggcatgggcgctgtctatctacaaaacggcgtctgcttgctgcccaagaccgacgatcacacccggcgactcaagatcatcgagaacgagatcaacgaaatggcgggcgattccgtcctgctggaaacggttgcgcttgatcgtgctcaggaagacaaagtcattgcccgcttcaaggcagaccgcgacgaggaatacaaagaactccttggcaagtgcgccgacttcgaggccgagatcgcccacgaaaccgaagttcagcacttcacctacgccgagttggaagaaaacgatgtcgatctgaagaagctcctgtcctggctggaaaaaatcgccaagctcgacttctacggtgccacgctggccgcagaggcagccgaacggctcaaaggctgcgaagccttgctggacgcctacgcgcaacgggtgttcgacgctcacgatgaaaaccgttga

SEQ ID NO: 148458 - DNA, 513 bp, Enterobacter cloacae; identical to SEQ ID NO: 148261

SEQ ID NO: 148459 - DNA, 1062 bp, Enterobacter cloacae
gtgctgccttcgctcttctttctgatcgcgctgtcgtggatttacattgcgttcggtgacacgccgctggtttccggcctgttctacggcatcaaacctgccatcaccgcggttgtcgtgcaggccgtgcatcggatcggctcgcgtgctctcaagaacggcctgatgtgggcgattgccgctggggcattcgtcgccatcttcgcgatgaatgtgccgtttccggccatcgtcgccggggccgcgctgatagggtatatcggcggtcgcgttaccccggacaaattcagggccggcggcgcgcatcgtgcggccgataaatcctatggccccgcgctgatcgatgacaacacccccataccgtcgcacgccctgttccgctggtctggcttgctgcgggttgccgcgatgggttgcctgttgtggctgatccccatggcattccttctcggcacctatggctgggaccacaccctgacccagatgggctggttctttacgaaagccgcattactgacctttgggggggcctatgcagtattgccgtacatctatcagggtgcggtcggccattacagttggctcacccccacgcagatggtcgatgggttggcgctcggcgaggccaatccggggccgctcattatggtggtggccttcgtcggctttgtgggggcctatgtacaggcactattcggccccgacatgttgttcgttgccggtgcggtcgcagccgcgctggtgacctggttcactttcctgccgtccttcattttcatcctcgccggagggccgttcgtagagtcgacgcgcggagatctccggtttaccgcgccgctgactgcgataacggcagcggtggtcggtgtgatcctgaacctggccgtgtttttcgcctatcacgtgctctggcccaaaggcctcgccgggcacttcgactgggtgtcggcactgatcaccatcggtgcggcagtggccttgttccgcttcaagcgaaacgtgattcacgtcatcgcggcatgtgcggtgctgggcctgatattgaagaccttgatcttgtga

SEQ ID NO: 148460 - DNA, 609 bp, Enterobacter cloacae
atgtccttcgacattaaaccgctgcctttccccgcaagtaccctaaatggtctgtccgaaaagctgatcgccagccatcacgaaaacaactattccggggccgtcaaacgcctgaacgccatccacaccaagctcggcacccttgacttcacgcaggaagccggcttcctgctgaacggtctcaaacgcgaagaactgatcgcctacaactcgatgctgctgcatgagatctacttcgactcgctgggcggcaacggcgtgttgcccgtaggcccgctgtgcgaggcgatcgagcgcgactttggcagcgtcgagcgctggcaggccgaattctcggcgatgggcaaggcgctcggcggcggttccggctgggtgctgctggtccaatcagcgcgcgacggcaagttgagcaaccagtgggccgccgatcactgccacaccttggctggcgctttgccaatcctggcgcttgatatgtatgaacacgcgtatcacatcgactatggcgccaaggccggtgcctatgtagatgcattcatggccaacatcgactggcaacgagcggctattcgctgggctagtcaccaaccctcaggaggactctcatga

SEQ ID NO: 148461 - DNA, 453 bp, Enterobacter cloacae
atgaaatggattacccgcgaacgcccgaagatcgatcgcattgcctgcccgtggctggtgacgcggttcatcgatacggatgccgagttcctctacgtcccggcaggcgacgtgctgcgcatcgctcaggagaccggcgcggtcccgtatgacattcctggagtggaactttcccatgacggtgagctttgcagcttcgatgccttcctggccaagtacgcgatggatgaccctgccctcaaacagctcgccgtgattgttcgcggtgccgatacatcccgacttgacctgacgccgcagtcggcagggttgtacgcgctatctcttggcttgtcgcagaacttcagcgacgaccatgaaatgctcaagcacggcatggtgatgtacgacgcgttctatgcatggtgcaagcactgccagagtgagacgcataactggccgccgaagatgtaa

SEQ ID NO: 148462 - DNA, 1005 bp, Enterobacter cloacae
gtgcggcaccaggtaatcctcgaaatccttgaactgacgcgagccctgcacccagatgtcgcccgagcgcagcgagttcttgagttccgacagcgcgcacagttcatagtagcgccggtcgatgccggcgtcggtcatcaccagcttctgccaacgaggcttgatgaagtcggtcggggcatcagtgggcaccttgcggacgttgtcagtgttcatgccgcgcagtacgtcgacggcgtcgagcacgcccttggcggcgggcgcggcccgcagcttgagcacggccaggaattccggcgcgtagcggcgcaaggtagcgtagctctcgccgatgcggtgcaggaaatcgaagtcatcgggctgcgcgagcttctgcgcctcggtgacgctctgggcgaaggcatcccaggacatgacggcctcgatggcggcgaacgggttgccgcccgactgcttggcgtcgatcagcgcctggccgatgcgtccgtacagtcgcaccttggcgttgatcgctttgccggacgcctggaactgctgctgatgcttgtgtttggcggcgttgaacagcttgcccagaatgcggtcgtgcaggtcgatgatttcgtcgatgacggtggccataccctcgatggccagcgcgacgagggtggcgtagcgccgttgcggctcgaacttggccagatcagcgggcgtcatctggccaccctcgcgggcgatcttgagcagccggttctggtgaagcagccgttcgatgccagtaggcaggtcgagcgcctgccaggctttcaggcgctcgatgtgttcgagcatgtggcgcgagttcggcttgacgggcgactggcgcagccaggccagccaggtcgtcttgccgaactcgcggcgcttgagcagatcatcgaggcgatgccggtgggggtctgtcagcggctcggacagcgcttcgtagatgcgccggttggcgcgagtaatggcctcggcgcagatgcgttcaatgacgcccggtga

SEQ ID NO: 148463 - DNA, 1227 bp, Enterobacter cloacae
atgacatggagaacgaccagaacacttttacagcctcaaaagctggagttcaatgagtttgagattcttaatcccgtagttgagggcgcccgaattgtcggcattggcgagggtgctcactttgtcgcggagttctcactggctagagctagtcttattcgctattttgtcgagaggcatgattttaatgcgattggtttggaatgtggggcgattcaggcatcccggctatctgaatggctcaactcaacagccggtgctcatgaacttgagcgattttcggataccctgaccttttctttgtatggctcagtgctgatttgggttaaatcatatctacgcgaatcaggaagaaaactgcagttagtcggaatcgatttacccaacaccttgaatccaagggacgacctagcgcaattggccgaaattatccaggtcatcgaccacctcatgaaaccccacgttgatgcgctgactcagttgttgacgtccattgatggccagtcggcggttatttcatcggcaaaatggggggagttggaaacggctcagcaggagaaagctatctcaggggtaaccagattgaagctccgtttggcgtcgcttgcccctgtcctgaaaaatcacgtcaacagcgattttttccgaaaagcctctgatcgaatagagtcgatagagtatacgttggaaaccttgcgtgtaatgaaagctttcttcgatggtacctctcttgagggagatacttccgtacgtgactcgtatatggcgggcgtggtggatggaatggttcgagcgaatccggatgtaaggataattctgctggcgcacaacaatcatttacaaaaaactccagtttccttttcaggcgagcttacggctgttcccatgggacagcatctcgcagagagggaggagggggattaccgtgcgattgcattcacccatcttggactcaccgtgccggaaatgcatttcccatcgcccgacagtcctcttggattctctgttgtgaccacgcctgccgatgcaatccgtgaggatagtgtggaacagtatgtcatcgatgcctgtggtaaggaggattcatgcctgacattgacagatgaccccatggaagcaaagcgaatgcggtcccaaagcgcctctgtagaaacgaatttgagcgaggcatttgatgccatcgtctgcgttcccagcgccggcaaggacagcctggttgccctatag

SEQ ID NO: 148464 - DNA, 240 bp, Enterobacter cloacae
atgcatgcccgtcacggacaacaccggctcctgcttcatatcgaagttatacaggctgccctgacggctcagcgcatcgcgcagctcactgatgaccacggactgcggggcgctctcccccttcatttcgagggcacgaacacgcagcaggaaagcgcggataagggcgacgggaaccgcattgacagcctgagcccattccgcactggcgtaagcggtaaaggcatcttcatgcgctga

SEQ ID NO: 148465 - DNA, 219 bp, Enterobacter cloacae
atgtttcactgcccgttctgcaaaaccagcgcgcattcccgcaccagccggtatctgtccgataacgtcaaacagcgctatcaccagtgcatgaacatcgagtgctcggccacgttccgcacgcttgaatccatcgacggggttattcgttcaccggtgacagagccggtcatcccggcacccgcaccggcagccaccgttaaccgtgccggtgcgtaa

SEQ ID NO: 148466 - DNA, 564 bp, Enterobacter cloacae
gtgacaacactgacactacagaaagcctttgagacctgtcaggcaaacaaaaccgcctggctgcaacgcagggaagaactgacgcaggccgaacaggcataccgcgaacagcttgccggcagcgggcacagcggccggagcctgcaaacgctgcgtgagattattgacgtgaaaaaatgggaaattaatcaggctgccggtcgctacatccgctcgcacgaggaggtgcagcgcatcagcatccgcgaccgattaaatgattttatgcaggcgcacggcgcggagctggccgccgcccttgcccctgaactgatgaattattccgggcaacatcccgccattcagcgctgcgccatgcagcactcactcgattatctgcgtgaggcgctacagctctggctgtcagccggtgaaaaaattaattattcggcgcaggacaatgacattttaacggccatcggattcaggcctgaagcggcttcgcgcgatgataatcgtgaaaaattcacgcctgcacagaacctgaattacacccgccgccgtgcagaactggccgtgcagtag

SEQ ID NO: 148467 - DNA, 144 bp, Enterobacter cloacae; identical to SEQ ID NO: 121041

SEQ ID NO: 148468 - DNA, 2505 bp, Enterobacter cloacae
atgaaaaaagtcaataaaaccatctttctgggcaagttacaccctgtagcgattggtgtatttcttgcgtttcttgcagtcaaaggcgttcacgctgaagagaatgtcgaatttaacactgatgtactcgacattaaagagcggaacaatgttgatttgagccagttttcccgggcgggttatttaatgcccggtaagtatcagcttacgctaaaggtcaataaaaccgacataccggatcagacggtagagtatttcccgcctgaagacgatccgaaagggagcgaagtttgcctcacagccgagcatgtcttacaaattggcctgaaagagtccatcgttaagggtgtttcatggtggcataacggacagtgtctggatcttcattctctggaaggcatggtagccagagccgatctgggaacaagtatcctctatctcagcattcctcaggcataccttgagtatacggccgaaaactgggatccgccttctcgctgggatgagggaattccgggcgtactatttgattacaccgtcaatgcaacgtcgtcgaaacaacaggaacagcgttccagttccgtcacgggtaacggcacgactggcgcgaatttgggtgcctggcgcctgcggggtgactggcaagcgcaatacatacgcaataccggaaatgagagtcaaaaacagcaaagctgggactggagccgggtttatacctatcgggccatcactgcactgcgggcaaaactggtgctgggagaagactatttaaattcctctctgtttgacagtttccgttttaccggcgccagcctgtctacagacgataaccagttgccgcccaatctccgcggatatgcgccggaagtggtgggggtcgcgaagacgaacgccaaagtgactatcagccagcaggggcgcgtgatttatgaaaccactgtcgcgccaggtccgtttcgtatccaggatctcaactcggcggtatccggcaagctggatgtcaaagtggaagagcaggatggcggaacccagactttccaggtcgacaccgcctccattccctatctgacgcgaccggggctagtgcgctacaaaatagcgatgggcaaaccgtctgattatgaccaccattctcaggggccaaattttgccactggcgaagcatcatggggcgtgaatagcggctggtcattatatggcggaacgctactggcaggggactataacgcgctctccttaggggtcgggcgcgatctgttgatgtttggggcaatttcctttgacgtcacgcagtcccgggctgcgattcctaatcaggacacattaagcggtaaatcttatcgcgtcagctattcgaaacgcttcgatgagtttgacagccaggtgacctttgcgggttaccgcttctcagaacgtgactttatgagcatgtctcagtatctggaccgccgctatcacaacggcgataacggtgggcgcgataaagaactgtacaccatcaccatgaataaacagttccgcgaacagaacatgagcgcgtttctgaactatagccaccagacttactgggacagggaagcgacgaacacctggaacgtttcggtatcgagcttttttgacgtcagtcggtttaagaacatcagcctgacactgtctgcctacagaactgaatatgacgattctaaagatgatggcgtctatctgagcttgtctgtgccgtggtccaacggcgcaacattaagctacaacagtcagtacagcggagacagcagtagcaatacggtgggttattaccagcgcatcaatgccaacaattattaccaggttaatgccggcagcacgactgacggccgaggtaccgggagcgggtactttacccatgatggcgatagcgcaagtgtgaccgccaatgccagctataccggcagcaaatccagcgccgcaggtctttcgctacaaggaggcgttaccgctaccgccaaaggtgcggcgctgcacagaaccaattcggcaggcggaacccgaatgctcgttgatacggcaggggtggcagatgttcccgtgcagggcatggcggggattgttcgtaccaatgccttcggtaaggcagtcgttgcggatgtcagcagctactaccgaagcagcgtgagtgttgatctggacagcctgccggaaaacgtcgatgccactcgttcagttgtgcaggacacgttaacggaaggcgcgattggctaccgtgcctttggcattcttgccggacagaagggcatggcggtgatcaaactggctgacggcagcgaaccgccgtttggcgcagaagtacgcaatggagacaacatgacaacagggattgtcgccgaaaatggcagcgtctggctttcaggtatgcgtcctggagagcgcatggacgtgtactggggcaacgacgtgcaatgttacatcgaattgccatcatcgctgccggaaacaataaaaaatctgttgttgccttgccacttacgctaa

SEQ ID NO: 148469 - DNA, 1086 bp, Enterobacter cloacae
atgacgcatgcaggccagcttcaaggaaaaattaatatacagcgtgctggtatgcaacgactgatctcgaagcataagactgacatcaatacattcctagcatatgcaggctatcgatatcaggtcgatatttccggggatggtgcagaatgtaggctcaaactgcggcatatggatcacgagaaccatctcagcggtggaagtcagcatctcagttacggtgagcgtaatgcatttgctattgtcctctttatgtacgaatgtcttgcccgcaaaccggacttgatcgtcctagacgaccccatttcctcgttcgacaagaataaaaagtttgccattcttgaaatgctattccgtcgtgacacaggggagtgtctgaaaaacctaaccgtactaatgttgacgcacgatgtagagcccatcattgatacgctcaaatcagttagacaaatgtttaacaatcaagtcatggcatcgtatcttcgttatagtgcaggaactataacggagttgccaattcgcgaaagcgatataatgacgtttgcacaaatatgcaagacagtgactgagtcaaactgcgacgatctaatcaagctgatttacctgcgccgacattatgaaattctggacgatcgcggagatgcttatcaggtgctctcaaacctttttcacggccgtgcttcacccattgactcgcgcgaaccagcagaggaaggtacaggttatcctcctatggctactaataagttccaaatcggccacaatatgatcactgagcgtattcctaattttaactactcttacatgctaggtattctaactactccagagtacataaggactctctaccaaaattgtagaactgggtatgagaaactgcaggtattcaggttgttagagccagaagttaataatcgagtaattcgcaaatttgtgaatgaaacttatcacattgaaaatgaatttatctgccaactcgatccggctcgattcgatctgatccctgaatacgtcatcttagaatgtgacaggcttcttatcccgactcaatcagccaatgatgagataggacaggagatcatataa

SEQ ID NO: 148470 - DNA, 339 bp, Enterobacter cloacae
atgaaacgtaaactttttttagctttatttctgactatttcttttggggcttcatccgccgaaaaatcacaggatttagacggggctaagtttggtgaagactggcctctaacttttgaaaaagcgtcggtgtcttgtgtgaacggtcgatatgcttttgtgtacgacaaagcaacagatgaccgctatccattgaacggcctagccattgatggcgtaaagtctggaaagcttgaggggagtgatattgatactgtctggaaagatagcccacattacaaaggcgtaaaaatacctttggatccggtaatggatgcagcaaccgcgctctgtgaatga

SEQ ID NO: 148471 - DNA, 837 bp, Enterobacter cloacae
atggctaaatttggagacggggcagcaccagctatcgaaagaatcctttcagcttatggacttagctcgcagaaagagcttggcgaaaaacttgggatttatgccaataacataagcagttggcttgccagagatagcgtgccgggcaatgtgtttgttgaatgtgctatcgaaacgggtgcagatattggatggttagtaacaggggaacttgcaaaagcaaactctccacatgcaaccctcaagggtaaagagctgtatgaagaggtcatggcttcaggtggtaaacctgttttgagacgaatccttgatgcttacggtttttcgctgcaaaaagagcttggcgatctgctcggtatatcatcaggaacgattagcacatggatacggcgtgattttttccccggcgatgtagttgttacatgtgctcttgataccggtgtttcgctggaatggttagcaaccggcaaagggcaaatgcgcgctaacaaggaaatggccacatcaaattattcaattaaaaaatcccgccttgaatctggcgagcttaaggacgctggcgcatggtatccagatccctcgatgataccgtctgactcagaggaattgatttttgttgaaggtgtaggctcctcttggcttgtcgacagttcggcttcgaacataagtaatggccgttggttaattgatatcgacggcgctcttgatgtttttgatgtaattcgtctgcccggcggaaaagtcaggttgtctaataaatctgctgaattcgaatgcaatatttcagatattactcctgccggagttgtagtgcttactttggaaaaacacgtttaa

SEQ ID NO: 148472 - DNA, 486 bp, Enterobacter cloacae
atgacaatcaaaaatttgaccgaggaaagccgtttcaccaaagagcagttaatcgacgcggcaaaattcagcgtcaatcattggaaagatgtagcagagcgctatccaaaaaacggcgattataaaattcaattggcagtatcagaaatcgcactggcagcactgaccgcgccagactacatcccgcctcacgtactggacgcaatgagcgatatgtgcgacgggggttttaatgcacaaggcatttgggatttatgccgggaatcaattatgcccccagcgccttgcccccgttgtgggactgtatcagacaggccagacggtggacattattgtcacgtcgacgccgggcaatgtggaatttgcgctaagtgcgtcccacagataaacggaggttcagggtttagcaattgtgccgaagcgcatgctgcagagataggccaaccatgcattgcagccattaagggggctgacgctaatgcatag

SEQ ID NO: 148473 - DNA, 204 bp, Enterobacter cloacae
atgaaagcgtatgcgctgcagggcgacaccctcgacgcgatttgcgcccggtactacgggcgcactgagggcgtggtcgaaaccgtcctggaggctaatcccggcctgtctgagctcggtgtgatcctgccgcacggcacggcagtagagctgcccgagaccgagagcgcggccagaaccgaaacggtgaatctatgggactga

SEQ ID NO: 148474 - DNA, 450 bp, Enterobacter cloacae
atgagtgaatttaagccctttgacgaccggctcaatggcctgattgctgccctgtcaccggctgcacgccgcaagctggccggagaagtagcaaaggagcttcgcaagtcgcaacagcaacgcatcaaactgcaaaaagccccggacggctcgccttatcaggcgcgaaagcgtcagccgctcagggctaagaccgggcggattaagcgggcgatgttccagaagctccgcacaagccggtacatgaaagccactggccgtgaaaacagcgcggtggtggaattcaccggcaaagtgcagcgtattgcgcgtgttcatcaatatggcctcaaagacaggccaaacatacacgctaagaatatacagtacactgagcgccggttgctcggatttagccgaagcgataaacaaattattgagcggatgattattgataaaatgagtctttga

SEQ ID NO: 148475 - DNA, 1167 bp, Enterobacter cloacae
atgtatttttataaataccaaaggatgagcgcacttaatgtctctatgcttcgccacggagaggttttttttgcctcacctaaggaactcaatgacatacatgaatgcaaaccgcaatttattttcagtgctgacgcagagatatggtcaagattcattgataaaatacttttaaccttgtgtatggaattgaaattaagccctgaagatgaatcagctaaatccatattatcattaaacaaacaaatactatcatcaatactcaaaggtcgaaaatcaagatccataaactatcaggatttaaataatatactcggccccgtattcagccgtgcaattattagcaatataaacttcaaagatgcggtagccgctataaaagcatttgattattatatgcaaaagcaattaaatgatgagttaaatgataactattacatatcatcattttccaaaagtgcaaaaaacttgactatgtggggccattatggtgacgccgaaaaaggatatgcaattatttatgaaactgtcgatggcaatgtcaaaattgaaagtaatttatctttgttcactaaccactgccaagatgatgatggaattactaggtttaacagctcatgtagcacaacaaccaaaataatgagtttagattataagactaagcctgtacgtgcgaatggtttcacacgtttgatacatcactttaattatagcgatcaggaagaacactatgatctttcacaagagttactttcaagacttaacaattttagtgaagaaagcattggatgggttaaatataccgattggaaatatgagaaagaattacggctacatcttcctatttatgaagaaataccctcatcacttagaagcattcgcataagcggaaaacacattaaaggtgttatttttggatcaaggacatcattgaaagataaacaaaatattctttctgcactgtaccaccttaaaaagtcacagaaagaggattgcgaaatatatgcatttcaagcaaatccgatccctaacctttataaaataaacgtcaccattttaggaagagtaataaatccagaagggcgttttattgagagactagacagtaaacacttagaccttaaaaaggaagcaatgaaaatagcagaagcaataaatttgagctaa

SEQ ID NO: 148476 - DNA, 507 bp, Enterobacter cloacae
atgacgacgctgattattgagccaaaaaaagagccgcaggatgtgcagggtgtggtgataccgccaccgggcgtgagcgagccggtaatcaaaaacaccccgttttttcctgacgtggatccgaagcgcgtgcgtgaggaaatgcgactggagcagaccgtttctcccgttcgcctgcgccgggcgattaagaccgcgatcgcggagactaacgcggagctgagcgactggcgtgaaagtcagctcgatgccggttacgccacgctggcggacgtcccgacggacaaactcgacggcgagagcgtgcgcgttttccactacttcaacgccgtgtgctcgatgacgacggccacgctttatgagcgctttcgcggcgtggatgcgaccgccaaaggggacaaaaaagccgacagcatcgacagcactatcgatgaaatgtggcgggatatgcgctggtctgtggcgcgcatccaggacaaagcgcgctgcatcgtggggcaaatctga

SEQ ID NO: 148477 - DNA, 204 bp, Enterobacter cloacae
atgaaagcgtatgcgctgcagggcgacaccctcgacgcgatttgcgcccggcactacgggcgcaccgagggcgtggtcgaaaccgtcttagaggcaaatcccggcctgtctgagctcggtgtgatccttccgcacggcacggcagtagagctgcccgagaccgagagcgcggccagaaccgaaacggtgaatctatgggactga

SEQ ID NO: 148478 - DNA, 210 bp, Enterobacter cloacae
atggaaaaaatcaccacgtttatcgcctactggctggccgtggggctggcgtatgtcggggcaatgtcccccgaaaagatggcgctttacgtgggcggcggatgcgccatttttaccgcgctgacgaactactggtttaagcgcaaaacctatctctatctgacgtctctcggactcgataaaggggctattcgtgaaatcaatcgttaa

SEQ ID NO: 148479 - DNA, 294 bp, Enterobacter cloacae
gtgaagcgcatcaggggaggcagacggcgcgggattgtcgtcagagaaaatgccgggcagcacaaaggccgtatcgagctcgccgccgatcgccagcaaaagcacctgctcgccaacagatggagcccaccatacgcgcgagcgaccggcgcgacaggtcagccagttcagccaggtggtttgcatcccgccggtctggacacgacacagcccctcgtcgtgatcgacgtcggtcacgacgccggtgcggataaggttgcggatcgcgcgggcgatttcctgcagagaatttag

SEQ ID NO: 148480 - DNA, 147 bp, Enterobacter cloacae
atggcgatcctgtcgacattccgcgcgaccagtttgtgtccgttcgtgtcgaaatgccggctgattccttatacaacaaaaaacacagagctgcagagcaggccctcactgccgataaagttgaataaaggtcggtttaggaaatag

SEQ ID NO: 148481 - DNA, 894 bp, Enterobacter cloacae
atggccgtcggtgatgcgaatggtacgctgccgacccctgacccggcgcagacgaagctcattaaccagaagcgcatcgcgccgctgaaccagttgaatgttgacccggccaataccagccagattatcgcggaacagattattcccgagaatgagggcggtttctggatccgcgagattggtctctacgacgatgaggggattctgattgccgtggcaaactgcccggaaacctacaaaccgcaactgcaggaggggagcggccgcacgcagaccattcgtatgattctgattgtgtcgagcacgtcggccatcaccctgaaaattgacccgtcggtggtgctggcaacgcggcagtatgtcgaggataaggttatcgaggtgaaagcctatgccgaaaatctgctggccgcacacctcgccgctgcagacccgcacacgcaatacctcaaaacggcggatattgacaaatacattccggtcggttttccgctgccgtggccgcaggcaacaccgccggagggctggcttaaatgcaacggcgcggtttttgacaaggtgaagtatccaaagctggctgtcgcttatccatccggtaaattgcctgacttgcgcagtgagtttttgcgagggtgggatgacgggcgcgggatagataatggacgagcgctattatccgctcaggtcggctctggagttgggatgttcatcggggggcattcagatgggaccgcatatatcccattgagtgatttcgacagcgttgtcgacaacagcccgtcatggtcacacataaataccgcagggctgatttcttcaattggtggtcaacggtcatctttcggcgctcgcccacgcaacattgcatttaactacatcgtgagggcggcataa

SEQ ID NO: 148482 - DNA, 519 bp, Enterobacter cloacae
atggcgttaccacgcaaactgaaatacctgaacatgtttaacgacggtctcagctacatgggcgtcgttgaatccgtcaccctgccaaagctgacccgcaagcttgagaaataccgcggcggcgggatgccgggatcggtgtcggttgacctcgggctcgacgacgacgcgctgtcgcttgagtggacgctgggcggcctgcctgacgtcgcgctgtgggcgcagtacgcgtcaccgggtgccgacagcgtgccgctgcgcttcaccggctcattccagcgcgatgacaccggcgaaatttctgccgttgaggtggtcatgcgtggccgtcacaaggagtacgacggcggcgagaacaagcagggcgaaagcggcacgaccaaaatcgcgaccgaatgctcgtactaccagctcacgatcgacggcaaagaggtcatcgagattgacgtcgtcaacatggtgatgaaagtcgacggcgtcgaccgactcgctgagcaccgccgggcgattggcctgtaa

SEQ ID NO: 148483 - DNA, 492 bp, Enterobacter cloacae
gtgaatggcgtcaccggcgtcagcgcctcggtctcatgggatttgcaggagcaggccaccgacgccaacctgctgaatcaggccggggtgacaacgctcatccgcaacgacggctttaaattctggggcaaccgcacctgctcggacgatccgttattcgtgtttgaaaactacacccgcacggcgcaggtgctggccgacacgatggcagaggcgcacgcgtgggcgatggataagcccgtttccgcaacgctcatccgcgacatcgtcgccggtatcaatgccaaattccgcgagctgaaaaataacggctatatcgttgacggctcctgctggtacgacccggagtcaaacagcgtggaaaccctgaaagccgggaagctgtatatcgattacgactacactcccgtcccgccgctggaaaacctgaccctgcgccagcgcatcaccgatacctatctggcagacctgtcagactcggtcaacagctaa

SEQ ID NO: 148484 - DNA, 780 bp, Enterobacter cloacae
gtgccggggctggacacgcaggaagtggcgaccgcgctcgcgtcaacctgccagagcctgcgtgcgttcgggtatgtgagcgcgtggggctgcaagaccatttctgacgccatcaaataccgtgagaatttcagccagcgcgagatcatggtgattcaccctgattttctggcatgggacaccacggcgaacgaaaccgatattgcctgggcgaccgcccgcgcgctcggccttcgcgccagaatcgaccaggaaaccggctggcacaaaacgctgtcaaacgtcggcgtgaatggcgtcaccggcgtcagcgcctcggtctcatgggatttgcaggagcaggccaccgacgccaacctgctgaatcaggccggggtgacaacgctcatccgcaacgacggctttaaattctggggcaaccgcacctgctcggacgatccgttattcgtgtttgaaaactacacccgcacggcgcaggtgctggccgacacgatggcggaggcgcacgcgtgggcgatggataagcccgtttccgcaacgctcatccgcgacatcgtcgccggtatcaatgccaaattccgcgagctgaaaaataacggctatatcgttgacggctcctgctggtacgacccggagtcaaacagcgtggaaaccctgaaagccgggaagctgtatatcgattacgactacactcccgtcccgccgctggaaaacctgaccctgcgccagcgcatcaccgatacctatctggcagacctgtcagactcggtcaacagctaa

SEQ ID NO: 148485 - DNA, 780 bp, Enterobacter cloacae
gtgccggggctggatacgcaggaagtggcgaccgctcttgcgtcgacctgccagagcctgcgcgcgttcggctatgtgagcgcgtggggctgcaagaccatttccgacgccattaaataccgtgagaacttcagccagcgcgagatcatggtcattcaccctgattttctggcatgggacaccacggcgaacgaaaccgatattgcatgggcgaccgcccgcgcgctcggcctgcgcgccagaatcgaccaggataccggctggcacaaaacgctgtccaacgtcggcgtgaatggcgtcaccggcgtaagcgcctcggtctcatgggatttgcaggagcaggccaccgacgccaacctgctgaatcaggccggagtgacaacgctcatccgcaacgacggctttaaattctggggcaaccgcacctgctcggacgatccgttattcgtgtttgaaaactacacccgcacggcgcaggtgctggccgacacgatggcggaggcgcacgcgtgggcgatggataagcccgtttccgcaacgctcatccgcgacatcgttgccggtatcaatgccaaattccgcgagctgaaaaacaacggctatatcgttgacggctcctgctggtacgacccggagtcaaacaccgtggaaaccctgaaagccgggaagctgtatatcgattacgactacacccccgtcccgccgctggaaaacctgaccctgcgccagcgcatcaccgatacctatctggcagacctgtcagactcggtcaacagctaa

SEQ ID NO: 148486 - DNA, 630 bp, Enterobacter cloacae
atgaaattttctggatacccaatttccagaagctgcgcaaagtcgcctcgggcatggcctcgcagtcacacctgcgcactacctatttttcgaccccgtcgacgctggcgcacggcgcttacccgttctggtcaggcgagctgtttaaccgtggccgcagcaaccgcgacgaacgtgtcgacatcgatatcagtcatcaggcgctcgccggtggcgtgctgtgcggtgatggacagtggcggcagattgtcaccattgaggacgcgcttgccggtggctgcaccctgtttaacctcgaccagcttaagcaggaaaacagcgcggatgacttccgtaacctgtttatgtgcgagttcgtcgacgataaggcatcggtattcccgttcgaggagttgcagcgttgcatggtcgatgcgatggaggaatgggaggacttcgagccgttcgccgaccgtccgtttaactggcgtccggtctggattggctatgacccttcacacaccggcgacagcgccgggtgcgcggtactggctccgccgctggttgccggtggcaagttccgcatccttgagcgtcaccagtggaaaggcatggactttgccgcgcaggccgaggccatccgggcgctga

SEQ ID NO: 148487 - DNA, 351 bp, Enterobacter cloacae
atgacggtgcgttatctgggaatgaacaaccagaccggcctcagtatctctgaggttgagcatatccggcaaagcgtgcgtgacattctggtcacgccggttggctcacgcgtcatgcgccgtgaatatggctcgctcctgtcgcagatgattgaccagccgcagaccccggcgctgcgtctgcagattatggccgcgtgctattccgcgatccagaagtgggagccccgcgtaaatctctcgaccatcacttttgaacggtcggagaccgacggcgggctgtatgtcgacatcaccggcacccgctcgaccggcggccagccattttccatcaccattccactgagctaa

SEQ ID NO: 148488 - DNA, 1605 bp, Enterobacter cloacae
atggacttactcgacacaccggaacgctgggcaattatcagactcgcaacgatctcgccccctaaaggcaaggggccagccagattattgttcgccactgtgactgcgcttgctccagagagaatgccgcctcctccaatggctggggttgaccggattcgcgtcaaaagatctgatgaaaatatttattttcggcgagtattacttttagaatcagaggcattggaatggtaccgttctctgagtgatggtttttctaaaactcccttaccaactcgtgaagtggacaggaatgaaaaatacgatgggataaagttttttgtcggtccattatttgatgaaaaaccttggcctcagatgagtttacccattggagagggtttattcagcctgccctctgcagaaaatgacccagctccctttattggcagtatgacatcctgtatacaccgccgattcagtagtggtgcccgggaatttgagcattttttacttgatgatcacgcctgcgcttttatagctagtcgtatgcacataaattttcgtgcctatcaggagtaccttggtagtgcgtgttatgtcagccctcaacctgtcatccgtcagattgaaaatttcataacggaagatataactaccggcgaagaatcgctgttctttcgttttgtccccagacccggtcagacagtgcaaggactccaactcactacgtttgataaggatatgaatctactgaccgacttccagacggtgtcgctgcaggaggatgggatcgtccagcagatgaaagggacatgtgatggtgaatatggatacgtactccgctctcaggaacatgggattctggctttcagtgctcccgcgcctttcctccgtagtattaatgtaggtgttggggttgctgacagaaatcagcacatcattgacgttcctatcgatgattccccaggctcaccccgtatgacttatcacgcttcacggagcacgcttcacaacaccacttcagtggtagccaataaaacagaatctctgaggtacagagcgttacggcgcgagcagcatattcggcgtgaacgaaagctccaagctgatacacaaggtcagcggtggttcaatgatgatagccgtatagacgcaatgcgctttttccattcccttattcagggagcaaaaaaacaaattatcattgctgatccctatttcagcgggcttcagttcgctcagtatttatacaaagtgagttctcctgaagtcattgtggacattctcaccacgagtaaatctttcaaaggaaaatcttctgaagaaaaggccgcagtcttcagccaaagaattgatcatcttcgccagacgcagcatataaccgttaatacacatattctaccaggcaacctcttgcacgatcgctttgtggttattgacagcgaggtctggttttctggaaattcgctgaatgcatttggcaaacaggcttccgtaatcgttaagctcccagacccgcagccaatcattgataacctcaagaaactgaagactagggggcagcctataaacgtctactttaatgtgaatacaggcgagcgattggataaggaggatgaataa

SEQ ID NO: 148489 - DNA, 621 bp, Enterobacter cloacae
atgggaagattttcatctccagtccaagtgcccgttccaagtccaagaacacttcctgctcaggcaatttattgggggtgcctgccggacggtgatcctgaacggtttccaccagacataagcgcattgcatcaacgccgcggcttaagtgcccctctccccttgtcacatttcgtcgaggcagttaaacaagctaaaaaccgagtctggataatggatagccatttcttgtcctcacccagtgataaaatcaaacaggatgattatgtgcttgatattgcaggatggtttcaccctcggattgatgccactgatatacgcattctgacatgtcatgatcctggatttgatgcttcccagcgctccatttttgatgcccttgttggcgacataaaccagaggcgcgcttccggacaaacgaagttttccttagtcatcaggcaaaaaatggataacgatttaatacatgaccgatttgcaataattgatgatgaactctggcacttcggggcgaccgtcggtgggtttcatacctctctgagcgcggtcagcaggggctggtgtgcgatagaaactggcgctgcagatttctttaatttggcctggaaggtgatggtgtga

SEQ ID NO: 148490 - DNA, 1950 bp, Enterobacter cloacae
gtgaatgaactagtggaatggcctgacattagtcgtaaaatttattcagcagtcagcgaccctgcctcttcagcggattcgtttttttcttggctgatttcgtttgatggcttactggagaatgctgtagcggatctgcagcacgcattcatcgcaagtcaaaccgatgtggaactgcttatagcgtcatggtgtgatggtaacactcaagacactgattatgagttcattgctcctctgttctgcgcgaagattcttaatctgtatccggacattcaaacttgggaaaaagtgcgcagcctggcagcgaattcggctgtcgttgagtatggattacgaaatgctatgctggcgctctgcaaacagaactctgacgttgaagaaatatatgtccaactgataacttctgtttttaacgccattgagtgcggaaagctcatcccgtcttttcaccgacaacgaaatgataatgccaatcgtctttccgcctgggcgaacactcgtgaaaagcttgaacaagtctggcgcggcatacacctggcagacccaacaggttttcaggaggctgagctgtttgcgctgctggccgatattgatttcgagaaactgatagctcttctgaattcatctgaaaacccatttttgcttgattctatcctgatggtctcaggtgcgggaatgtttacaccccggcttgaacgatggaaaagattggcagctagcgcggctcctgcgttttctgatgagggtgagtggaatgaaaatatattcctgcccctgttactttcgcacgtcatgtcaagattgcaggaacttcctcaccagctcttgaaacgagaaaaagtcccagaagaaatttttagggccgaactggaggcgttgacggaaattattgccaaaacgctaagcgttcgtccggactacgccggaattgtaacccgttggtcggcctggttaacgcgccagattctgctggatgaacggggatgcgaagatctatcccgcccgagtttcgcatactcactgctaaacgatgcattgggcagaaaagcctctgccatatccttacccgatagcagcccgccccaagcccctgcatgggaagtcctcagctattatgctgcccgttctaactatgctcatgacaacagctatcctctacaggatgtaaccatctttaatcggttatggcgtccggaatccagtgaaatcagcaaggtggcattggatcaattctcctcacgcctctcaatgttttacaggagagagggacaaccttttcctgggctcgcttcacatctgtttgccttcccacttgtccaacagggcaatacagccgaagaatggctggccttgtggaattcagcttatttaatcagggaggttgcggaattcggttttgctgattcgccttcagaaaaatatacgttacgccatcaggtaggtgagatgcttttagtgttgtgtacaaccggtattgctgcgctggaccaactcgcagggctatttaccgatgggcaacagcgctatcagcaggacgttatcgacctgcaccagcatctgtatgatgccgtgacggagatgatgactattgatgacaccatcaataccaaatactggaaggaagcctatctgcatctttgcctaaggcgtgccatctgggacaaatctttgggggatgcttcaactgaatcgctgttcgtcccgtcagaatacccgacgttcaatcaataccttcgctattatcgttctgacctgaaggatttgattgttatgctttctagctgtatgagaaacaatataagtcctgtggctctaaaagcggttcttcttgaatcagacatcgaactgtcccaaataatcgatcatataaagaagttaaatggcattgatgggcagcgttatccgctcaatcaaaaggaaatagcggacctccaccctctgctgtag

SEQ ID NO: 148491 - DNA, 276 bp, Enterobacter cloacae
atgaacacgtcaccgtggaacaaagaccgtatcatcggccaaaaaagaccacttcagatatctcatatctgggtgatcagaatcaggcttgaacttgaaggtaaaacgcgcgacctggatctgttcaatatgaccctggacagtaagcttcggggctatgatctggtcaaactcaaagtatctgatggcgcatatggtagctctgtttcaagcagagcaacggtgttgcaacagaaaaccggtagccctgcgcaatttgagataagcacatcttaa

SEQ ID NO: 148492 - DNA, 2481 bp, Enterobacter cloacae
  misc_feature (2015)..(2024): n is a, c, g, or t
atggctcatatcagcgccgtcgtaaccctacgaccaattcgattcgcattcctcgttaaacccaatgatagtaaacggttactggaaatcttccaaataaacacatgcctttggggcggtaaatttaaccctataattccaatttttggccatgtgcctaaatggtgggatagggatgactacaaacctgagagcgctttgcagatcgtcaatggctatcttgatgctttcgaacctgatttccttgtagaagctgaagcagggctggctaaagggcttggctatgatccagaccgaatactgcaactttcagccatgctaaggcgatctaacgaaccgcgaggccaagctgggcttgatgtcttcgatctatataaagatctgtataagaagcaattccaattcgtgcgtcgacatgagcacaatatcgtggaactaatacctcggacgaatgcattgaaatcgttttgtgcttgcctagccggcagcttccctgaggatgaagaccttaaatattttggccaaggattctgtgatgcttttgatcccaaacaggttgaactatctccagaagctctagcagagctgtacaatgaaggatttaattccgcactacaaatcggtcactcgaatattgagattaattatcaagaccatactgatccaacactcttcgtcatggatgcacaggactcgcgcgatctaattgactactggaatcttcgtgcagtaaggaggaatgcccgccccatcccaatccaatggctcgatgtgctttccccgtattgtagagaatacatagaacattgctaccgaccgcttcgaggaaatccacatggcgtaatgacccatgctaatgtgttgtttgcaaggtccctcacttctgctgccatcgaacaactgtatgctgactacttgcgtgtggatcgtgatggggcaaacgtccgacaagattggtaccctccaatttggcgtccgtccccacattttgccgttcgtaatacgcgccccattctctctgcaggagagaaaacgttcgacatacaaattgatgatgaccgaaccgaagttcggtttgacaatctctatccagatttcgctgagagatatgctgccagcaacgctcgctgggcaaacgttgtgagatttaaagattggttaaattcaagccgagtcgcaaccgtttttccctgtgattatcggtcaccaaagatctctcgttttcatgcgttacagggaaaaattttgtctacgactgaaggttttgttaccttttgtaagtacaaaaatatatctgacctatggcgtctaagtgatggcacaactgcgataagtgaatggctaaaaaataatggagtcgaaagccaaatctctgatgcagggcaagctacacagcaaattattaatacactcggaggcttcaggggaattagtagttttgcccatgcagaggtagtgaaacttctcaataaaatttcgcgacggcccatttcaccctcgattcaataccaagaatttcagaataaaattaaaaatgtggtgaagggtgatatatggcgaaataaaaatgcagaaactttagttgagcttggtgctgttgagcttggcttagaactaaaatgtgcaaaatgttctacttggggatggcacgcgctacgcgaactggatcatgtagtagcatgcggcctttgcctaaataagttcagctttccaacgatcgatccaagttcgagtcagttgtcccgttgggcttacaggctgataggcccctttgcccttcccgattatgctcgtggggggtacgctgcgtccctaacgctaagatttcttgccaacacatttgcaagccacgataccaccattacatggtcaaccggtcaaatactgacattggccccaaaacaaaatattgaagcagacctaatactctggcaccaacgcaaagttttcaatgggctggatcaccacgcagaactcgtatttggagaggcaaaaagctttaggggcgagaattnnnnnnnnnntgtggatgcatttgaagtcgaagatgttgagagaatgaaacaacttgctatccgcttccctggcgcaattttggtttttgcgaccatgaagcaggcaggcgatctttctccggccgaaattcagcggattacaaaactcgcttcttgggggcgtgaatatatccacgagcgtcgacaaacaagggctcctgtaatcctcctaactggcctagagctgttcgcaccatattcgctttctcaagcctgggatactgcaggtggccgccatgctgaaattggaaagggacacttcggctatacagataatcttcgcattctggccgatatgacacagcagctatatcttaacatgccgtcatatagcgaatggttacgagcaaagtgggaaaaaagaaatcagcgtcgtcaggtacgacaagctgctgcggtgcctatacgagatgctgaagatcattaa

SEQ ID NO: 148493 - DNA, 576 bp, Enterobacter cloacae
atggcactaccgattgaatacagaaatgaaagagtagaacatttagaacaagaagcaaataaatatcaagcacatgaattgtggaacctaacaaacgaggattttatgctcttaggtcaatatatacagatgtattgttttatagagctaaatatgcatagattgtttaataaacttgagtcaacgggaattattaaaacaaaaccaaaggataaggtgaacattccatatattttaggcaagctcatagcgttagtgagtgaagaccttattgagtcttctaaagttgatgaggttaaaggaaaactacaagaaataaaatatcgcagagattatagaaatatctttgcacattgggctgcaaaaagaatacctaatgaagatggaatgattttttttgcaagtgatgcccacgattataaaaaagtttttggagggaaaattaatgctaacattgctgcttatgttattttcgatgtggcagacattcgtgggttagttgtacacctcagtagctatgaagaatggatagctcatttttatgctgagatatacgagaagtatagtaaacattga

SEQ ID NO: 148494 - DNA, 603 bp, Enterobacter cloacae
atgaacacgtcaccgtggaataaagaccgtatcataggccaaaaaagaccacttcagatatctcatatctgggggatccgaatccggcttgaactggaaggtaaaacgcgtgatttagctctgttcaatatggccttagacagtaagctacgaggctgcgatctggtgaacctgaaagtatctgatgttgcatatggtagctcggtttcaagcagagcaacggtgctgcaacagaaaaccggtagccctgtgcaatttgagataaccaaagggacaagagaagctgttgctgcattgataaagcttggcaatttgcacagtaaagacttcttgtttcggtctcggatcggaactaaccggcacatatcaacccgacaatacagccgaatttttcatgggtgggtagaaaagcttggtctcgaagcttcgctttacagcacacattccatgagaagaacaaaaccttacctgatatacaagaaaaccaagaatctccgggtgatccaacttctgttgggccataagaaactggaaagcactgtccgttatctaggcatcgaagtcgatgatgcgttagagatctctgaatcgattgaagtctaa

SEQ ID NO: 148495 - DNA, 657 bp, Enterobacter cloacae
atgaataaaataactaatgaaggggctaaagtctacacgccatttacgctgaatctttatgactggtgggttctcagcatttccaataattatgcatggcgttgcccgacaaagaagtacctgcttcctcactttttacaacatttaagtttgaaccatcttgatatcggagtcgggaccggatattacctcagaagtatccccgctaactgcaacatttctcttatggatctaaattctgccagcctgagtgctgcatcagcaaaggttggggaagcgagaatccagagtaaaattatacacgatgtttttgaatgttatcctgaatcactccgtgataaatttgattctatatccatgttttatcttcttcattgccttccgggaagtatgtcagacaaaggcaccgtcattgaaaacgccaaaatggctttgactaaagatggcgttctttacggtgcaaccatcctgggtgatggagtaatacataatggttttggaaagaagctaatgactgtttacaaccgaaaaggtatcttttcaaatacccatgactctgaggatgaattgagaaaaatactttcaaggcattttgttaatgttgaagtcatcgttaaaggagttgtagctctttacactgcttacagtaagagataa

SEQ ID NO: 148496 - DNA, 831 bp, Enterobacter cloacae
atgggttatgtaacaactcgcgatggcgttgaaatcttctacaaggactggggtccaaaggatggtcaagttatttttttccatcacggctggcctctgagtagcgatgactgggacgcccagatgttattcttcgtaaataaaggcttccgcgttgtggcacatgacagacgtgggcatggtcgttcggaacaggtgtgggatggccacgacatggatcattatgcagatgatgttgcagccgttgtggaacatctcaatgtacagggcgcaatgcatgttggccattcaaccggcggtggcgaagttgtacgttatattgccagacatggtgaagataaagtttcaaaagccgtgttaatcagtgccgtaccgccattgatggtgaaaaccgacaataatccacagggaacgcccaaatcagtatttgatgatctgcaagcgcaactggctgctaatcgcgcccagttctattacgacgttcctgctggacctttttatggatttaaccgctccggttcggctccttccgaagctgttatttataactggtggcgacagggtatgatggggagcgccaaagcgcattacgatgggatcgttgctttttcgcaaaccgactttactgaagacctgaaaggaatatccatccctgtactggtgattcatggcgatgacgatcaggttgtcccttatgatgattccggtaagttgtcggctgaactggtcaaaaatgggaaactcaatacttataaaggagctccccacggcatacccactacacacgctgatcaggttaacgcagatcttcttgcatttataaacagttaa

SEQ ID NO: 148497 - DNA, 429 bp, Enterobacter cloacae
atgaagatcggagatctggcaaaagcgacgggtctaacaccttcccgcatacgttattacgaggcggaaggcctgatcagtgctcctccccgacaggataatggctatcgccattatccgcctgagaccgcattgatactcatgcttattgaccgggcacaaagatttgggttcacgcttgagcaaatccgtcaggtattacctcaggggaaaggaagctggaaccatgaaggattagttgcttctcttgaatccagggttgaggagatccgactcctacagcagcaactgagggaaaatcagaccatgatactgaatttaatcagtggcatcgaaaacaggccggagggtatttcatgccaggaaaatatgttgcgggttatgaggctgatgcaggttgatgcgccggttcttcattctattaagtaa

SEQ ID NO: 148498 - DNA, 954 bp, Enterobacter cloacae
atgcaaacgattctgggagcaagcggacagattgcccgggaacttgcccgcgagttaactcattccttcagtgctgacctaaggcttgtcagccgcaatccgcataaggtcaatgacactgatacccttatgtcagctgatttgcttgatggcagtcagaccctgaatgcggtaaaaggtagccgcattgtgtattttgcagcaggcctaccaccggattcctccctctgggagaagcaatttccggtgatgcttcagaatgcactgaatgcaacccggcaagtaggggctcattttgtctattttgacaatacgtatatgtaccctcaggacagcagacgacagacggaagacatgccgtttcagccatctgggagaaaagggcgtgtccgggcaatgatggcgaacatggtgctagaggagatgctgcggggtgagattcctgtactcattggtcgtgcccctgaattttatgggcccgggaaaacccaaagttttacaaatgctctggttttagacaggcttaaagcaggaaaaaaaccactcgtcccattgcgtgatgacacattacgaacgctcatctggacccccgatgccagcagggctttagcgctgctgggtaatactccagatgcttatggccagacttggcatctgccctgctgcgaagaaccaattacatatgcgcaatttgtttctcaggcatgcagtgtttttggaaaagagacctcatggtctgttctcaataaaatccccttatacatcgcaggtatattttctaaagggccgcgagaattgcgagagctccttccgcgctatgaagcagataatctttttgattcttcaaaatttaagtcacgtttcccggactttcgtataacaacttatcggcagggcctggaaaacttatacactgaatggaaagcaacatctgcgttaaataaagatgactaa

SEQ ID NO: 148499 - DNA, 690 bp, Enterobacter cloacae
atgattcggtctatattacatgttgttaccaatgtatctcattatgacgacccggagcataaaaccgggctttggctgtcagagctcactcatgcgtacgatatttttgcagctcacggcttcagacaaataatcgtgagtccagcaggtggccagtcccccttagaaccacgatccctcaagtggccatttttagataattctgctcggaactggcttagtgatccttccagaatggaacttcttgagaatactctcagtcctgagcaaatcgactcctctgaatatgacgcaatttatttcactggtggtcatgctgttatgtgggattttccagaaaatgttaggcttcagcaaattacgcgagatattcatgaacagagaggcattgtgtcctctgtttgccatggttattgcggtctgttgaatacccgcttatctgatggtgagcttctcgttaagtcccgtagaatcactggcttttcatggacagaggaaattctagcgggtgtctcccgtgagatgccatacaacgcgcagcaggagatgaagcaaaggggagccagatatgagaaggctttgctaccatttacccccaacgttgtcgttgacgggcgactgatcacaggacagaacccattttcagcgaagctgacagccatgcgcgtggtgtcacttctcggttattga

SEQ ID NO: 148500 - DNA, 978 bp, Enterobacter cloacae
atgaaattgattgagataacaaaaccaggcggccctgaagtgcttaaagtaagccagggcaaaataccggaatgtggtgagaacgaggttctcatttcagtaaaagccgcaggggtaaatcgtcctgatattatgcagagggaagggaaatatcctatgccggagggtgttacccctgtccctggactagaagttgctgggatcgtacatgcaattgggaaaaacgttactcacttttcagtcggggatcgtgtttgtgcgctcaccaatggtggcggatatgctgaattttgtgccgttccggtcagtcaggtgttgcctgcgccaaataacttaagccttacggaagccgctgcacttcctgaaacatactttactgtatgggccaatctttttgctctggggaaagtgaaacctggagatgttgtactaatccatggtgccgcaagcggtattgggacaaccgccctcgccttatgctctgccatgaatattaaattattcggtaccgtaggaagtgatgagcaagttctcgctctgaaaaagtacggggagatgattaacttcaggacacagaattttgaagaagagatcctgggcagaactgacgggaaaggggttgatgttattcttgacattgtcggtgcctcatatttcaacaaaaatctgcatattctgaaaaaagacggacgactcgtgctgattggttttatggggggaagggttgttaaggagtttgatattcaggagctcatccttaaaagagccctggtaacaggctcaacgatgaggagtcggaataacgcggaaaaaggagaaatagcccaacagctgatacaaaatgtatggcctttaatcgaatcaggaaagtgtaaacctgtcatacaccgggttgttaaatttgaagatgtccggacagcacatgaattacttgaggccggaaaccacataggtaaagtcattcttacccttgaataa

SEQ ID NO: 148501 - DNA, 591 bp, Enterobacter cloacae
atgcctgacttaagtggtaatgcgcgtgaagctatcaaccaacttaagggctatgcactagtgctgaattgcgcgggaccattctctgttactgcgcttcctattgcttatgatgttcgacgtattgacttcggcgatggtgagaaggatgcgatgaccattccctggggtgacgtgtccaaggcctattacacgacgggtattccagacatccaagtctttgcgcctggctcaacccgcatgatttcccgggccagaagggcaaaccatatcaggcctttgctgcaactggcgtggattcagaaactcctgaagacctttatatccagaacagtaaaagggcccggggaagaaaaacgtcagcagactccttcttttgtatggggagaggtgattaacgctagcggtgaaaaaaaaaacgcccgtattcgcactccggatggttatacacttactattacagggtcattaaccgtggttgagttcctgatggtgaatcaggttgcaggaggtgcctatacacctgcaatgttaatgggttccaatcttataacgcaacttcccgggacgggaccgctgaggattgtataa

SEQ ID NO: 148502 - DNA, 279 bp, Enterobacter cloacae
ttggaagtgacaatcgatggcgtcaagtatgcgcctgctggcggtgttttattcagtttcggaattgctatcaccacgcgcaatcgaccggaaattctgaatcgctccgttgagcagcacatgaagcatctgccaaccggtgcactactgattgttgtcgatgatggttcaaaacccgcagctgtagtgcctgacggcgtaaagctgattcgccatgaaacatcactcggcattgttgcttctaagaacgacagtctaccatgggaaaatgcagaataa

SEQ ID NO: 148503 - DNA, 696 bp, Enterobacter cloacae
atgccgagagtcgacacattagaactgttaaatgaggttaaagaaaacttagaggttatggaggcaagccaaaacttaaaaccagttaagatcaaaagcattcttgaacatttaagaagctctctagaatatgttgcaaacgacacctatgacatttataagcctcatacaagctcctctaggccaataatttatttcccctatgggaaaagagaaataatcgacaaattttttaaaacaaaaattggaataaatgacttagaaagctctgagatttatcatatatacaactctattcaaggttattccactggcgaagagtggttaaatatgatgtgcaaactaactaatgacgccaaacatagaaaaccgatttcacttaaagaagaaatatcttcagatatcacagtaagtgcaaatggctttaatcttctcacggcatccaatgtatcaactgtgatttttaaagatatcaccgtagacggcgtaaagtattcagattttcatttggaaaacggtgtattaaacgatgcagaaaacggagcaccacttaacttcacactcacaggggataaaaaaataaagttccatggtgaagagtatgaagtaattccttttcttaaaaaatgccttacagacatttatgtattcgtaaactctacatatgatgtccttgaaaaaaacgaaacgacataa

SEQ ID NO: 148504 - DNA, 2058 bp, Enterobacter cloacae
atggctactacaccaacaaacctgcccgtcccaagcgaatcacaagctgacttgaagttcaatgccgggaaagtcgacgagttcgttacctctatggggtggacttataccgatcgcttcggcaataagcattatacggttgagggcctgcgctggctggcacagcaggctatctcccagttcgggtatatcacactggacagcttcgaggacggaaataccctcacattgccaaatcaagttttgcgacttgaatctaccggcgaatattatcgttgggacggtcccttcccgaaggaggtgcttgctgactccactccagaatctacaggcggcatcggtccaggggcatggttaagtgttggcgatgcatctcttagaacacaattgggaaataatgatgggttcaggttgcttggtgagtgtccagatgtagccaccctccgtgaaacggaacccaagagcgttgggcagttgattcgggtgaaaaattactactcagacaaatttggtggtgggggcttcttccgcagtattaatcccggatcgctggtagacgatggcggtctttatatcaaaacgtccggcggagctgtgtggcgtcggtgcgtcaaaaataaacaggtcagcacagaagaatatggatgctgggatgggaatacaggatctgacaactcagcacgcctgttgaaagcatgcgcctctggtcttgacgtgaaaatgatgggggagaattataatgtcgttagcatcccttcaagtcgcttcagcctgaccggtagaatgaaagcctctactactgatttttccacggcatacggtcgtacgctcctgacattgaccggagcgaatgtaacttatgatatcgatatcgacatgcagaatttcggtgctggtggctttatcaataaaggaactgacactgttggtcgtattaaggtttcaaatatctatggtgctaaccgcacgacttatggcctccagaacgcagtaacggatgagggaacaagaaataccatttcagccattattcgaaatatccagaagggagatactggtgttgatccgcagcctgctgcattcaccgtaggtgctacagctcagcgaggaaactaccaagatgttaacatctatgacagtcaaggtggggtaatcgtcgcagccaccactgaagcggtattcggtgttatcactgccaggttgatccacgataatggaatttactgccttgatggtagtcgcgtttcgatctcagaaatggttgttgataacggactaggcgagcctgtggtaaatgccggcgggatagtaaatataggggttctacgtatcagagagtcatctggttatggcattacatactcgtacagtggaacgatgcgtatcgatgccctatatattgacaacaccctcagttcatcgattatgccaattctacgtagtcgacctgataacgtgagcagcacaatcaggataggccgcatagaggggacatgcattcttgctggagttactgcaagtattcttcattctatgttctctattacacagggtgtgacagatttattcattggcgatgtaaacctgcgagtaaattacgtaaccgggtcatatcttggcatggcagatttctcgggttgctcaaggatccagttaggtaactggacgatagatttcaacgacaccacaggtacactcacatcatcaagcatcgcttacttcactctaccttcgacagctcagctcgccggttctcaggttgggtaccagaactacaggtcaaccacagccacagtgcgaatgactaatgtcggcaacgacacaatagattttgcagttggtcaggcactacaggttaatgcaggcccctacatcagtagtgctgttacagccaactgccgcatatttcatggcgcggcaataccaacagcgggcaagtggtatagtggagataagatatttatcatcactccgggtacagcagtgaaacttggctgggtatgtacgcaaactggagatttctcaggaacagcaccaacattccagctgatggtgtaa

SEQ ID NO: 148505 - DNA, 471 bp, Enterobacter cloacae
atgccgagcttcagggagtacaagcagcagcgaccgacacgaggcctttacgacactatcacgttctaccatccatccttcggctacgtccgcctggtcgataagcagttctttccgaagacgctcagcgggcagacgtacacgccagcgcgctttgaaatcgaagagagtcagcagagcggtactccggtgattgacgctacggtgaagttagggcgtctgtcgtctgacatcaaagctctcatgaagcagtggaaaggggcggctcggctaacagctattacggccacgcggcagatcttcgacagcggcgatgtgtcggtaccgataaagtcgtggcagcttttcgtcaagacggtggatatcgatgctgatgctgcatcggtcactctgtccgttacaaatccgctcaataataatattgggagattatacgacccccgcgaatatactgggcttcaatatttatga

SEQ ID NO: 148506 - DNA, 303 bp, Enterobacter cloacae
atggaatcagaacacactggcgtaaaaatcaaaaaagttaccttcgattggaaagaaataaataaatctgaactatcaagtagctacagagtcacctgtaagataactacagaaaacggaatagaagttgagggtagttacttttaccaatggaacaaacctggagtttcaggtttaggggctttcaattgggaccagacgccggaggcaaatgcagaagtccaggctttcaatgtagccattggaagagttcagcaggtgcttcctatggttatcatgccaaacaatgcaaattggaactga

SEQ ID NO: 148507 - DNA, 477 bp, Enterobacter cloacae
atgttcgggttaatcagtttattccgcattttcaaaaataatgcgcacattctcattccttgcgcgttcatcatccttgtcgctatctgcctgtgggggctaaatgcccgcaatcatcagttaacggcgacgaacgacaggctgacacaacttaacgacagcaaggatgtgcagatcaacgacctgagggctaaaaatgacgatctggcggggagcgttaaagaacttgctggcgccgttaacaggcaaaacgtggtcatgtctgaagtcgcagaacaacgggctgagtcggccaagcagaaccgaatgctccagagcgagattaagcgctacctggcggcagataagtgcgctgctgctcctgttcctgatgccgctgttgagcggttgcgcgcagcagcagaagccgcccgtggaataccgggtgataaagcagccggccctgaaccttccggcggatctgacgtcgcgaattga

SEQ ID NO: 148508 - DNA, 201 bp, Enterobacter cloacae
atgggaaaccatatgcaaagagttagttttagacgtaatggtgaagaggttggctgcggacaatgtgaggttagggagggtcctgatcaggaaggcgtgtatgggtttatgtcagaaatagacccgggtatttactcatcatcaggaccgcttcctataaaaaaagttaaaggtgaatttatcgttgacctccctgattaa

SEQ ID NO: 148509 - DNA, 381 bp, Enterobacter cloacae
atgagcgtgaaacgttatagatacgattttcaatctggccttgttgcagacgacaaaggcgggttggtgagttatgcagattacgagaagctggcttctgaaaacgctgggctgaaaaatgccattagctgccatgccgctggatttactgtctgcgaagcttgcggggaagaaaacatatccggaaatgatgatatctgtcgtgccctgaatgaaaccccggcgaccgacgctttcctggctgaagtgcgggcgcagggtgtggattctgcgattaacacagtcatttcgatgatgaaccatcagcatcctgtcacatcaaagacaatcgacatattgcgcgtccatgcctaccagcttcgcaaaggagtgcagtcatga

SEQ ID NO: 148510 - DNA, 753 bp, Enterobacter cloacae
atgattcattttcacggcggccctattacgccggacacatgcgcgctgaaggcatggaaaggcaggcacgctttcatctccttcgctaaccccggccaaatagccttggccagcgaagtcacccagtctttcgcgctggataacggcgcattcagtttctggacaaagaatcgtgttgttgactggagcgagtattaccgcttcgttgagcgctggggtaaccatcctcgtttcgggttcgctgttattccagacgttatcggcggcaccagcgaagagaatgacgctcttattgctgaatggcctcacgggaaagtcgtaggagcgccggtgtatcactttaacgagccagacgagcgctttattcgtttgtgtcatgagttcccgcgcgtttgtatcggcagcatgggcgaatatgacgccaagcgaccaagagcgtgccgggcgaaactgcgcgacctgatacgtcacgtagtcgataaaaacggctatccaattacgaagcttcacggtctacgcatgctgaataaagagatcttctcccacgttccgctctcgtcagctgacagtacaaacgtagctcgcaatatcggtatagacaaagtgtggaatggttctccctacgcgccagcaagcaaagaaacccgcgcggcggtgctggtagaacgcattgaatcatttaactccgcaagttcgttgaattacgacgcagaacgcgatcagttcacgccacaactggcattcgaggtttga

SEQ ID NO: 148511 - DNA, 219 bp, Enterobacter cloacae
atgacgccagcaaatgaaaacgccatccgagcagcctgccgccgctgcacagaagaaatccagcaggccatgcgcaagaagccaaagccaaactggaacgaaactgtgcctcccatcatcaacaagcatcacaagaaaattgaagctctgggagttagccccctggagtttgtcgttaaaactggccgcctaaatgggcggtttggaaccgagcaatga

SEQ ID NO: 148512 - DNA, 231 bp, Enterobacter cloacae
atgagcaaatatttagaactggatcgtctagtcctcaacaaaatcggcgataatccaatccatctcattaagatttacgtccgagatgttttaaatgaatcagaatgcatagccactgcggaagggaaatcatatccctaccgcttcgtcgatcggcacctgcaagcattacgtataagcgccgttatacgcaacgtgacaagtaagctgggtgtgaacatgaatgaataa

SEQ ID NO: 148513 - DNA, 474 bp, Enterobacter cloacae
atgttagagcccgctactttctcagctattgcagcctcttgtgcagcaatagccgctgcaatcaatgcttatgtaggttatcaaaatagaagtgatgctttagataagcaaattattgactcactcacaaaaaaagcagatgaatgtaatgcaattgtcgtaagacataattataaagtgcctttaaaagaggaaaacattggagagacacttagaataatttctttgctttatctttccattgcagatattaaaagaattgataaacgctacaaacatcttctgaagtatgatttctttataaataccaacaatgtgaagaaaattaacttcaaggaatacttcgtatactccctccacccttcaatatttgaagatttaaagattgatgggaaaaataaagaattttcgaatgtcgtaccattggaaaaaatgcgatctatatcagagttctataaaaaacagttacggtga

SEQ ID NO: 148514 - DNA, 1086 bp, Enterobacter cloacae
atggcatttcagttaagacattgtgttatacatgaacttgtaaaagaaagtggaaaacagcgcgttgaggctattattaagcaggttctgcctactgatgataaatatgtgcaggaattagttaaatccctgaatgacttaattggaaagaaagaaaaccaagcagcaagaggcacttttgatcttgaggatctaacttataaagtaccgaatgcgttccaagactattacaagggaaaggcagagtctgattcatttcatacattttcaacagtgtgtatgaacgagctttctaggcaagcaaaagacccttcgagagttgccgcatccggtggagcaatagtatatgctcattatacaagtggcacctctaacttcatgcttattacaatggttaaacaaaaagaagctttacgtctagatgaaaatttaaagccgataggaactgttcaaatagacatggccaagttacaccaagctgcacgggtaaactttgatagataccatcaatatgaaacattgccagaagaagagaaacctacatatctcgccttcgtcagccctaaaataaatcaagatgcttcaggatattttgtagcagccttaggatgttcagatagtgttccctcggctaaagccactgatggtgcacttaatggggtaaaacagtacttcgaagcgaataaagaagtaacagcgtataaaaatcaagcatatgatgctgtgctaaattacttaacattaaaagaagatggcaaattagcatctcttactgaaatcgatcatgcagttagaggtacagttcctgcagaaaagcatgaacacatggataattttataacttatctcaatagtgaagaaattggacttccgttagagttttctattaacagagctgtactcggtaggcgtgcgaaagtaaaagccaagtcaaatgggtgggaattaaattttgaaaaacgatttttcggaacaactccaggatcagtaattcagtataatcgggcagataaaaaactgataatatcgaagctagacgataataccatacagaagttagaagcagtacttaaagagagagggtaa

SEQ ID NO: 148515 - DNA, 909 bp, Enterobacter cloacae
atgaaacgattccccactcgcgctgaagctgaagcccacgcaaagtatctttctcgagcactcaatatctgccggagctacgcgcaggatgtggtcgcattacgttataactgtaataattggtcggaactgagcaaagtctttggtcaatttagtgataaatacatgtctttctatggcctcccaagcccggaagataagcgtgcgtttaaccagctcctggttccgtatatcgctgaactgcagaatgccgttcattctgagagccatgtaccggaaagcctgatttgtaaggttgctcaaggccgttatccccgaatatcaggaaaagtcatgtcagccttagtacatgagtgcgaggattctccccctgagagcctcgaagacattattgatctactcgagttttatgatgatacggctagtcaggcagtagttgggtaccgtaagcagatcgcggttaataatccctggctggagccttgggtatttggtttacgcttttatgcctattaccattttgaaggaaaaatggtcactattttaagccgagagtgggatctggatattcatgataactacctatcacgtggtcgtgacagggctttttcacggccatggtttcaggattatatggtcggctatctctcctatcttgtggaacaatttattgggctaggttatgacggtacaattaagatttgttgtattaataactatagtgctctggattaccatcttgggaaaaccgagccttacgggcgtgttgggatccaacacttatacaacgtattgcttgattgcggagggaagggcaagtggacatttagtcaagatggacacaagcatgacttcggtatagagcttcagtttgcttctttggcctcattgaaaaaaggaagaaaatga

SEQ ID NO: 148516 - DNA, 807 bp, Enterobacter cloacae
atgaacaaagctggaaaaatagcgtactcgtggctgaaggctcaaagtgagaacgaaaaaattcgatttattgcacaggctctagggagtgctgagtatcaaggatttatgcaaaaaaatcagcctgaaaagcaatatgctcataacctgcctttaagttttctgaaatggtatctaccccagaagctagtggtcaattatcacggggaggagctgagtttgagaagcgtgcctgaggcgcttggagacaaacttgaaattctgcacacttggatgccaactggacagtttgcaccctcacgcaatggatcatacatcccactgggtactaactttgtttgttccgctttgatgcgcccttatcggcaaagacaacaggaagcatatctggagcagacctggcagcaagctatccctctattgcgatcacctgatgttagtaacgatgacatgttcatcgctccatggctggactatgaaccatatctaaatggcgacacggatgtgtacttcatactggatgaagcctacaaaagagtcaaaattgggatgtctggcaatctcaggcaacgcatcgacacgctgaaacaacaacacaaagctagcctgcgccttgtttctatcatccctgcagggggcatggagacagaatctgcgttacatctttattttaaaaagcacaggttagacgagaagggacttggccgggagtggtttacttattcggatgaattacgcgagtttattgatactttgaacacttatgcgatcaggagtaactgccttaaagcttatggaattatttga

SEQ ID NO: 148517 - DNA, 279 bp, Enterobacter cloacae
atgcgccttttaatgtcagtgacgctgcccccggccaccaacgcatcaatattccagcgtcagcatgcgatgataacaagtaagcaaggcatcagagggggctggctctctcagcagcttcttaatgtgatcatagaaatgttaaccgcactaatgaaatgggtgttacaaaatgtaacactcattgattatgaccgtcaggccttgcgtcatggatatgtagtaaaaatccgaaagtgccaggaaagaatattaaagagcaaaaaagaacacgcctaa

SEQ ID NO: 148518 - DNA, 195 bp, Enterobacter cloacae
atgagcctctctgcggcaattccgtgggaaaaacgcatgatgctcatgcttgagatgatggaactgcatgcactaaaagcctggatactctggcagcgaaaccgcgaccggcatcgtcgcgccaagcttgtacattatcaaggtgtacgtttccctcaggacggactggtaagatcgcagcgcaagaaaacctga

SEQ ID NO: 148519 - DNA, 1302 bp, Enterobacter cloacae
atggtaagctcactgcactatgtcaatataaagaacaaaagagatctcaggcttttcctttggtatctctcaactgaagatattgctattcttattaacgcactggcatcatcaaaaagcgtttatagtgcagatgatatatttagaaataatgttgaaattgcatcaagtgcggttaatcaggccctgttactgataaaggataaggctgttaaggacgtttaccccaaatcctttaatttctttaaatctcttcagttaccctctaatgagttttcctggataaaaaaatctccggacgcatgctatttttcatggttgtttataaagacttcgattcatgatttaaatggtgagctacaactcattcctgatattgccgggaaaattagaaattctgagtacactgcggtcgggcatgactttttgtataagagattactgataaatccctatcctgtggataataaagagcgagtagttgcaattgaagatttttttgaccgtgcgccaaccactctgagaaacaaactcgaactgatgcatcgcattagaaaactatggggcgacctttattttttgagtgttaacttccctctaacgccaaaagagaaaaagaaatgtgattgggcatgggagtacatacaaaaagataggagtaatatgcgtggtaaaagaaaaaatccggatggaacgtattcggattgtttcaatacgccatctgatactaacagtaacatgctttcggcattaagaccctcaagtacatatgagaaatacatggctgtaaaattttcatatatttttaaatttgttaaagatgacttgtttattcagcggttcaaaaaagcatgggagctgcatagatacaggctctcagctgcttctaaaaagaataaatcgttaaggcactgcagaactgaaaaaaaagaagttatagaaaaacctgtgtcttcagtatcagaagcggaaagttacaagaatttttcgtctgagagtagtactcatcaattgaatcctgattttgcacagcctttgcaaagttcgcatggtacaggggacgttttggaaccaagagaagcatatcaaatcaataacaatgagaatgttgaggttatgacgccaactcatgcagggagcaaccaaaaaggcttaaattcccctggaacagtaattaaatatttgcagtcttcctccctgaaaaatatttcaccgtttcagatgataagcatggcaagtgacggacttgacgcaatagtgaaaacagcgagtaaattaagggagaagaaaaacagcaagtaa

SEQ ID NO: 148520 - DNA, 867 bp, Enterobacter cloacae
gtgcgcaatatcattacattacttctgagtctgaccctgctgatgctgccttccatgtcatttgcactggatgtgtatggtgaggttcatccgcaacgttacaccttctttctgactcctcagggcggcaatgccctgaaggcggtcaatgacaaaactgccgctttactcaataccgctcagcagggaaatatgcgcgatgcgctcacggtgaacgcccttcagaaagagggctatgacagggtgggaattgcccctttttatccttcagaccgcagtcagtctgccatacgcgatgacggtcaggcggtaaaggcggtgacctgcgtaatgactaccgtcactgtacccaacagtacccgtaaggtgacgatggacaggacctggtgtcaggatgaagtgggggcggcatacatcggcttcagcggttgggttcatcgcgatgtggtgcaaaaagcctgtcgggtgggggatgctgactgtccggtgtatttatccctgcagggagatgacccgactattcgtaacgatgctgttcgctttcgtgcttccagaaagccagtgggagagatgagcaactttgatgaactcagggctaatggctgtgccatggcgaacgagtctgttcgtctggattccggcacgccggggcgctgtagcacgattactggcgttgaagctgcatccggcagtaaaaagatggtagcgcattttaaaactgataccggtgagtcagggacactggaagtgacatttgataccccgcactcgcgtaccgtgatggcccggcccgttggctcgttctatacccagtcgctcaaaaatggcaaatgggtctgcacgggagcatacggggcgtgctactga

SEQ ID NO: 148521 - DNA, 174 bp, Enterobacter cloacae
atgaaaaaagagacacgaaaaacggaacatcccgacttgacctggccgctggttctgagtgttgccggggtcacgatgatgcgcagccagtcggtgctggttcagacgctcggggccagtctgaccacgctgagcctgattaagggtctaaaaaaactggcctcgctggcctga

SEQ ID NO: 148522 - DNA, 489 bp, Enterobacter cloacae
atgactgacatgataaaagggaaactgagtgggctgaaaagcaaaatgcatttttcccgtcacagaggaaaatcgccagaaacaggcaatgaggacctcactgaggtaggcgcgacaaattcccttcctgagttgggtgagtccgtcagcgacagcagaatatcgaaatccagacagatgctggaaagcatcgtggtacacgggctgctgaacctggccgagaacaggctcagcgatgatgcgtttgtggatgcggtttttgaaaaggcctatgagctgctaccggcagcggtcaggctggccgtcagcagggaggtgtgccggacctatctgcactcacgtaagaagccattgctggcgcaactgcagcaataccgtcatgacaggctcagcatcaccgcacttcctgcccaccatgatgcaatgagcgctggcgcggtttcggaggttactgcaaaaacacagcatgaaggttcacccgacacttaa

SEQ ID NO: 148523 - DNA, 471 bp, Enterobacter cloacae
atgtctgtgtccagcttatccacggtatttccggccaacgagcaacgcgttattcgacgggcattacgaattgttgagaaatatcagcgtaagcccggtgagccatttacctctacaagtttcaccaaaacctggcttcagctatatatggctcatcaggagcgtgaagtgtttattgtgatgtatctcgataatcaacattgcctgctgggacgagaaacactgtttaccggcacgctcagccataccgaggtgcatccccgtgaagtggtgaaatcggccctgaagcataacgctgctgtggtcattctggcgcacaatcatccatcaggtacgacagaaatcagccagcaggataaacacatcactcagcgggtgatgaaagcgctggcactggtggaagtgcgtgtgctggatcatcttgtggtgggtagtgaagtagtttcttttgcagagcgtggcttattatga

SEQ ID NO: 148524 - DNA, 321 bp, Enterobacter cloacae
atgcaaatttcaactgtaccggctacagtgccggtttcgccacgcctgtcgcccgtccaggtatggcagcaattgctatcgtatctgctggaacaccattacggtctcacgcttaacgacaccccctttcattacgatgcagcaatcctggagcatatcgaagcgggaataacgctggctgatgcggtaaatttcctggtggatcgctatgaactggtacgcatcgaccgcaaaggatttagctggcaggaacagacaccgtttcttaccgctactgatattctcagggcaaaacgtgctaccggattaatgaataattaa

SEQ ID NO: 148525 - DNA, 771 bp, Enterobacter cloacae
atgccagaggcgttgccaaaatacatagaaatcagcggtgagttagttgattatcttaaatacagaaataagctcgatgatttcagtttccataagtacattcgtgagattgagaaactgaacgatccgctttcagaagattatctgaaggctttagcttgtgctgcaaatggccgccaggaagatgcgatcctcttttttgaggaagctttgcgcttaggtattgatacctatgcgctaaactatgctacatacctttcagattacggtactcataagcagctctcagccctcactaagagactgattggtacttatggctgtaaaaccatgcttacctttgcttgggaaactaatttatttagcggaaacattgaccaagctttaatatatgcagaacgtttcattgatgctgctgataaaaaggatgcagaaaaaatgaaagaggattcagtagatatcgtaatagataccgaaagatttaaagagtcttcttcacttactcatgagcaatatatgtttgtggctcaaagtatgctggatattgctgataattataatgtgcgaccagcatcaatcgcttttgtttttgtgccggaagagaaaacggcatcatatataatgacgttaaaaacaaatgatgttgatgtaatttctgatatgaatctagatatagctttttcgcttgcagaaaatgattctttgttgggtaagaattttagcgtctggtaccaaggtctcgaagaggtagatagccatgcctgtaactag

SEQ ID NO: 148526 - DNA, 144 bp, Enterobacter cloacae
atggctaacatgaagcagttttggaaagagtggggctatatgagccgagtgactggcaagcgccacacgcgaacctacgttggcaaacctaaatttcactatggtgccctgagtcgctaccaacaaattgaatggctggactaa

SEQ ID NO: 148527 - DNA, 996 bp, Enterobacter cloacae
atgtctgaagatactatggttgttaacgcttatcctgtaacaccaggctggacaggaagtacgtatcctggtggagtatctatacccaattggcgcccacctgttccccatgtggctaacattggtcattacagtaattttaatgttgtgtcgatcggtacggatatttttgacacaactgcccgcaaggacagtaaaattgatccagtaaccggtgaaattgcatatgatgatattgtatccatcgaacgaggtgatcagcgagttctcatcgttgaagtcaaaatgacggctgcccttgaggagttaaaaaaactaggcactgtctggaaaaaaggttcaatgtacctgatccttggtaatggtgatcgtctaaaatttaaagatgttgggcaaatgattgattttattaataactcaaatcgtattgccaatgagacatttatcagagcaaaagaaggattctctgccacaggttatgttcctaaaaatgccgctaaacaacctgatgtgaattcaggcgtgacaattggaattggtgttgatttaggaggtaaaactaaagattcaatgctgaatgatggtgtatcaaaggaatttgttaagctgctagaaccttatcttggtcttaaaggtaaggcagctcaagataaattgactaaatcaccgcttactattactgaagctcaggcaatggatttgtcaaaaaattatattaatagattttcttctggagtagctagtaaatatcaggcagctactggaagtaatttttctaagttaccgttaggtactcgaactgcaattgtcagtgtgagttatcaatacggacagaatttggctgctgcaacacctgaattctggaagcaagtcacttcaggtagatgggcagatgccgtaaaaaatcttaataactttaaagataacttcccaactcgtaggcaatcagaggcagcacttattcaggctgatattgctgctggtaaattaaaataa

SEQ ID NO: 148528 - DNA, 411 bp, Enterobacter cloacae
atgagaaaaaaatattttgcgttacttagttttatggcactcttccaaaacagtgcacatgctactgtcaatttaaatcaagtcattgaaaatattgacatatcaacttttagaaattctctttcccctcgttcccctgaaagcggcaagacattacctgctatgggattcgacattcctgtaaaatatgatgaccagactttttacgggttgaccaataaagaaaacacttggatttattcaatatctaacttgaaagttaacggaagtaagttaagcgcttgtttctacgactatgcaaaccctactcaagcaagttataaatcagttacacttttaacattagtagaaaataaaaccgggaaatactcagtgatttccgagtccactaacagcacacaatgccaataa

SEQ ID NO: 148529 - DNA, 1131 bp, Enterobacter cloacae
atgctaagaaatattagtgtcagaacgttcattgtctatttccttttatgtgtatttttggtaagtgatggagttatagcgctattttcacgaaattcttcgctttttattgcagtcataattgtacaattcatcgccttatttttactctgggcgtacatgacaaaatatcttgtgacgccgatcaatactgtgaaaaaaagtattgaagaagtgacgtcaggcaaacttggcgtgtcgatacctgaatttggcaacaactgtgcgggacgactgatccccgggattaatagtctctccagcaacattgcaacgctggtccgtgagatccgcgcctcctcgcaaaccgcgatgaccctgtcagatcaactctcttcacgcagcgcgcagctttccgtcaaaacagaacagcagtcagcttcgctggtgcaaacggcagccagcatggaagagatggctgcaagtacaaaaaataatgccgacaatacccgtttagccagcgagcaggcgaatatcgcgacgttacaggcgcgtaaaggcggagaattaatggggcaggttgcgaacaatatgcagtcgattaccgactgcgcccagcaaatgacagagattatctcgctgattgacggtatcgcttttcagaccaatattctggcacttaacgccgccgttgaagcggcacgagcgggcgaccatggtaaagggttttctgtggtcgcgggtgaagtgagaagccttgcgcatcgtagcgccgaagcggcaaaaaatattaagtcattgattgaagttaccagccataacgtgacgcagggcgttaacgtggtctctgaagccgaaaaaaacatgcatgacattgttaccggttcgggcaatgtgagcagactgatggatgaaatatccgcctcaacatcagaacaggaaaaaggtatttcacaaattacgcaggcattgtcagagcttgaacgcgtaacgcagagcaacgtgtcgatggttgaggaactcaatgggtcgtcagatgtgctgcgcaatcaggtgattgagctccagacacgaacacgcaatttccgtctggaaaatgagttccagactgacaatgcgttaagaagccgcgaatgggcggtgaattcctga

SEQ ID NO: 148530 - DNA, 459 bp, Enterobacter cloacae
gtgaaactggactttgaccgggaggggacggaatccggttacggctacctgtggctgcggatggcgaagccgtactctggtgatacatatggctggcacaccccgctcaccgacgggacggaagtggcgattgcgtacagcaacggtgatattgacctgccgtacattgcgtatgcgctgcacgactctgagcacccgggccacgtgacccgcgacaaccatacccgcaacgtgctgcgcaccccggcgaacaacaagctgcggatggaggataaacggggagaggagcatatcaagctcgccacggagtacgggaaaacacagctcagcagcgggcatctggtggacagccagggacaatgtcgcggccggggtgccgaattgcgtaccgatgtatgggctatagcgacttattaccataagtacggtaaggatcatatcagtatccggtcatactaa

SEQ ID NO: 148531 - DNA, 1230 bp, Enterobacter cloacae
atggtgccaaagcttcgttttaaaaattttgtgttgccatggaataccactattatcaatggcaaagttgatattattagtggttttccttttgaaggtaaacatatcactgatgacgcttctggaattcgtttaatgaggggggttaatgttagtgaaggtattgtaagacatactaaagatatcgatagatattatcctctgtcagccgaaaatcatcttagatacatgttgaaatctggcgatattgtgatagggatggatggttcaaaagttggtagaaatagcgcgcgcattaacaataacgatgttggttcattgctggtgcaacgggttgcgagaatacgagatattggaatacttaatacaagttatttatttcagctacttaattctacctatttttacgattatgttgatagggttaaaacgagttctggtattcctcatatcagtttgaaacagataaatgagtttcaaattggtatgccatcaatggaagaacaaaccaaaatcgctgattttctgtcctctgttgacgaaaaaattacgttactgaacaagcagtacgacctgctatgccagtacaaaaaaggcatgatgcagaagatttttagtcaagaattgcggtttaaagatgaaaatggagagacgtttcctgagtggaactcttgccaattaaaagacgttgcaactcgtgtaacaagaaaaaataaagaaaacaaccaaacgattctaaccatatctggtcgagatggattggttgatcaaatgacttactttaataaacaaatagcttcgaaaaatgtatctggttattacctaatcaataatggtgagtttgcgtacaataagagctattctcaaggttacccaatgggcgcgataaaaatgttgactaactatgatcaaggtgtggtgtcaactttgtacatttgtttcaaattaaatgaaaatcaatacaacaatttctatcaacattactttgaaagcggacttcaaaatagatccatagaaaaagttgcccaagaaggagctagaaatcatggtctgttaaatattggggtaaatgatttttttgatattgaacttcaaataccgagtttaaaagaacaaatcaaaattgcggattttctctctgctcttgacgataaaatcactaccaaaaaagcagaactggacacgttaaaaacctggaagcagggcctactccagcaaatgttcgtttaa

SEQ ID NO: 148532 - DNA, 123 bp, Enterobacter cloacae
atgcactcacgcggtgattacttgtccaatttccgtcaagttaacatgaccctcattgatccgagatcaatgacgatcatagccatgaacataatgattttttatatagaaaacgtgaactaa

SEQ ID NO: 148533 - DNA, 915 bp, Enterobacter cloacae
atggccgttcctacctacgataaatttatagagccagtactccgttttctggcaggtaaacctgacggcgtacctgcacgcgatgcgcatgaagctgcggcagaagcacttaatcttgatgataatcagcgagcagaagtgatagccagtggtcagttggtttataaaaaccgggcaggctgggcacatgaccgtctgaagcgagctggattatcgcaaagtttatccagaggaaaatggtgcttaacgcccgacggggttaaatgggtacaggcccatccccagccactcgccgaagaggaagtgaaccacttggcctttgatttcatgaacgtgaagttaaaacagcagccagatgctgtcaatcttgatccaagaccagcggcaccgaaccaagaagagctggcaaaaagcagccctgacgatcgtcttgatcaagcgttaaaagagctgcgggatgctgttgctgatgagttactggaaaacttgttgcaggtatctccggcgcgctttgaggttatcgtactggatgtacttcatcgtctgggatatggcggacatcgggacgatcttcagcgcgtaggcggtactggagatggtggcatcgacggcattatttcgcttgataaattgggtctagaaaaagtttacgtgcaggctaagcgctggcagaacacagttggtcgccctgaactacaggcgttctatggtgcgctggccggacaaaaggccaaacgtggagtatttatcaccacttccggttttacttctcaggcgcgagattttgcccattccgttgagggaatggttctagttgatggcgaacgtttagttcacttgatgattgaaaacgaggttggcgtttcctctcgcttggttaaagtgcccaaactggacatggattactttgagtaa

SEQ ID NO: 148534 - DNA, 624 bp, Enterobacter cloacae
atgaatttttcatctggggtaaacttagttatctcggccatttctttggcgatttctggaatcgcagcttattactcagttcaggcttataatcaatctgagaaaatcgataaacaggtctcgcatgtgatcatggcatccattgggaacaagataaatcgctacgctgaaaatgcttataattcatatgttttcttgagtggattgagagatatggagtatggtgaccctgaattgagtgaaaaagttgaagtgctatcactggattttttacacaaacaggacctgtcaggtttatccgtccctgaagatacactattccaactggctaagagtaacggtgaaactgcaggcaaaatagcgcagtgcctggcagccgttacggagataaccagtgatataaaacagttttctaaaatcacgcaagaaactatgacgctggaattgcgcttgactctgcctgtaataccgtatcgtttcaaaagggttagtatggtctgtcaagacgctgataagatgctttctgagcatatagggaaaacacgaccaaggaaaggaacgttaggagaactcgcagaagcacaggcgcttcaaatggaaagacgactaattccactgcgttaa

SEQ ID NO: 148535 - DNA, 600 bp, Enterobacter cloacae
atgagagcaaataaaataattcataatttatttttactatttacgttatacactcacttatcttatgcagcccaacaaaatagcgacattgttggtgtcagcaatgggccatttacaaatgagttaatattaagagattcccagaatgacttctcaccttggtggaaagataaagtcaaggtagagttgagcaagccagtcaactttgcgggtaagtacagattattcgtatccccaggaggccatggtaaagaatgccttcacgattattggatttgtggttgggtcattgataaaacaacaggtgaagtcgtttcgacattaccaacgtcaccagaaggtggtaacagctatgctgaagctgttgataatggaacgtcagacggccttaaattcaaagtaattgcctataaagatcgcacatcattaactattacaggtcgtgccgttaacgcgccattacgtgatgcgaacggagaaatttcagttccagagtgtaggtcgattaaatataatttcgacggagagaattacgccattattaaagaagaatataatggttgtaatctccaaaaagaatctgaggtttatggtaaataa

SEQ ID NO: 148536 - DNA, 483 bp, Enterobacter cloacae
atgaaatcaaacctcaaaaaaatattgttattattggcttttgttttcgcaatattctcaaacctcagctttggagacaataacaacccaacgctcgatacgaaaagtccagagttagttgttaaaacgttttactctgattatctcaccgcctggaatgatcctgacgtggggagtggtgcagagaaaagccagaaggcaattgatacctatacgacacaacaccttcaacaacttaatagtgacaataattccggggctgattatttcatcaatgcccaggaaatatgtcctgactgggtaagtgaaatcgaggttaaaacatctcccgtgagcagtaataaggttgcaactgagttaactcttggacatgctgatagtgaatcaaaatatgaagtcagccttgttctcaaaaatgataaatggctaatgaattcggtgaaatttatatccagaaaaacaggtcattgcaacgagaactaa

SEQ ID NO: 148537 - DNA, 222 bp, Enterobacter cloacae
atgatgcagcaggactggcactccgccgacattcttgccgggctgagaaaacggggtacctcactggcggcggtgtcccgtcaggcaggcctggcttcttccacacttgcaaatgcgctgataaggcactggcctaaaggtgaaagactgatagctgaagcgctgggcgttgcaccagaacaaatctggccttcccgctaccgcaagcccgaaaattgttaa

SEQ ID NO: 148538 - DNA, 897 bp, Enterobacter cloacae
atgagcattccaaaattcaccttaaagacttcgaatacttccagttctaattttatagctattttagattgtctcaatcctattgccgatatttcttcaccaaggcgaaattatgaggatttacaaataaaactaataggtaaagataaaccggagaaaatcgaacaaaatctccaattgataacatgcaaaaacaaaaaagaattttttaattattttgaaaaactcacgcaacgcttcaatactccaggtttcaaacctctcattctaattcatgctcatgggaacaaagaaaatgggctccaacttcccgataattcatttgtagaatggcccaatttgattaaactatttggagaactaaccgaaaagtgcggtggggatttaacaataattgctggattttgccattcttatgaactcattgaatacataccaatagataagagattaccgttcgctttttattatggttatgccaatactatcccggcaggcatagtcgaagatgaaatgaacataatctatcagtcatttattaatgatggtggaaaaacccttttcccattactatcgaaattacatattaaatcctttggagagttcgattttattatgcaattcttagcccctgctctcgctatggcagcagatccagaagaattatcaagattggttccaatattttctcaaggagagattaaaaaagcagttcggaatcaattcaacggaccacaacgtgggatagacaagctcatcaaatccattgtcagaaacgatattttagctgttgacctaattaagaaacacatgcatgacacagaacgaaaaacatatactttgaaagctgtagatgattatttttctttgattagaacaaaccgttcacaagtataa

SEQ ID NO: 148539 - DNA, 819 bp, Enterobacter cloacae
atgtttgagaaaatttcacattggctatcaataccttatgtaggtagcattattggtataattggtgttgcaatagccattttcactattttttttagcagaaaacgctataaaatttcacttcacaaaacaaccaatgacttaatcggtttgtcagattcattattgcctaatcaagtcgagattttgtatgagggtgaaacggtaaataagcttgcctcatcgactttcgtcatatggaattccggaaacaaaattataaccaagaattcacttacaacaattgaccctctcagaataatagccattaatgatgtaaaaatattaagacatgagattatccggttaagcaatcatacctgcaacatttcaactcatattgacgaaaacaaaaacagcattttgttgagttttgattttttagagaaaaatgatggcgttagaattaaaatccttcatacaggcaatgactcagatataaatttagtgggcaaagttataggtgttaaaacccctaaaacaacgcctagatcggaaaaaataaaaagcacaatgatcattgataaattattgttcggaaaaaccacgttgggattttatttaacagccatacttttacttacagcaatatttactgcaacgattatatggccagatgagataattaaattcaatgagttatcatcagcttccacggtatggatgttaagaggattcgctataattaatttattttccttactatttttattcggtcttaaccgaactaattatcctgccgtcttaaaggaaagcgaatctgaaaagaatgaaggctag

SEQ ID NO: 148540 - DNA, 582 bp, Enterobacter cloacae
atgcatccagtaatgtttttaggttcattgattaaaaaagataaaattatatggatgaaaaagttcacggataaatttggtttaattaaatcagaagcatttaggtccaaattattggaggtttccaaagagttaagtattgacccgaactacattatggcgtgtatcgcgctggagacaggaaaaacatttagaacagatataaagaatccgggttcatctgcaacagggctaattcagtttatggacaatacggccaaagaccttggaacatcaacgcatcaactccgggcaatggatcacgtagagcaaatggaatatgtcaagaaatacttcaaaatgcaagcggacaatgttggggtcccgacagaagaatggactcttgaggatgtatattactcgatattccgacctaaaacgatattgcttgggccaaatgatattgtttatcaaagaagtgacggagactattatagtaagaatctatatcacgatagaaataacgatggtaaaatcactaagaatgaaatagcagagaatattagaattaatttcaaacaaggcattcctgaggaaggatga

SEQ ID NO: 148541 - DNA, 1647 bp, Enterobacter cloacae
gtgtctgtgttacccaaaatagtctggccaattccctctaacaatcgggggaaggaatttagtaaccaggaagatattctctcccatttagcgggggagtctaccggacaatatgcgataggccgtagcggaatgtggcatggtgggatccatatcaccgaagccacgacgccatggtgcgcgcttagtggtaagtctccacttgaagcgatagatttcccggttccctttaagggcgagcaggcggtgcgatgcatggctgacggggaagtggttgcttatcgtgtctgcaaggattatatgacgattgcatgggaatccggtccgctgagtttttcggggtcatttgtcctggtaaaacactatatccagccaggtgagaaagagtccagcggactgcatttctacaccctgtatatgcatcttgcgccgtattctgcttatgaggccgaagcagaaaatcagtgggtcattcaggatacattgagagcatattctgaaatggactggttgacggcaaaacttacttcagaaaaaacctctccacaaattgccgggcacatgcctaaaggttccagagtggaatgggacccggcagacagcaatcttaacgccacaggaaataacaagcgaaaatatggtctagtgacgcttaaaggtttaccagaagaaaccagcagtactctcatgccaggtcagcgctattgggttgttgtggataacaacaatgtaaagccagctccgggggctggtccatgctggtggcgacacttgcttccacccgctaaagaggtcatggtatttgataaaacggttagtctcagttcaccgtttgctattaaggccggtgacccgattgggcacatgggctactatcaggcaccaaaggatggggggtatgaggcgagatatcaggtgcatattgaatgcacgagcatggatgacaatctggaaaaattcctgaccaacccggaaaaagtgggggagaaaatcccactctggttgaagtattctcctggactggctctatacacaaaaaatgtcgcaaaaggcaccttcgcaaaggggacgacgtcgacaacgcggacaggcattctaccgttgagtaaggttgcaactgaaacggataaatcaacaaaacaggaatactggctgctgcgaccagaaaatgcctacgtgcccaaaggcctggctgagcctcaactcttgtcacagtatgatctggcaaagctgggtttcagaacggaaaccgcagagcctgccagttttgattacctggatggaaagaatcagcctgttggattcttccgcagtcttatcaactcactctacgaggccgcaaccggtgatacacgaaccagtcatgcactggtgaagcataattatcagcgcctgctggataaaattgacagtggaagcgatcgttattctccaatggaatactggagagcgcttcataaccccgactatcgtgacgtcattcagaaaactatcgtaaaacatcccagcgattggtacttcaaaaagggcgatgcaatctggcaaccgttcctgaatgcactgaaaaaagacgctccggaatggaaaaaatacagcgaagattttcttgataaaatggcctggatgcaggatgtgaccactgagtaa

SEQ ID NO: 148542 - DNA, 165 bp, Enterobacter cloacae
atgcttaagcttgaaaacgcagacatagcgtgtgaaaaggacaataactctggtccagctaagggtgaacctgattcgttaacagtggaagatttattgccggttttcgatattacggagattacgaaattcaatcaggtggtctgtaaatcgtttagcgactga

SEQ ID NO: 148543 - DNA, 1209 bp, Enterobacter cloacae
atgcccgtctggctggatgccatccctgaaaaggcccctaaggtagcgcgtcccggaaccggccgttggcttcttttcctcgcgtttgtcatgctggcgggcatagcgctcacactatggtgctggacgtcagagcgcaccggctttgtcttctggttcaccgctctgggtcttccattttgcacctgggggcttattttcggcctacgccgatttgcctataaagcagaacaaattggtgcggaatcacgcaatgccgagcgagaagcgcttattgacagtgaaattctgcgcggtcagcgctgctcctggatcctcggtacttatattcagagtccggccggaaacaaagccgatgacctgctgaaggcaatgaaagtcgcggctcccgctatagacttctctcgcccaagaggatgcgataaaccggtcaggtacgcggcattaacagaatatcagacggatttaacgaaagcgctgaaagcagcggtcactaagctgaccacgcgtgtggaggtgatagttcagccacttccgccagcgctgccatgctggctgatgctcgactgtgatagcgacctgtatcccctggttgaagagcagcttaaagctgagctctcactgaaaacgggcaggatctttcgcctgatggccggaaaaggactaggcgcgtttgatgcctggctggacaagagatgggacaatccgggcattctggttgccatcacgctgtcgttaccggcatctccacgggaagaagacgctgatgccgtctcgatggtggtcttcagcaaccgcaaagcccaggcttggccggatgcgctccgccttcatcgcccggaaagaggaactgaagccacgctgaccaaaacacttaaacgtgcattgctctgggccagaatcgaccctgacgcgctccgggggagctggattacaggtccaggtctgaccgcaggaagcggctggaataatgcctgcgaggagagtggtgtggaatttagtctttcagaagacaatttcagtattgatccggtgcttggctacaccggccatgcgtctccatggcttgccatcacgcttgccgatgcagcctttgaacaacgagaggtgcaggttatcgccgcacaacccgccgctgccaaagacgacatctgggtcgccgtcatcaccaaagaagaagttcgcaaggaatcgcctaagaatgtctaa

SEQ ID NO: 148544 - DNA, 162 bp, Enterobacter cloacae
atgaaaaaaatcatgttccttgtactagtcccagcattttgttatgcaaacacttctactaccttcaaatcttcttgcagtggcattcaatacagtttcgaatcattttgtaacgtaaatactcttaaggacaatcaggataaacttgatatcccaatttga

SEQ ID NO: 148545 - DNA, 1278 bp, Enterobacter cloacae
  misc_feature (1262)..(1271): n is a, c, g, or t
atgcttggtagacagcagattgcaggtatacctacagctcttagtgaattatttaaaaatgctcatgatgcttatgccgataatgttgaagtagattatatcagaaagaaaaacctgctcattttacgagatgatgggttaggtatgaccagagaggagtttgaagagcgatggcttactattgggactgatagtaagtttattgatgaggatagtatcggtatgccagaggtcgatattaccaaagcttctcgtcctataatgggggaaaaaggtattggtcgtctggctattgcatctatcggtactcaagtactggttatcactaggtctcgtagaaattctaatttaggtaacgtagtagcagcttttgttaactggtctttattttcgctacctaaattaaaccttgaagatattaacattcctattgttgaacttgaatttggaaatactttaaaaaaagagcatgtgaataatcttttggacgaggcattagccaatattcatagtctaaagggaaagatctcgcaaaagaaaattgatactcttatttctcaggttaaattattcgattatgatcctgaatattggactaatgtcctaaataatcaagataagaatcttggcctggatcgagatcatctttcattggatggagatcggggtggtactcattttgttattgtgccagtagatgatgtgctgaatgatgacatcgaaagttttatcactgctagacgtaccgaccaagtatctcgtttgcaaaaggcattgttgggttttaccaatacaatgtacgaaaatgctcatccaccaattattgcacgttttcgcgatcatacattacatggtgaatgtatagaccatatcagtgaatctgttttttttaccccagatgagtttgcaattgccgatcaccattttcagggggcgtttaatgaatttggccagttttctgggacagttaaaatatacggtgaagaaaaacaagtcgttgttccttggcctgaaggtaataataaagaggttctttgtgggccttttcaacttaatctagcatatattcatggcgttcaaaaagattctagagtatctcctgagatatggcaggatttaagggataaaactgacagattcggtggactttatatttatcgcgatggtatacgaattttgccgtatggagactccgatgttgactttctacgcattgagcaacgtcgttccaaaagtgcaaaagagtatttcttttcctatcnnnnnnnnnnccgttga

SEQ ID NO: 148546 - DNA, 1092 bp, Enterobacter cloacae
atgaaggtgattgattttttttgtggctgtggcggagctagtaaaggatttgaactggctggctttgacatagctcttggcattgattttgataaaaatgcggctgatagttacaaagccaatttccctgatactgcgtttattaatgatgacattcgaaatgttaagataaaacatgttgcagaaaaggtgccggattggaaagaaaatgattttgtgttttgtgcttgcgctccttgtcaaccgttttcatcacagaataaaaagcgtcacagtactgacactcgtagatcgttattgagtgagaccaaacgttttattcgcgcattccgtccaaaatatatcttcattgaaaacgttcctggtattcagagtgttaaactggctgaagctgggccttttgcggactttctgaattttcttgctcgttttaactaccaatctgaataccatgtggtatctagtgagttttatggtgttcctcagcaacgtaagagattggttgtgcttgcgaagctaaatggttctcctgcttttcccattccaacacacggtaaagatggtatgccttttgctactgtgagggattatatcggtcaattgcctagccttcaggccggggaatctgatcctaacgatccattacatgtagctgcgataatagaacctctcaatatcgaacgtttgcaacacaccccggaaggtggggatcgccgtaattggcctaagagactttggctgaaatgccacaaggattatgatggacatacggatgtatatgggcgaatgcattgggatgaaccatgtaagacattaaccactaaatgtaccagtatatctaatggacgttttgggcatccagatacaacgcagcatcgtgctattacttttcgcgaggcagctttattacaaacattcccactgagttttcaatttaagggaaatcgagtatcaaaatcaaaacagattggaaatgctgtccctgtattattagcaaggcgttttgcggaggctatgtggaaacaacatcaagaagaactggaggggttagctgagctaacccagcttgacaatggcacagataaaaactaa

SEQ ID NO: 148547 - DNA, 336 bp, Enterobacter cloacae
ttgcagttgctggttaagccggtcgatttccttaagtgcggcatccatgtccagcgcatcaccctgcgctttcgcctgcgcatccgcactgacaaacaatcccttgcctgcccgcagggttccccactcatcggtgcgcagctctgtgccctgaccgcgggtctttccctgagcatccaccaggtggccagtgttaagctgcgttttgccgtactccgtggcaagtttgatatgctcctcgccgcgcttatcctccatccgcagcttgttgttcgcgggtgtgcgcagcacgttgcgggtgtggttgtcgcgggtgacggggtccgggtgctctga

SEQ ID NO: 148548 - DNA, 321 bp, Enterobacter cloacae
gtgacccactattttgctcgtcttatttcaggtctgggcctgctcgtttctgctttaatcgctccagcttattcagccactattgcggaaggtggtgttattcactttcgcggtgcaatcgttgctgacccttgtgaagtcacaccgcaacagcggcagcttgcgctgtcatgcccggaaaaaaaccgtatgcaaacgcgtacgatcagctatgacgatgcgctgaacggcaagtcgacggcttccagcctggcgacagtgaatatgacgtacctgaatcctgaaaaaacgctcgcggttgttcagatccagtaccgttaa

SEQ ID NO: 148549 - DNA, 936 bp, Enterobacter cloacae
atgctgaacgtgattgtcgacgggctgtggcgtgagggggataaaagccttgccgtcaggatggtggccgaaaacggcgaaacgctgccgtcctggcagcccggcgcgcatattgatgtccacctgcccagcggcgtggtgcgccagtactccctgaccggggcatgtcaggacgagagctatcttatctgcgtggggcgtgaagccgcctcgcgcggcgggtcgcgctacgttcacgagacgctgcgtcccggacagacgctttcgatctctgccccgcgcaacctgtttccactacatcaggctgagcgggtgttgctgctggcggcggggattggcattacgccgctgtatgcgatggccctgcagctgaaggcgtccggtacgccgtttacgctgcactattacgtcaaaaaccgtcaaagcgcggcgtttgctcgcgaactcctgcagtgcggtaagtgctttattcataccaccagcccgcgatccaccctggcagagcaccttcccgcgcccgaggcaggtttgcgcgcctgggtgtgcggacctgcgggctttatggaaaaagtgcgtgaggtggcgacggcgaagggatgggaggacgaccatatccacagcgaggcgtttcagcccgctgcgcctgtcacgggcggtgaatccggcgagatctttacggtcaaactcgcctccaccggggagcgctggccggtgcctgcggataaaaccatcgcccgggtactgcaggaaaacggcgtggacgtgccgctgtcctgcgaaatggggatctgcggtgcctgcctgacgccggtgattgacggcgtggtggatcaccgggatagcgtgcagtcggaggcggaaaaaagcgcaacggaccagcaggtggcgctgtgctgttctcggagccattccagggagctggtgatcgggctgtaa

SEQ ID NO: 148550 - DNA, 258 bp, Enterobacter cloacae
atgcgtgattttcaggtggtggaatttgaggacgaagcggaacaaccgcgacaaaaagagtggttgctggaagatacagaaacgaaatgcgactactgccgggcgttaaaccacgtgctgctggtgtcgcattttgaccgcgaaatgttgccgcacctgacgggattactccacgacatggcccattctatggcgggggatttaatcgctcctgtacaaccttggatgacaatacatcttccgacgcagcaacattaa

SEQ ID NO: 148551 - DNA, 486 bp, Enterobacter cloacae
atgaaagagcgaatcacgcagcttaagtctcgttacccgaattacagtgccagggaaaaaattattctgaaaatatgtgccgtcgcgatagcgggggcagttatttattacgcgggaatggttccgctggataatatgattcagaacagtaaggccacgctgagcagacaaaaagagacgctgaactggatgcgcagtgaaatagataaaaaccatcttcaggtccagattgtcaaaacggataatccacgcacggtggtggagaacagcgcccaggaaattcatctgcctctgacagacgtgcgtcaggatgggcaaaccttatcgttcgtggtcagtcgcgtaaatgtctatgaattaaagagctggctgcgggaaataaaccagacctccggcgtcaggctgcagaaaatgaacctcacgccggtcgaccacctcagcgatgtgaaagcggaagtccagctcacctggagcaaaaaggcatga

SEQ ID NO: 148552 - DNA, 1134 bp, Enterobacter cloacae
atgaaacaggtactttttgttcgtcccgataaccgcgagggcgggaaaataatggggtgtgtctccggcagccagcaggttgagacgctggagagcctggacgcgctggcggaccatccactggcgtcccgtgtttgtctgctgctgcccgccagcagcatgatcttccgccattttacgctgccgaagaaagtcgcctctcaggcgacggccttctcctggatggcggaagagacgctgattggcgacgtggataatctccactggacggtgctgaataaaaaaggtgccgaagtggatgcggtggcgatagacgccgatctgctgcgcgggtggttaaaccgctgtcaggaggcggggttaaaggtgattcaggtgctgccggatgcctggctgctgcccgtgacggctggcggaagtaccctcgtcgtcctggatgacagctactggctgcgtttatcaccgcatattgccagtgagatggaagcgagcttgctgccgcttctgatgcagaaggccggagagggggaggtgtgctgctacggtgaagcgcctgccggcgtcgcggtcgacatcgcccagccctggcagcatccgctggtgctgatccagtcccagtggcaaacctgccgcgtcacgctcctgcacggcgaattcagcgcgaaagcgggctcggggaaagcctcgaagggcatcaaagcggcaattgccgcggcgggtctgctctctctcggcctgttgctgggcccgcgcgtcgccatggcctggatgctggtgcagcaggaaaatcagattcagcaggagatcctgcaggtttatcagcaccattttccgagcatgcgccagcagaccaatatcaaatatcactttggtcaaaacatgaaaaagcagagcaaaggggtgtttctgcagctggaagatctggagaaagccaggcaggccgtacccgcgctggagatcacgctgctcgaatacgatgctcagcaaaacacgctaacgctgagcgccagttcgcaaagccaatccgcgttgcagacgtttgtaaaccaggcgggggaatattttgatttcaccttacagcctgtttcgacctctgctccttataccgccatgatcgcagggaaatataaatga

SEQ ID NO: 148553 - DNA, 1557 bp, Enterobacter cloacae
atgtatcagagccactttcattttaaaaacccgccgttcagggagatcgcccgctcatccggggattttctggtgccctatcatcaggacgtgttcaacctgctgaaagagaaaacccaacaggcgggcgtgagcggtctcttttgtgacgacgcccgtttgttaggtcagttcagccatgcgctgaaaaccgcgacgcccggcgttcttgccatcaacgcgtttccaaaactgagcgccagtagcctgctgtacaagctcaacccgggaacgaaagagaacaagaaccggattcaggcggtagatacggtgctgcagcagtggcagggtgggaaagccagaacgaaagtgctggtcattacccataccgaagccatgaaagagagctgccgcgaggtgctgggtatgttgctcacgcgcgcccaggagctggagtttcgcctggccgtggtgctgatgggcacgaaggatcaggacgccgttctgatgcagcaatctgaactgcgtgaatatgcgcatacccgccacacgcttcgccccctgacctgccgggaatttctcggctatgtgcaggcgcagtgtgaagagcacgggtgtgagaactcgccgcttacgccggcgcgcgtgcgtaagatgcacacgctgaccaaagggaatatcagcaagctgaatgaactggcacacctgtcaatgctggccgcctggaccgaacgtgcgctacaggttagcccgcgtcatttacgcctggcggccggtgagatccttcctgcgaaaaaacacggtaagcgcctggcgaccgtgggactgttcgcttccgtgctgttcgccgcctgcggctggtatttaacctcctcgatcaccgcaaaacttcccgttcaactgccggtgcccgtcagctggagacagcaggcaccaaaagttgaggcacccgcggtgccggttatcgacaacgaaatggttaatcagccggatgcgatgcaccagctttacctgatgtgggggtacgacgcctcggcggatgacgccctgtgtcaaaacgccgcgaaggtgaacctgacgtgtaaacagggcaacgcctcgccggatgcgctggcacgagagggttatccgtgggtcagtgaactcaaaaccggtgaccatcttaactacgccgtggtcgcccgcgttggggatacctctatcgacctgctgatgaacaaccgcacctggcaggtaagccgcagctggtttaaccagcatgcgaccgggaactatacccaactgcaccgcctgacgccggaaggtaaagacgccatcagtgccgccagcgatgcgaaagatatgggctggctggatcagcaactgagcctggctcttgcccagcctgaaacccatgctcagacctggacggcggagatgatgaaacgcacccgcgagttccagcaaaaaatgaatctgcacgtggatggcattccaggggaagacacgctgatgcagctcatgcgtgaaacccataccacgccgagcgtattgctccaggccacatcagacgccaaaacgcaggagaagcattcctaa

SEQ ID NO: 148554 - DNA, 627 bp, Enterobacter cloacae
atgtctaccatctgtcttgcggctcagcgcagctacgtcaccggggaggcggtctggttttcataccgcgtccccagcctgagaaaaatttgcggtaatacctttttgtgggcgttaggtttgtgcgccatggtcatggcagggttgtacgcgcacgtttactggaacctgcgccatccggcgccggaaccggttaaagcgagcgtcgcgaaacccgaaacgcagctttcagatatgcactacgtgtatgtgagtaagccgttcccgcatccgcatccgaaacccgcgccggtacacgctgatgttcccgccatgcaggatctgcccatcaacagcgatgatgctgactggcagcaggcacctgacggcggcgtgccgcacgatacgtcgcgggatactttacccggaaccgaagcgcacgatgcggtacccgccagcgcaagcggtgacgatgcctcaataaccgaattatttaagcaggcattaaaagaacaagagcaggattattcgcaaggcaaaattcccgcgccgccggttgacgagacgcaggataattcgcagaaaggttcattgcagaaagtggatccccggtcacctttgagtaagaaaggagaccggctggagtag

SEQ ID NO: 148555 - DNA, 819 bp, Enterobacter cloacae
atgcacggcggcgcggtaggtacgggccagcccgtcaaagctcacgggcggctcataccacttattgtgattgaaggtcagaacgtgacagaggctctggataagcgtctgatgagtctcacgttgacagacaaccggggatttgaggctgaccagctcgatctggaactggacgatgcggacgagcagattgttttgtcgcgacgcggggcggttatctccctggcgctgggctggaaaggtcagccgctattcccaaagggcagttttaccgtagatgagattgaacacgctggcgcaccggacaggctgaccatccacgcccgcagtgcagattttcgtgaaacgctgaactctcgctgggaaaaatcgtggcatcagacgacggcgggtgacgtggtgaaagatattgccgcccgtcacaatctgactatggccctgggtaaagacctgagcgccagggcactcgatcatctggaccagacaaacgagagtgacgcgagttttttgatgaaactggcgcggcagtttggggctattgcttccgtgaaagacgggaatctgttgtttatccgccaggggcagggcaaaaccgccagcggaaaaccgctgccggtaatcactatcacccgcaaaaccggagacagccaccgtttcagccgggcagaccgtggagcctatacgggggtgatcgccagctggctgcatacgcgggagcctgcaaagaaggaaaccacgagtgttaagcgtcggaagaaaatcacggccaccaaggagccggaagcaaaaacagggggattatctggtgggcacggatga

SEQ ID NO: 148556 - DNA, 717 bp, Enterobacter cloacae
gtgtttggtaacgcctatatggagaaacgcacgaaccggctgggcggcattctgtcgctggagccatcgctggcaaaatacacccgacgcgggatcgacctcgacacctactggtttgtgcaatacggcatgaccacgcagccctacgagttcaccaagggcagcatctttcacctgatggaaccggatctgaaccaggagatttacggcctgccggaatacctgtccgccattccctccgccctgctgaatgagtccgctacgctgttccgccggaagtattacatcaacggcagccacgcggctttcatcatgtacatgaccgacgccgcgcagaaccaggaggacgtgaacaacatccgccaggccatgaaaagcgccaaggggccgggcaatttccgcaacctgcttatgtactcacccaacggcaagaaagatggcattcagatcatcccgctgtcagaggtggcggcaaaggatgagtttctgaacattaagcacgtaagtcgtgatgacatgatggcagcgcaccgcataccgccgcagatgatggggattatgcctagcaatgttggtgggtttggagatgtggagaaggcggcgaatgtgtttgttcgcaacgaactgcggcccctgcaaaagcggatgctggagctgaatgattggacaggggaggaggtgatccgattcgggccatacactttagacgaggcctaa

SEQ ID NO: 148557 - DNA, 312 bp, Enterobacter cloacae
atgaaaaaggataaaaatatgaaaactacatacagctatgattttcagtatctcccgaaaggtgctcagcgtcctttggacgacggggatattgtcgggtgttcctcagaggacaactcacttttgatgattcctaacgttggtgattatgtagacattaccgtcaacaaagaccgtgagacatttggtggaagagtaaaaacaagattattcaggtttacccgaatcagtgaagaccatgtgatttgcaacatcaacattgtggtcgaagaggttgatgattcagtgtggggcacacttgttaaagaatga

SEQ ID NO: 148558 - DNA, 1248 bp, Enterobacter cloacae
atgaattttgaaagactgactttaaaagactggcaacaattttccgatattgatatttgttttcatcccagagtgaccattctcacagggtcaaatgggagtggcaaaacgactattctatcgcttttggcaagacatcagggctggcagcacatttcacttgccacccctaaaactgatttaatcagcaaagggctaaagtatttttcacttacacgaattataaataaacacaagaacttagacagaaaaattggaacgctcacctatacaaatcagtccgaagcaacaatattagctccagaagtgggatcaccacagtatcaacttcagatcgataaccagcagcaagcccgacttttctttattccttcacatagacaaacgttctcttacaggcgagtttccgagatcaacacaactcgtaaagaaagaagaacagcgtttgatgaaattcagagtagcaatatccagaggcattcaggttacgcggtaaacgaacctaacagttttcttatgaagagaacgctcttaggatgggttattaatggctatggcgtacgcaatggcgagaagattattatgcctgccgacccactacagattaataactttgagggtttttgcgaggtacttaggcttgttttacccgagtcacttggctttgaaagcattgaagtgcgagattacgaaattgtattttcctgtaatggtggtgaagatgagtttttactggaaacagcgtcaggtgggatttcagctctaattgatattgcttggcaaatattcatgtttgatacagatgccaaagaaccattcgcagtagtgattgatgaaattgaaaatcacttacatccaagtatgcagcgaaacctattaccaaacttactagcagcctttccgcatacaaaatttataatcagcacacatagcccattgattgttacttcggttgaagacgcttatgtttacgcactccgatataactcatcaaaaaaaatatgttcttatttgctggattttaaattggaagtaaagaatgccgtggatattctggatgaagttctcggtgtctctacaacaatacctgcttgggcgataggaaagctcacatcaattcttaaaaaacatacagaaacagatcccacacctgaatcgctggcagaattgcgttcagaacttgttcaagccggtttaggtaggttactaccccaagctataggagcaatcgcggaggctcggaaatga

SEQ ID NO: 148559 - DNA, 579 bp, Enterobacter cloacae
atgaggcgattgaccagacctgcttgccctaacccagtggccattcgtaccaattacaagcatccagaaaataagctagccttacagcaatgctcacacaataaatgtatgtattgcgaaagtcatatatcccatgtctactttggagatgttgaacacatccgtccaaaagcagaagataaatttccagaacttgaatttgagtggtcgaatcatggctattgctgcgcacgttgcaataatgaaaagagagatgagtttgacaatgactgccctttaattgatccatactcagaggatccaaatactcatttactcgcatttggctcaatattaagacataagtcaggtagtgagcgaggagctcttacaatcagcacgataggtctaaatcgtccggaattaatagagcgtcgttctattagaataaacgaactgcagaatgcgattgacgcatgctatagaacaagaaatagcaccattagagataacttgcttgctgcattgactcatgaaagcgatgctgataaagagttttcaatggttgcagcggcgttattagctgctaacgaattgtaa

SEQ ID NO: 148560 - DNA, 624 bp, Enterobacter cloacae
atgtttggttataaagtttccaaacaaagacactttgatgaaacctgccggactttcgcgctgcgtcacaacatggcgaagctggcagaacgtgcgggtatgaacgttcagaccctgcgtaataagctcaatccagaacaaccgcatcagcttacggccccagatatctggctgctgaccgatctcaccgaagactcaacactggtagatggatttctggcgcagattcattgcttgccatgtgtgccaaccaatgaagtcgcacgggagaaaatgcccctgtacgttcttaaagcagctgccgagatcggccgtgttgctgcgagtgcagtttctggtgttcaactgaatgcgacgacccgccgtcaggttgttgaaagcgtcaactcagttactcgtttgatggctttaaccgctatttcactgcaggcgcgtttacaggccaatcctgcaatggccagtgtcgtcgataccgtgacaggtcttggctcttcttttgctgaggtgtttatgttgaataacgaaccctcattcgcatcactgctggtttctgagttaacggatgagctgatggcgaagattcgtgctcacgaatacaaccgctcaatggatcttcccggttag

SEQ ID NO: 148561 - DNA, 573 bp, Enterobacter cloacae
ttggatttcagtagcggcgggaagaaagtcattgagcggttagttgaggcgtacggatttactacgcgacaagcgctttgcgaccatttaggcgtgtctaagagcaccatggccacgcgttacatgcgtgacattttccctgcggattgggtgcttcaatgcgtaatggaaacaggtatttcaatcgattggcttgtttcaggcaaaggagaatcaactacaaaggctgaaacaactttaatagatgttgaagcgcaacaacttagaaatggagaaattatcgagcttggtacgtataaaatttccccactattacttctaaaaaaaaaaacaccattagccttaatgacaaaccaacatatttatatttgtgatcgcaatgatgtcaccatttcagacggccaatggctagtggaaatcgagggaaaaatgagcatcaaaaaaaaaaaaaaaaaaatcaatcttattccggtgaaaaaagtaatggtcacaggagatgatttttcttttgaattcgatattaatgatataaaacccgtagcaaaggtttatagtataattagtgaggcttaa

SEQ ID NO: 148562 - DNA, 1467 bp, Enterobacter cloacae
atggatattgagtggaactggtatgataacacagtttttttaggtgagtatctgccacaagatacgttggatagaatgaaatacgcaaattatctatatgatatttgcgcagcaaggggagaaaattcaaaccttgtagttaatataaatgctgaatggggtgctggtaagacctatttcacaaaaaggcttgcaaaatcaatatcagatcaccaccccaccgtttacattgatgcttggaaagaagacttttctgatgatcccttactgacagttttcagtgcaataaaagagcaactaaccggacaatccgacaaatttactacattattgaataaaaccgtcgagaacataggtccattacttaaaacagcaacaccattaatacttgaaggtttagtgaaaaaactcatcggcgtggatcatattggtgatttaacgaaagatttgtccattaaactcttggagctacattcagaaaaatctaataaagtcacaactataaaaaaaggaataaatgactgggtaagattcataaaccagaaagatagcatagacaataaaaacctgcccatattcattatcattgatgaactcgatagatgtagaccgagttttgcaattagcttattggaaatcacaaaacacatatttaacatacctggcgtggtatttataattgcaactgacactgagcaattacaacactcgataaaagttgtttatgggaatgaattctcagccaaccattatttaagtcgtttttttgatagaagatttttattaccagcgccacaaatgcgtgattttttatacactataacacctgacaatgtatttgatgaatttgataatttaataaacttcctttcaccaacccccccaagttataaacacttcattttcaactgctcaaatatatttgagtcaatgaaaattaacttacgcgatgcaataaagctgtatgaacggttaatagatacaatacttacaacttccaaaagctttgatccttcgttcttattattaatgtctattgttaacttcaagaacaatgaattgtatgcttctattaaatcaaaaaattatcaagataatgaagtatcagtgatacttaatcaaaacttatcaataatcattgatttatcacaagaaagaactggtgtcgtctccttaattaaagatagtaatcgccgaaggaataattacaaagatactgaattaaaaattacatcgtttcaatatttaaaacaagcaggggaaataatcgaaattggtagtcctgtcacaagcagaattaccagcagaggcagctacaatgaggaatggtgggacggtgggttaaatgaagatggcactttaaagacaatgctaaaaatgggttgggctaagaataaaacatacgataaatcactgtctttaaaccaatattatgacctcattgaattgagtacaatttttgaataa

SEQ ID NO: 148563 - DNA, 831 bp, Enterobacter cloacae
atgacctttaaagttattgcccttgatctcgacggcacgctacttaccccacaaaaaaaaatactccctgaatccatactggcccttcagaatgcccgtaaatctggtgcaaaggtagtaatcgtgaccggacgacatcatgtagcaatccatcctttctatcaggcgttagagctagatacacccgctatatgctgtaacggggcattgctttacgattacataggaaaacgagtacttacctctgatcctctacttccagatcaggctacgcaacttgtaaaactgctagatactcataatgttcatggcttaatgtacgcagacgatgcaatgttttacagtgaagtaactggacatattacacgtactgaaacatgggctagaacgttacctgaacatcaacgcccggtgttcaaactcgttgattctttaggggctgctgctcgtgacgtagataagatctggaagttcgccctaactgatagtgatatcgataagttgaaaaaatttactcaagtggttgagagggagatcggccttacctgtgaatggtcatggcatgatcaagttgatatcgcccaaacaggcaatagtaaaggtaaacgccttacgcagtgggttgagtcacagtgtttatcaatgaaggatgtgatcgcttttggcgataactttaatgatgtgagtatgctacaaagtgcgggattaggtgtagcaatgggtaatgcctctgacgaggttaaagcatgtgcaaatgttgtgattggtactaatactgaatctagcattgctgaggtacttaatcagtactttgaacaagtacctgcataa

SEQ ID NO: 148564 - DNA, 210 bp, Enterobacter cloacae
atgacagaaacacagtttgaaaaaaactatcctcatgataaattcaaatacataagaactaatttccgtactaaaggaacaatgggccaaactgaaatcgaagaatacgatatcatttcaattgaaaccggtgaaacagtactcaaggctactcgaactgaacataccaatttgcgtgggctagatactacagttaaatgggattggtaa

SEQ ID NO: 148565 - DNA, 1242 bp, Enterobacter cloacae
atgatatatttaacagaaaaaaaattcagcactcaacttgaaaatatcattgcaaatagcgatgatgaaaaccttgttatagccttaaatgaaaaatggggaaatgggaaaacgaccttcctgaaaatgtgggaagcagaaatcatcaaagatggaaaattcaatgttgtttactttgatgcatttcaaaatgattttcaatcggaccctttcatagctatagcatcgcatatatatgctaaaatagacaatgaaaacttaaaagaaaaatatctctccgccaccaaaaaagtggcatcggtattattaaaaacatctcttaaaataggtatcagtgcactaacattaggaactgtgaaaggttccgaattcgaaaatattggagatgatattagctctgcaatcaatgacccgttagaaaaatatatagaagaaaaaataacgcaacttgataaagagaataacacacttgaacacttccgcagcacactttctgatattgccgctgaaaaaaagttaatatttattatagatgaactagatcgtgcaagacctaattactctcttgagttacttgagaggataaaacatgtttttaatacaaaaaacatttacttcatcctctctaccgataaagaacaatttatcaaggtaatacaaaaaacatatggttccatagatgccagcatgtatctaaataaatttattcatttatgggtttcactaccaaaagatgataatgctgggatgaaatcatacacactttcaaaatacgtcaattatattaataaaaaaatattaagcagaaacattgatcttaaaccttcactggatgtgttatcttatctgctaagaatcaataactttagtctaagagatgccgaaagatgctatagcctattacttctttgtaatacaagctttgataatggattaaaatgggagtatcaaattggagttgctattgctgtattcctaaaacttaaagatgaaagtttactcgtaaaaatcaaagagaggacaataaccaaaaatcatgtcatggaggcactaggtgttactgaactaccggaagaagacaactatcatatcttgttagcactgaatactgagtatcttactcgcgaaggttacgcaaaggcgttaagagaagatgatcaaacaatatttcgtagcggttttggtcaacaaccattaactatatctcacgctatagacctgatttttaacgttcaacaatag

SEQ ID NO: 148566 - DNA, 1404 bp, Enterobacter cloacae
atggctactggtcattttttgaggattggcgacaaaacaacgtgcggcggtagtattctttcagggtccccaaatcacagctttggagggattgcgaccgcgagaaatggcgattcagtctcttgtggtaaagatggcaaggtataccatatcgcaggtggtatacccacttactcgattcatggagttgccgcagcaggtaccttgcatagccgcagtacatgcccctgtaacgcaagtttcatttcgtcattcccaaatgcttcctattgggttgaggagaagaaagcggttaaggctgtccctgtagttactgccgcccctttagctgctccaccaccaacaaaagcggaagaacccgtacagcacgcccagacagctaaaaaaccacataaggaagaaactaaacgtgaaccagtagatgctggcttctgtgtacttcctttcggtgctgaaactggtgcttatgagcgatacttattcgaaggtagttcaccagcaggtacaaaagagctttaccgttcactgaatggggaaggtaaggaatataaagcgggttctattatgcttcttgttgatcctgaaaagcaggatgatgaacagatagcacatatgcagtctgcaaaacaacgtattgatacagcattagaaccgcttacacatcaagaagctaacttcttacacaatcactatggcacaatagctaactttagcaacatcgctgataaaggcattggccttgctgctgatcctgtcggaaagtacttcgagaatatagagaagatcctgaaagaaattcaggaaacgtacaaaaatacttacatgacaagaggggccttgattggtgaacagttctatgtgagacgtacacaattgtttaaagagcttgaaagagaactaaaagtaggtttcctaaacaaggctatgaaatttggcgagtacacaaaaataaaaaatgctcttggcttgtcaacaagttcaattactcataaatggaatgagacaggaataagtgatattgatggctatgctacgcatataaaacgagcggcaaaatatgtagcagctatgagatatgttggctatgtagggatcggctttagtgcccttcattctattaatgaaattaatgaggcttgttctgttggtcgcgaagatgaatgtaccaaaaagaaatacactgaaataggtagttttgcaggtagcactggtggcggtattcttgcaggtggtatggctgttccactttgtatagccattggcgttggtacggctgggacaggtggattagtttgtgctgttatcgctggagggactttaggttatgttggtggggaagctggcggctgggggggcgaaaaggtaggaaacaccctttataatgttatagaaggttcaaaatga

SEQ ID NO: 148567 - DNA, 711 bp, Enterobacter cloacae
atgaccaaaaagatttatttttatgcacctggtacaaacgattacatcagcccaactttacttttctcagttgcccggatgacggtaaatgatggcggggttcagtggttagagactcagtgggttggcggtggcaatgttcaggggatggctctttacacttcgattcttgatgcggcaattgctgctgaagtactgaatcaggcagaaaccccgtcggaatggaagatttacccattctctgatctgaacattacagagatgatgatcaacacgaaagcccataaatcacattacggcatgatgcttgtgtttgggttctcaatcgacgatttcagaaaccttatacttcaatctgatctataccgaactctgcaattccctgaatcattccctatcggtgacggcttagatcccatcacaaacaaggtaatcctgaaattcgatgaatccctgtttgaggggatgaatggttactggcatgaagagtttctcagctactgtgaatcaatggagatcctgaactctcaacctctcgacttcataaaagaacatgcccggaatgctgtatcaacggcacttgtcaccgcaacaccgatgatcagcccggcaacgcaatactgtgtatccacctattccatcaaaaagcaaatgtggatcgtatcttctctggcagtgaatggttccaaacctgctaacaaacttcattaa

SEQ ID NO: 148568 - DNA, 273 bp, Enterobacter cloacae
atgaaaagaacattgtcagtactattgtcgataattccattaaccacaatagcggctactattcccgatgggaaaccagaaaagccctttgttattggtaatgaagttatttgtctgaaagaaatccagaaggatactatagggctacggttacaaatcaactgtgtggattcgggattagacgtgcgtgtagctgatcttgataacaactggttacaggaacgcggcggcatgtgccagccagcgtacatggtacttgatcgttctcaataa

SEQ ID NO: 148569 - DNA, 129 bp, Enterobacter cloacae
atgaaggcgagccaggcacacgaagcgcgtacggccccgacttttatgttgcctatctgcgcgatcctgacggacataagctggcatgcgtttgtcagcattattctcctgaagcggatatgttcgtag

SEQ ID NO: 148570 - DNA, 435 bp, Enterobacter cloacae
atgaaatacccgatcgtactgctgatatgtgcttttacagccccggcaatagctgacgttagtgactggtcttcagcagtgaagggaattgcctcaggtgatgcacaccggattgagcaagccccaaagcttgctgccgttgctgacgagaaccaggcaaagcagttagaagatgccttagccgcagcgctcaccacaaacaccaacgccacgctgaaagcgctccgcatccttgatgccggaaaatggccgcacatggtaggcagcgatatcgtctgcacgccgcctttagagaaatcacccgccgaaatcgacgcgttttatcagcgtacccgccaggcgctgttggaaacgtttgaaggtgctcagtgcctctggatcctggaggcaaccatggaagagttgaaagcagagaaagcccgtcaggctaagtag

SEQ ID NO: 148571 - DNA, 465 bp, Enterobacter cloacae
atgaaaatgactagccggagtgtgcgctggttgttcatcctgttgatgattatcgcgccacttttttatgcctggtatacgcattatcagcggaatcattttacctgtgagagtcatctcattattgttgatgaaagttcgcggctagatgccctcatgacgtttacatttaataatggtgctggcagttacgattccaccggagaatacagtcaggcgggtcacgaaacggttgccatcagcaataaaattgccttccgttactggcgcgaagaagggcgaattattatgatttccagtgatacaaacgagcgcccgaaaaaagacgaaccttttcgtcactctattcccgattttttccgtcaacgcgaccatggcattagtatacagctcgttccggtaaacgctgcttcctacctcttcatcttcggaaatactcccgcgttttactgtgctaaaggatga

SEQ ID NO: 148572 - DNA, 792 bp, Enterobacter cloacae
atgaagcccgtctttctgataaacggcaccgtgctttttgagcctgagctgcgtcgactgtgctcactttcgggctaccctgagcgcgctgtgctcctgcatgctccggttagcgagtgcctgctacagctggttgaacacaacggtgaggtgcttacgcaacgttatcttttctcagcggtatgggaaaaacagggtgcagttgtctcgaccaacgccctctaccagactatcgcctctatccgtaaggcccttaagatggcgggtctggcagataatgttgtgcaaaccgtacccaaagcggggtttaagtcggttgctcaaattcagacaggtacactcgacacctttatcgcgacggacgcggcttcgccagccgacctgcaaactgaagcttccgtgccgacaccgcgtgtagcagataaccctttccgctttctctcagggaaaatagcgtatggcgtcgctacggtgttatttatcctttcgtgtatggttctctatcaacagttgcatgaaaaacgcgccggatttgaaacctatcaaccgataggcaatattgcagggtgcgacgtttattcctcctggtatgacaaaataaaaagtcagcggatatatattggcctgaccaaacgttatcccattcagtgcaacgccggtggggtggcctatatcacgctcaaccgttatcaaaatggaacgtcggtgattgtgtgcgataaattgcctgaggttgctggtgcacaatgtgattccattttgtacagggagcaataccatgaaaatgactag

SEQ ID NO: 148573 - DNA, 417 bp, Enterobacter cloacae
atgatcggtgatgacattcattttgatatttctaaccgcagactctaccgccttactggcatccagagtgataaaagtattgcatttgcctctatttattttaatgaaacgatgctcaggcttttcctttatttgttgatgaatggcagagcccagcccatccctaaagaagagctctttgaagaaatttgggaggcgcataatctgagcccctccacacaacgactgtggcaggttctgcgcaatctcaacaacaaactgagtatgctagggttaccagaaaattttattcgcaatattaaagggtgtggttacatcattaattattcggatgtaatccccgtttattacagaatgagcgaactcccggctcattctgttaaaaaagaggagaagacagatagcctgagtgagtga

SEQ ID NO: 148574 - DNA, 1926 bp, Enterobacter cloacae
atgagcataatcaaccattttgccaacttgaaagttcgtaagaagttattctttggtttttctctcgtgctgctcgtgacgattgttattctgatttcaggtttgctgggtctcagcaacattcaggataaagtcgaaaagaacggccataccaccgacctgtttaacgccctgacgcaggttcgcttagggcggacgaattttcagtacacgctcgaccagaagtaccttgatcagaccaacgccgcctcccagcgcatgcagagcattgtcgccagtatggaaaaactgtcctggtccccggaaggaaaaaaagcgctggacgatacggcaaatgcggtgaacagctacgtcgccaccctgctgcctttcacaaaatccctttctgagaagaaaatcagcgaacagaaactgagcactcagggactgtgcgataactccggcctggcttccacgctcagccgaaatggctcgctggacgcttcgcacgcctttgtggccgctcagattgcgtttgtcatgagcgacattgattctcaggttaccctctataaacagcatcctacggatgcgttaatgaaagggatccgcgcgcgtctggacatcgcaaaatcggacaccgaacaactgctttcggttgctaccgaggaacaaaaggtctggctgcagtcaggcctggaagacatgcaaaacgtcgcggcagagttaataaattaccaaaacgtctggaatcaacagtcgacactctccgataccttaaccggtaaagcgataacgctgacgcaggccatccagacattatttagcctgcagcagaaaaaagtgtctgatacggttgatagcgttcagatacagatgggcatcgttgctgccatcggtcttgcgcttggtgtcctcttagcgatgggcatcaccctgtccatcacccgtccgcttaatgagaccctgcgtgttgcagagcaaatcgcccagggcgacctcaccagcacactgaccagcacacgtcgtgatgagccgggtctgctgatgcaggccgttgcgaccatgaatgccaacctgaaaaacatcattaatgacgtacgcaatggggtggatagcgtcgcccgttcgtcttcagaaattgccgcaggcaatatggacctctcttcgcgcaccgaacagcagtcagccgccgtcgtcgaaaccgccgccagcatggaagagttgacttctaccgtcgcgctcaacgccgagaatgctaatcatgcgcgccagctggctgatgaagccgcgcaaaatgcgacggaagggagtcagatctcactgaaggtgatcgatacgatgaaaaacgtgcgcagcagttcgcaccgcatttcagagatcaccaccgtgattaacagtatcgccttccagaccaatattctggcgctaaatgccgccgttgaggccgccagagcgggcgaccagggtaaaggctttgccgtggttgccgcagaagtgagaacccttgctcagcgcagcgcgcagtcagcaaaagagattgaaaacctgattaacgaatcggtcgtgcaggtggataccggctttagtctggttgaaagcgcaggggatgcgatgacgaaaatagagacatccgtggcgcaggtgcgtgacattatgaacgaaattgccgccgccactgatgagcaaagccgcggaatttcgcagattgcccaggcgatggcagaaatggacaccaccactcagcaaaatgccgccctggtggaggagtcttccgctgcggcaagttcgctggaggatcaggccgtgcagcttgaaaaagtggtgtcgattttccgtgtgtcaaacgggcacaaaccccgccaacgagaaagccagctaaccgccagcgtgacccctattaaacgatcttcttcccatgaccagaatgactgggtcaaattctga

SEQ ID NO: 148575 - DNA, 831 bp, Enterobacter cloacae
atgataaccacaacaaaattaacctcaggatggttcacccgcttcaatgcactgttggcccgcctgcttaccctctccccggaaagcaccctgagcgcggccatcgagaagcgcgagattgtgccggtttaccagcccttctttaacagccagacgggcactatcgcgggtatcgaggtactcgctcgctggaatcatcctctgtacggtcccgtgtctccagatacatttatcccgctggcagagaaacaccggcttatcgccccgctaacgcatcatctgattcagcaggtcattgccgatcttcagcatcgaattcaccttttccctgaccggctttatatcaaccttaatctgagcgcccgtaactgcctcgatccgcgcttcgagacggatacgcttgagcttttgcaaaaacttgcgtcgagccaggtccagctggttatcgaaattacggaacgcgatccgctgcatttcactcctcagttaagcgaatggtttgcaacgctccgacaagccaatatctccctggcgttggatgactttgggaccggctgttccaacatctcttacattcacgcgctagaccccgaattcatcaagatagacaaactgtttgtcagccagattagtgaaaatggcgataccagactggtggacagtcttatcgaattggcgaaaaaaatgcacctgaggattattgccgagggcgtagaaacaaaggctcaggctgactatctgcgcttaaaggacagcgattttttgcagggttactatttcggtaagcctatgaagatcgatgaactcgtcgggaaagttaatgcttgctga

SEQ ID NO: 148576 - DNA, 1035 bp, Enterobacter cloacae
atgtcggcaggtacaattaccctcacaaacgggtccgctattgttggtggtagcggaacggcatttgcaaatgaaatcgctgcaggtgacttcattgtctctactgtgggcggcgttccgtttacgctgccagtcaaatcagtcgagagcaatacccagttgacgctggtcagcaactttactgggcctacacaatcaggtgcggcctggtcagcggttcctcgagttgcgcttaacatggtaacggcagcgcttgtggcccaaagtgctgaagctctacggggtctgaactatgacaaacagaactggcagcaggttttcagtgcagctggaaacattacggttaagctgccagacggaacgacattcaccggcccttcatggaaatacctggtagataatactggaaccatcgatggtaaaaaggggggaactctctcaacaacctacctctctgtggctccgtacgataccggagcgggtaataaagtggcgttgcagtccttcagcactgggtctgttgcagggattatcggaaggacttcttattcatattttaatgacacaggttatgttggggccagaagggggagcggttacgatattctggatattgcaattggtatcgataaggccaatggcacttacaccaactgggttttttccgcagggggaaatgccacagcgaacaatggttcatggataaacaattctgacgagcgtattaaagagaatattaagcagatcgaaaatccgcttgctaagatgcgtttggtacgtgggtgtacgtgggatcgtctcgataacgcccctccaggtcagggtttcattgctcaggagcttgcactcgcaatgcctaccgcagtatttgaaggtggggaaactgagctcagagatggttcaatagtcgagaaaacgttagctgtcgatgtagctggtgcagctgctgcgcttcaccatgaagcgattctggctttaatgaatcaaattgaagatttaaagaaacaggtcgaggcgttgcagcctggaagttaa

SEQ ID NO: 148577 - DNA, 240 bp, Enterobacter cloacae
atgactaaaataatgttagcgatgaccttttgcctgtttctttctgcttgctctggttcggctctgcaaaagcagaaaccattatgcgaggcagaagcgcttattggtggccaggttcagtcggtacagatttacggtgtgcgtaaagtagccaatcagacacaatatatagcaggctaccccttcaactggcgatgggtgagcaaaaataacttcaccaggtcgacctgttcaaaatga

SEQ ID NO: 148578 - DNA, 600 bp, Enterobacter cloacae
atgcaggaagttatgagtcgtattgagcttggtggtgtgctcggcaaaaccttcggcaaagttcaccaccgactaatctcccgagtgagtgaagcgggggttgcactcgctaaaaccatccctggatttgagcagtttatgatatccagtcagcgccgaggactcactttttccgttttcgatgggaaaagaaatattggtgaggatgatcttggctttccggttaccggcgacgttatccgcattgttccaataatcattggcagtaaaaaagcgggtgtactgcaaacaatccttggcgcagttctggtcgttgtcggggttgcgataggctatttttcagcgggtacattatctgcggccggttatggtgtcgcacaatttggtgcggcgatgatggtcggcggtgttgtgcaaatgctttcccctcagccaaccggattggccagcaaacaaagcgcagataaccgcgcatcctacgcgttcggcggagttacaaacactgcagctcagggctacccggtcccgctcctttatggtcgccggcgtataggcggagcgattatttctgccggaatttatgtcgaagatcagcagtag

SEQ ID NO: 148579 - DNA, 234 bp, Enterobacter cloacae
atgagcgaaaatacccccaaacctaacgacacaattttgatggctcatgatgtcatcattgcgggccttttgaccactctgccagaagaacaatcaatggcggtccgcaattttgcgctgataaaactcaatcagagattggaagaagaaaaatcaaaggccgaaccaaataaatttattatagaaatgttagagcaagcaaaaacatgtactgttaacttgttttcacgataa

SEQ ID NO: 148580 - DNA, 558 bp, Enterobacter cloacae
atgctgggggatagaccagtgaatattaattttatctcaatcacgataatggtcatcgctggtctgtctattgcactggtaaaaagttgctcatacgccagcaacatacagagtgataatgacgttctgcgaagcgacaacgctttacaggggcaggtgatcgccgctcaggcattcaacttcaatcggttcaatcaggttgcagagcatgccagtaggatgaattccctgatagacaccagcaccgaagaaaccgtaatcgaataccgggagattctccgccgtgaaaagacctgtgatctgcctgttcctgctgatatcgctggtgggctgctcgaatacgcgtaccgtttacgtgccagcgcaatgcacaccgataccggccgacctgacgaaaccgatgatcgtgccgctaccgccagctcaatgacatattgccaggccgttttgtggattaagccgctactggccgtcattgagaagggcaataataacttagtgggtatcaggcagattgaactggaaaggacaaatcagaaatcagtcaatgtaaggtaa

SEQ ID NO: 148581 - DNA, 522 bp, Enterobacter cloacae
atgttcgcaaagcaaaagtctggattgttggttttcgcccctatctgcctcatctttctgttgtcggcctgcaattcccactctccccgtgaaaagtttagtaccatttctggccgcgtaccgccaacgaccagtagcatcagctttacaaagcagcaactagctctcccatatgaggtgcgactcacaggctcaagtgataacagtattatttgcgacaactgcggaaatactcacaaaaaggtgtcgatccggggaggagagaacctcacacagtacaacatgatggttgagagcccttatttcactttcttatgtacccgaactgtcggtggatgctggagtggttcatgggttgccataaacaaaaaccttgccaaaccgtatgtggaaaaggtatggcttggtagtaattcagatatccgcaatatcataccctctaacgatcagcgcaggaccttattacaggtgacctatttgaatggcacgcagaaggtttttgtattcgataacgataaataa

SEQ ID NO: 148582 - DNA, 228 bp, Enterobacter cloacae
atgactaaaacggcagtagagaaagctatcgatatagctggcggtgttcacgcattagcgagagcggttggtgttaaacagccatccgtttcctattggaaaaaagttggtagggtcggcaccgattatgttcttgacgtagcagaagtgacagggattccagcacatgagctgaggccagataaaccaagactttttcccgttccgcacatcaaggatagcaagtga

SEQ ID NO: 148583 - DNA, 726 bp, Enterobacter cloacae
atgaagaaaaacgaattacttacgttgggcgaaagactcaattacgcaatgtctcaagcaggtatgagccaaggtatgctggctaagcaagcaggaatggctcagcctactatctggcggatagccactgggagggcgaatggttcatccaagatacttgacatagcgaaggccctgaacgttaggccagagtggcttgtaagcggtgaagagccaatgactgctgatgattattcatataaacctgagaataaaaaaaatgaaaaccatctcgggggcaatgtaagtgacaacgcgtcagccagtgaagacgaagttgatgtggtgcttctgaaggatattgagtttgcgggttcagatgataaccttatgaaagatggcgttagtggccataagattaggttctcgaaatccacccttcagagagtaggcgccaccccaagtggtagcagtgtagtgtgctttccgattagaggcggcagcatggaaccagccatgcctgatggaactaccgttgcagtcaacttagaagataaaaaaatcgttgatggtaagatctatgccataaatgaaaatgggtggaaaagaatcaaacttctctaccgtactggtcctgatacagtcagcataagaagctataacagcgcagagtttcctgcagaggagaaacctttgcaagatctcgaaattctcggacgagtattctggtactcagtcctgttgtaa

SEQ ID NO: 148584 - DNA, 306 bp, Enterobacter cloacae
atgaacacaaactccctacccaaaccaactaaccagacatttgatattcacgccaagcttagagcatcaaagagccattggtcatatctttacgcctcccagcctcaccaagatggttttaattatcaatttaacaccactttcattgatggagtggagttcgccgtttacgaacgcatcgataactatttcgtcctggttgatttttttaagtcatacgatgaagcctgtgatgacgctaaaaaaatcattgatgcttatcctgacattaaaaagatgttcgaagccaaacaagcaacatattaa

SEQ ID NO: 148585 - DNA, 861 bp, Enterobacter cloacae
atggcaatgaaaactgaattaacgccagtcgcggctcgtgacttgcagataattgagtatcgcggtcaacgtgtagtaaccactgaacagctggcagcgggatacggaaccgatatggagaatattcgccgcaatttcaaccgcaataaatcacgtttcgtggaaggtaagcattacttccaaatctcaggaacggaactggaaaatttgcgagtctcttatagtcccgcacaaatttcgaacaaaacgcgtagcctgactctgtggacagaacgcggtgcggccaaccacgcaaaaatgctggaaaccgatcaagcctggggatatcacgaagacctggtggaattttactttactcagcgtgatgccatagcggcaccgtcaacacaggtggctctcagccgtaaacagctggcactgatggttatcgaggccgaagaacgagccgaagccgctgcgctggaaaataaaacgctcagcgccaccgttgagagtctggagaaacacttcaccaaaggcatgacgatccctgcattctgtaaggctcttaatggcgtcaatatcaacaaaatgatgtggtgggtattcgagcgtgactgggtgttcaacgaacaacgtgatcctgagaaagatcctcgctggcgtgtcgcctcatatgcacgcgacaaatatctcacagaagaccagacgcagataaccccgcacggcaaggatgctttcacaaagtttacacctgtgcttctggagaaaggatgtcatcgcctgtaccagctgtatattaaaggtgaactgccgatgaaaaagacatggaacggcgaatacagtcacgataaagcgatttatacacccgagggtatgtga

SEQ ID NO: 148586 - DNA, 420 bp, Enterobacter cloacae
atgaaaagggacatctgcgatcatgtcagctcaattcagcaggcccaccagcaagctcttacatggctgtctgatgcctatctgttccatttggtcagcgtacatcgtcgacctgtgtatcgtcatgtgcatggtgatatttcattaaaccaaccctcgcttcagggattcatcgactcatatcttgaagacaagggatggaatttagaacgtcgcagggcgcattacatcaacatgctcaatcttattggctatatgggccgaaaaaactctgacttcattgactggggaacagtgccatcactaacacctcgcgggctgcgctggatgaatgcctgtctctcaaggctgggtgaaatggttaacacctgtggtggttgggataacgttgaaacattggcagacatgaaggtggactga

SEQ ID NO: 148587 - DNA, 174 bp, Enterobacter cloacae
atgtgtgatgagcaaaaacttaatccggttaatgagcttgagagaatcagggcgcttgcagttgctgccgggtatttatccactacagggaaagaggcaacgctgttgtatgaacttgtagatttagtgggagaaatagcccgcaaggcacttgagcatgaaggcgtattatag

SEQ ID NO: 148588 - DNA, 597 bp, Enterobacter cloacae
atgactaaattttatgcccctaccggggaggtactcgctcaatctaaaatcggtcagcacggcatttctacgccaactatgagtagcttagaaatggtcgattacatcaatgccgagcgtaaagcgaaagccgaagcagaaggattaactttcccatgcaagcgctatacgaagattcaacacaaacacatccttgccaaatcgccgaaggtcttgggtgaggggtactcagccaaatttttggctcagtatagtgatagcactgggcgtgagcttccctgctaccagtaccctaagcgcgaagcttgcctgatggcgatgagctatagctacgagctgcaggccaaggtttacgattacatggaagagttagatcgccaggctcatggctacctcaattactctgtccaagagctgcaggcaatagtggctggagctcgtaaggtatcagatgaagactcaagtgacgctggccgccgtttgcgtaaacgtcaggacgatctggagctgctcgaaaaagcggaatcgctggtagaaagcctcagtcagttgaagctcgatttcatcggtagcgaacgtgctaaggagattcattaa

SEQ ID NO: 148589 - DNA, 198 bp, Enterobacter cloacae
atggcccaaagcctaattcgtttacaagaagtacgtcgccgtaccggctacagtaaagcatggatctaccgccttatgagtgaggggaaattcccgacctcggtcaaaattggttctcgcgccattgctttcgttgaaagtgaagttgatgactggattaaccagcgcatcgaagactcacgtaaggaggttgcctga

SEQ ID NO: 148590 - DNA, 1023 bp, Enterobacter cloacae
atgtttacgcttccgaaggatgctaatgagttaaacgaacaattgaatagaattgctgatgacatggaaacatgtaatgaagggttcagaaaaattcgagagcttgatgttactattcaagagataaccgatagggtagatgtaaaaaaatacgacgaaatcactaaagattttcatttaattcagtattacatttcttttcaaagacgacgtaaaatcattgatagtctagagtatatcaatgaaatgatgagtgaaacctatgagcagtatttattagaaggtaatgatgagataagcatagaagaatacgaggtttataaaaaagggcagattgaacttgaacaatatgagttaaaagatgatatctacagaattcttactggagataatattgatatcaagaaagaagaccttaagtatgctgatgcttggcatctgtctctacctgtacgcacgattgatatgaaaaatattgcttttgaaaatcgacgctgtggttttgttggtgggatggaagagaaagattataatgatgttatttgtaaggtatggagtgatagcccaactggtgaagatatagcaaaattaagaactattccggatggttatggctggcctacaaaaggattgagtcaacacatttgggctgaaatagatctcaacacacctgatgacattctttttgagtcgtttaaaaactgggttaaagcagcaagagaattacctgtattcactgattcatcggttccatatcatttaatgtcagcaaaggtaattaaacctagtcatataaaaaaatggcgagccttacgtatattggcatatttggatttaaaaatattgtctatgttaactaacttccctatcaccttaaaacaatatggagatatattgttttttgaggattttgatgtggatacaactgaaaaagtaagaaaaactcttatccctcttgcaaatgatgtcctcgattatggttaccttgattgcatgttgaaaaaagtattggcggaaaattaa

SEQ ID NO: 148591 - DNA, 699 bp, Enterobacter cloacae
gtgacagcgcacaacccgttcgatacgcccccccggttacacgacatttctcaggacatcgtcggcatcaaactggagcctgtcgtcgccctcacctctcaacaacgggttggcgtggaggtactaagcgtcctgtcagacacatgctacagcgaggattttttccgccatcagccagcaggctggtcaatgacgctgcttgaagcgcagcttgccgcactaaaaaatacgccgcacggtcataacctttttattaatttgccgataaccgttctgacagagccagcgtcttttcagcggcttataaaactgaaaaacacgccgctgaatattgagattgttgattcccctgtttttctgacgttctctgccgcacagaagcagagcgccattcagaacatgcggacactccggcagcaggggcacagtatatggctggatgatattgacgaaattatcattcagccgtttttattttgtcggttaccgttgagcggcatcaaaattgataaggacgcattctggcgtttacgcgccacgcctgcgctgaggcaactggtttcacgttgctttcaactagccgggagcgtgcttatcgaaggtattgagactgaacgcgatcgcacctgggcactgcaggcaggcgcagatttcggccaggggtattactggccgtcctggacatggccggaggattaa

SEQ ID NO: 148592 - DNA, 1074 bp, Enterobacter cloacae
atgtctaaagtggatttacgatccaaaaaaacctggggagcgctggccttaattgccgcgatcgcgggggcgatggcttccgcatttgcgtggacggcgggctggcttggttcacgcaccatcagccaggcattagtcccggaaacgccaacgccgtttcctcctggatttcgccgtgcgcacggcaaagggatgtgctttaccggaaacttcgttcctgaaggagctgcgaggtcactgtctactgcgcgtctcttttcacaaacggaaacgcgcgttgtcggccggttttctattggcactggcaacccctacgcggcggataactcaacgaaaaccctgagcatggcactgatgttcagcacagacgacaaacagcagtggcgtatggcgatgaacaacgagccctactttgccacccgggatccagaaggctttctggctcttcgcaaagcaaccgcgccagatgcagcaaccggcaaaccggatccgcagcgcctcgctgcattcttaaaagcctatccggaagcagaaaaataccttaaatgggcggcacaaaaacccgcacccggcagttttgctggcgcaacgttctacagcattaacgccttctaccttgttgacgctcacggtaatcgccaggcggtgcgctggatgatgcgcccgcacgatccttttatatcgttgagcgaggcgcagcgtcagacagccgatcgcaacgccatgttcgagggcgtcagccagagacttgctcagaaacctctctactgggatttcgttcttcagctcgcgcagccgggtgacccggtggataacccttcccagccgtggccgaacgatcgcaagcaaattgtggccggaacgctggaggtgacgcaggtggaagcccaggcagagggtccctgccgcgacgttaacttcgacccatcgacggttccagcgggtgtggaagtgtctgccgatcctgtcctgaacgcgcgttctgccgcgtattcacactctttcagccgccgcgagcgggaaattggctacggcaaggcaaccgaggccgttcaaatgcaggaggttaaatga

SEQ ID NO: 148593 - DNA, 675 bp, Enterobacter cloacae
atgaaagtaagaagtaaagaaatattcattgatgagattgctaaagactcttcttggagaaaacacgaactgtcagttatgcgtcaattgatagattcaaccagaggagttgcgaagcattctgcaataagggcttcagtggtgatgttatattcccactgggaagggcatataaaaaaggcaggtaaattatatataagttatttgaaccatttgggtttgaaatatagcgcgatgagtgaaaataatttaacggttggattattttctaactttaattccgataatcaaggcagaagtttctactcctttgaaaaatatgttgatttcattacgattaaacatggtaatgaaaaattcaacgtcgactcggaaaaagtaattaatactaaaagcaatcttcagcttgaggtattgtctgagatatttgctgttataggcttaagtgacactcagtttttggcgaacaaattatatatagatgagcagttgcttaaataccgaaactgtatcgcacatggagaagatacaagaagaaatgaggagataaagttagatccagtatcttatcaagaattgcatgaaaaagttgttgaacttattgatgtgttcgatactgatttatgcaatcatgttgttttagaaaaatacaaaaaagctgtagctcatgcttga

SEQ ID NO: 148594 - DNA, 1122 bp, Enterobacter cloacae
atgacagatttaattacgcaagtagaaacaagaagaaaagaaatattcactgattcttatcctatgtcgattggagaacttgtaaatctttatcgtgatggggaaatagacataaacccatcctttcagagattttttagatggtcagatgaacaaaaggtaaatttgattgagtctataattttaggtatacctcttccgtcaatttttatctctcaaagggaggatggaatatgggatttagtcgatggccttcaacgagtatcaaccattctgtcatttatgaacgagttaaaggatgaggatggtaataaaaaagctcctttgaagttacatggtacaaaatatcttcccgggctcgagaatgtttcatggaatggattggagggaacaactgagtttgattcatcccttaaaatatctttcaagcgagaaaaggttgatattaaaataataaaaaaagagagtgatggtaatacaaaatttgagcttttccaaagattgaatactggcggtagtgaattatcagagcaagaagttaggaactgccttctcataatgctggatcctgaagcttataagtatttggttgatgctagtgggcttgatgcctttaacaaatcaatagctataagtgaaaggttatacgaccagcgttatgatatggagttaattatcagacttattttccttgcgaatgcagaacaggaagacctgaaaggtatcacggatatctcctcgtacttaactaataacatttcaaaaataaccacggcagagttcgactgggtttctgagattaagttgattgataaaactttttctattataaatgaagttctaggtgataattcatttaataaatatgacaaggactccggaagatataaaggagggttccaaatttcattatatgagttactagctactggagcatatcattctattaaaaatggagctgatgatgaaaaagtaaaagaaatgattttttccacttcaaaatcagccccttatgatgatgtgtttaacaaatatagcggatcaggtactaaggcatcataccgctggccgagaatgctggaacttgtgaaagagtattttatcgatgaaagtaagaagtaa

SEQ ID NO: 148595 - DNA, 429 bp, Enterobacter cloacae
atggatcaatcaattaaacagactcctgaaaaaattcgggtttgtgtgcggacgaactcttttttattcgaaaagggccttgcggaactagcacgctattactttatcgcccgagacaaaatgctctgcattgttgatgcagacacatttggtacgaagacgcatctggtgaagtatctggagttcatcaggagaataaaacccgacatgcttgttttgatcaccggccatctcccccggagcgagcagcatgcatggtatgtaaaagcaaatgaatccctggcgggctggcgggacaccattgatgccatgaactttatgctccccaatctcgacaatattattgaacattataaaaggaggaaggcaggtgaaattaagtttttgtatcaggacgaatattatggcaaagatggccgacgtgagtga

SEQ ID NO: 148596 - DNA, 261 bp, Enterobacter cloacae
atgaataatgtttatcctgaaaagcaagcatcactactcatcggtgatgcagccacgcatttatccttgcagggtattaatattgatcatgtttcgctcagtcattacctgagtaaaaaacttgagtatgccaggcgtattgatgattgcttgtatgctgaggtgattggtattgcacttgcaatgttgaaggaaaacgccaggccagccgaacggttctgttataacgatgaggcgtgtcgcgataaacctgtcgcttaa

SEQ ID NO: 148597 - DNA, 219 bp, Enterobacter cloacae
atggactggcaaagcgacaaacacgatcctgctaccgtttggttttcactttcttcccgtgcggcagagcatgagcagggaaagcagtggcatatcgcggcattattgtggaaagaggcggcgcaatatgcaaaagtgcatctgaatatcgagtgggcaaacctgcgcggtgaattttgtgctttacgtgcaaacaggatgcctaaatataacgagtag

SEQ ID NO: 148598 - DNA, 2574 bp, Enterobacter cloacae
atgcataataatattaattctcgctcttctcgtttccaacttaccaaattagcggcagcgttatttggtttgtctgcatgtaatgtacaggctgcgcagactttcgatcctgctttccttgaaaacttaggggatggttcagccgttgctgacctatcacgtttttcaacaggaaatgaagagcaattacctgggaaatatcgggttgatgtttttgtcaatgacagattactggatacccgagaactgcttttcgccgaatcaaaaagcgtaaatgataagcaagtattggagccttgtataagttacacattgcttgaggaaatgggggtccgcgttggggcatttcctgaactaaatccatataaaaatgataataataatacgcaaagctcaacgtgcgtaccttacaaacagttcatccctgactcagatgctaaatttgatttctatcagcagcgccttgatatgagtttccctcaggcagccatggtgcgcacaccgcgtggatggttgccccctgaacgttgggatgacggcattaatgctttgatggctaactatagttttagtggctccaacactgaaatgaagggaaacgacaatggaagctatgatagctattatctcaaccttcgtagcggtatgaacattgggccatggcgtttgcgtagctatgcaactggctcctcagataatggaacaagccgctggcaacatatcaatacttatttgcagagacccctgagaggtctgcaatcaacattaaccttaggtgatagctacacaccttcggatatcttcgatagcgttcaattccgtggggcacaaattgcctccgatgacgaaatgctaccagatagtctgaaaggatttgcaccagtacttcgtggtgttgccagaactcgtgcccaggtcacggtgcgccagaacggatatgttatttatcagtcatatgtcgctccgggcccgtttgtcattgatgacctttatccatcaagttctaacggcgatcttgaagtggtagtgaaggaaagtgatggtagcgagcaacgcttcactcaaccgttttcaagccttcctgttatgcaacgtgagggacgtctgaaatacgccctgaccgcaggtcagcttcgtcgccagggttatcaaggcaaagaaccgatgttcatgcaaggcaccatgatgtggggtctttccagaggagtaactctttacggcgggctagtggccgcagatggttattctgctatatctgccgggcttggcaaaaatcttgggactcttggagctatatcagccgatattagccagtccttcagccatataggtaaagatcacaaagaacatgaagagggtcaatctctgcgtttcttatatgcaaaatcattcgcagaaagcggtacagacttccgcctgcttggttatagatactctacaaagggttatcactcattccaggaagcagctgagttacagcaggatttttcaaccccatatttgctgaaacaaagaagtcaaattcaaggcaccttaaaccagtctttaggtggtcatggctcactctatgcatcgcttatacatcgagactactggggtaaatggggttcacaacttttagcacaaataggatacaacaatagctggaatggtatttcttatgggttagcttatagtcacagccgctcgccctactctggccaaaacgatcagattttttcactgtcggtgtcgattcctctggaaagattcctaccaagcagttgggcaagttacaacatgactaccgagagacatggttcaacgtcgcacttaataggagttcacggaactgcgttaaaggacagaaatctttcatacaacattcagcaaaacattcgcaacaacggtggggatgatactggaagtatcgatttaagacaccaaggcatctatgccaatagtaatttgggttatagctatagccgtaattccaagaccctaaactatggacttcagggcgggattctggctcacgcaggaggtgtaaccttatctcaacctcaaggcgacacgatggtgctcgttgaagcgaaaggtgctgctcacacgccggtatttaataatactggtgttagcactgatttcagaggctacgcggtcgttccgtacgcacagccatatcgtggtactcgagtcgagcttgatgcaaaaggtttaggagagaatgttgatctgcttgatggggcagtaaatgttgtgcctactagaggagctgttgttaaagctcaatttgaaactcgtgtaggttatagagttctcatgaaccttatacaacgaaacggcaaacctgtaccttttggctctgtagttacaattttgaacgatcgtaaaaataataaaggggacggctttatcgttggtgatgacggtcaagtatacctgaacgggttagaagccaaaggacggctccaagtcaaatggggtgaaggtaataaccaccagtgcgaagcggattactccttgcaaatatacacagaagaaaaaaatacaccgcctttaagtttaattaagtcaaatgctcaatgcatatga

SEQ ID NO: 148599 - DNA, 1053 bp, Enterobacter cloacae
atgaaaaacctatataccgcaagtgctacggttgcatttcttgctatacttttctcatactcgagtaatatccatgcagttgatagttcatggttaccaggggagtgtcgccctttgcaaggcactaagcaatatactttcaattttgtaaagaccattaatgatgttagcgaaaatgaaccgagcaaggaataccctaatgcatttcagtggtcagacaattcgcaatataacatccagtgcaactgtatgggctcgtcaaccccaccaaacccatatgtatacttcaaaaccgaaactaatttaaagtggcttacaactattaataataaaaaattctataagataagtgacaatttagcagttgcatcgcgctcacttatttcaggccagggtgatatcaatgtaccattctcagactacccgaacaccggagccccacccaatatatgctctgaccaatcagcgaaatctggttccgatggtaatttagatttacttataacaagtccgttcattggacagatgcctattcgcaatacaaatatttttaatctatatgccagtgttgtacctggttcatacggaatagtacctatcgctcaagtcaacatcactggtttagtcactgtacaacaatcgtgtgaaattaacgctggtcaatcaatccaagtggatttcggcgatatgtttaacggtaatttcaaagggccgcgattaaaaccagagggagtgtcttcaaaaaaattgcagttaagttacaagtgttatcttgtgagtaaaggaatggatgtaaaaatgcggtttacggggcaaaatgatagtaattatccaactgcattagcaactaccaatccagatattggcattatcattgaagatggtaacggtaacctcattcaacctaataccggcactataccaatgactgttgattacgatactcaaacaggttcagttgatattacaacttatcctgtaagcacaacaggtaacatacctgttgttgggcaattcaccagcagagcaacagtagtagtagattttcaataa

SEQ ID NO: 148600 - DNA, 516 bp, Enterobacter cloacae
atgaaaagattcaacttgttcattgccgctcttttttgcttgtttaccaacgtatctttctcaaaagatatcgagattaattttagtggcacggtaaagcaaagcagttgcgatgtagtcagcgcgagcaagaacttacaagtccaaatgggtcaagtcaaggtcaatagattcagcgggccaggtagtgtcgtgaatcaaaggcaatttaccattagcttagcaaactgccaaaatgttgattcaattgatgtttatctaacaggtcaaccggaccaaaataacagcaattattttgctttaacgagtgatccagatatggctgatggggtagcattgcaaatatccacacgcggtggtcaattacactcgcctctgggaaatttagtaaatacgccaatcaattatgccaatacaaaacaattgcattatattgcttcgtatgtacagaccaaaaatgtgatcaaaactggaagagctaatagtacagctgacttcacaatagtttataaatag

SEQ ID NO: 148601 - DNA, 1029 bp, Enterobacter cloacae
atgaaaaaaaagcattgtttatttgcactctgttttttcaccgccacaactgtggcggcggaaaatccgcttatgtctttaccccatcaaaaaattttcagtgacccagactcaggttcactcgttcaaatgcgcatcgatgatttgaagcaagaaaacacaaggctttgggaactcatacgtaatattgagaatcaatataaggctaaaactgacgaacagattaaatcatggaaaaccaaacaaaatgaacttctaaataacatcgagatattaagcaaacagaaatcggatatggagacaaaaacacgtgaattggaagatttgcttataaaagagaaagaaacatcaaccaaagagtcaaataaaaatcaacaagagatcagcactcttaaagctgagattgaaaaatacctgaaaaaaaacacctataattttgaagacagtaaaatacttaaatcatatgtaagtggtattctctactcaaatgacattaaggcaatgcttaaaggttatgattcgcttagtattgatttagacttgaattctttgatggcgggcttgaaggatggtttgaatggaacagctcaactggaatccaaaaaactagagtctgaaaaaggtaaacttttggcattggttaaaaaaagggaagatgagttttataaaaaatcaatttcagagataaagaaagcgattggcgacaagaaggttgccaaacaaaatcaatctgcattttttgtagttactaatagcgggaaggatgactataagcagggtgatgaagtaacgttcgacttgaagattgaaaagttagacggtgtggcattacagcatgataaatcagctaaaattgtttatcaggattcaatggcatacgttataaatcaagctttcaaccttgccaggaaaggaggtaagactgaaatttatggtcttgcttcggatttctttgcaattggagaggttccggaaagcattacaaacttaactccagttaaaatcattgtagacacagaactaaaataa

SEQ ID NO: 148602 - DNA, 720 bp, Enterobacter cloacae
atggcagctttgcctacgggtgacgaaatcagaaacaataagatttgtatctggtttatgtaccggggaaagcgttgccgcgaaattctcaaaggttggattaaccccccggcgaacatcaaaaaagccgggaatcttcgggcagtgatcgttagcaagatcaaccctggagaatttgattacaaccagcgctttccttcatcgtccatagcaagaaaaaccgtaaccacagtttcagttcaaaccttttcagagctgtgtgaactgtggacgagcattaaagaaacagaaattagcgcgaacacgatgcgtaagacgcactcacaactcggtacgttaatgcacatcattaacggtgatacgcctgtttcaactatacgccacagcgacattctgaaatacagaaaggaacttttgaacagtgagacactttacctggcaaatcccagaagtaacaaacagggacgcactgtgcgtaccgtgaacaactatatatcgctattgttctccctgcttcggtttgcacacaaatctggctttatcagtggcaaaccctatgaggggatcaagaaactacacaaagggaaagtaaaaccggaccctttaacgaagcaggagtttagtttgctctcggaatccgagcgtggccaaagcctcaatatgtggacgttcgctgtttatactggtgtgcgtcacggagagctcgcagctcttgcctga

SEQ ID NO: 148603 - DNA, 930 bp, Enterobacter cloacae
atgaaagaacgtgatatcaagacaggcgaaaaagtattagtgcttggtgcaggacaattgggcgctgccgtactggagtatctggttccggcagtcacgcagcgcgatggcgctgttaccgttatcgtatcgcccggatcctgggatagccggggtaaacttcagtccgaaattcatcaaaaactggctgatgcaggggcagaattcatcgcggtcgatgtcgccgtcagctccactgaaacgttaaaaacccgttttgtgggttttgacaccgtgatcaactgcatggggtttgtcgccggagcgggtacacagctcaaaattacccgcgcggtactggaagccggcgtaaaccgctatttcccctggcagttcggcgtgaattacgatgtggtcggcaaagggagcggccagcccgtctgggacgagcagtatgatgtcagggcgctcttgcgggaacagaacgcgacggaatgggtgattgtttcaaccggtatgtttaccagctttctcttcgaaccggcatttaatgtggtgaatttatccgaaaaaaccattaatgcgctcggaggatgggacacgcaggtcacagtcacgtctcccgcggatattggtcggctgaccaccgaaatttatttgcatcatccgcagatcgtaaatgaggtgatatttgtcgcaggtgaaaccacttcttatgggaaactggccgaaacggttgaacgcacgacaagacaagcctttgccaaaaacgttctaacgctcccggatctgctggatgcactgcatttaaatccggatgaccagatgctccgctatcgcgcggccttcgcccgaggagacggcatgtggtggccgatgagtaacacctggaatgtacagaataatataccgactcaagatattgaatcatggcttaaaaccgttatgtag

SEQ ID NO: 148604 - DNA, 189 bp, Enterobacter cloacae
atgaaaataaaactggctttaacgctcctttcggtactggtctcgggccatgccgcagctaaaacctgggtgctgacaagcgctgaaagcagcgtggagaaaggaaactggaagatttccagcgatgagctgaaaattaacgatcgaacgttcagcattgagcaaaaagtgttgcacggcggcaggtag

SEQ ID NO: 148605 - DNA, 147 bp, Enterobacter cloacae
atggaatcagattatatatggagcatcaacaccagctacacgcgccagccaatcgaagttgtcctgacctctttcgacgtaggtgagcagcacatccccgtgcgcttcccccaacaggcagtctttcccagacaaaccgggtgttag

SEQ ID NO: 148606 - DNA, 426 bp, Enterobacter cloacae
gtgataaaaaatctattaatcgctaccagtttgctggcagtttcagtactggcaagtgcgcaaacagaaaaatatacttatcctcaagcggaagcattgccgcaggatgacacatcaaacatgctgcgcgatccggctctattaaccgggtatgatttaaaccttaccgcagagcggtttgctaatgcctggctttcaaaaaccaatgaacgtgaacgcattaaggcaaatatgtatcttctgggggttgtggatgcctccgagggaaccgtctggtgcaaaggaaagccttttttacccaatacccttcatgagtttctttacccgcgtttcgctaaattgactgcagagcaaaaagaagagcgcgcgtcgaaaattatcaccgatggcatgaaagaattacgcccttgcaaaaaaggagagtaa

SEQ ID NO: 148607 - DNA, 606 bp, Enterobacter cloacae
atgcgagagactggagcaaagctaaagatgaccaaggaagatttaaaacgccacctgcatgaatgtttacaagctgaagtgatgaaaaatcaaaagccctttacctgggccagaactgctcacaaagcattcaaatgccctgaaaggcggtttaatttttggtggcggattgcttcttatctttataaaactaacattagtaaaaattttgcacgcagaataaatagaaaattgaccagaaaatatggttgcgaaattcagcttggcgcctcaatcggtccggggttaattatcagccattttcatggcgtagttattaatggtagctgccgtataggttcaaactttaaaatcagacaaaattccacaattggaattggtggtggaaaaaggcctgactccggagagccaagtatattaattggagataatgtcagtgtcggcgctggctcttgtattattgcaaatgcaataaacattggtagcaacgttgacatcggcgcaatgagctttttaaacaaggacattccaggcgattgtgtcgtttatactaaaaaaacgaatgaactccttttcaaagttagccgggaggacgcttgcatctga

SEQ ID NO: 148608 - DNA, 345 bp, Enterobacter cloacae
atgtctaatacaaccacgattaacacccctgacaggccatgtgtccattgctgttcgactgttcgctatatctcatcgggttcttgtgtggactgtacaaaatcacgccgacagccaccgaaacctaaaccaaagattgcacgtgtaaccgctacagcagccgttgcaccgttccattcagaaggtggggataacagcaacaacgttattgtgaagctctctaaaccggctttagataaccttgaccgtgtaggctatgagttggttaaaaagtaccgtttagccggatattcaccagaacgaatccgaatgattgccctgtctcatctgcttgaagccgcttaa

SEQ ID NO: 148609 - DNA, 261 bp, Enterobacter cloacae
atgagtattccaatgaaagggctgtcaaagcgtggtagttataatcatcttactgactcaatggaattcaaatacttcaacggtcaaacagaaatcagtgaatcagcctataagctacttgcttcaggtaataagcctaaaccaactgtgaagccagctaaagcggtcaccacgtataaggtgaagcctaagccgccaacagttgagcagcaacgagatgcagctttaaaagccgctattaaacagatgacggggggctga

SEQ ID NO: 148610 - DNA, 576 bp, Enterobacter cloacae
atgaaagatttagcccatgctgtaaaaattgaatcacccgttgcaagtatcagccacctgttaccttgtgagcaacgtactcatattgaaaagttgtatttcccgaaagtacagcaagccactgaccgaatgaataaagctgaggctgaatttcaggatgctgtagaatctcgttcagtgttgattaatcagaaagctgctgaatatctggctaatccttcagagcgtcatggattcattgttaagcaggtttacccaaccaaccaacagcaggtgattcaatcaatggctgaacagggatatatggttcatcgtgtatctgttggaatggttacctttattcgtatgcctaagaacgctaaagataatcctcttcaggaaatcacagataaagctacagcagaagctgaatcaactattgataaaatgattgagcgattgaaagtgaaagcaggtgaagctgtacaccagcgaaatgtaattgttattcaagcccgtaaagctctggattcaattaaatcatttgaaagctatttaaacgtgattgtaaccgattctgaagaggtaaccgaataa

SEQ ID NO: 148611 - DNA, 2088 bp, Enterobacter cloacae
atggctaactatacagttgatgaatttattattcagttgggctttaacgaaaacgtttcaaaaaacctccagcgcctcgaaagtcgaacattaaaagtagctgaacgaattgaatcacgattaaacaaagcattcaccccaaagggtaattttaatggtgtgattcaatccgctaatatcgcttcaaagaatatcaataaagcattctcaaagagcatgagttttgatgaaactggtaaatcctctgtgaaatctgtagagaatgctgctaaggcttctgcaaagcgcattaaagatatgtatcaggacgcctatggagctaaaggaaaaggccgctcaaatccaccagccggaaagccacaaggcagaggctcagatttaacagccgctaattcaatccgttcactcgctaatactcagttctattcgaatctgacaagacgcttagagggtatgggttcaactggacaagcaagggcgatgaaattacgccagcaggttcacggattgagagatgatgctttagccaatccttcagccaatttgaaccagttccgcttagcattacgtgcagccactgacagcgcgtctaaatgggcttctcagaaccgtaagcaggtatctaatgcagatgggttatcctcttcattcggacgtctggtaagcgtttcagcggccttatacgggacatttgaagccgtccgtaaggtggttgaaacaggtgtagcccgtgaaggtgtgaatctctccgctgaagctgtcttcaaggggcaagctggtgatgctaaaacgttcgccgctcagttctctgaccaaatcggacagggtgtcactgagaccttgaaacagtacactggctttgctgcgggtgctcagaattcgttaggctatcagggtacacaggacttctataagaacgctgctgtattcggtcgtatcagggggcttgatgctgaacagttgaagggcatcatgacagcattcacacagatggcatcaaaagggcgcgtacaggctgaagaactcagaggccagttaggtgaccgtttaccgggtgctgaacagatgttcgctgatgctttaggtgtcaacactcaacagcttgataagctcatgagtaacggtaagttactgtctaaagatgttcttccacgtgtatctgctcagatgaaaaagatggctgatgaagcagggggattagaccgtgtatcacaaatggctgtaactggtatcggacgtgttaaagcagcgatggagaatgaccttaacaaggctttcaccagctctgagaagggcttcggacagttcaatgcttctgtagctaacatgcttaacgatgcttcaccgattgctgaggctttagggcataccctcggaaaggttgcctctatgacatctggagcggttgaccatgtagatgagtggagccgtaaactctcagcgttaatcctcagaacttcagcgtggtacgatgacttatcagacggtcaaaagaaactggttgattctgctgcacagttcgctatcggggctgctggtgttcttgctctggttaagtctatcgctggtgtggctaacaagctgaaatggttaagtgctctgttaggtggtggtgctgaagctggtgcggctgctggtgcaggtggattactcaagggtgcatcccgtttagctggccctgtaggtgtcgctctggttgctcatgatgctgtagacgcttcaggagttgaacagaagtacccaaccgctttaggtgtcgataaccctattgcaaaggctcttaactggctttcaagcccttctaaagtgttaggtgctcaggatggtgattcaatcactaacagcccattcacacgtgctatgggttcatttggtgactggcttcagggtaacaatgcgctgaacggtcaggctaatacattcgctgtaccgtctatgtataaccctgctcagacaactatccgtaatgaccagcgtattaatatcagtgtgaatatggatagtcaaaagattggcgcattccagacacaggttttaactggtggctttgaagacctgaatattaatgctgaacatttgggcgattaa

SEQ ID NO: 148612 - DNA, 273 bp, Enterobacter cloacae; identical to SEQ ID NO: 110433

SEQ ID NO: 148613 - DNA, 147 bp, Enterobacter cloacae; identical to SEQ ID NO: 110434

SEQ ID NO: 148614 - DNA, 132 bp, Enterobacter cloacae; identical to SEQ ID NO: 110435

SEQ ID NO: 148615 - DNA, 564 bp, Enterobacter cloacae
atgaaactctatgaaatcccgtttacccccgcttatagtgatgtaacccgaatcacttctttcaacggtgttaagttatctctttcagctaaaatgatttacctgtttatggtaggtcttcaaagaaacggtcaagaagtcttcccctcaatcaattacctgtgtgaattgttcggtattgggcgaaaggttgctttaggggctttaacccaattacatgaatcaggtcttattagttctattcagcgttatgatagctctaaggtatacacagttgaaatcatgcctccagaattgattaaaagccaccagcaagaaaataaacctgaatcagtatctgaaccagaggccgcaatcaccagtgactccgataatgtcttacctttcccgttaatcgaaaggaatgaaaatccagttattgacgctgtagaagagattgaaccagttattatccgtctttctaaaccaaagcctaaaccagaaagtaaactgaattatctgtttgctactgatgcagaggaagacgacgagccatttaaaatgccaatttacgaggaattgtaa

SEQ ID NO: 148616 - DNA, 150 bp, Enterobacter cloacae; identical to SEQ ID NO: 110437

SEQ ID NO: 148617 - DNA, 813 bp, Enterobacter cloacae
atgaagcagtccgccgtcagccagcagatcgccgcccttgaacaagaactgggcgtggtgttactgcaccgaacaacgcgtgcaatgaagctgaccgaacagggagaacgttaccgccgcgacatgcagctgctgctggacgccatgcgggaagcggagggacggctggcgccggtcgatcatcaatttcagggaagcgttcatgtccaactgccgagcggcctggggcagatcgtcttgccacatctactggagctgcagcgcctgcatccagaattacatctcaggctttctcttgatgaccgccttgcagacctggtgacggagggcgtggacgtcgcgattaggctgggcagtgagcccccgcaggcgcatgcggcccgcgtgctggcgcgtattgaaagcgcgctgtttgccgcccccggctttcaggcggtgcacgacgtgagcgagctgaccacgctgccccacgtgcgctttagcggcatcccgctggatgcccccctgcggctcatcacggatgaagaagcgatcgaagtaaaagtgaataccgttttccgcgccaacaccagcgacgcgctgctaagggcgctggaggcgggcatcggtatcggcggtatgcagcgaccgcttgcggccagggcgctgaaaaccggcacgctggtgccggtattgcccgactggcggttgcccgatcgcgttctctatgccgtctatcctgacgcccgctttattccgcaacgcgtgcgaagcgtcgtcggcgtgattgagcaattgctgattgagatcgcggagcacgcccccgcaaaataa

SEQ ID NO: 148618 - DNA, 261 bp, Enterobacter cloacae
atgtatagctaccacgaagtcgaagccatcaaaaccaatcttgaatggattgttaatcaggctgcgcttagccattcctccccctcacgcgccgatcaaaaagcgctcattgatctccttgaactcatccagttttacgaaattcttctggatttaattaacgaatttgggaccgccgtgattgatccgcacatttcggaaggcctggccgtaacggaaacactcatcgccagggtaaaaaacagcgcgaaagccatgtaa

SEQ ID NO: 148619 - DNA, 747 bp, Enterobacter cloacae
atgcacgcgttcgactggcagggcgtgctgaccgggcagcccctgcagtggattttatccggttttctcaccacgctgtgggtcacgcttgcgggagtggcgcttgccaccctgctagcgctgttgtttctgcttcttcgcctctccgcaggacggtttggtcatgccgtcgtcagcggctgggtctcgctgtttcgcaacacgccgctgctggtgcagctcctgttctggtacttcgccgcctggaacggcctgccgctcgggcttaaggacgtcgtgaatgccgatcacgcctggtcggttctgcccggtggcgtctggtggttcacccctgaatttttatgttctgcctgggggctgggcgtgttcacctcagcatttttaattgaggagattgagtctgggctgcgttccgtccccggcggacagcgggaagcggcgctggcgcaggggttttctgcctggcggttatttcgctacattctgctgccgcaaggactggcgaacgcctggcagcctgtcgttggtcagtatctcaacctgatgaagctctcctccctcgccagcggaattggctttgccgaactcacctgtcaggtgcggcagatcgaaagctacaacgcgcacgcgctggaggcctttaccgtgggaaccgcactgtatctgcttaccggcgttgtgatgggtacgctactgacgcgactcggcccccgcgcagggagggctcagcatgattgccggatttaa

SEQ ID NO: 148620 - DNA, 648 bp, Enterobacter cloacae
atgctgaatattctcattaaagagactgatttattttttagagacggattgcagcgttttcttgtggatttcttcacccataatttcaggcattcgctccattttgacgttgaactttctcatgaacatgttagtgccgccgatattatttttctcgcgttatgtcagggggaaaccctgacttgctatcctgaattactggcgcgcaaaaaaggaattgtggttggtctggtcgaggatgagcaccgtttctcggcatgtccgtcctgttatcaggatatgatatttctctctcggcgcacctcgcttgacagaatgaccgagacgctgtttatcgcatggtatcgcacccaattacccagctttcgctggaaaaataaaagctgcgatgaatgccagcacaaaatattatcgctgcagcaaattcgcgttatggtgcatttttacagaggattatcggtagggcagattgcggataagcttaacaccagtgataaaaccatttttacccataaatatctgctaatgcagaaattcgacctgcgtagtgattttgaactcatggccttgatccaccggatggtagagaagaatacctgtccgaaccggttgcgtgactatctaattgataatcagctgcaaagctaa

SEQ ID NO: 148621 - DNA, 963 bp, Enterobacter cloacae
atgtatttagcaaataaatatcggccgtatgggcaattcatttttctggcactgttatggttatgctcactacgtgctgaagcagactgtacgttcgggggcggtggatttaacccagtacaaccgtttaacatacagcagcccgccgtgacggttcagcgtgatgctcccgttggcacagtaataagcagcttcattaccaatggcagtggtgatatggatctttgtataggtccggggacgattacttatgaaatgagtatgttcaacacgccttcgtcaataactaattattataatacaaatgtccctggtgtgggtcttagtttgcaatttgttactacagactggttcttttccaaagtcagacagtattcatattcggtaccgaccaaaatcgttgtttatcctctggaggttactttaataaagacaggggatattacttcaggcgtgatcggctctggattactggcaacggctcatggtgatgataatgttcaatcgttaacggttaactatgctggcaataaagtgacgcaattagcatgcgcaataacaacgcctaatttaacttttcctatcggtgatatatcggcatcggcttttggcaatactgtcggcaccattccttctggtgctcaaagcacgcagaatctgggccttgattgcgatgccgatgcgaatattaacgtcatgctgcaggggatgcaaaacccggacgtcagcactgacagcgtattagccttgactgggcaagggaacgcggacgtggcgaagggggtcggcgtacaattgctatataatggggcgcctttagcgttaaataaccgaattgttttgaaacaatccgcgggtggccaggaaacgttcccgataaccgcccgttattatcagactcaggcgagtgtttcaacaggcaaggccaacgcatcagccacccttgacttaacgtatcagtaa

SEQ ID NO: 148622 - DNA, 2529 bp, Enterobacter cloacae
gtgattagccataataagcaggcggttttatttaatccggcactgttaatcgctgtcgtactcggttcggttaccgagaccgcttatgcaggtgagtattttaaccctgagctgattgaactggacaaccctggcatgaaaggcgccgatctttcggcgtttgaatccggttcgcaactgcccggcacctatcgcgttgatgtgctcatcggcgggcaggttgttgacacgcgcgacatcagatttgacgcggtaaaaaacgcggaaggcgagacgtccttgcagccctgcctgagcgtggcgcagctgaaaagctggggggtaaaaaccgagctattccctgacctgaattcaggcggcgaatgtgcgaagctctcggcgatcccgcaggcgtcaaccgcgtttattttcagtgcccagcaccttgagattacgattccacaggcggcgctgtcaccgcaggctcgcggatatgtgccgccagaaatgtgggacgaggggatcaccgccgcgctgcttaactacagtctgagcggctcaaacagctggggacgtgacggcaacagcagtaacacgaacagccagtacgccaacctgcgtccgggcattaacgtcggtccatggcggatccgcaactattccacctggagccgcgacggcagcggtaaagacaaatggggcacggtctacacctacgtgcagcgggcgatcgttccgctgaaggctcagctcacgaccggcgacagcgcctctccggctgacgtatttgacagtattccattccggggggcgcagctggcctctgacgatgacatgatgcctgactcgttgaaaggctatgctccggtggtgcgcggtattgcccgcaccaatgcacaggtcatcattcgtcaaaatggctaccagattgctcagagcgatgtggcgccgggggcgtttgaaaatacggatatataccccactggcggcgcgggtgacctcgacgttaccgtgaaagagagcgacggcagcgagcagcacttcaccgtggcctttgcttcactgccggtattacagcgtgaagggcgttttaagtatgcggtaaccgcaggccagtaccgatcctatagcagcgaagttgataaaaccccgttcgcacagttgaccgggatctacggcctgccgcatggcctgacgctctacggcggtttccaggaatcgagcaagtatcagtctctggctgcagggatcggtaaaaacatgggcgactttggcgccttctcgacggatgttactcaggcgtggtcaaccccacaaaatctgcagggaagtagcggtcagtcctggcgcattcgctacagcaagaactttgttgagacgggaaccaacttcgccatcgcgggctaccgctattcaaccagcggctactacggaatgcaggaggtgctggattcctatggtgacagcagcgcgctgcagaaccgacgtcgtaaccgggccgagctgacgatgagccagaacatcggtcagaacctgggatcgctcatgctcagcgccgtacgtgaagattactggaattcaggcaggaccacagcgtcttacagcgccgggtacaacaacgcctggaaaagcgtgagctatgggatcacctatacctacagtgaaaacggcagtactgacggcaacagtggttcatcccgcaacggtaaggatcagcagattgcactgaacgtcagcgtgccgttagaggccttcttgccgcgtacctgggctaattacagcatgaacgccagcaagaacaacggcacgacgcacagcgtcggccttaacggcaccgcgctggaaaacaacgcgctcagctggaacgtacagcaaggttacggaacggattccgtgggatataccggcaatgccagcgctgattttaaaggcacgtatggtgaagtctatgcggggtacggttacgacaagggcagcgatcgtctgaactatggattgcagggggggatccttgcccacgccgacggggtgaccttctcgcagccactgggtgaaaccaatgtgctgataaaagcacccggcgcgaaaggggtgagcatccagaatcagagcggcgcaaaaaccgactggcgtggctacaccgcagtgagcaacctgacgccgtatcgcaagaacgacgtggcgctgatgaccgatacgctaccggatgacgtggagctggaactgaccaacaagaccgtgataccgacccgcggtgcggtggtcagggcggattatgtggcaaatgtcggcatgcgggtattgatgacgcttcaataccgtaatggccagccggtcccgtttggcgctatcgccactgtcaaagggcagagcgggaacagttttattgttggggataaaggtcaggtttatttgaccggcttgagtccgaacggaacgttatgggttaaatggggtagtgataattcagaacaatgccaggtcaactatgcgattactgaaaaagacaggtcagatagtatccctgccgttgtttacgattgtcgttga

SEQ ID NO: 148623 - DNA, 678 bp, Enterobacter cloacae
atgtattttctgagtaaaactttacttgcctgcgtgtttctatcagccggtatttctcaagccactgcgggtgtggtcattggcgggacgcgcgttatttatgatggcaataaaaaagagtcttctattagcgtcactaaccccgacacggcaccgtatttaattcagtcgtgggtagagtcgcaaaacggaagtgctgagaaaacaccttttattatcacgccaccactctaccgcctggataaaggccagcagaacgtggaacgtattgtattagcaggttcggttgcccaggataaagagtcgctctactggctaaatattaagtctattcctgcggcatcgcgaaaagacaatacgctgcaaattgcggtaaaaacccgcattaaattgatctatcgtccagcagctctgaaaggggtcattcctgaagagctggcagataaattaacctggcagcgtagcgggaatcagattcaggtcactaacccaactaacgtggtaatgaatttcaatgaaatccgcgtgaatggtaaaaagctcgaggacgtaacttatgtacttcccggggctagcgcacggtttgatttgccgaaaggtattaccggcggttcggtaacgttcaggttaattaatgattacggtggtaccggaaatgtgcataacgccaccctgtaa

SEQ ID NO: 148624 - DNA, 531 bp, Enterobacter cloacae
atgaaaaagcaattaataatggcaatgtttgcagccagttctgtactgaccatgacaaatgtattcgcagcggcaggtaccgttaattttaacggtaatattcttgattctgcctgcgatgtagatgtggcttctcagaaccaggtggtggtgctgggcgattataataaaacggaattcccggttacgggttccagaacggctgcaacacgatttgatattgtactgaaaaactgtccggttacggttaccagcgcaaaagtccgtttcgacggcacgccggatccaaccaatgccaacctgctggcaattgattcgtcggtggcaggggcggcaacaggggtggcgattaacctgatgtcagcggataaggccgatctgccgttacacagcagcaataattattcctatgtgctcagtagtacaacggataatacgctgaatttttacgcgcagtatatttccactgaagcaacggtaaccgccggtccagcaaattccgtggctaatttctccgttgtctataactga

SEQ ID NO: 148625 - DNA, 1500 bp, Enterobacter cloacae
atgaaaaagatcattgccgttgctatcgtttcagcgtttctggtcttcctgtctctttatgcggtcaacgcggttatcgtgggtcagcagaaaagcaagcagcttgaaatttcccatacccttttacactattcggaaagtttgacccagagcgtggcacagacactcaaaagcctgagcgctcagggatgtgacaaaagcagtctcgatcgctacaggcagataaagcttgaaagccgctatcttgcagacatcggttatatagaacaggggaaaataatctgtaccgctttttggggaaaactcgctaatcctgtcccgcttcctgcagaactgcataaaacgcccagaggattcctcctcgcgcaattttccagaaaagatttttttaccggcaatgcggccatctataataatcttattatcttcacctcccgcaacgcttacgataaattcatcccggtcaccgcaaactactctctcagcacaaccacaaaagacttcggcagaatatttttttcggcgaccccggagttaaaacagcagagcggactgcattcctctttgtttacccttacactcacccagtgcagcgcatcctgggatttgtgcgtcattgtgaagcaccacaatgcgggactggcctccctgtcgcccgtcgtgtttaccgtgctcgcagtcattttatgttttatctgggtggcgataacgctatttttctttcgactcaatgaagatcgattctcactggagcggacgctggttaaagccgtttttaccaacactatcggcgtgcactaccagcctattgtaaggattcaggataaaaaaatagtgggtgtggaagttttgtcccgatggcgtgatgtaaaatacggtgacgtctcaccggaactgtttattccactaatcaaaaaaataggcctgtataaaaaatactacattaatattctcgaaaaatcccttgcggatatcgcaccgcttgttattaaacatcgactggtggtttcgctcaatgtaggaagaacggaaatagaagatggacaatttatcagcatcttacgccgtctgtgtttagctaataacattcccctgtctctggttaaaatcgagctttctgaaaaagccgtttccacggagactattctggaggatttttgtaaggagttaaaatcgcttggcgtgaagatatccattgatgacttcggggtgcaaaactcaaacctggcccgactctctcttctggaatatgatgagatcaaaatcgacaagtcgctggtcgacggcatcagcgagcattataagcagaatatttttgttatctttagtgacgccctcgcaaaactgaataaaacgcttgttttcgaaggcgttgagagcgaaatacagtatcgctttattgcagaaagatatcccgaggctttcgttcagggatggtatttctcaaaatcggtcacccggagtgagcttgcgaagcagctcactggtgtcgctcggtag

SEQ ID NO: 148626 - DNA, 177 bp, Enterobacter cloacae
atgtgtgcgcttcttcgagctgtggaactgggggtcgttctgttaaagccgggcaaagagctaatggagatgttcaccgcaggtagagtgttgatcgatcgccagcccgaaagcatgcgcgaatatcaaacaggccgtgttcccgatgccaggcagccacttgctgaaaacgagtag

SEQ ID NO: 148627 - DNA, 810 bp, Enterobacter cloacae
atgggactgtatttaaatgaggatgttgtttctaatatcaatatacttaattcgattttaaggagagatttgatagattatgaaaataatcaacttttttcttcaaaaatcatggactctgaagaggattttctcaatacagcagttttaacagcttggatgactttttatagccatttcactaatgaacgaaagtttctagatgataatacacaatttaatcaagagtatatttctgactacgtcaaattcaatgctgacatgtatgccaaagataaaattcagtttttgtcagaccttatcagggttctctatgaactgcatttttggacaggtaagttacgtggcgaaggaatagtatcagacgagtttctaacccttctggaaaataagtatgaaaaccttgaggataaaactacacagttcaaatatatccgcgaaaatttagctgttgcgttggttcaatggttattgaaaagtcaaggtttttctgaagctaaggggttgattaaaaatattcaagaaaaaaaggagtctttcattgaagaggttacgactttaaaagtcgagaatcttaatgagataaacctaaaggaggctgaagcgataaagaacatcaataataatttttcatccattaaaaatgagatgaggcttaataaggagtccgttgatgcatcattaaaaaacatagcggagtctttggttgaaataaaggaactcgaaggtcgagtacaagatttgaaatcggaatataattttgtaggcttaagttctggttttaataaaataaaagaaaaaaagaattag

SEQ ID NO: 148628 - DNA, 837 bp, Enterobacter cloacae
atgattcgtcttcttatatgtgtttgcctttgtctgatcgtattatacggatacgctttattcaacgacctttggttctttgaaggtatggattctacagaaaaaggagtttttggagattcatggggagcttttacatcaattttttcagcattaggattttgtggcgttttgtggaccttacagttacaaagggaagcaacgcgaaaaattgaaatggattcattaaagcgcgatgaatcagaaaaattaagagatttcgaaaactcgttctttaacatgctaagtatactgcaaactttaattaaagatatgagagttgaaaattcttctggaagaaaattggccgaaggacgccatgttttcctttatttctacaaaaacttcaagaaagaagtcaggcaaaaaaatggaaggaggttggattttaatgcgcaggattacttagacgttcaacaagcatcgttgtcgatgtctaatgagtataggatttatttcaaaaatagagcgcagaatctctcccattattttagatatgtctataatatgtttaagattatacacgaatctgagttgtgcaatgtcgataagaaaaaatatgcaaatatattgcgcgcccaactttctaattatgaactgttgatgctattttataacgctaattttgttcatggaaagaaattcatattgtatgtcaatacttatgcgattatggataatttgccagttgagaaactcatctataaaaaacacgtttcattttgtgataaagaggcatggggtgaaaattatgatgcattaaaatatcaccccaaatttcatgatgttgaaaattaa

SEQ ID NO: 148629 - DNA, 396 bp, Enterobacter cloacae
atgaagacacgcccattattactgactctgctcagcctcaatttattaaccgcgtgcagcgcttctgagccagataaggttgaacaaatacaccatctgcaggtcccgctagttttaccgggagaaaaaccgcctgccgttccggcatcacatattgcagcactttatgaagaaaataaaatacagataaataaaatagcaacacagctgaaatcacggtatttacagcacgccaccgcgaaggatattttcaccgaagacagccccgttcagccggtctacgcctcgctgacaaaactggaacagctggaaatgattaatcagcaatacctgaaagataaaaatgttaccggtctgcaaaagattaaacttgcccttcagcctttagtcacttaa

SEQ ID NO: 148630 - DNA, 810 bp, Enterobacter cloacae
atgagcgcaaatttaatctggtcaggaaaagttgatgcaaaaagtgccgaagggataaatacaggcctttccatcaaacgaggggagatcattacgattctggccgatggctgggccaaaaatggtagcgaaacttttgctctgaccgcgccacagggacgtattcccagagagggcgaaccgctaacgatacgcaatccttcacttctggcacggattgggagtgaaacatatccggttggcaaccataaatatcgctggtcaattcctgctgaaggtattctgacgctgatttatgccgatggtaaagaccagtacaaagacaactcgggcgaattcagcgttgaagtgtatcgcgaggcggatattacagcgacgacagcgccgtttgaagatttaaccaactttgaacgtgataactggaatagctggcaggcgggacctgccgggcacgatctttacctggttgacgccagcgcccgcgccgtcgagtttattaccaggcccaataaaaatcatgccggagagatcctcaaaaagacgctgacaggtctgactgccgggcatgaatatacctggacgctgaaagctgcgcgcataatcggaaaatatgaagcgccaaaaatttctctccgtgcagatggcaaagacatctccgcaccgctggagctgaagcaggcgaatgaatgggtaaccctgagtggaaaattcaaagccgcgggcagtcaggctgaactcgcggtagtcagccatgttacagcaagtatggggaatgatttcagaattaaggagctaaaaattaagggataa

SEQ ID NO: 148631 - DNA, 396 bp, Enterobacter cloacae
gtgatatgcatcgcgaaagaatacatttcagacttaactgaaaggaaatgtaacagcagaagaaagacgatcatgcaaagagaatattctgaaagcaggatatattcggtgcggtgtaatcggttccagtcgtgcggcttttggcaggcacccgatataaaaaaggccagcacaaaggctggcctgtctaaagcgcgcgtcagtcgattatttcagaccggcagcttcacgcagcagagcggctttgtcggttttttcccatgggaaatgttcacgaccaaagtgaccgtatgccgcggtttcctgatagattgggtgcagcagatccagcatctgaatcaggccgtatggacgcaggtcgaagaactcgcgcaccagcagggtcagctgttctga

SEQ ID NO: 148632 - DNA, 897 bp, Enterobacter cloacae
atggaacaacaatatgatgggatcctgaaccaggatctcagggcagaacatgtctatacgaaagtggatggacaacgtattcattgcgtcgtagcgggcaaaggtcatccggtcctgctgatacccggttggcctcaaacctggtatacgtggcgctacgtcatgcaggcgctggcgcaggcggggtttcaggcgatagcggttgatccacccggcatcggggattccgataaaccgcgcgacggctatgacaccggacgcgttggcgccatcctgcatacactgatggcgcaactggggcattcacagtaccgcatagtgggccacgatattggcatgtgggttggttacgccatggcaagcgattttcctgatgcggtggagcgtcttgtgctgaccgaagcggttatcccaggactggctcctccgccgccgattttcgtcgcaccggaagagaacatttttctttggcacttcatgtttaatcaactggcggatttacccgaaaccctgacctgcgggcgtgaatcacactatctcagctttattttcgaccgctgggcacatcgccgcgatcgggtggctgctcaggtgtatatcgacgcctattcgacaccgggaggactgcgtgcaggctttgactattatcgtgcgatcccggaaaccatcaggcaaaaccagctccgcgcgcaaacgcctttaaccatgccggtactgacggtgggagcggaacatgcgacgcgtgatgcgccgctgacaaccctgcagggtaatgccctggatctacggggcgagacggtggctgactgcgggcattttattaccgaagagtgctatgaggcgtttattgggctgattgtaccctttctctcagaggacaccgatcgtgccgcttga

SEQ ID NO: 148633 - DNA, 594 bp, Enterobacter cloacae
atggcaggaagaccgcgccagttcgatcgcgaccaggcgcttatcaaagcgcgtaacctgttctggcgacaagggtacgaagggacctcaatgtcagatttggtggctgagctgggcatcgcttcggcgcgcatttacaaggcgttcggttcaaaagaacagctctttcgggaagcgattgctcattatgaaaacgaagaaggcagcttcgcggatcgcgcattaaccaccgagggtgatgtacggcaggcaatcaaaacgctgctgagtgatgccattacgctttatagccaacctggcaagccgcatgggtgcatggtggttgctacagccgctagcgtcagtgcggaaaatgacggcattaaatcctggctggctgagcatcgcctgcagcgcacgcagcagatcattgaccggctgcggctggcggtgcaaaacggtgaattgcccgaaacgaccgatcctgacagtctgggagacttttttgccgtctttttacatggcttatccgttcaggctcgtgacggcgtgccgtcatcacgattgctggcgtccgctgagcaggcgatgagcatcctgccgcccaaagagtga

SEQ ID NO: 148634 - DNA, 513 bp, Enterobacter cloacae
atgaaatatatgattgcgctactcttcttatgtgctccgatggctctctttgccaaaaaccacactccggcgcagattattcagatgataaacgataaaggtgtaaggcgtgttgtagcagcattgtatgctaatgatagcggtgagtcggaatggtggaatcatgtcattccagagataagtaaaggaactcaggcatggttagccgtagcgagtgcccttgaacccggtgtagacgccagtacggctgaagatctaaaggcggcgctttcaaatgctatcccgcataacccttcgggtgttttagcaatcttaaatgacgaaaaaccgttgctcactattgaacaaatttgtgcttttgccaatttccctgagacggaagcagagagtaataagctttatgtcgattcaatcagggagatgtttaaggttaaaagtccggcgggtaaaagatgtctcgcggttatgatcgccaccgttgaacactctgttccattcgataaggataattaa

SEQ ID NO: 148635 - DNA, 537 bp, Enterobacter cloacae
atgtcggaaggtcaggctatacttcccgccatgaacatttacattcgccccaccaccagcgacgacgttgccgccctgcccgcccttgaacgcgcggcgggcgaacgttttcgtgacgacccggatctcgcctggcttgccgagggtgaggtcatttccgctgaacagcacctcggctatgccgaacgggggctaagctggctggcgctggcgaacgagcgtcccgtggggtttctccttgcagaggcacacccttcgtcactgtttattgtggagctctcggtcgatctggcctggcagggaaaaggaattggccggcagctcatcgcccgtgcggctgaccatgcccgcaaagtggggctgacatcgctgacgctgacgacgttccgggacgttccgtggaatgcgcccttctatgcaaagctggggtttgaatacatcactgaactcacgcctgaactgcgtgaaaaacgtgaagaagaagcagcgcacggcttagcgtataactcccgctgcgccatgcgtctgccgctttga

SEQ ID NO: 148636 - DNA, 228 bp, Enterobacter cloacae
atgaaaattcgtccacttaataagcatttctattctataggttgggttaggaagaataagcgggccgatttacaaatgctttctttttattcaagtcgtcagcatcccttcataaagcaggtgcattcgcaggcgcttaccactattctggcgcgtacggaagtcatcaccgcttttttcggtttgtttaaccgtaaagaaataaatacagaatatggactttcataa

SEQ ID NO: 148637 - DNA, 765 bp, Enterobacter cloacae
atggcctacagcaaaattcgccaaccaaaactatctgatgtgattgagcagcagctggagtttttaatcctcgaagggactctgcgcccgggtgagaaacttccgccagaacgcgagctggcaaaacagttcgacgtttcacgcccctctctgcgtgaggcgattcaacgcctcgaagcaaagggcttgctgcttcgtcgccagggcggcggaacctttgtgcaaaacagcctgtggcagagcttcagcgatccgctggtagaacttctctctgaccacccagaatcccagtttgatctgcttgagacccgtcacgcgctggaaggtattgcggcctattacgccgcccttcgcagcactgatgaagatcgcgtgcgtatccgcgaactgcatcaggccattgaacgggcacagcagtccggcgatttagacgccgagtccagcgccgtcgtccagtatcaaatcgccgtcaccgaagcggcacacaacgtggtgctcctccatctgctacgctgcatggagccgatgctggcccagaacgttcgtcagaattttgaattgttgtatgcccgtcgggagatgctcccactggtaagcaaccatcgcacccgaatattcgaggcgataatggccggggagccggagcaggcgcgcgaagcgtcgcaccgtcacctggctttcattgaggaaatcttgctggaccgcagccgtgaacaatcgcgtcgcgaacgttcattacgccgcatacagcaacgaaaggattaa

SEQ ID NO: 148638 - DNA, 1005 bp, Enterobacter cloacae
atgaatttacgccgttcagtcaacacgtttcttgcatctgtgctgcttctgctggcgggcatctttttccattcagcccgggcagaatgtacctttaacggcagttctgacgtggatgccgtggtgacgtttcaacttcctccggtgattattgtccagcccgatacgcccgtcggcaccgtgatttatgatgccagcgttgaaagtaaagaggtgttggtggactgtagcggtgaagcgcaaattcggcgcggatatctgtatctgaccgataccgacgcgcgggaggatgtgatgaccggggtttaccagaccaacgtgccgggtattggcatccgtgcggcatcgtcgaacgagcagttccccagctacaacgaggaagatatcctcaggccgatgcactatctgggatcgacgcatggaagctcgcagagcaaatcggtatttcgtgccgccgcacagctggtggtgacgggcgatatccaggaagggtatctcgatacctcacgattaacctcaatggacattctgggcaacgcggtgataggtgagatgcgtttttctcctgccagcgttcgcattacaaccaacacctgtaacctggttgaccgaaacatttatgtgccgctgaaaacggtcaacacccaggactttaacggccagtactcagacatactcacggacagcagcttcaggattgaaatcaccgactgtgcggcgggcacaaaggttgattatcagtttaccagcgcgggttcaacgggggtcacgaacggcaatattctcggcattgctgccggagactctgccgccgatggcgtcggcatacagatccttgaccagaataatacggtgctgcagtttgatcagaactacacggccataaccagtacgcaggacaaagtccctgtcgagatcccgctcaaggcccgctacatcaagacgggagagattaaagccggcaaagtcgactctgtcgcgacgttcgaagtattttaccgataa

SEQ ID NO: 148639 - DNA, 588 bp, Enterobacter cloacae
atgagctttctgagtgttttaaccggacgcgtattccaggatctcctgctgcatggcaaagagatagaagaggctgttgctcgtcgcgatagccgccttttaaaccattccactcccgagctggaacggtatttttcccggccgctcagcgagcttccgcgtcaaaatccttatccggtagcggcgctgttacctctgtttttagtggcatttgcgttaaaccttttgccttttcttcacgcattgccgggcttatcgccattacagcatgcactgagttttttcataccatcattaacaatgacaggcgtgctcattgcgataagcgtacttctggcccgtggaaagacgtctggattgttggggtttatggccttgttcatcattctgctgataacgaccctcgttcaggcgctccatatactgctttctcatgacggaagtctttggccactggtcatcgcatttttcgctctgctactttgtcggatggtgatgaacagcagaggctttgtgctgtttacgctctattgtcgcactcagcgtcttgccagactggcacgcgaaatgcggctaaaaagccattaa

SEQ ID NO: 148640 - DNA, 342 bp, Enterobacter cloacae
atgcgtaattcacttaaagccgttgtattcggtgcggtctccattgtgttttctgccagcctccaggctgaggttcattcgcatggggaaatgaatgccgccagtaatgaggcatcagagcaaatcatccacggtaagggcgttgtgaaagcggtcgatcttacgaataaaaaaatcaccatctctcatgacgctatcccggcgattggctggcccgcgatgaccatgcgtttcacctttattcaggctgacgagagtatcaatgccttaaaagtcggcagtcacgttgatttttcgtttattcagcagggcaatatctctttactgaagagcattaaatag

SEQ ID NO: 148641 - DNA, 237 bp, Enterobacter cloacae
atgccatttgtgaatgtacaaacgattaaagggatcatgaacgccgagcaaaaaagggaattgctgcgccgaatgacggacttaatggtggaaatcgaggggaaaggggatccggcattccggaattcggtctggatccgtattgatgaacacgagccggagcaatggagcctggggggattacagcctactgctgaaatgattgcgaagaaattcgcgtcgacgcagtcgtcctga

SEQ ID NO: 148642 - DNA, 462 bp, Enterobacter cloacae
gtgtcaaaagataaatcattgccttatctctcacccgaactgtgcgggctcgcagaaggggctaaaatcgttggcgatcaatggattttgctgattttgagggaggctttttacggcatcactcgcttcgagaccatgcgcaaccataccggcatcactaagcagacgttagcaacgcgcttaaagttgatgacggagctggggttgctttcccgaagaccttaccgggaagaaggatcgcgggaacggtatgaataccagcttaccgacaaaagccgcgctcttgccccggtgctgctatctctgatggaatggggacacctgcatgttttacacaccgcaccgcatatcacgctggtggataaagcgagtggtgaaccggtgcgcattggctatgtgaatacgcagggccatgaggtcatgcgaagccaggttcagattgtgccgtcaatagaggggtaa

SEQ ID NO: 148643 - DNA, 3687 bp, Enterobacter cloacae
atggatacattaatatgttctgcaacgcctgttcagacgttcccgcattctgctgcacctaatacatataatcctcgtttacatataaaagtgagtttgcttgcattacttatttccgcttctctgacaagccacgttcgggcagaggactatacggataccgttatcagtgacgatccggatgtaccaagagtgttcctgggcggagacaccatcaccgtgacggacagcgatgcgtccgcgattcgcgccgaaaatggaggggacgtttcggtaccagatggtggaatcgccattaccgtgactggcaccggtacggctgatggattaaataacaatgtgattattctaaacagtggctcggacgtaaatcttggaaccggaaccaccattagcgcttccggtaaagctattgggatcctgctaaatggatcgacagacgcgaatgaccctcgcccgcagtttaaggccagagatttgtccataaatacaagcgatatggttcttgggggaatagatagcccgggtattagtgctaactggcatagcgatgtggaattaacgggggattaccgggtcactaatgctggggctaacagtggtgccctgttatcggctaacgctggcgcccatataacgatggtaaatgctgaactgaatgcgggtacgggtgaaaacccggcatcgggcacctccttcggtattgtctcgcaattcagcagcagcattacgggcagcggaacgacgaatttaaattacgacggaagcggaaacttttttggcgtggcagccggcgccagtctgtcgggcgaggatgctgcccgggtacaattaaacgatatgaatttacagatccgctctgacggtggggcggcaaacggtctctgggcaacccaatccgggacaattaacatcaccgggaatgcagacctgaatgcgcaggccgcttccggctatctcgtcagggccgacagaaacgggacggttaccctttcaggggcctcaaccggcacactcacggcagatactgcatggggtgtctggggggcggggcttggaaatctgtcactgaatcaaagccagctcgcggtgaagggtacagatgccgccgccgttattcgcgctgataacagcgctgccgctggagaaaaccgcttttcctttgtcgattcagtcctgagcagcaataaagatggtgtgctggttaccgccggggatgcgaccattacgctgacaaacacccgtctcagcgctgataatggggcagtgattaacgccgctggcacgggcacaacccgcgtggtggcggacaataattcacagttaaccgggcgagtgcagacggcagaaggcggcacgacaaatctgacgctcggcagtggctcttcctggaacgtcacggaggattccaggctcagcaacctgacgctggataacggtaccctgcgctatgctggcgcggcggcacttaccgcgaccgatggcataaccctgagtggcggtggtggcaccattgataccagcggcaatgcaatccttatttcatctgtcctgacgggcgatggcggtttaacaaagaccggcagcggaatactcaccctgacgggtacacattcctataccggtggtacagcgatcagcgaaggtacgttgcaacttggcaatggtgataacccgggaacgattgccggtaatatcatcaataacggtacgctcacgctgaataataacgctgtccagcagctaaacaatgtcattactggcacggggcaattccgcaatgaaggcgcaggcactaccatcctgacgggtgataacacctggacggggggaaccctgattaaccatgggacagtgcaactgggtgatggtggaacgcaagggagcatcaaaggtgatgtgacgaacaacagtgcgctggtggtgaaccgtagtgatgctctcacgctagatggcgcgatcggcggttcaggaacgttgagaaaacagggaagcggggagctgatactttccggcttatacagcctgacgggcggaacctatattgatgccgggacgctgacattttcgggcaacacgtcaacgaccaatgtgacaggccagagtggctcgatactgaacctgaagaacaatgccaccctcacgggttgggttgatccactggatatgaatattgaaagcggctcgacctggaatgtcaccggtaccgcgggacagaacgttctggatacgctgacgcttgccggaaatattaatttcccgggcgcgacaggtggcactttcacacctaacaccctcacggtaaaaaatctcaatgggcagaacgggacggtcggcctgaatgccgatctcagcaacggaacagcggatcgcattattgtaaacggtggcgctgcaaccgggagtactaacctggcggttaataatgtcagcaatacgggggcaccaacgcaagggaacggtattctgctggtggagaccaccaataacggaacgactgctgccgatgctttccggctgagcagccctgtttatggcggggcatatcgctactccctgctgcgtggcgccagtgatagcagtgcggctgataactggtatctcacctctgatcaacccggttcgccaaacccggattcgcaaaaccctggttcgccaaatcccggtacgccggtatggcgtccgggtgtctcggtggcggcagccacgccgctgattgtcgcagggactaatatggcgatgatgagtaacttttatgaacgtaccggtttttatggtctgaacaacagtgatgtaacaccgacagcatctatgccctgtgaggaggatcttacgctgtggtgtgccagagaatcacgggcctggggacgttatatcaacgataacattacgcataaaggtgatgggaagggtatctacggcgatgccggggcaaagtatgatcaacacattaacgccattcagttcgggaatgatatctggcgcaatgttgatgatacgggtaaccgcaattacgccggtctgtatgccacgatcggcaacagcagaagtcacgtgacggattatgacgatagcgaggcggggctaagccgcctggatgcttacaccctcggctcctattttacccatgttcatcataatgatgcctggacggatatggtattccagggttcatggttaaaagcacgtaaccaggccgaagacaatacccgttacgatacagaagggttcgctcttgcgacatctcttgaaggtggattcccggtgtacgagacagggagcataaaagtagagccgcatgcgagagtaacctatcagtatgaaaacctgaatgatgccaatgatggcctgaccgagatccgtttcaatgatttccagtcactgcagggttccgcggggatccgggtcagcaatatcggattggtgaacaatctcaaatattctgtctggctggatgccggtgccggccaagaatttatgggtaaatcgaagacggagtttgtgatgacggagaaaaccgaaacgattaccacccggacgcgtggcggctttgctgatgtgaaggtcgggggcagcctcgatctcaacaaaacgcttgctgtctatacttctgcgaactggacgccgcgctttgataatacagagtacagtctgggggcctcgataggcgtgagagggacctggtaa

SEQ ID NO: 148644 - DNA, 405 bp, Enterobacter cloacae
atgcgtaagaaagcgtataatgcctttcgaaatccgcatacctgtccagtggctgtcactatgactttgaatcgtttttgctttttgctcctgttcatcgctgcagctggcagcgtttttaccgcgtatccctgcgccatgtggttcttgctgattaacgttctgacgatagccatttacggcgccgataaaaccgctgcgcggagagggatgcgcagggtaccggagaggacgttactggtatttggcattgtaggcgggtggcctggcgctattgtgggccaacagctctttcgccataaaacgcagaagcagccattcaaaacctggtttttactgagcgtcgtcgtaagcgtctcggctacggcggggctgtattatttttatcccttcatccccaattga

SEQ ID NO: 148645 - DNA, 1626 bp, Enterobacter cloacae
atgaacaggttagtgctcgctctattattatgtttactctatttccctgctcattccgttttggctgccgaaccccgacaggaaccgactgaaagtgagcgggcgcgcacgctatatatctttcatcaaccgatcgtcatgctgcaggcaaagttcggtttcaccacgccagaagagcgtgtattacggattcgaaatacgttacgtaatttctcgcaggaagatgttagcaaacctctgacaattatccctgtcacccggtataaccagcagggaagactgttcgtgatgaatggtaagccggtcatgctgctgacagaatcagatctggatgaaggggacgatcttaccctggatcaggccgctcagcgcgtcctggctcgtctggaagcgcagcgtaactcgcttcgcgatcaatatgatacccgatggctggtgctttccaccgctaagactgcgaccggtattttgatgtggttcctgcttggctatggtgcgttgcgctcctggaaatgggtaagagggcactatcgtcgaaaggtcgcagagaagcggagctgggtaccccaacgctggcgccgtttcatcggcctcatcgaagcgcgtctgtacggcctgttgatgttggttgtgatgattttggctttttacggctggcttagctggtcgttcagcctgtttccctggacgcgagtctgggcaacatcgttgggtgactggacgttgcatgtcatacggcagattgccttagccgttgcctctgcgctgccaggactggcaattgttttcatcatcttcaccatcactgcggtaatcctcaaggtgttaaaggtggtactcaaccaggtagaagtggggcgtttacagtttccagggctgcaccctgaaaccgtcggggcgaccagaaaacttctctcagttgtggtgtggttgttcgcgctctctgccgcatacccgtttcttcccggggccaattcgctggcctttaagggcataagcgtcttctttggtctgatgctgacgctgggttctgctggggtgatgaatcatgcgatgagcggtctcgtactgatttattcgcgcgcgctgcgcaagggcgacgtcattcgggtcgcggataacgaagggaaggtgagcgaaattggtatgctcgccaccaaaattatcacccgcgaaaactatgtggtcaccgtgcccaatgccgtcgtggtgagcggcaagataacgaacctcagcgctcaaaacaatgacggcagcgtcaacttaaccgtaagcgtcaccattgggtatgacaccccctggcggcaggtgcatgccatgcttgagctggccgccaggcggacagcgtgcgtggatccttcgacgccgccgctggtgcgtcagctgtcgctaatggactggtatatcgcctatgagcttcaggtcaggctgcttcccgggcagcctctggccgtcgcgcgcaatgcgctgttcagcaacattcaggatgtctttaacgaatataacgtgcaaatcatgtcgcccaactttgtcatgcagcctgaaggaagcgtcatggtcgccaaagaaaactggtattccgctcctgccgtcgcaccgagcgggacgcataacgctgacaagtga

SEQ ID NO: 148646 - DNA, 1026 bp, Enterobacter cloacae
atggtttgggatgatgcatacatctcttatattgtaaatgatcatcaagaccaaattgcacaaaataaggttgacagtattactcgcgatctctcaattgaaaatcacttaacgcaagttgatagcgatcttcaatcaacgaaattaggtgttttggttctggagcaagccacgaatgatgctaaccaaaaggcattacttgccggagcgcttgctgatactgcgaatcaaacagccgcaatagctttacaggaaagtgctaaaaatggctcggatatcattgatctgcaacaacaaacacaacaacaaggctcagtattaaccgatcacgatcggcgcatcacgtctttggaaaatgcaccaaaaccaactaacggcgttgatggaaaagacggcgctaagggtgataaaggcgataccggcgcgacaggcgcacaaggcgttgccgggattaacggacgtgacggagcgaatggtaaagacggtcaggacggcgctaagggtgataaaggcgataccggcgcgacaggtgcacagggcgttgccggaattaacggacgtgacggagcgaatggtaaagacggtcaggacggcaaagatggaaaaaatggcgtgatgaccaccgtgacacgcacgcaggtagacacggcaacacaggctaaagtcgctactaatagccaggcggttacggccgaggctcaggagctgctggcgaccaaacagacattacaggcactgaataataacactaaccagcaatttaaatcgctgcgtgaggaagtcgataataataagaaggaagcaaacgcaggtatcagcggcgcgatggcgatggccggtttaccacaggtgcaaacgaatcagcgcgtgatgttctcggctggcggtgcgacgtacaacggtgaaagcgctttagcggttggggcgtctgttaactttaacgaacatatgattggtaaagtgagcttctctgatgataccgcaaataacatgggtgcttcagtcggcgtagggatcggtttttaa

SEQ ID NO: 148647 - DNA, 432 bp, Enterobacter cloacae
ttgtggtcatgtcagtttggcgtaaagcaggctgacgagtgggaaattatcaacgccgccgggcgctcggttgggcagaccctttcccgcgctggtgacggccagattagcggtggtcgtggtggttacccgggaccagaattttccggctatgtgctgctggacgattttaataaaccgatggatatgttttcggagacgaagcgtaaatcagcgaatcagctgctggtgaacactatccgctcccgccggggcgaccgttccaaaaaccacccgacaccagttatcagcatacagcagtgcctgtatgtagatgatgcgaccggctttatgctggctggcggaatgggcctcagcttcgatcatgttgttatcccggcgatgattagcgaggactatatcgagcggttgccggaaagtggggcgttatga

SEQ ID NO: 148648 - DNA, 216 bp, Enterobacter cloacae
atgtggctgattcagttcatttcgtttctggtcatcttctccgtgatttatatcgtattcccctttgaatacctttttgacgtctacagcgacaaagtggggttcataacggaaacggactggagtgacatggtgctgttcagcattatggccgtgtcagtgctgatgaatgccgtgctgatattcctggtgggctcagcgagaaagaaaggttaa

SEQ ID NO: 148649 - DNA, 477 bp, Enterobacter cloacae
atgatacactgcacattcaggctgaacggtaacgcgctgtcaaacctgagctgtccgggtgtaggttttttcccagcctattccggtaacgaaggacatcaccgcaataacccggattcagttgctgtgaagaacatagggccgcttccgccaggtaaatattacattgtggacagaccaagaagcatcggcacacgagtaaaagattttttcgctaccaagtacacgggttccgatcattctatttggtttgcattgtaccgggacgatcccagcattgatgacgtaactttctttgaagaagtcgctaagggtaatttcaggctgcatcccgcaggttatgaaggtataagcaacggctgcataacgctgccttctccggcacactttcacattctccgggaggcgctgttgagaacacctcaaaccctcgtgacggcttcgttgtccgcttacggcactgtacaggtgtattaa

SEQ ID NO: 148650 - DNA, 483 bp, Enterobacter cloacae
atggctataccagcatacttatggttgaaagacgatggcggcgcggacattattggctctgtagatgtacagggccgagatggcagtattgagatccacagcttcgctcatggtctgcatttgcctacagataatatgactggcaagataaccggcacccgcatgcatagcgcgttgaccttcgagaaagagtttgactcctccagtccatacctctacaaggctgtggccaaaggccagacactgaaaagcgctgaattaaaatggtacaaaatcaacgacgcagggcaagaagtcgaatacttcaacatgcttcttgagggcgttaaagtcgtctctgtatgtccgctgatgcataactgcaaaaattccagcaccgaaaagcacaaccacctcgaagcgatttccctgcgctatgaaaaaatcacatggaagtactgcgatggcaatatcatgttcactgatgcgtggaatgaacgatga

SEQ ID NO: 148651 - DNA, 795 bp, Enterobacter cloacae
atggttcagccccattttccccttctggcagatgccacgctggcggccatcaatactgtcggcgcatggctggcgcaggacgacctgagcgagacccgtcagcccccggcggtcgatgtggtgattctggctggcaacgcggtgatcccgaccattgacgcggcctgccgtattgcctctcagaaaaacgtgccgcttctgatcagcggcggcatcggccattcgaccacgtttttatatgaagcgatccgcaaacacccgcgttatcacactctaccggtcgcggggcgggcggaagcaagcattcttgccgacgttgcgcgggagttctggcagatccccgatgagcgcgtgtggattgaagatcgctccaccaactgcggtgaaaatgcacgttttagctggaacatgctgaaagagcgtcagcggacaagcgggcacatgctggtggtgcaggacccgacgatgcagcgccgcacgatggcaacctttgcccgcgtgtgccgcgatgagcccgcgccaccgcagtggataagccatcccggatttacgccgatgctgcaaaacggaaaagagggcgtggaatttagcgaggacaccgccgggctgtggcccgttgaccgctatctttcactggttctgggtgaactgccgcggctgtatgatgacgttaacggctatggcccggccgggcgtgattatatcgctcacgttgagttcccagaggtcgtcaccgccgcatggagacggttacaacaggacccggtcctgaagggcgcacgtaaaataatctga

SEQ ID NO: 148652 - DNA, 477 bp, Enterobacter cloacae
atgataacgattaaaaaagccgacctgcacacttctgaatccctgcgtctgattgaaaaattgtcatcagaactggcgaatatcaccggggatggcggcaggcgtcattttaacgtcgactcgatgatggccgaacgcgccctgtgggttgtcgccaggaatgaaaaagataaagccgttggatgtgcggctttgcgccccctctccggacaggttgcggagctgaaacgcatgtattccgacaggagcgagccggggattggtaaggctttactggcttttcttgaagcgtcggcactacgtctaggctatagcgaaatctggctagaaacccgacacgttaatacacgtgcagtgaaattttatgagcgaaatggctaccgtgtaattgataactatggcccctacatcggcaggcaagaagccgtctgtttcgcaaaaacactggcgctgcacgagagtcgtgggaatttgtga

SEQ ID NO: 148653 - DNA, 579 bp, Enterobacter cloacae
atgaaagcacaatccgcaagcaacgatacaaaaatcagcgtcagggataagatattaatgacggcgcacgatctgttttattccacgggcttcagggcgacgggggtggatacgctgattaaagcgtcaaaagtgaccaaggtgactttttatcgccatttcccgagtaagagcttgcttattctcgcctatttgcactatcggcatgaaatatggatgaactggtttgaggcctctctgcgccgtaacctcgccgaatgtcaggtactttctgacgcgatatctgcaacgctttgcgaatggtttaattcgtccgaattccacggctgcgcgtttattaacgccagcgcagaggcaaagtccgaagagattgaaaatgaaataaaagagatatgccgcgaccataaagcagaaacaaagaaaaaaatcgaaacgctcgctggtataacggatgaaaagaccagtaatgacattatgatgcttattgacggggctattattcatgctcaaatgggaatggataccgaagcggtaataaacgcgttaaaaacgggcttagaaaaactgacaggtcagtga

SEQ ID NO: 148654 - DNA, 471 bp, Enterobacter cloacae
atgacactcgatgttttatttcatctaatgaaaacgatctcacctgaaaaaaacaccgccggtgaaaatatacatgcgctcatcacgttactttcgtcagatagcgatcgcgctgaagcgctttctccatttatccatcgactgcatctcctgtctttcgctcaacgcaatccgggtaacgccgaagcgttgctctcggcacacgttccaaaagacgattcagcccttaccctgcctgacttcgctgactggcctcgggtgcgttacgcagtgtccggggaagtccaggcgccggaatcagaagagtatttcagcaaaatgacctcggctgccaatgtgatacgcgcggcactgatcgacgccgagcgcgcaaaaggaacgcctgcgctttatattctggacaaattactcgatctgaacagtgcgctgccggaaagatataagaaaatggcaaatattccctacgcctga

SEQ ID NO: 148655 - DNA, 222 bp, Enterobacter cloacae
atgtacaactctattttggttccgattgacatttccgaggatagcctgacccacatggttatcccgttcgttcaggcacatacagcactcaatacggccaaagtccattttctaactgttattccctcgctaccctactattcatctttagggttggcatactcagtggaaatgccgaagataaaagagttccagcatgctggccttagcaaaactggatga

SEQ ID NO: 148656 - DNA, 2583 bp, Enterobacter cloacae
atgaccctacctctgaccacctctggctttacggatgtcgagcaatctaaaaggctgataaataaaacctttacctatgttgtaacgttgctggtcggtatttttgcggcggcaatagtgtctttgctggtaataaaaaataatgttaatgaaatcagcgacaagcatgacgaatttttattaagaaaagcgttagaggcccgccaggagagcatccgcagtcatctgaaagactatgcagagtggggcgatgcctacaaacacctccatcagaaaatggatacgcactgggcatgggacaagcagaatctgggcaagtcgctgtatgacaactttggctatgagggcgcgtttgtcctctccccggaaggcaccacgcgctacagcgtgattgacgggaaactgaaacaggaagaactggagcgctggttaggtacatcgacaaaagaccgtttactcagcgaactgagcaaaaataagggattgccggtttctgtactaacgctaattgattccatgcctgccattgtatctgctgaatggataacaacgggcgatgataccagtgtacaccccttaccgggccggccttcggcaatggtgtttgtagataaattaacggctaaaaaacttctcacgatggggcatgatgccgccattaaaaatgttcgtattttacccaactcgttggtttctaaaataaacgatcggacggaattaacattaagcacccagaagggtgatgtgcggattatctgggacagcgaaaatcccggccaggcgttgatcgtctattttctgccgttacttattctttccgtactgcttacaataacgatgacggtaattctcatgcgtcatattatgcacaaggcgaaaattcatgacgaaaatgcctttctccttgagcaggcacggttgaatcttatcaccagtgaaaaacgattcagggatgtcagcgaaacaaccagcgactggttctgggaaacagatttatcgttaactataacgtggctatcaggccgattttccactgttacgggatatgaaaacagcaaatggataggtcgcaggctggatgaactctttccttcaacaggagacctgcttcgtgattgtgtcagccatcgggaattaacaggacgctttgaattcaggaactgtccttatatcaataatcagcactccacctcttattgcacgcttttggcaaaattttctgctcaggctgatggaacggtagttttacgcggggcggcaacggatgtctctctggaagtagaggcaataaaacgcgtggagtttctctcccgccatgatgaattaacggggctcccgaaccggtaccacatcaaggagtttctggcgggccagttagctcaagaaggcgtcaacgcgagcccctttgcaatgatttgcctcgatttagacaagtttaagcccgtcaacgatatatttgggcattccacgggcgacgccctgcttggtgaagtcgcgtcacgacttaagggctgtattcgtgacggtgattttgttgcacggcagggaggagatgaatttatgctgctcctcggcaacaccagccaaatagatcgtattgaagaggtgtgtcaacgcatcgtgcaggaacttaaccgtcctttctccattgaaggtaatgaggtgacaataggcgtcagcatggggattgcattggctccgcgcgatagcagcagcgcaaacgagcttctacgctatgcggatattgcgctttatcaggctaaacaatccggcagaaacagatgggtctattatcgtccggatatgtcagaaaagttgaccgaacgcaggaagctggaattagaactgaagacggcaattcgtgaagaccagctctgcctgctctaccagccgcgttataacctcagatattccagaatagatgccgtggaagcgcttgtgcgctggcagcacccggttagaggaaccataatgcccgatcggttcattccgctggctgaagaaacaggattaattattagcctcagcaactgggttattcgtaaagcgtgtgtagaaacaaaaggtaatttaccaggactatcggtatccgtaaacatctctgctatagaattccaggcaagcgatctcgctgaacggataaaagagatcctccatgaaacagggcttgagcccaaccgtctggaaattgaagtgactgaaaacgtcacgctttccgatcctgaacaaacgctgctgaccatgaaggcccttaaaaaaatgggcgtgcgcattctgattgatgatttcggtacgggctatgcgtctctgagctatcttcggaagtttcagtttgacggcctcaagctcgacaaaagctttatttttgctttaggcgattcaccgcagaaccagtcggtcgtcgagaaaattatcgatctgggtaaagcctattcgatggagataaccgcagaaggggtggaaaccatcgaacagctgtcgttcctgaaaaaaaataagtgcgatgaggttcaggggtacctgcttggaaaaccggctgccattgccgatctcaatttaaacgcgaacgtactgagtgtttaa

SEQ ID NO: 148657 - DNA, 1209 bp, Enterobacter cloacae
atgccactggtcacaaaaacgttaaatcataaaaccctcatacaaatcgctgctgtaatcgcttttatccagttcacgaatgcgctggaatatatgatgttcaaccctatttttgcttttatggcggctgattttgctgttcccgtatccttctcaggctacgtttctggcctgtacacaacaggtgccgttctgtcgggcattatcgctttttactggatcggtcgttttaataagaaacgctttctcatcgccaatatggctctcctggggctgctgacctttttaacgacattgacttccagttttagccttttgcttacattacgattctgtgcaggattgttgggaggtaccacaatggggttgggtatcagtatattgataaaccacgcaccgactcacttgcgtggaaaaatgttagcgacggtgattgcgtcattttcgatagtaagcattgcgggaatgcccacaatattatttttatgtactcattatggctggcatatcgctttgtggttcatcagtacgctgtgtttgttggcgatgccactgattgtcaccatcattccgcaagatcgcgtttctttcgagacaccccattcgcagcctctcaatgtggatattttactgttttcttccgctaatgcgcttgtacagtttagcccaatgctggtcgttcctgttctggtaccattactgttacagcagcctggcgcttctccggacatgttgtcctggctattcttcggcggggggatggcagggtacctgtcgacaaaaatgacaggcgtattaacaacacgtttttctgctgtggttctggcgacagcttcaactatcgtttttattctgagtttgctcataccaatcctggggcttccgcatccggcgctatttattactttatttctcggtgcatcttatagtcgtctggtttcatcttcggcggttacgattcagtttcctgataacaggcaacgcgcaggattcatgtcattacaaacatcaatgatgtatttgattacaacgatcgcattttttttgtcttcttttttattacctgggtatgacatgacacaacaaaaaatgaacacgttactaacggtaagcgccatttccgcattagggttcccaatcatcgttatcattttgcaaaagaaactggctaaacgtaagaaccaacccgaccttctcgtcattgattag

SEQ ID NO: 148658 - DNA, 918 bp, Enterobacter cloacae
atgcggccgcctctggattttaataccctgaaagtgttcattgctgtggttgaaaaagagagttttgttggggcatccagggcgctggaaatgccgacatcaaatgtgagtcgttgtatttctcagttagaagacaaactcaatcttcagcttatagagcgcagtacccgccatatgaaactcacccaggcgggccacctgctctataaccgagcgaagccaatactggaggcacttgagcaaactgaaacagaattaacgttgcggcaaatgcagcttaagggcccgttacgtatctgtattcctaatgaaataggcccggtcttgctgggatctatagttgccgatttcgcctgtcagcacccggatctggaaattagctgcgtcacaaatttgtctggctttgaatccgttcgtgacgatctggatttagcgatcattgtcacccgtggccagatggatgacagtgactacatcgctcgccatctggtgactatcccttgtaccatcgttgctgctccttctgtcattcaacgttatggcaccccttctcatatacagcattttgaagaattaccctgtattacaaccgtaagcgcacttaaaggtgctccctggcagtttgttaataaaaaggggggattcgagacgataaaggttaaaggccattaccgggtaaacagcggagagatggcaggacgagcggctgtagcaggtgtcggttttgccattctatcgaaacaagcctgccaaccctacatcaacgatggacggctaatcgagcttaactttgaacaatcccctgctccactgcaattgttcgcactttattcagatcggcgctacttgcctgctaaaacacgagcactcatagatttcatgcatcagaaattgagtaatatatcttgcgtaacataa

SEQ ID NO: 148659 - DNA, 555 bp, Enterobacter cloacae
atggattatctaaattcattgcagagaatattgtcacttgatccttcacgaatgcaggcgctttacgcggttcgtgatttgcaacttcctgattgctggataggcgcgggttttgtcagggatgccgtatgggatcacttgcatgcctgttggaaaaagtccttttcaggcgatgtggatgtggtctggttcgatcccgaatgttgtacgccagacgatgaacgtcatctggaagaaaaacttaagcaacggatgcccgcttttgactggtccgtaaagaatcaagccaggatgcatctgcgtaatggtgataatccctatcactcaacagaaaatgcgctgttgtactggcccgaaactgcgacggctgtaggcgtcaggctgggcgttaacaatgttattgaggtcattgcaccctatggtcttaatgacctgtttgagctgagtttaagaccaacgcctgcgtttgagcgggaaaaatatgacgtcttcaggcggcgcgttgaagagaagcggtggttagaacgttatcctcaactgcggcttattaattga

SEQ ID NO: 148660 - DNA, 1281 bp, Enterobacter cloacae
atgaccgaacataccaccagctactacgcggccagcgcgaacgcttacgaacctttcccgacgctaaacgagtcgatcagctgtgacgtgtgcgtggtgggcggcggctataccggcctctcctccgcgctgcatctcgccgaaatgggctacgacgtggtgctccttgaaggagcgcgcatcggtttcggtgccagcggacgcaacggcggccagctggttaactcctacagccgcgatatcgacgtgattgagaaaaactacggccccgatgccgccagagtcctcgggagcatgatgtttgagggcggggaaatcatccgggagcgtatccagcgctaccagatccagtgcgactatcgtcccggcgggctgtttgtggcgctaaaccataagcagctggagacgctggaggagcaaaaagccaactgggaacgctacggcaacacgcagctggagctgctggacgctaacgccatccgccgggaagttgacagcgaacgctataccggcgcgctgctggaccgcagcgggggacacattcatccgctgaacctggcaatcggcgaagcggacgccattcgcctcaacggcgggcgggtgtatgaacagtccccggtgaccgccattcagcacaccagcccggccgtggtgagcacgcagcatggccaggtgacggcccgctatgtgatcgtcgccgggaatgcctatctgggcgataagatagaaccggagctggcaaaacgcagcatgccctgcggcacccaggtggtgaccaccgccccgctgccggaagcggtcgtccgcacgctgatccccaataactactgcgtggaggattgcaactacctgctggattactaccgtctcaccgccgacaaccgcctgctgtacggcggtggcgtagtctatggcgcgcgcgatccggacgatgtcgagcgtctggtgatgccaaagctgctgaaaaccttcccgcagctggcaggcgtcaaaatcgactaccgctggacgggcaacttcctgctgaccctgtcacgcatgccgcagtttggtcgtctggacaagaacatctattacatgcagggctacagcggtcacggcgtgacctgcacccacctggccggacggctgatctcggaactgttgcgcggtgacgctgagcgctttgatgcgtttgccaacctcccacactatcccttcccgggcggtcgcagcctgcggattccattcacggcgatgggcgcggcgtactacagcctgcgcgatcgtcttggcgtatga

SEQ ID NO: 148661 - DNA, 1488 bp, Enterobacter cloacae
ttgcaaaaaacatcagcctatcaatcacttgtcaaaaccttccagcgtctctcccgcttctcgcacctctcctccatcgccagctgggacatgttcaccatgatgccgccaggcggcagcgccgcgcgcggtgaagcgctggcggaaatgagcgttctgcaacatcagatcctgaccgataaaaaagtcggcgacctgttagcggccgcagcaggagaagatctgaacgacgttgaacaggctaatctgcgcgaaatgacgcgccactaccagcaggcgaccctgctgccggaatcgctggtggaagccaaatcgctcgcgggaagcaaatgcgagcacgcctggcgcacacagcgccccgccaacgactggctgggcttttccgccaacctgaaagaagtggtgaaactcagccgcgaagaggcccgcctgcgcgccgaagctaaaggctgtacgccatacgacgcgctgctggacatttttgaaccggacatgaccagcgcccgcctggacgtgctgtttggcgatatgaaaacctggctgccggacctgctggcaagcgcggtggagaaacaggctcagcggtcgttcgttccgccgcagggccccttcccgacggcaacccagcgcgagctgggtctggaagccatgaagatgctcggcttcgattttaacagcggacggctggacgtaagcgcgcacccgttctgtggcggcgttccggaagacgtgcgcatcaccacacgctatgatgaagacgaactgctcagcgcgctgtttggcgtgatccacgaaaccggacacgcgcgctatgaacaaaacctgccgcgtacgtgggctggccagcccatcgccctcgcccgctcaaccgcgatccatgaatcccagagcctgttctttgaaatgcagttggggcgcagcgaagccttcctcaagcacctcctccctgcggtacatgcccgctttggcagccaggcagcgtttagcgaagagaactttattgcctggaaccagcgcgttaagcctggctatatccgcgtcgatgcggacgaagtgagctacccggcacacgtggtgctgcggtatgagattgagcgcgcgctgatcaacggcgagatcgaggtggacgatatccccgccctgtgggatgaaaaaatgcaggcctggctcgggttatccaccaaagacaactaccgcaacggctgcatgcaggatatccactggaccgacggcgggtttggttacttcccgtcatacacgctgggcgcgatgtatgccgcgcagctgttccatgcggcaaagaccgcgcttccgggactgcaggcttccatcgccgaaggcgatttttccgccctctttgagtggctgcgtcagaacatctggcagcacggcagccgcttcagcacgtcacagttaatcacccaggcgacgggcgaggatctgaatatccgttacttccgcgaacatctgacctcgcgctatttgtaa

SEQ ID NO: 148662 - DNA, 1230 bp, Enterobacter cloacae
atggaaacacctgccctgcctcgtcgccttgccctcactgccggatgtcatcaactcctcaactgggggatctcattttatatgcccggcacctttgcgcgggcgatttcagccgatcggggttggtcagcaccgcagatttatctcggcctgacgctggcgatgctggtgatggcggcggtctccccttacgtcgcccgtctgctggcacgttttggcggacagagggtggtgatgggcggaacgctgctgattgctgcaagctgcgccggtatggcgtatacccggacgctgtctggctggtactgcgcctggctactgtgcggcctcgggatgcgcctgtcgctgtatgacgcactgttcgccgcgctggttaacctgtacggccagcaggcacgcgggagcatctcacgtattacgctgatgggcgggctggcgtccgccgtcttctggccgcttggagaggctttactcaatgtgatggcatggcaggacgcgctgaaggtctacgccctgtccggattactgagcgccctgcttcttcgccacttcccgcgtcagcgctttgcggtgaagccaaaagcgagcgcgccggtctcgccccaagacaggcgtaacggctggctgtatgcgacctttattgcgctcattacctttgtctcaagcgggacctctacccacctccccgagtttatcgccagtttcggcctgccggtcgcggtcggcatgctgtgggggatcggccagacgggcgcgcgctttatggaggtactggcgggagtacgcttaacccctttaaaacttacgctttttactgctattgccatgccgctttgttttctcatcgggctgagcagcaccctgtttgtctggtgtgccgccggatttgtgctgggttatggcgcaattaacgggctggtaaccattgtcaaagcgaccctgccgctggagctgttcagcgcggaacgttacgccagccggacaggcatgcttctcatcccggggcagctgatggccgcagcttctccgtgtgcctttgcatggctgaataaaacgctggggatcgcgggtgcaatgtgggtttcaatggggctgacgctggtaattgccgggctggcgatagcgattgtgcgccgtcccgggaggcaaagtgtatcgcactgtatccagaaccctgcgctgacaaacgggtacaaaacgccgcctccggcaaatatctccgatacataa

SEQ ID NO: 148663 - DNA, 780 bp, Enterobacter cloacae
atgagtaatggagcacaatcacttcttagtcaattactaattgccataatctctatatctttagggtcatttctttttgctggaattctagagagttacaaaaaagaccaaggtcttcaggaagaacttataaaggattacttcaggccaatgatggaattacaaagttcttgttcatcttcacataatgaactattcctaaagtatggagagttatctggttcttatcagctcatgtctaatgaaatagtacatatgacaatgacacctgattcaaaattaggccagcattatgaagctctcccaatatctattattaaagcaaatgcagagttaaaaaaaggagttgaagagcttgaaatgacggtaaaaaaatgcaaggccgatttattcctcaagtacgaagagcttgcattagttactggttcatatccagagtttaggggtttggcgaaaaattatacaaatgcgattaacaccatctattcagaaagacaaagaaaagccaaggaaaatacaaaaaatatagaccctaatcaactaataccattgatgcggaaatttattgctatggatctatccaccaatgcaaacaaatccatgcttgccagtgaaatggataacatatctaaactaacaacgcagcatagtttgataatggcagagtatgaggagttaatttttaaagaagataatgatctatttctaagtcttcatgacctttttgcaatccaaattagtgaaaagtattcgggtggatttatcagttggatattttaa

SEQ ID NO: 148664 - DNA, 381 bp, Enterobacter cloacae
atgacgcctttcgaacacgagattatcgacctccacattgcgcttgaagactggttaggcaaaggtgaaggcgattccgacgccctgctcgcccgctttcgtccagattttctgatgatcccgccgggcggcgtccatgtcgactatgacggccttgtgggctttctgcacagtcagcgcggaagccgtcccggactgaagatcgttattgatgatttaacgacgcgacaggcgtggccccacggcgcggtgctgcactaccgagagacgcaaacccggccagacctgcccgtcaacgtgcgctggtcgaccgcgctgctcaatcaggaaggcgacaaaataacgtggcgtctgctgcacgaaacggcggcacagccgtaa

SEQ ID NO: 148665 - DNA, 420 bp, Enterobacter cloacae
atgagcattatcacatccctggtagcccaccctgacaacaccgcgcagcgcaaggaaatggctagcctgttaaccaacttattcaaaggcgatgtcgatccggcagagctttttacgcccgattaccagcaatttacggatggtcacgcgcttgattatcagggttttgtgcagcacctgaaccacgttcgatcgcagatccgcgagatagcattcagggtagaggagttcgcctgtcacgatggtcttttggcagaccggcactgggttaccgtgacgtatccggatggtcggcaggcagagattgaggtgtatatgtttgccgcactgcgagaaggaaaaatttgtcgtatccatgaggtcacactggtgattggcgcagaggcatcagaccgcgcactcgcccacgccacgcaataa

SEQ ID NO: 148666 - DNA, 10104 bp, Enterobacter cloacae
atgagccaaatctctgttatatcaaaactcactggcgtggaaacgactacggaaggcacacaggttacgctgagccattcctctatcgttgagcttcatgtagagcgagccgatgtctcccacttcgcgcgaagtggtaacgatctggtggtgaccctgcactcaggggaagtgatcacccttaaaaacttctacgtcaccgacgcgcaaggcgtgagccagctggtgctccaggagagtgacggtgcgctatggtggattgaagatccaaccggagccgctacgtacgaatccatcgcctctacggacgcgttgctggccgcatccggaagcgatgccggtggagccgccatctggccatgggcactgggcggcattgttgcagctggcggtatcgcggcggcagcaagctccggcggtggcggagggggagacgacgacgatggaggtaacagcagccctacccccggctcgccggtcaatccaaccaacccggatacaacaccgccgaacgcgccatccagccttcagttctcatcggacggtaaaagcgtcaccggtaccgccgagcccggcagtactatcacgctgaaagacgcgaacggcaacgtcattggcaccgggcaaaccggcagtgacggcaactttaccgtgtctctcggcactccgctgaccaacggcgaacaggtgaccgccaccgcgacggatgcggccggaaataccagccagggcacaacgattacggcgccggatctcaccgcacccgatgccccgaccatcggcagcgtgacggacgatgtcgccccactaacgggctcggtgacgaacggcggcagcaccaacgatccacgtccgcagctcagcggcaccgcggaggcgggctccaccgtgaccatctatgacggcggagtcgcgattggcacggcgctcgtcgccagcaacggcacctggacatttaccccgtcagccgacctgactgaaagcacccaccagattaccgtgcgggcaaccgacgccgccggcaacctcggaccggcctccccggtatttaccctcaccgttgattttaccccgccgaccacgccaaccgcgattgtgctgaccgacgacacgggtgcgatcagaggaaccataaccgcgggcacgcctaccgacgcttcaaagccgatcctggcgggaacgggcgagcccggtggaacaatcactatctacgataacggtgtggcgattggaaccacgacggtactgccgaacggcacctggagcgtcacgccgagcggcccgctcccggacgggacgcacacgataaccgtcgttgaaaccgatgcagccggaaaccagagtgcggcctcggagcctatcatcttcaccgtggacaccacgccgccgctggcccccggcgacctcgtcgtttcgaatgatggcggcaccatcaccggcaccgcggaacctggcagcacggtaaccatccgtgaaggcgacgctatccttggcaccccggtggccgacagcgagggcaactttagcctgacgctgaccccgcctaagctcaacggcgaaatcctgaccgcagacgccaccgacgctgcgggcaacacggggccagcaacctccgcagcggcgccggatgtcaccccaccgcaggcgccagttatcgtgtcggtgattgacgacgtactgaacacaaccggacccgtggagcagaatgggctgaccaacgaccgggcgccgaccctgaacggcacgggcgaacccggttcgaccatcacgattttcaacggcagcgatatcatcggcacggtggacgtcccctcatccggcctgtggagctttacgccgccctcaccgctggccgatggtacgtacgtgctgacggcaaccgcaacagatgccgccggtaacccgagcgaacaatcgaacgcgtggaccattatcgtcgacgggacggcgccagccgccccggtcattacgcaggtggttgacgatgttcccgaacgtaccggctcgctcgacctcaatgagaccaccaatgattcaaccccgacgctcagcggtaccgccgcagcaaatgccacggtgaccattcgtgtggacggggttgatattggtacgaccgtcgccgatggcctcggcgcgtggagctttactccggacatccccatcgccgagggtccccataccctgaccgccgtcgcgaccgacgcggcaggcaacattagcgacgtttccaacagctggggcatcaccattgacagcgtggccccggatgcgccggtcattacccaggtagtggatgatgtgccagagcgcctcggcgcgctcaatcctggcgacagcaccaacgacaccacgccgacgatcaacggcaccgctgagccgggctcaaccgtcaccattcgccaggacggcgtcgatctcatcacagtcccggtcgacagcaacggcacgtggtcctttacccccgccacgccgcttggcaacggcacgtatacctttaccgctgttaccaccgacggagcgggtaataccagcccggcgtcaggtggctttaccctgaccgtcgataccacgccgccagcggcggctactatcgccaccgttaccgatgacgtcggcggcgttaacgggccgcttaccagcggcgacaccaccgacgacactcagccgctgctgcagggcaccgcgccggcagatacggtaatcaccgtctatgacggcaccaccctgctcggcaccgcgaccctcgacggcagcggcggctggagctttacccccgttatcccgctcaccgacggcccgcacacgctgacggtgcatgccacggatgccgcgggcaataccaccatctcaacgccgtttgaactgacggtggataccgtcgcgcctgccacaccggatatcccggcaatcaccgtcaatcctgacggcacagaaacgccgctgaacccgggagaaaccacccgcgacaccacgccgaccctgagcgggaccggcaacccgggcgataccgtgacgatctacaacggcggcgtcaagcttgatgacgtgctcgtggacggcaccggcaactggacctggacgccagccaccccgctgcctaacggcacctatgacattaccctgaccgtcaccaacatggacggcacgggcaacgaaagcgccccgtcccagccggtcactatcaccattgacaccgatgcgccagtcgcacctgcagcaccggtgattaccgacagcgtcagccagataaccggccccgttcccgatggtggaaccaccaacgatccgcgtccggtcctcagcggcaccggtacggcgaacgatgttattaacattactgacaccgtcaacggcactccgaccgtcgtgggcaccgtcacggtagacagcaacggcaactggagctggcgtcctgacagtaatattggggaaggtacccacgtctacaccgccaccgccaccgatgaggcgggcaacgtctctgacgcttcgccggcgattacgattaccgtggataccgttgcaccggatgtcccggcgattggcgccattggcggcgcgccggacgatggctatatcactgatgcaacaccaaccgtcggaggaaccggcacgactggcgatacggtgatcgtctacaacaacggcgtcgagctggggcgcgtggttgtggttaacggagaatggagccttactctcccaacacagacggacggcccgctgaatattaccgtggcgggcgttgacgcagcgggtaacgtcagcgcgctgagcccggtctttaccgtcacgctcgataccgttgcgcctgagatccccgtcattaacgccgttgttgacagccagctgtccaacaacgtgctgtatacgaaggacggcacgccgacccttaccggcaccggtgaaccgggcaccaccgttatcgtctccgtagacggcacgccatcgggagcgccggtaaccgtgcagtcggatggcacctggagctggactgccgacgcgacgctgctggatgatacatacgtcttcactgtcgcttccagcgatccggcgggtaacctctcaggcagttcagcgccgctgagcgtgacggtcgataccgtcgccccggccgatcccgacaacatgagcctgcctgagacaggcacaccgctgaccggtaccggcgaagagggaagtaccattaccgttaaggacagcggtggcacgatcattggtaccggcgttgtcggcagcgacggcagcttctccattgcgctgagcccggcgcagctggatccaaccacgctgaccgtgaccgccacggacgccgcaggcaatccaagcgccgatgtgccttttatcgtcaccgactcgccgcttgagctgccgcaggtgcccgtcatcacggcaatcgtcgatgacgcggacccggtcaccggcgatgtgaaaggcaaaaccaccaacgacaccacgcctacgcttaccggtacggccgaagcgggcagcgtgattaccatctaccaggacggtagcacgacgccattgacaacggtgaccgccgacggcagcggcaactggagctatacgccagccgcgcttggcgaagggctgcataccttcgaggtgaccgcgaccctcaacggtgccaccagcggccgctctccggcggccagcgtgaccatcgatcttaccgccccgggtacgccaaccattggctcggtcattgacgacgtgggtcctgtcaccggtccgctgaccagcggccagaccaccaacgacagccagccgactctcaccggcaccggcgcggtgggtgataccatctccatctacaacaacggcgtgctgctggacagcgtggtggtcggtaataccggcacctggagctacaccacgcccgtcctgccggaaggcaataacgtcctgaccatccgcgagaccgatccggcgggaaatcagagcggtccttcggcggacttcaccctcgtggtggataccctttccactacgccggtcatcaccagcgtaacggataatgtgggcaataccgccaccccggtagccagcggcagcgaaacgaacgacgccacgccaactcttacagggaccgcggacgcgaacagcgtggtgaccattttcgatggcgctacccagattggcgtggttacggcggatgacaccggcgcgtggagctttacgccagagaccgcactcgtcgaaggctcgcacagcttcaccgtcctggcgaccgacccgcagggcaacgtcagcgaagtctcagccccatggagcgtggtggttgacctcacggcgccgacggttccaacgctggatacggtgagtgataacgtccctggcggcgtcacgggcaacctcaccagcgggcaggcaaccaacgacaacaccccaacgattagcggcaccggacaggcaggcagcactatccacatcctgaataacggtacgcagattggtacggcgaccgtcgacggaaccggtaactggtccttcaccccgaccgcgccgctggacgacggcagctactccctgcgcgcgtacgcaacggatgccgcgggcaacgcctcggctaactcgtcggtcttcgccttcaccgtcgataccgcaggccccggtgtgccgctggtgaccagcgtgattgacgatgtcgcaccgaccacgggaacgctcacgtcgggtaacagcaccaacgacgcgcgtccgaccttcaacggcacggccgacgtaggttctacagtgcacgtgattgttgatggcaacgaaattggcaccgctgtggtcaatgcccagggcagctggaccttcacaccgggtaccgatctgcccgacggaccgcatgccatcaccttcaatgccaccgacgcggcgggcaacgcgggtacggcaacggcaccgtttaacctgacggtggatacgggcgtgccgtctgcaccggtcatttcagccgcggcagataacgtgggcagtattcaaaccccgcttacttccgggcagagcaccgacgacaccacgccaacgctgagcggcaccgcgacggccaacgccacggtcactgtctatgaaaacggtcagccggtcggcaccgcactggcagacggtaccggcgcatggagctttacgccgtccgcaccgctggccgctggcagccacacctggaccgccacggtgaccgatgccgccgggaacgtcagccccgcctcgccgggctttacgctggttgtcgataccacggcacccaccgcgccggttatcagccaggcgattgacgatgtggggaccattaccggtccaatcacatccgggcagacgaccgacgacaccgtaccgcggctggttggtaccagcgaaccgtttgccaccgtgaatatctatgagggaaccacgctggtcggaacgggcaccgcagacggcagcggcaactggagtatcttactcaataccacgctgacagaaggtgcgcacagcttcaccgcgcaggccacggatgccgcaggcaacaccagcgcgtcgtcagccagcttcagcctgacgattgataccacgccgccagcgctgccggtgctcaccagcatcctcgatgatgtcggcaatgcggcaacgccgatagcagacggtggaacaaccaacgacgcgcagccaaccctcagcggtacggcagaagcgggttctacggtgaaaatcttcgataacggcgtgcagattggcagcgtaacggccaccggcggggcatggagctttacgccttccccggcgctgggcaacggctcgcacaatttgacctttaccaccaccgatgccgcaggcaacgccagcgcgccaaccgccgggtataccattaacgttgatacccttgctccggccgcgccggtcattagctcggtagttgatgatgtgggcagcgtcatcggaccggtaaccggcaccactccgaccaacgatacgcgcccaacgctgagcgggactgccgaagcgaacgcgacggtgcggatctacgatggcatcacgctggtgggcaccgtcaccgccgataccaacggcaactggacgctgccagaaaccaccacgctgacacaaggcacccataacttcaccgccacggccaccgatgccgcaggcaataccagcccggcatcggccgtgacgacggtgatcgtcgatcttaccgccccaacggccccgacagggacctttaacgccgacggtagcgtattaaccgggaatgctgaagcaggcagtaccgtcacgatccgtctcccggacggttcaacggtaacgaccacagcgggcagcaacggcacgtacagctacaccttcgttaacaaacagaccgaaggccagacgctgcaaatcaccgccaccgacgctgcgggcaacgtctcgcagcccggctcggcgctcgcgccggtggtgccgctctccgccagcaataacgtcgaagagctggagctcagcaccacggccaccgtcaccaacagccagtacagcgactacggcttcctgctggttggcgccgtgggcaacgtcctgacgctgctcggtaatgactccgctcaggtgaacttcaccgtgggcagcggcggcagcgcggacatcgtcgtgaacgccaacgccacgggggccgtgctctctctgctcaacacccttgagctggtggtacagcgctttgacaccgttaacaacacctggactaccgtagtcgataccggacagccgcagtttgccgacctgctgaccctgggggccacaggcgtttcgctgaacctgaccgggctggcggacggcaactaccgcgtgctgagctataacaccaacctgctggcaaccggctcctacaccagcctcgacgtggctgtgaaagagaccgggccgggcaccgttacgggcgacaccagcctcggcggtaacgtgatcaccgacgttgacccaaccgcaggcagcgacaacgctccggcaggggcaacggtcacggccgtcactaacgcccagggtgtcaccaccagcgtcactgccgacggcacggtgatccagggtcagtacggtacgctgaccattaaccgcgacggcagttacacctacgatctgaccaacaccagcgcatcggtgattggccggacggagagcttcagctacaccatcacccataacggcgtcagcgcgtcggcgaacctggtgctgtcgctgggcagcggtaccgccaccagcggtattgtcgcggttgacgatacgaactcgctgaccttcgataccaccgtcaacgcgattgacaacggtacgtcgtcccagggcggctttaccctggtggggatcaatctcggcaacacgctggggctgaacctgctggacgatatgaccaaccccatcatctataacgtggaggaaggcactacccgcaccatgaccatccaggcttccgttggcggcgtggccctggcatcggtgttcgacctgtacatctacaagttcaacaacgcgacgcagaccttcgagcagatgcgcattgaaccaggctggctgcgcgcgccgctactgggcggcacctcgcctcagctgacgctgcagctgccggccggtgagtacctgttcctgctgaatacggctgcggggatcaccgccctgacggcctatacgctggacgtgctgcaggatcatgtctacagcgtggcgagcgtcagcgcgagcactaccggggacgttctgtcggatgatattgcgccagtcggcacgctggtgacggaggttaacggcgtagcggtgaacagcagcggtctgacgaacattaccggcgagtacggtacgctgagcatcaacgcggccggggagtacacctacaccctgaatagcggcgtcggcgttgaccacatcagcaccccggataccttcgtctacaccattaccgcgccggacggcacgaaagacacggcttcgctcaacatcaccccaaccgcgcagccgatggatgcggtgaatgatgttagcaccgcgatggacgtgacgtcggtacaccacaccgccgcgtactcggatacaaccgtcgggtcggcgagctggaacgccgcgctgctcacttcaacccagggctccggatccggcaccttcgtggtggatgccaataccgcgctgcacaacgtggtgctgtcgtttaacgtcgcctcgttgctgacgctgacagggttgacggttgactggacgctgaccaacggcgccaccaccgtcagaaccggctcgttcaacggcgggctgctgctgggcggcacggcaacgatcaacctgacgggtctcgacctggaggcggggacctacaccctgagctataccggcagaatggggccgctgggagtaggaaatatcaccatcaccccaagcgtcaccggcaccagctactcgctgtcgcagttcgacgccacgggcacccacaccgttgacggcaacattttcgacggcaccggttccgcagggacgatggaccagctgcactcggtggatacccgcgtgagcattaccggctacgacggcgttaccactacgctggatccctacaccggcagcacgctgtcgagcatcacgggtcactacggcacgctggcgattgccgcagacggcagttacacctatacgctcaacccggggatatcgctctctaccattaccacgaaggaggtctttaactacaccctgaccgatgccaacggcaccacggacaccgcgtcgctgaccatcgatatggcgccgaaatttatcagttcggagcataacgatgtgattagcggtacggcctacggcgacacgctgatttatcaggtgctgaacagcacggcgggcaacgcgacggggggcaacatcaccagcgccggcggcgaccactggacgaacttctccctggcacagggagacaagatcgacattggcgacctgctggtgggctgggacggtaataccgcctcgctggggagttatatcaatgtcacgcaaagcggtagcaacactgtgatctccatcgaccgtgacggcgcagggagcacctacactaatactgcactcgttacgcttgataacgtccagaccacgtacgacgagcttgtgaaccagcaacacatcattacctga

SEQ ID NO: 148667 - DNA, 489 bp, Enterobacter cloacae
atgaacacagctaagcctttgttgcttaacgaaaaatgtccaatatacgaaattactactaccgctgagttcagcaagcacaacgttagggcttttttaaagcacgtagaagctcattaccctaacttcagatcatggctggatttcacctttgctcgtcagctcgctgatggcaatcgtaaggcgctgatagttaaagaaaaaaataaaataattggtatatctcttctcaaaaaaactcaaatggagaataaaatctgtactttctttgttgccccacaacatagaaggaaaggcataggcaagatgttaatgaacgaatcgctttcttatctcaaaagtgatgtgcatatcactgtttgtgaagaacgctggcctgaaatgcgtccttttctagaaaagtactgtttcaaactcgataatgagttgcctaatttttatcgtgatggctgcactgagtatttttgtagcctacaaaaccctaattaa

SEQ ID NO: 148668 - DNA, 1233 bp, Enterobacter cloacae
atggcaaaaagtttagcagtttggataggcaaatcaaacgatatgccagctaaaacctgcacgagtgaggtacgtagtgacaacctagaagcatcagcatcaacgacagaggcaagcagccttcaatctgaagcaacagatcagagtcttgagctacactttaactattgggtgctaaatgataaaaatctgaatagaaaaaattctcaaccgcaagataatacgtggattggtccctttaaagtaatatcatgggttgtctactttttatgtgtttttgttaaatggttaatcagcttcgccaaagaaagagagactactacctatcttgatgttggtgtgagattttctaaaattggggaaaacgatactatcaatatatttttccctttcaaagtatctcctcaagactacgatagccagttaggtctaaaagtggctaatgacgttcttttgctttcagctatatttaacacagaagtaaaatctatagaattcagagacaacctttatcaccattctgacattactttcttaactgcgggtaaggataataataaaggtgtaaggttttatacaaatatcgatttgcaagtaagtgaaaataacccgttaggtgctggcgttaaactacatgaagttgtagatgaaggaagcatattatcgtttcctattgaaaattttagattggatgatcttcgagatgggtatttcagattcagacttattcttaatcctttaagtaaaaaggcactttcaacttcctatgtaccttctgacagtttcatgctcaccactcaagaagccatggaaataattgacttccgcgttaatgaaatacgtaatacaccagagaacgttaatgcgttactaacacctagcaatattcttaaaaaagttcatttttttatcattcgagaagtaaagtccgaatatgttatgtcagatactagttacgcaaggagtaggctactcgagggtgatttgtggaaaaagtatcttcagtcatatcatacaaaacctatcaaaaatgtacctaaaatgttgatttatcactggaaatcaacaaaggacaaaaaagaagaatatcttgagaatttttctgcttttgccaagtttaaacatacacgacgctcagcatggatcatacttagaagtataatgatcggcttaattttcagcatttttgcaaactggctctacgatgtactcaaatacttgcttaaatcataa

SEQ ID NO: 148669 - DNA, 435 bp, Enterobacter cloacae
atggataagattctgattagtattaaaccgatgtatatggaaaatataatgttaggtaaaaaaaccatagagttaaggaagaaagtggggaagttctttttacctaaaaatgaaatttatatgtattctagtactcctgtcaaggctttagtagcaaaggcttgtataaaaaaaattgataaaatggaaatcacgggactaggaaataaaaagcacgaaattctccagcatgcatgtattaatgaaaaggaatttgatggttatttctcgggtgtttcattttgttatttgattcatttagaaaatataaatgaacttaaaagtccagtgccattaaaagaaatgaaaagatttggactctatccccctcaatctttttgttatttaaacgatgatatgatggaaattatgggaaattactggagtgataaatga

SEQ ID NO: 148670 - DNA, 534 bp, Enterobacter cloacae
atgattgttggtatttatggaatatcaggtgttgggaaaacaacattcactaagaaattacaagacaggtatccaaatatattgcggtttagcgcatcggagttgatttcaaaatttgatgggatcgtggattatgatcaccttaaaggtgatactataattgaaaatcagctaaaattaataaaggccatggagtttatgtctaatgaagagcatattaccgaccttgttgttgagcttcataatgttatagaaactaaagaggggcttattttcatcgataaatctgtcctaaaaaagttgcgattagatatggctttttttataaaaaaagatccagaattaatatatactaacagggtgggggatatgaaaaaaaggaatcatgctgaaatagaagaaattaataacattcaaaataaatcattgagttatttcatggaaatatatagtgatatgggtggggttattattaatggtattgatgaagatataaattgtttttcggaatcgtttgataaatatcaatgttag

SEQ ID NO: 148671 - DNA, 594 bp, Enterobacter cloacae
atggggcagctgtctatgtatattacacatccgttcgttggatcgcttacaatcccttcgacgaaaatcgttgacatatatgcgacgatgaagaaaggtgtgtatggctctataccgatatcgtctgtttatttaagtggtaacattgtcgtccctcaggggtgcgaactctccagcggcagtaccctggaaataccatttggtgaatttaaggccagcgattttaaagatcgcaaagggcaaattgctaagaacgccacgaaatttaccaaagagttgcagtttaaatgcaccaatatttccgatggcgtaaagattttcctgcatatcgaggggatgccaaacgcgaatgattcgaacgccattgatatgggcaacccggatatcggcgcggtgattgaaggggctaatggtaaaattctggtacctaatgacaccagcgttaatcaggagatgagcgtatccgcgctggtcgatgatacgcaccgtaccgcctcaacgaccatttcggcctacccgataagtaccaccggtaaattgccggccgcgggggagttcgaagggattgccaccatgcgtattgatgtggagtaa

SEQ ID NO: 148672 - DNA, 618 bp, Enterobacter cloacae
atgataacgtcgtcgcaaaaggttgtccgctgcataagctgtgaactgtcctgtcagttattcccggataacgcagtgcgctcacaatactgtggtaacgcttcgtttgcagtttggccgattggtaatcatttcttgcaacttgcggtagcaaataaaatattgcggggaaacaagaatcacttattacgtgggtttatttttgtagatttttcgatgtacaacctgcgcgtacttgccgatccgcaatggattgagcatctggcgataactaacatgcacatcgttcttatctcggaccgcaagctggaggcattggctaattacttattcgctcatcatgatgaaataaagggaattatttattcagatgacaatgacgctgtattacaggaaaaaattaaccacctcttttccggcagacgtgtgaacagtagacgaggaaacaccctgaatactgttgaattcactttgcttaacagatttatgtcaggagtgtgcctccaggagataataaaaacagacagcattgatgtgaaaaaaatttatgttcataaaatacgattagagaggaagttaggtaccagcattcataaaatactcgtttctgttttgtaa

SEQ ID NO: 148673 - DNA, 744 bp, Enterobacter cloacae
ttgtatctcattaacaaactggtcgagtatgatccggaaaacaaaaccctggcgaatcccatatccgggcgcacgatacaattgcagcttcctgctaatctctgttttctttatctcgttacccaccccggagaaattatttcgcaaaatcagttaatggtggtgggatggggggagcgtaatgacgttacaaccccaaataccttttatcaggccattttgactttgcgcaatgcgctggctgaggtggggttaccgcgtgataccgttaaaacgatttcgcgtcgtgggctgatgctttccaaaacaacccacgttgaggtatttaccccaaccactgaggcggtgatagtcaataaagacgaggaaacagtcgctgacaccgtgatacagagaccggtttggttgatcattaccaccactgtgcttttactgatcgtacttatcaacggagtggtgttatataaacaccgcctgacgatgccgttcagtaattatattccgctctcaacgggcagcaaggtcggcccctgccagcccttttatgcacctaatgaacctatgcaggaccattacctgcgcttgttaaagaattatcctgccctgtgtgccgagaaccggtacgtttttctcatcggctatagtaaaacggagcgaatcgcggcatttgtctgtaataacgatgcgcgacatgacgcgacggcgttatgtaccacgcattatttttgggcgcatgagcaatga

SEQ ID NO: 148674 - DNA, 876 bp, Enterobacter cloacae
atgacattatccgccgcaccgcgcatcagctgtgacgtcgttgaaacacgcgccgacgtggcgcgtattttcaatattcagcgctattcgttaaacgacggggcgggtattcgcacggtggtcttttttaaaggctgccctcaccgctgcccgtggtgtgccaacccggagtcgatctccccaaaaattgagacggttcgccgggagagtaaatgtttgcgctgcacgccctgcctgcgtgatgcggacgaatgtccttccggtgcgtttgagcgcatcggacgcgacgtgacgctggacgagcttgaacgcgaggtgatgaaagacgatgttttcttccgctcttcgggtggcggagtgacgctgtcgggtggggaagtattgatgcaggcaccttttgcgacgcagctgcttgcgcgtttgcgccgttacggtatacgcaccgccattgagacggcgggagatgcgcccctgtcacgattgctaccgctgacacgacagtgcgatgaagtactgtttgacctgaagattatggatccagagcaggcgcgttcggtgacggcggtgaatctgccaagagtgctggataacattaagcaactggtggcggaaggcataaacgtcatcccccgcgtaccgcttattcctggctatacgctgacggaaaccaacatggcgcgcgtgctggcatttttgctgcctacagggatacgtcagctgcatttattaccgtttcacgcgtatggcgaaccaaaataccgcctgcttgggcaacaatgggtgatgcgggaggtgatacctccgacaactgacgaagttgcagtctttcgccgtatggcggaacgtaaagggtttcatgtcaccgtgggaggttga

SEQ ID NO: 148675 - DNA, 168 bp, Enterobacter cloacae
atgcaatctttaccggatctttatccaatctttatacagcgaaatgtgcattttttgggtctggacggcttcctctcaacgctcttttatgtggctatgtggcagtgtcgattagttggaaaactaatccgagtcagtcttaggacccaggacaaaaatgtggcttag

SEQ ID NO: 148676 - DNA, 342 bp, Enterobacter cloacae
atggtcaatactaacggttcaaagtactggcgcatgaaatatcgatttgccgggaaagagaaaaagctctcattcggaacctacccggacatctcacttgcggaaactcgcactaaacgagatgaggcaagaaaggtattggcgaatgataaggatcacggagaggtcaaaaaagccacgcaattagctaaaaaactctcggttaccaacacatttgaagcaatagctctcgaatggcacagtgcaaaagtatctggtttgtcaaagagttatgctgattacgtcaagcgagcttttaaaaataatgtcttcccctatctaggctctcagccagtggactga

SEQ ID NO: 148677 - DNA, 267 bp, Enterobacter cloacae
atgcaggcgcactacagtaaagggattgataaaataaaagcgtcgctgccggatcgtacccgggaggccatttttgcccaaaccggaaaaatggggctgactgaggcccggctctggcagcctgttgaggaccgcgtattaagggatatatatcctgaaggcggtgttacaggtgtgtgggagaggcttccccacaggacgatccctactatcaaacatcgggtgaaggctttggggctgaggtccttcagaaggaaaaatgggtaa

SEQ ID NO: 148678 - DNA, 1380 bp, Enterobacter cloacae
atgaatgacattacccaacgtaagattaaaaccggcggtgacccgcgctcgctatctgattatgccgccttgcgtgatgagctgagtaagctgacgcatccggctcgcccggatatgaactggcgttatgcggaaaaactatgtctctcactgttcgagcagaacggtgtggaattgcaaactgcagcctggtatacgcttgcgcgtgcacagctggccggtttattcgggctcaatgaagggctgacgatactcgaggccctgataagccatcagtgggggacactgtggcctcagccagtccatgcgcgcatggaaattctcagcagtctgagtcagcgtctgcagcaacgaatgcgctcgctcccgctgaattacagcgacctcagccagttgtaccgggcggagcaactgcttacaggtctgggagaggtactgcagcgtctggagcttaagcatctgagtcagctcgatacgttgcgtaccctgatgcacaacagtgctgttcggctggaaaatagcgatggcataaccactaccgggtcgagcattcagcctggtatcgtattgcctgccaccgtgatgaatgaggcgacagcatccacgagagactttgctggtggaccggatgaagatacgccagagagtgcagtgaagtgggtttacgttgcgcaaccggaaccgcagtcgaatgtggaagtgctgtcgacaatgcctgttccggttaaaaagtggaaatccttcgctgccggcacgtgtaccatgctggtgataagcatagtctcagcgtggagctggcattttctacaccgtccagaccctctacagactcagcttgctgcttcactggctccgttccctgcacctctcacgtctgaacaactggggatgttgcgtcagcagacttcgttaccgcaggaccttatcgcacagacagagcatcagcttgcccgactggataagttgcctcctgactgggatattgcatacagcagaaaactcatcgaacaggttcaggtattgtggccggatcaggctaagaccctggtacagcagtggcagcagcagattaatatctcagtacttcctgtcgataaaacgaacggctggcatgaaggtatgacgcagcttcaggctcttgccgataaactgaatgcacttgatggtcagaagggaaaatacatcaccgtcagtgaacttaaatcgcaggtctttggcatgctgacaagcttccggcagaccgtgccggtggaagaacagcttcggcagttgaagctgctccctgaagactctccgcagcgtcagcagcagattcagcaggctgagcagcacctccgggctcaagtctatatgctggcgcaggaaaaacatcgtgagtga

SEQ ID NO: 148679 - DNA, 471 bp, Enterobacter cloacae
atgtcagtaaaatcacagtttctcgataaattgcaggcccgacagtctgctccggcttcatctgtcagtaagagtcagactgatattgcagagtttcgcctgcaaatgacacaacttcaggagcagatggacgcgtggctggagggtaccggactgaatgtggagacggtcagtacatccgttacggacctgctggttgaggggagagtgtttgatattgccgccctcgttcttcgtatcgacgaccggtctgtaaaatttgtgccggtattcctgtatgctcagggtgtaaccggatgcgtggaggagaccttccataatggaggactcgtgacgcctatggggcgattatttatgcggtccgggacggtgaacaactggacctttgttccgcctggtgctttatcccgccatgggcaggtttttgatgaaagcgctttttttggtttgattctggcgctccttcaatag

SEQ ID NO: 148680 - DNA, 450 bp, Enterobacter cloacae
atgccgcgcaattcgccctcattatgcgagatgctttatggcaattttgtcggtgatctcgaccttcagcatatcagtgaagaaaatcaggttatcctgtcggtgctggataacatgcagcggatccttaactgtcgcgccggtactctggcacatctgccagactatggtctgccggatatgaccaccattctacaggggcttcccggaaccgcacataagctgatgtcgacgctgtctgcggtcttgctgaaatatgagccgcgcctgaagtctattgaggtgctacttcttgatcaggaaattcctggtgagctccgctacgccatagatgcagaacttagcggtattggtctggtgcgctatggcactgagtttatgccggaggggcgagtaatgttacgccatcttaagcaacagcagtatatcgatactacaacccgtcagtaa

SEQ ID NO: 148681 - DNA, 1065 bp, Enterobacter cloacae
atggctgtattacatcctcaggaatgctatctgctggagaaatttatttctccggaacattacgccgcaacccgcgatgcgattattgcctatattgacgctcatgaagctgctttcgcccgctacctgcgggagatgccgttaaacagccgtaaactccctctctggcaacaggctgatatagtgtgggggaatcgcgtgctgcccaatattcgctctgctagggagcgttatatagaagcttttattctgcgtactcataatgatatcagggcatttaacataggtcataccatgagtgatatcggcaaaggcattacagagtgctgggatggctggatgacgcaggaggaaatcgaaacaatatctgaacttcagagcattgcatacaaattagatcaacaactatcaaccacaatttctggcggttggaaagaagggcgtctgacttatcgcgctgaaagtattatcagcgctaacccattgcctgctgagattcctcgctatgaacttgaccattcagttcgtatagaagcagacgaaaaaccagtccaaactggtatatatttaccagacatagattttgctccagcctgttttatcccagctagctatcatcttcctccagaggcaaacatgggggttgaacgaagtgattatgttggaatcgatggaaagcctagttatagctggaaggcgtctgaatgggttaaaacaggctggacgctgatccgtcgtgttgaaggtgagtttattgatgttccaccgggtggttttttcccggaggggaaaccggaagagctttataactggccacagcgtgaaaagaaacttttgcaggaagagaggaaacgtattacctgctggagcggcgtttttgcaccgttcagtggccgctgggcaaccattattaacggcacaacgcaatatactcacactcacgccggacaggtgatgccggaatttgaagataagcatggacagaagcaccgtgcccgttggtcactgctggaaagggatgatggcggcagcgtgtttgacatagctcctgatgagggaaattga

SEQ ID NO: 148682 - DNA, 1458 bp, Enterobacter cloacae
atgatagatcaggagcttcagcacgccctggcgttctaccagtccccaccacaaagctggtatgacgaactggcagataaagccaaagcatccggagagtggctgtgggaaacgcttcagggcgactttaacgaacagcagacgaccgggcagatcgttaccggaacggttatctcgatgatccctctggtggatcagatttgcgacgtccgtgaccttatcgccaactgcaaaaagatcaaagaaaatgatactgaggtctggccgtgggtgtgccttggtctgacactggtcggttgtttcccgacactgggctcactggtcaaggggagtgccaaagtgatgttcttgtccgtacgcaaagcccattttaacgagctgagcaaggcgggtaactacagtcgcctgctggacgggagtatcgcccaactcaaccgttttctggatactcctgcagtgcggggtacactgcgaacgttacggatatataacccgtatcactatctggcgggtaaaatcgatgacttgaaaagtatgctcagtacgtcggagctgctggcagtaatggacaagctgatgaaggtcacccgcagcttgtttgacacagtgacccggtggggaccgtccagcctgcaacgtccggtcgcggcgttgtgggaaacgctggtttctgtacgcagcaaagcgaatgcaatgctggcgaaagcgctgaagccgctgagtgatattcttgaacatctggcgaatcgcctgagagtagaaggagataatgcgtttcgtgcacatgtcggggagaacgctcatttctacggcacggcccgtgccagtgaagaactggcatatttcaaacgggaaaagccagattgggtggatgttggggcaggcaaacctagatatcaggcccttgaagagtttgaaaatgttaaagcggtaaaagaaggctggccggatatcagtgaaaccagcaaaaatccggcgcttatgaataaattcgatactttcgatagctcaatgcaggcggttgaaattccaccgggcacggttatctatcgtgtggttgacccttcctccagtgataacaatatctgctggatgcgaaaagctgagttcgacaaattaaacagtaaaggcgactggcgccgacggtttgcggtatggaaaaagtggaatgaaaacggtgaatatgtgacctataccgttcccccaggacaacccctgaaagtctgggaaggccgggctggtacgcagattaatcgtgaggcccctgaatattcgctggaaggcggtgctgtacagattgtacttgacccgtcacaactgaaaaaagagttcaccggcccgcggcagaaaacaggctggggatatggtgatgcggctaacgaccctgtttatccgtatctggggttgccgaaactggaaaatacccataactggtacgaaccaaaggataaaaaataa

SEQ ID NO: 148683 - DNA, 267 bp, Enterobacter cloacae
gtggtgctgcttgagggcaagggagaacacgatctcgctcttaacttttttgacggatcggatgctatcccgaaagccccctatacccttcatttcgatggtggcagcgaactcgctggcgtactggatgagcagggatatgccctgcacaaaaatgtgccgtttgagtcagcgaccgtgacttaccagcttccaccgcctgagccggaaaagccctgggcaccgtgggatttactgctggaaaaaaccagcgtcagggagggatga

SEQ ID NO: 148684 - DNA, 261 bp, Enterobacter cloacae
atgccgagaaatagcccttctttatgcgagatgctttaccgtaattttgttggcgagctcgaccttcagcatatcagtgtagaaaatcaggttatcctgtcggtgctggataatatgcagcggatccttaactgtcgtgccggtacactggcacatctaccggactacggtctgccggacatgaccactattctgcagggtcttcccggcaccgcccataaactcatggccacgctgtctgctgttttgctgaaatattag

SEQ ID NO: 148685 - DNA, 1098 bp, Enterobacter cloacae
atgacaaaatttctgatgacggatgaacatgttcgccgccggcttttctggttgctgcaacgactcagcagttatagtctctggcaacgtaaacgtgaagcctgggcattgtttgcaggaaagtacgaagaagctctgaaaacctggccggaagagaaaactaaggggtttgatgaaaaagctattatctggatttatgatgcgttacgtctttatgacgaaggcctgtcagaactggcagtaggtaatcgtcaggtatggaagactaagacgggagaattttaccgtctgagtaggccgattgatcttgtcagatcatttttctgggcttcatgtcatgaacgctgggttcatgtagaaccctatccggaacacgtgatccccctggataatttgcgatttgcggctgagtgctatggcgataatctgttatttcctccgtacgataatgtctgcaatatttttgaagcagattacttattggactccagtcggtataacggtgtgtttcatacatatccttaccctgtatttcccaaaaaactgccacccgttcccgaaggtacagatattattatcaaaacaggagagcctgtactctgtgacggtatctgggaaccagtgaaaattcagtacaatcataagttgttagtgataaaaactgacatcagtgggtttaaaaatcttggtgcctataattatttcattcgaggaatgaaagcacctttgcagatttatgaagatctgttgctggctgaaggctggggttatcgtgacgttcactggcgcctggtctgggaagacaaccgctattgcgacggcataattccggatgaatcagagtattttcttcatgaagcacaagggaaacgtatccagtgcaggacgggggataagtgccctcactcagggcaatgggccacgcttgccggaggtcatcagcagtttgcttatgttcgtacaggaggccagatgcctgaagcgacagttttcaaaggtggctacagtccagaaaccttcacacccgcaagctggagtttgctggatcgagatgacggtggcagccccttcgaggctaatcctggtgagaatcactga

SEQ ID NO: 148686 - DNA, 1554 bp, Enterobacter cloacae
atgagcgatatcagcagtaccgcctggtttaaacagaccagtcttgaaaccagccagtggatctgggggaccctctccggggcgttcaatgagaagcagaccatcgggcaaattattaccgatgcggccattggaatgatccctctggtcggggatgtcaccgccgtgcgtgatttgctggccgtgtcgattggcttgattaatgaacccaaaaaacgtgaaagcaccaccgagtgggttttcctggtggtgttgttgtttgcactgattccggtgattggcggcgttatcaaaggggtaggtcgtctggtgcttgtcgggacggccaaaacagctaaagcggcaaaaaacattgaaacgcagaaggaaataattcagtttttaaaccgcgttggcgaaggtaatgccccaaagtggttgaaagcactggatgtacagtctcaccaggccattctgctggataaatttggggcgttctgcaatacgatgattacggtgacgaacaagatcctgggctctacgctggggcgtgcactgccggaaaaatggcacgggcagctctattcgctggttgatggttttgcgagcctgcgggatatgggagccagaatgatccctcaggctctgcgggaactggatctgaagctcaaagtgatacaggggatggtctataagggtaatcctttcattctggttacgagctcagggcgtgctaccgttcgtcgtgagtccgaggcgtatctgattgagcgtgagttgcgggaagcacctaaacaggggacacggtacccgagtattcaggcggagacgcgtttcagggggagtctcagacgaaagtatcaaaaaacaggttatccaaacatcctccactgggaaggggagagcccagcctttcctggaaaaaccgtatttacagacgtagcgtctttcagtggggagattacggcgaaaagcgccagggaaatgggtgggaaaacactatttcgtgcttttggtaatgaaagtgaatttgccaaagaatcctacgccgcgggaggattctggggatatcaaaaaacgccagagacagctgaagaatggcgtgagttatatggtgtgctggatgagtggaacggcaatggctttctcattgtacttcacctccccgaagatttcggtacacggatgcctggcgctaacgcctggcatgggataatagctgagcaattcgggaaacacaggccgaatcaatatctaaaaggtggtggggagcaggtcattattgagctggacgaacggtttaaaagaatggtgaataattacggaaatcaggctaaagctaatggccatgcaattactgtcgatatccagggtgtgagagccgaattttacccctccaggtgggaggatgttagttgtaaatatggatacagcaaaccagaaggtattgagcctccttatgcgtccaatacgcgccagttacatgatgatgaactccgaagcaaagtgacgcagcggagtatcgtaaatgccactcgcattgaacaccagaccagcactgaaggtaataaataa

SEQ ID NO: 148687 - DNA, 2565 bp, Enterobacter cloacae
atggacaccacccttgataactggctggcgctgtttgacgggcagacccgctaccgccttgagataaacgacagcatcctgaagccggaagtgctgaacttccacgggcgggaagcgctgaatacgccgttcaaatggcgcattgagttcaccacgccacagaaaggcatcagccgtcaggacgcgatgctgaagtatgccaccctcagcatgctctcaggccgggttgtgcagggtattattaccggctttgaggtcctcaacgaaaccgtggaccagacgcatttcgctgtgacgctctcctcgcgcctggcactgctggcccacacccgccgctgcgcggtctggcagaatgtttcggtaccggaactggtggaacaggtcctgcgcagccacgggctggaaggagcggattttgaattccggctggaacgcacttacccggtccgcgaactgattacccagtggcgtgagaccgacctgcagtttattcagcgaatactggccgaagacggcatctggttccgcaccggggtcaacaccaccactggtcttgatacggtgacctttgctgacagccagcttcagtatcagtttgatgtacgcctgccgtaccgtgagccttctgccctccatgacggcgcggttgaggcggtatgggatgccagagtgtggcaccacacggtgacaggcagtgtggccacacgggactacaactaccgcaccgccggtacgccgatggatgcgaaggtcagcgtcagaaacgaggcggccactaccggcgaacattacctctatcttgccccttatcgtgaagcgggcgatgacaccacctctgagccggaaaccgaaagcggcgcgttttatgctcgtatccagcacgaacgtgaactgaacagggccatccgcctgcacctgttcagtaacgccagccacctgacgccgggcatggtgctggagacaggagacactgacgtgccggagctgaaagaggggatggtcatcacgctcaccaccttccgcgcggcacgtgatacccgcctgcatgtctcggtgtggggcatgccttacagcgagcagttttgcttcagacccgagcctgtaccacgcccgctgattgccgggactctgacggcccgtgttgagagcgacgagaagaatgcgccgtatgcgcacctcgatgaaacggggcgctaccgggtgaagctggacttcatccgtgaagacgcagagccgggctataactacctgtggatacgtcaggccaaaccgtacgccggggaaacgtacggctggcacacgccgctgataaatggcactgaagtggggattgcctttgacggcggcgacccggaccggccgtacattgcccatgcattccatgactctgagcatccggatgtggtcacccgggataaccatagtcagaacatcctgcgcaccgccggccagaacgaactgcgaatggaagacctgcgccaaagcgagcatattgcgctgaaaacgccgtttggagccacggcccttaaccagggccatatcgttgatgcacagaacgagccgcggggcaccggctttgagctgcgcaccgatgagtacggggtgattcgcgtagcgaaagggctgtttatcaccgccgacggtaaagtacatggcgagggcgatattctggatatggatgtggcactccatgagattgaggccgtccgcgcacaaatcgagggactggccagcgccacccgacaggcgaaagccctggaagctgatatcgccagccagcaggcaatgttcgccacacggctgaaaactctcaatgagatgcttcacttttcagcacccgaggggatggcttttaccagcgcagagcacctgcagctggcggccactgacaatattgccctgaatgccggtggtgatatcagtatcgggacccaggggcatatcaccggactggcgggcgacagcgtgggaatgtttgctcaacacggcaagctgagcctgatttcggcacaggggccggtccagtttcaggcgcagaacggcgtgatgcatctgagcgcggagcagaaactaaccctcatctctgccagcgagatgctgctggccgggaagaagcgaatacgtctggtgggtggcgggagttccatcctcattgagcaggggcaaatcaaatacgagactgcggggacgtatacccgcaaggccagccggctggatacggaaggtggtgcttcacagactccagacgtgccgtggctggctgacccgctgaaagaccgcaatgatgcactgatgcagtacctttaccatgatgatgcgccggtggtaggagcgccgtttaccgcgacactgtcggacggttctgtgcgtacagggaatctagatggtgcaggctatctgcatcttgacgatgtgccagacggcccgatgaccgtcgatataggaccggacagccgcagctttgcccgaaaggccacagaggaaaacacgcgctatcaggcgaaagcgatgagtgacgctcaggctgatgacctgattgcccgccacacagggagtgaagtatga

SEQ ID NO: 148688 - DNA, 528 bp, Enterobacter cloacae
atgactttcgcttccctgtcgcgcagcgccgcactgatgctgctctgttccctgttgactgcatgtggcctgactcaggccgtgtcggacggcaccatcagtgcaaccagagccattttctacaaaaaaataaaggtgctgcacctggactttgagccgcgtgcggccatcaacgcagatgaaagccaggtgccgcttgccaccatggtgcaggtataccagttgaaggaccgccagaaggtggacgcggctgactatcagaaactgctgcgcgatgcggataacacccttaaagaggacattgtcgccagcaagtcgctgctggtgatgcccaaaggcagcgtgacgctcaatatgccgatgaacgaagaggcgaaatttgtggcggtggtggggctgtttaatcggccggatatcaaaaacaacacctggaagctggtactgagccgcgacgacctcgacccggataagccgcgcaccatccagctcaacagcaccgggctgaccctggttccggtgaaggagtaa

SEQ ID NO: 148689 - DNA, 1080 bp, Enterobacter cloacae
atggaaagagaatcacagccagcacattccgggctgacagaagcgcttcgcgacaacatctggcaagttaatttctaccgcttctgtcagctgctggagcaggagaacccggatgcgccgaaactgggcagtaccgagaaactgtccgccgacccggtgcgttttcgtccgtggccggggatgggattcccggtcagtgaactgaaggcggttgaaaccgacgaggaccacccggacctgtcgccgacggtgcggaccactttcctcggaatgtacggggtggactccccgctaccgacggcgtatctcgatgatattgcgcagcgccgggaggggtatgaagccaccaccgcgtttctcgatatcttcagtcaccgtattcacacccagtactaccgtatctggcgcaagtacgcttacccggcgactttcgaagccggtggcgtggatgacacttctcagtgtctgctgggtctggtggggcttggcatcccgggtacggcggagcagattgccacgccggtctcccgcttcctggcgctactgggaaccatgcggttgccaacccgaaacgccgaaggcatccgccagttggtgagcctgctggccccggagacccggaccacggttatcagcccggacccggtcaaagtccccgtggagaatcgcagcggactcggcaaagccaaccgcgtgtcgttgtcacagcgggccacgctcggcaggaccgggaaagaagcctgcagccgtatcctcttgatgctggcgactgacaatccgcaggaggcgcagggctggctgcccggcggtcagctgcacactgacatgatggtgctgctgcgggtgtacatgggttatcgctccgatgtacgccttcgcctcacggtaccggtaagctgtctgcctgaaccacgcctgggtaaggcaagccgggtacaactgggccgcaccggcgtgctgggcctcaaacgcgaccatcccgcgacccgtacgcacctgacagtaagccttggtacctgtgaggggctcacctgtgagactctgcggccggcagaacccggtggctatcgtttcgactga

SEQ ID NO: 148690 - DNA, 1770 bp, Enterobacter cloacae
atggatgatttaacccttcgctattacgaagccgagatgcgttacctgcgcgaagccggtaaagaatttgcccgcgcccaccccgatcgggcagcgatgctcaatctggataaaaccggggcccgtgacccgtatgtggagcgcctgtttgagggctttgccttcctgatgggccgtctgcgtgaaaagctcgatgatgacctgccggaactgactgaagggctggtgagcctgctgtggccccattacatgcgcaccattccgtcgctgtctgtagtggcgttcacgccggactggcgccagcttcgcaaaatggaagtgcttgaaaacggcttttccgtcctgtcgcgtccggtcggtcccgataatacggtctgtcagtaccgcaccacccgcgaagtgcccctgcagccgctgcacctggctgaggcccgcctgcagaccgaaccggatggccgcgccgccatccgcctgcgctttgaatgcccggacaaagtggactggtcgaaagccgggattgataaggtggctatttacctcgatgcagacagcccggtggcctcggctctgcatctggcgctgacgcgccgggtgcaggcgatgtatgtccgccacagtgagacccgtacagagcgggtacgctttgacggctggtgtaaacccatgggctttgatgacaccgaccggctgtggccaaaaggtgactcagcgttcagtggctaccagctgctgctggagtatttcagctttcgcgagaagtttatgttcgtggagcttaacggtctggatcttgccggcctgagtgcgaaaaccacttggtttgagaccgatatcgtgctcgacggcggctggccttctgacatgccgtttgagaccgacaacttccgtctgcactgtgcgccggtcattaacctgttctcactggaagcggacccgctgacgcctgatccgctgcaaaacgaatacctgctgcgcccgatgcgcgttcaggacggtcatactgaaatctacagcgtggactccatccacggcgcagtgaaaaacggcaaacatccgtacgtgccgttcaccagtttccgccatcgcgggggcatgatgcgccacgatgcgccggagcgttacttccatacccgcgtgaagcgtggcccctcggggctgtatgacacctggcttatccttggcggtaagtcattcgaactggagcagctatcacaggccccggagtcgctctccattcgcatcacaggtaccaacggtcagctgccgcgccgctcactccagagcacgctgctggacagggtggtgaaagcaggcaaagtgccggttcgggtcatgaatttgaaggtgccaactttgccgctttacccaccggcaaatgaccgcttccactggcgggtgatgagccatctgggttcaagtttcttaagcatgatggataacccggaagtgctgcgcggcacgctggcgctgtatgactggaccgacgatgagatgaaccgccgacgcctggaggcgattgttgccgtgaagcacacgcttatccgtcgctttgaaaagggctttatgctgcgcggggtggacattgaaatcacccttaatgccgataactttgccggggagggtgatgtcacgctgtttggcgagatgctgcatcgcttctttgccctttatgccgatgtccacctctttaatcagctcacgctggtcctgcaaccgactgggaaaagactgcgatggaaagagaatcacagccagcacattccgggctga

SEQ ID NO: 148691 - DNA, 660 bp, Enterobacter cloacae
atggatgttttgttctgggtcgctgccagctttggtgctggcgtctgggttggagtgcagcacagaaaaagtcagcgaaaatcctttcggcagtccacatcgaagaaccgtactgtccgaagcgaagctcagccaacaacttgtccccccgcgtcgtcgccacatccagccgtaaaatacagaaactctcgctgggaagagaaggaggacctgttctggggaatggtggaagaaggtgtcattcttgaaaacaaaaaatacatgacaaccccgaccgaaagacaatatctggaaaagctcgaagcgtggtttggtcaatattgtcggatattttgtcaggtgagtcccgggcgcttcctgaagttaccggagcaggaggcgttcagtgctgaagaaagagcgcgtttctttacccagtttaatgcgatgtccgtggattatgttctggtctccagaaaaaataacaaaattgtctgcgtcattgaactggatgataaaagccatgaacttgatgagcgtattgcacgtgataaacggctcgaacatctgtttgaaatggccggtgttccgttacttcgtgtcaacgttgacgaaatgaacgctcaacctcccgtgtgggatcgtcgtaaggctgtagaagaaagaatggccgtttcctga

SEQ ID NO: 148692 - DNA, 1620 bp, Enterobacter cloacae
atggctactgcagaaacgctcctgaccctgtgtcttccggatgcggtccagcgtaccacactgctcgctaagagccgggaaagcctctccctgtggtcgccgtggctgacaccactcccgactggtaatggagccggggatgacccgacctatgaggatgatttccagctgatgcgcgaggagatcaacaagctttccggcaccgataccggggtgctttgtcgcctggcggaaagcattctgacccaacatgcccgcgacatccgggtggtgacctggtacaccatggctcgtctgcagcgcgatggcgataccggtctgacggatggcatcctgctgctggcagccatgctggagcaggcggggcagcactgccacccacagcgcagcaccgcaagactggccgcactcgactggctgaacagtgagaaagtgctcgatacattctctcgctggccggacgtgacgcgtgaggagacaggcagaacagcagccgcgctgtgcttgctggaaacggccctggaacagctgccggatgcggaacgccctgactttgccggtttgctgcgcaggctggaaacccgcctggctggtagcggcgggctggatacaccggtggcttcatcaggaccggacggctcaggtgaaagcacccacagcacaccgacgtcaggcactgatgtaccggaaaccgtggctgtcaaatcggaagtggaactggtccgtcagctgcgggtgctgtccggctgggtggttgagcagccgcagggctggcttgccgctcacaggatgatgaaggccgcccgctgggacctggtgacgcaacttccggctcttgatgcagccgggcggacgcgcctactgccgccaaaggctgactaccgcgcccagcttaaacgtctctacctgcagcagagctggactgaactggttgagcaggtggatgtgatgttctctgagggcggtaaccgcttctggctcgatttgcagtggtatctgtggcaggggctgagccgggctggtgggccgtgggagcactgggcggagtacatactcagcgacctgaggctgttactgaaacgcctgccaggcctggagacgcttgcctggaacgatggcacgccgttggccgatgaggtgacactgaactggattgctgaaatggtcaacgatgagatgcccgggtttgccgatgcgcctgcggtggcaaacggaggccagacggatgacatatctgcgctggaagtggaagcgatggaaaaaggtgaccgcgatggcccggaggcagcgctgacctggcttcagaatcgtccggacatggcctcaccccggagccgctggttaattcgtttactcatggcgcgggtggcagagcagtacggccgcaacgagcttgccctgcacctgctcggtgagctcacagccagtgcaccgcagctgaccctcggtgactgggagcctggactgttgtttgacgtgcttgcccgccgtcttcggctgttgcgtctgaaagctggtcgcagcgagagcgacaaatcccggctcacccctgaaatggatgaactgctggctggcttgatttccattgaccccgcccgggcgatggtgctgtgcggttag

SEQ ID NO: 148693 - DNA, 3372 bp, Enterobacter cloacae
atgaaaatcgcatccacttttctgcttgcgctgcttctgggcgcactgtctgtctgcctcattggcggcgcactcttgttatggccggagtgggttaaggacaccttcaacatagggccattcagtacgaccggcatagtgataatcagcctgctgctgatgctggcagcattgattatcggctgggtgcttgaaaccgtattcgctaagaacggtgagaaacagggaaagctggatgtggtcgcctccggacagcaggctgctgcatcccagcctgaagcaaagcataccgacgcggacacctcccggtttgtggctgaggcgctggtcgatcatctgcgcctgcgctaccgccgtcgctggaaagccaaagttcgcctgttgctggtacaggggaccgacagtgatatcgaaaaggttgtgccgggtcttaagggcgatcactggcaggaaagtgacgggattgtgcttatttacggcggtctggcggaaagcgtgccggatgatgagttcctgtccgtgctgaaagcagtgcgaccacagcgtccgctggatggcgtggtgcaggtgatgaacacggctgcactgcccgatacagcgaagcaggacacgctggtgcgtgtacgtcagaaaaccgatactcagttgggctggcagctgccggtctggctgtggcttgtccgggaaggctcctgggaccaggacggagtgggtgtacctccagccggcgcgctgtttggtccaggtgcgacaacggaagaggtccgttcgacattgacctcactctcgtcagacctgcaaaccccaggcgtgtcggcgctgctggagaactctcagcaccagtggctgttgagcctgtcgaaagccctgcgcggctcgttgcgacgctccctgatcccgctgctgaccacgctgatgtcagggccagccccataccgtctgcgtggggtgatgttcagtccggcattgccagggaccgaaacggtgccgcatgcgcgcctttcaccaccggtctggcaggcgctcgaaaacgacagcctgcaggtgcatgcccgtaaaatcggtttccactggcaaaaggtactacgcatggtgctgctcgctctggtactgctctggggcgcgggcacgctactgtccctgtccgtcaaccgcacccaaatctggctggctcaggatacggcccggattgctgctgacactaaacagcctctgtcggatcgcctgcgtaaccagttagctctgcagcagaccattgcccgcctgcagaaccgcgaagtgcacggtgcgccgtggtacacccgctttggcctgaaccaggacagcgacacgctgaagctgctctggccattgtatgcccgtaacaatcaggcgctgatgcgtgatgcactggctgacgaacttcaccgtcagctcaacgctttcgtgcagttgcctccggcaagcaccgcacgaacgtcagccacccagaagacctatggcctgcttaaaggctacctgatgctggcccgtccagacaaagcggatgcggagtggctggcgggcaatatgctgaaggcctggccgcaccgcagcggcgtgccggacagcgtgtggcagacccaggcgccgaagctgctcggcttctgggcgcagaacctgccggcacacccggagtggaaaatctctcctgaccgcgaactggtgggcactgtacgtcagatcctgctcaaacagattggtcagcgtaacgcggaaagcggtctgtaccaggagatgctcgggcgtattgcccgtaactggccggatttaaccctgtctgacatgaccggcgatacggatgcgtcaaccctgttctcctcggaagagatggtgccggggatgttcacccgtcaggcgtgggaagagcaggttgaagatgcgattgatgaggtagtgaagacccgccgtgatgaaattgactgggtgctgaccgacaaaacccatcagccgggcagtgatgtgtcaccggaagcgctgaaacagcgcctgactgagcgttacttcactgactttggcaacgcctggctcaacatggccaacagcattcagtggcacgaagcgtcatcgctttcggaggccattgcgcaactgaacctgctggcggatgtgcgccagtcacctctggtggcgctgatgaatacgcttgcctggcagggtcagacgggggccaaaggagaagccctggctgacaccctggtggactcggcgaaaaaactggtggagcgtcagaagagtgcaaaacagtttattgaacaggcgcaggggccgaaagggccgctggacggcgtctttgggccgcttacggggctgatggccggcaaggacggtaccggctcaaacggtaacctcagcttccagtcctggcttgcccgtgtaacccaggtgcgtctcaagctgcagcaggtgaccagcgcccctgacccgcaggcgatggcgcagatgctggcccagactgttttccagggaaaagccatcgatctgaccgacacccgtgactacggctctctggtagcggcaagtctcgggcaggagtggaacggtttcgggcaggcgctgtttgtgcagccgctcgatctggcctggcgtcaggtgctggctccggcggcaggcagcctcaatgcccgctggcagagcaccattgtttcgcagtggaacaccgcctttgccggacgctatccatttaaggccaccggcagcgatgcttcactgccactgctggcccagttcctgcgcagcgactccgggcgtatcgcggcatttatcaaaaccaacctcgggggcatgctgcatcaggaaggcaaccactgggtggtggatccggctgccagtcagggaatgagcatcagtccggcgtttcttgccgccatcaacaagcttgccgatatctcggatatcgtctttgcccagggcgatgccggggttcatttcgaactgatggcccgaccgtcacgcgatgtggcccgcacccagctgacgctcgatggtcagcaactggattacttcaaccagatggaaagctggcagagcttcacctggccgggcaatacgtattaccccggtgtggatctgagctggcgctcagtcaatacagaaatgcgcctgtatgccagtaatcagggaaactggggctttatccgtttgctggataaggcgcttatcaccccgctcgacagcagccgtacccaactggtgtggatcacgccggacggtaatcctctgaaatttatcatgcgcagtgagcttagcaacgggccattggcgctgctcgaactgcagggcttcagtctgccacagactattttttccgtgggcgcgactgacggctcactcacccttgccggagacgaataa

SEQ ID NO: 148694 - DNA, 1161 bp, Enterobacter cloacae
gtgccggttgaacttgagcgcattcccgcgcaggaaaaactgccgccccgtccgcgttttaaacgctggctccacctgggcattgtgatgttgttggtaggggttgcgaccacattcctgttctggaagggcgagcgctcaggtgccgctttctgggggctggcaacaggattgcctgtcgtgttgtggggcctgctggttgtcggacgctatctgggatatgcccttctttgcgggcgctgcaaccagaaaaatgccacgactgctgcacgctaccgtgcagacgttgcgcgcggacagcgctttgcctggcttatcggcgaagtcctgattaacgggctggggcctgccagtccagtgacgcacgaggctgtgttagctaaaaagcccctgatgatgccctgtgagcccgttaatggtggcaatccggttcgtcaccgggcgctggccgtcaccggagagatggctgaccgtgaagcgcattacttccaggagatcaccgcccacgtacagaatctggtgtcgttgctcccgccgacgctgacctgctatctgtcggtagataccggtgaacagttttcgacactgccatcgctcctgcaaaaaagcgtgtcccatccgctggtacgcattcgcgacctgacagggctggaaatcctggactactggctggactgccattatgaccgtgctgctgcgttactggtggtcagcgctcagctttacgaacatccgccagaggacagtggcgaggccatttccatgttactgctgaccaactgccgcctgaaggacatcccggatgtgtcagtcagggttcaccggccgcagaactgtagcgatggcaatctcgatcgggcatttgagcgcgtcatgatgtggtcagggctggaaaaaactgcactgaagcaggcctggaccagcggcggccagatggcctccggcgatatcttcagcaaggcccgggaggcacatgccccggggcttaaagccgataaaattacccatattgatacggttgtcgggtttgcgggcgttgccgctccctggcaggcgttacagctggctgcccgtcagtgtttgagcgacagcgaagcccagctaattgtcaccgaactttcagaagacaaccgacaactctgtattgtcaccccggaataa

SEQ ID NO: 148695 - DNA, 258 bp, Enterobacter cloacae
atgcaaggaattattcgtctcggtgacagaaccacgcacggtggagccgtattgtcctgctcaacgaccatgttttttggtgatattggtgtggcccgtaaaggtgatcgagtttcctgccctgagcatggtgataccactattgtcgaaggtaacccaaattatcgcgatcgtggtgttcctgtggccttccatggccacaagtgtggttgtggctgcacgcttatcagctcactgcccaatgctctggtggggtaa

SEQ ID NO: 148696 - DNA, 489 bp, Enterobacter cloacae
ttgcctaaaatactttgcagcttattgtttggactctgttcattgtctttatatgggcaaggtgaggtagttcaagggccgtttaaaattgatggcgaaaaagcaatctactttcagagagaatcaaatcctgatttccctctcggtttatactacgattccggaacaaaaaaaactcaagttgataaatatgaaatggatggtgacactccaaatgttgacacagtattctttatgaaaattcacaatgtaaaaaacgttgttgttttaatctcttggcatcaattgcatcaagctgagtctatcaatgggaatacttatcaaatctatgcttataaatacattaatgatttattgactctaaatgatgtgatcacaaaggatcctgcgttaaacggtatggatggtgagttcaacggtgatgaagtgcattttaaatataaagatgcagcatctattaagcaattcatcaagagtaagtataactga

SEQ ID NO: 148697 - DNA, 234 bp, Enterobacter cloacae
atgaggaataaatatatttatttgacacttgctgtgcttatatcatcttcatttgcaaaaactgactctccaagtgagtgggttaattatgagaaaataaaagatgcatattctaaagcagatgctgaactgaattctgtatataagcaacaaattcaggagtataaaaaagaagggggggggtttatggacggagtgaatcacgtgatatataccttaaaaaatcacaactag

SEQ ID NO: 148698 - DNA, 534 bp, Enterobacter cloacae
atgaaaggtattataattaaagttatagccttaagtatacttttagtatcatcattggtttatgcttgtggtgataatcctaatgccatggttcaaggaccattcaaagatagcgcatttaataatggagtcatctgttttcaaaactctccagataaaagagatgttgatttttatcaaagttatttatccgttaacgggaaggttaacaaaataattgatacatttagttactctgatgctcctgctgaggtttcctctgtattctttaccacaattgctggcaagagaaatgtggttgttcttctgcgctggaatgttaattatttcactgatggtgtccagtatccatatcactatgaagtaaaggcatataatgctactaaagactcaagttatgagttgttcttggattcagatagggacccaaatttatcaggttttcaaacaaaagataatgaaaagatatctaacgataaattagataatgcgagcaagataaaaaaatatttacacaataaatatggcgattga

SEQ ID NO: 148699 - DNA, 771 bp, Enterobacter cloacae
atgatctttggctatctcggcgtggctttcaaagaagaccgcgtttcctgctcagagcatggtaatccactatcgtccaagataacccaaattaccgcgctctgggtgtttctgtggctgtacgcttatcagcttactgtcaaacacgacagtgaatggtttggcggcagtaaccatcaccgctggcgaacgtttttaaagcagctggatccgctgtgcatcagctatgtcagacagtggtttgacgacatggaatggatgagcaaggtcgagggattaagtggtggtgcgcctgtctggcatatgcatcctgtggtatttttaaatgcaattgctgaaaaatatggtgatactattgatttcaatacaactttaggtttgtatcagatatcaaaaaaatcagccgaattcattttatcctgggaaggatatgctcccaaaccctatgttcctggtggggaacagtcaagcggagtgactgtcggatatggttatgatttagggcaacagacgacatcatcagctcgcgaattattaagtgcttattactcaaatgcacaagttgaaagattgctgaccgcaatagggaaaaaaggtgataatgccagggcaatcgttcatggactggcagatataaccatcactaaagataaagctttagatatggcaatggttctaaagcaaaggtattgtcagaaagttgtggatgcttatccacaggccattaatctaccaccggatagcgcgggtgcaatgctatcactaatttaa

SEQ ID NO: 148700 - DNA, 450 bp, Enterobacter cloacae
atgaaaagagtaaatagtatcttgttgataagtggattgctatccttgtcttcgttcgcattgggtgctgagaattatttttcatgttcaacatcgaagggcgaactatccttgcagtctaatgccgatcagttggtatatgagatgaaaaatgctaatggtaaggtgttttcattttcatctgcatctcccgcttatagtgattttttatataatcattactcgcgctatcaaactgactatataaatgtagcgtttacaaaatataacttcaaatatactgtattcagtaattatgaagatggggagagcactaaaggagttactgtcaccaatctgaaaaataacagagaatatacttataattgtaagggtgaaggtgtagataaactttctgatttaattagtaagcttcagtgtgataaaggaagctctcttgggtgccagtaa

SEQ ID NO: 148701 - DNA, 954 bp, Enterobacter cloacae
atgtatgaagggaataattgtgcttattgctggctctactgtgacctttccggtgaagaactgcgccaggcagttaattacgcggagctggatgtcagggatattgcggcgcgaatggtggtgaagcacgacagtgagtggtttggcggcagcagccatcaccgctggagaacatttttaaagcagatggatccgctgtgcatcagctatgtcagaaagtggtttgatgacatggaatggatgagtcaggtggagggattcagcagcggtgcgcctgtctggcatatgcatccggttgtgtttttaagttcaatcaatgcccttagtcttccaaaaacgccagttaatggtgaattggtgtcgttggatttcgttaatttttataatggcgaggttattgatgaatcagattacgaattggcggcaaataaattgagatgcgaagttgctgcaataaaagctgtagctaatactgagacaggcagttctggcagttattttaaatttgagagtcatgatgattatgttccagcaattttgtttgaaaggcatcatttccataaatatacaagtgggagattcgattctcaatcggatatttcaaataaaaatgcaggtgggtacggtaaaaattcagagcaatacctaaagcttttaaaagcgtatgcgcttgataagcgttcagcgttaatggcaacatcgtggggcaagtttcaaattcttgcttcaaactataaagcagcaggttattcatcgccagaagagtttgttaagtcaatttcagagtcagaaaaaaatcaattggcagctttcgttaatttcatcaattctgattctgtacttttgaatgcaattagaaataaggattggctgtcttttgctttgagatataatgggccgaggcagaaaggatacgatttaagaatgaggagtaattatgaaaagagtaaatag

SEQ ID NO: 148702 - DNA, 717 bp, Enterobacter cloacae
atgtcactaaaaaaaataataatgcttactgcactaagtttaatcaatataagcgcgaatagttacacaactgattgtaatactaaggtatgtgatgggatgacgttacctgcaccttctcaaaaattcatagaaaagggttatgcaaacattgaagttaaaatgttaaatgatagtaaatatcttttcctaagtagtgagggtgatgttaataaatgttcggttatttttaaaattcaaaatgataaaatagaaaattatcctgctgccggcgaagatgggaagttgtgcaatgtaacagcaataaatgatcatgttgtaagttcctatcgagaccaaggggcatggataaatgacgtgtataagactttaccagaacagccttggactctgctgttctctgatttttgcgctgattgccagcaggtaaaacgggtctattataaagatggaaaacaaagctctcaggaattaatgtcagaaggagaagactactcaaaaagaaaatcgttgaatggtgttgttttaactcaaagagcatctttatattctcaacccaatgaacaagggatgttaaaggcatatttaatcaagggcgataggtttaagctttctgatatgtctggtgatggttcgttttatcaaattgaatatacagcatcatctggtaaaaagatgtcatattggattaagtctgacgattttgaactgaactga

SEQ ID NO: 148703 - DNA, 2283 bp, Enterobacter cloacae
atgaaaatctgttttcctgcccgaaaagcgaatggtgaacaatacgccaccctggatgaaatgatgcagccgctctttcaggagccacacagctcctggctggccggaacgaataacatgtggcacggcgggatccacatcaccagtaagagtgccccgggttctgtgctgacaaacgagacggcagacacggcggtgccgcttcagtttatggccggcggcgaagtggtggcctggcgtattaatcaggactatctgaccggtaaatacatcaataacccgctgcagtattccagtacgtttgtgctggtcaaatcgacctgtacccccgatcccgaaaaaaaggacaacagcctcgatttttactcgctgtatatcgggcttgctccgctgtctgcctttccggagcacaagctgtatcaggttacagagaagggcgatgctcttcataaacgcgaatataccggcaaagaaaaagacggagataaggctccgggcgcgaagacggataaactcaaaacgggtgaccgcgtcattgtgctgcgtgagatcaccttcgatctgaaggggcaggcgcagatgttcgggcttgcccggatgctcaacagcaaatccgaaatgaccggcggggcgttctgggtgtcgcttgacccgcaatatatgacacctgccggtaaacagagggcgcacctgccggcctggatgcagcaggctgtagcacagggcacatttgataccgtcgttaaaccggcaaccaaaatggaagttgcagctggtgatgcggtgggctatctggcggaagacattgccccctgcgacttgcacggtgtggagaaaagtgcgttcgcacacattgaagtaatcagcaccgacagccggatggtcgattttctgagcaataaggcacaggtgaagagtggcccgaaatttgttcatatccacccggagagcttcctttatagccgttccggcgatactttcgcccagaccaaaggacaggtgaagaaagatattcacaaaattatgccgcaggacaaatgccatccgttcaaagacagcaaccgcaagcgctggtttgatatcggggacggggcctgggtaagcgaagacgatgtcgatgcggatatcggccagtacgacctggataaacttggctttaaagcacttgaagagccgtccacatccgatatgacgaaatccctgcgtgaaggggggatcaaggacaggttcaccagaattgcggagtgggtacgccctgaacgcggtatccgggaaaaacaggtctctgactactataaatccctgctgcggaaaatggacagcgataacagtggcgacctttccggtgcagaactgcgccaggcggttaattatgcagagctggatatcagagatattgcggcgcgaatggtggtcagacacgacagtgaatggttcggtggcagcagtcatcaccgctggcgaacgtttttaaagcagctggatcctctctgtgtcagctatgtcagacagtggtttgacgacatggaatggatgagtcaggtggacggattcagcagcggtgagcctgtctggcatatgcatccggtagtatttttggatgcaataaacgtagtttcggagtacgaagtcactgttgagctgatcgaaaaattattagggcatactaatccttggtttacaggtaaaagaggcgggaaggtattttcgacccatttcaaaaataattatcctgaagtttatgagtttaataagcaaagttttgtgagtgaatttaatgagcaattaattgcatatgggattattggtgcctatcataaagcacatttcctttctcaatgtttgcatgagtcagcgcattttgatacaactttagaatttggttctggacataattatgatccagggcagcataaagatgccgttaaaaatggaaatactgttgtcggtgacggtcctcattataaaggcaggggactgattcagttaacatggaaaaataattatcgacgcttctctggttactctggtgttgattgtgtcgctaattctgagttggttgcctcggtgatgagtaatgcaattaaggcatcttgctggttttggcgtaataatggtggtattcacaaaaagtatgatgccaggggagatattaatattttgattgataatgagaagaataatgttgaattaattactctcgcagtcaatggtgggcgaaacggtttaccggaaagacaggggtatttcgatgcaattaaaaaagaatggggtttggagtaa

SEQ ID NO: 148704 - DNA, 417 bp, Enterobacter cloacae
atgaaaaaaatcatctattgcggaattgttatagtattttttagccagttcacctttgctgaaccctctgttcaaatctcggcgggaaaatattcttttacgcaggaaggtgaagaacttattgatggggctaaggtgagtattacctggaatatttatgtcaaggatgacagtcatgcagtcgtcaaaatttcatcatggcatgtgcctttcacttgcgatggaaaatatactgtatccagaaatggtgaccaactagcgctaagctggtctgataaagataatcctgatgtagagtgcgacacttcctctccacagtttttattaaaaaaatcctcatcgggaaaagtattagcacatagtgagctttttgtctggaatcctgatggttggaaaaacatgcgtgtgattaaatga

SEQ ID NO: 148705 - DNA, 849 bp, Enterobacter cloacae
atgcaaaaaaaatatgtgacatttatttttgttgttttatcattattttccactttggtttgctctgaagtcgattttaatgcttctacatgggtatacgataaagtatctaatgttgatgtgtttggtaaacatgattcgaacgtgatagctcacattgatgaatcttttaaaaaggtcattataacaaccaaagataaaaaactaacgataaaaaacgattttttagaaaataacaatgtatgctcaactgattttgtgtcactaaaaaaaacaccgctttcatattatttgtcgcaaaaaacagctgatatgtataagaaagtctacgaggagagcaacgtaccactttctgatgatattgatcttctgatgtctttgtatcctggtaaagaatgtccggcaccatatgcagaaatactaagagttaacgattatttgactgtttccgaccaaaattatattttattttttaagcatgtaaatgaggatgaagttagaggtagcagtaaagtaagaaaaatggatttatccagttattgtcgagatgaagatccaaataaagagtttgatggggcaactaacactgaatgcacattccctggaatgggtttgagtgctgcatataataaattaaaggaacttagcagtacaggtgagtatttgaatccaaagttaccaaccacaaatgaaaaagataaagttgactcagggaatgttgactatcagtggcaaggtaaaggtaagctaaaaatttccctcgagatggataatgaatcaattcattacatcttcaatgaggaatcgactgggaccaatttgttaatctcgactgaatctcagtattga

SEQ ID NO: 148706 - DNA, 2703 bp, Enterobacter cloacae
atgaaaatctgttttcctgcccgaaaagcgaatggtgaacaatacgccaccctggatgacatgatgcagtcgctctgccaggagccacacggctcctggctggccgggacgaataacatgtggcatggcgggatccacatcaccagtaaaagcgccccgggttctgtgctgacaaacgagacggcagacacggcggtgccgcttcagtttatggcgggcggcgaagtggtggcctggcgcattaatcaggactatctgaccggtaaatacatcaataacccactgcagtattccagtacgtttgtgctggttaaatcgacctgtacccccgatcccgaaaaaaaggacaacagcctcgatttttactcgctgtatatcgggcttgctccgctgtctgccttcccgaagcacacgctgtatcaggtcacagagaagggcgatgctcttcataaacgcgaatataccggcaaagaaaaagccggagataaggctccgggcgcgaagacggataaactcaaaacgggtgaccgcgttattgtggtgcgtgagatcaccttcgacctgaagggacagacgcagaggtttgggcttgcccgggcactgaacagcaaatctgaaatgagcggcaaggcgttctggatgtcgcttgacccgcaatatgtgacccctgtcggcgagcagatggctcacctgccagcctggatgcagctggcggttgctcagggggcgtttgataccgttgttaaaccagcgaccaaaatggaagttgcagctggtgatgccgtgggttacctcgcggaagacattgcaccctgcgacttacacggtgtggagaaaagcgcgttcgcacacattgaagtaatcagcaccgacagccggatggtcgattttctgcgcaataaggcacaggtgaagagtggcccgaaatacgtttatatccacccggaaagcttcctttatagccgttccggcgatactttcgcccagaccaaaggacaggtgaagaaagatattcacaaaattatgccgcaggacaaatgccatccgttcaaagacagcaaccgcaagcgctggtttgatatcggggacggggcctgggtaagcgaagacgatgtcgatgcggatatcggccagtacgacctggataaacttggctttaaagcacttgaagagccgtccacatccgatatgacgaaatccctgcgtgaaggatggatcaaggacgggttcaccagaattgcggagtgggtacgccctgaacgcggtatccgggaaaaacaggtctctgactactacaaagccctgctgcaaaaaatggacagtgacaacagtggtgacctttccggtgcagaactgcgtctcgcggtgaattacgcggagctggatgtcagggatatcgcggcgcggatggtggtcagacacgacagcgaatggttcggcggcagcagccaccatcgctggagaacatttttaaagcagatggatccgctgtgcatcagctatgtcaaaaagtggtttgatgacatggaatggatgagtcaggtggagggattcagcagcggtgcgcctgtctggcacatgcacccaattgtttttctaaatgcaatatctcaggtagagaataaagagatcatattcccattcaaagtgaaacctaaaaatgacattgatggggtttggaaacgatattattgggccgcatctttatcagattccaatgcgtcccaggctatttttgggcgtaatagatctggtgggggaagaaagcatgcagccagagatttgtactccgaacccttaactgaaattgttgcggtaagtgatggtatagtacgaaatatttctcactactactatggtacatggcagattaccatagagcacacaacttctgatgggcgccatttttatatcagatatggcgaggttgaccatgcaagtattatggttagtaatggtcagcatgtaaaacaaggggctattttagcaaagacgggattgatgattaacccagcgacgggtcagcatcccagtattatcaccggacaaacagtttacatgcttcattttgaatactatcctgggaatggtagcacccctccaccaaacaatactccaacgttaccatttaaacgccggagtgatttgcgcgacccattggatatattacgtgaaggataccggaacacgttcgatgatggacagccttcgtctgacaatcggttgccaattagctcgttaaatttatcagatcaaggaaaatccttcatcaaaggctgggagagtttcagttctactgcgtataatgattctgaaggtttttgcactataggttatggacatttaatagccagggacaagtgtgaaaatttaaacttacctgatgagtttaaaaatggaattacaactgcaaaggcagataagttatttgaagctagagttcctttatatgttggtgagttgaagcgaactgttaactgtaatatgtatcagtatgagtttgatgctttgattagtctgttgtttaatatggggagcatgagtaaggccccaatgcttacatcaaagctcaaccaggctgattatgcaggagccgccaatgagtttttagatataactaatggtggcgtttccggacttgttaatcgtcgacagaaagagcgttcgttgtttttaactggagtttatgactcttctcactga

SEQ ID NO: 148707 - DNA, 2355 bp, Enterobacter cloacae
atgatggagagcattgccagtctggcacagaagaaaattgatgaagttctggggttgtcccgctatcgcatggacgtccatgaatgcccgcattttctcgatgtcctgcgctatcgtgccactgaaaccctgagccagccgtggcgttacgatgtcaccgtcacctgtgctgcgaatattgccggcagtgagctgatgctcaaacctgcctcttttacctttcagacgccgctttatgacggtacgcctgccgtacctgtgcgtacggtgtatggcgtggtggatgattttcgccgtatctctgtttcgggggatgaaattacctatgccctgagactggtgccgcgtattgcgctcatgcagcataccgaacgctgtgcggtgtatctgaaccagtctgtgccggaggtggtggagcaaatcctgcgttcccatgggctggaaggggcggattttgaattccgtctgtcgcaggcctacccggtccgcgagctcattacccagtggcgtgaaacggacctggcctttgttcagcgtctgctggctgaagtcggcattttctggcgctttgagatggacggccgcattgaacaggatgtggtaattttccaggacagccagatgcagtatcagtttggcgtgaagctgcctgttatcccaccgtcacgcacgagtgataacggccaggagagcgtctgggatattcggccgacagaccgcgtggtcacaggtggtgtggctagccgcgactataactaccgtgatgcactgaccccgcaggacagttcggtgacggttcgtcaggagagtggggccaccatcggtgaggtgtatcactatgctgagccgttcctgagtcagggggatgagcacactccggagagcggcgcctggtatgcccgcctgcgccatgagcgctacctcaatgctcagcaaacagtcacggggcgagcaagcaggccggttctggctccgggcgaagtgctggagccacagggcagtgggctgcctgacttgctgaagaacggcatcgtcatcaccggtattcacacctcaggtgcacgcgacaaaggctttcagctgcgctttacgggcattccttacagagaaacggtctgttttcgtccggctctgttgaaccgcccggtggtggccggctccctgcctgcccgggtggagagcgatgagaagcatgacacctacgcgcatctggacaaccaggggcgatatcgcgtccggcttgattttgaccgtaacagcaccgagcagggctatgcctacctctggctgcgcatggcaaaaccgtacgccggggataccttcggcttccactccccgttgcttgatggcactgaagtctcggtgatgttcgacgggggtgaccctgaccgcccgtacattgcccacgctcagcacgattcagaacacccggaccacgtaacccgtgataatcacacgcgcaacatctggcgtacggccggagacaacaaattccgtctggaagataagcgtcaggaagagcatttcaagctggcgacgccgtttggcaagacgcaactcaacggcggtcatgttgtagatagtgagcgtgagccccgcggaaccggttttgaactgcgcaccgatgaatacggggcgctgcgtgccggacgggggatgttcctgactgctgatgcacaaccggcggcacagggcaaaatgctggatatggcgccggctattgaacgcctgaatcagtcagcggccgaaatgaagcggctcaatctgcttgcgcagcaggctcaggcactcacctgtgacctcgaaagccagaacagactgctggaaaaccgcctgagagaccttcagtccgcggtactgctgggcagtgcaccgcagggcgtggcgttcacgtcgggtgagcatcttcagatgaccagcaagcagaacaccatcctgagtgcaggtcagcatctggatatgggagcaatgaagaatatcacgctggctgccagtgagtctgtcgggctgtttgctcataaatccggggcaaagctgattgctaatcagggggatgttgaggtccgcgcagaggcgagctctatggagatgacatcagagctgatgtttaccatcagcagtaacaaggatgagctgctcatcagtgcccctaaactgcgactcaacggtggcggctccagtatcacgctggacaacggcggtattgtggaagaaaccccgggggattacctggtcaagtctgcacattaccgctcaccgatggccggcggcagcatggacatcacaccgcctaagttcagccagacaaatgccagcgtggagccacccaaaacacgtaatatcccttcacgttaa

SEQ ID NO: 148708 - DNA, 1683 bp, Enterobacter cloacae
atgcgtggaaaaacagtcgtccgggctgctctgccggtagtgctctgccttgccgccgtgttgtggctggtatggggattcctgacctggccggttgccgggaaagccatcctgactctggtggtcttgctggttgcgggcatgcttgcccgtcgccgttaccgtcaacagcaaccagtacaactggctgatgaggccggaattttcccgcccgacagtcataccggaccggtggtgctggtctgcggggatgtgggtgatagcatgttcgcagcagggcagacacgtggcacggcgcaggggtggtacctccggataactgaactgtccggactcacgccttttgctgagcgtctgctggcccgtacgccgacgatggcaggccagctcgccgtaatgtaccgctgtttgccggaccagcatgaagatgaggcgctgttgcgtgcctatttgaaagcattgcgcctgcagatgaagcagttgcgggacctgaccggctttagcgtgccggtggtcctgagtgccgaattcagcggtccggaaacgccctggatagtggtacagggaaatacgaccctggtatgtcctgaagacgaacctgctgtcaccctcagcgaatggcagcagtccccgcagacggctctaattcagccatacctgtcccaggcgacatcgctgcttcacgccgtgatgctggatgaactgggcaaagcggacaggttgtgtccggccttacgaccatttgctgtcaccctgcgtctcgggtcggtatccacctcgacagccgcgctgtggccacagttattgttccgccagacccgcattgcccctgccggccatgtcactgcctgtgaaccgcgctggcattttgccgatgcggtacttcctctgctggctccttataccaccccgttgcagggtggcaaaaccgggcgttgggtggtgatgattctgctgttatgcgccctgggtgccattgccctgtccgtgcggcataaccagtcgcttatccgcacggtcagcgccgaccttcagcgctggcaggctatcccgatgaaccactactccccgaaagcgcaggccctgcacgccctgcagcaggatgcattgttgctggagcgctggcagcgtcagggagagccatatcgctacgggctcgggctgtatcagggcaatcgtctgtggctggccgtgcagcaggccattgatacgtatgtgcctccgccgccaccgccaaaaccgaagctaaagccggtaccgaaaattgtccgtctcgacagtatgtcgctgtttgactccggcaaagcggtgctgaaaaccggctcgaccaaaatgctcgtcaattctctggtcggcattaaggccaaaccgggctggctgattgtggtcgcgggtcatacagacaatacaggtaacgcacagctgaaccagacgctgtcacagaaacgtgccgaggcggtgcgtgactggatgcgtgacaccggtgacgtgccggaaagctgttttgcggtgcagggctatggcgcaagccgtccgatcgcaaccaatgacaccccggagggccgtgcgctcaaccgccgtgtcgaaatcagtctggtaccgcaggcgaacgcctgtcagataccgggccacacccaggcgtcatcgcaggatgatggcgcatcacaacacaatggagagtaa

SEQ ID NO: 148709 - DNA, 729 bp, Enterobacter cloacae
atgaataaagttatcgacattgatgccctgatggcagagacctggctaaccgtggcgcaattgcgtcacggtggacaggtgacggatggccctgcgctgtatgcggcctgcaaagcgcaggtggaaagcgtacgcgaggcgctggagcgcgccgggctgggtgctgaaagtattgatcacatcacttatgcccagtgcgccctgctggatgaaaccgttatgaatcgtaaacccgtggctcagcacacggaaaatgcgcaagcggcagtatccggcgacagtgcccttggtgcgttgaatatgccccttgatgccgggcaacgagcttggcgttctgcgccactgcaggcggtttacttcggctccctgagagcgggcggagccttgtacgatcgtatcgcggaggtgctgcgtcagcccgcgccggagcctgcggtgctaacttgctaccagcgggtgctggcgctggggtttcaggggcaatacagcctctccggggtgggacagtctcagcgcgatgaagtgatcgctgccctgaatgagcgagtgccaccgctggaaagcgggacatcactggtggttcagaagaccggtcgccgtcgttataacctgctgcgatccgtctggttctggattgtgctggcggtgatcctgaccggtgtggtgtggctgggtggtcatttgtggttgcaggatctgctgcgccagcaactgccggagcagccctga

SEQ ID NO: 148710 - DNA, 1350 bp, Enterobacter cloacae
atgaaaattcatcgtccgttatggaatgaaggggcacttctggcccctcagcagttccagcagcagtctgaatgggatgcattttcccgggctggtattgccgcccgcggaaatgctttcccctggggtgttggtcgggttgagcttgatgacgcgatgctggcctccggccgcgtgcaggcgcagtcacttcgtctctggttaccggatgacacactggttgatacccgattcagtgacctgcctccggagccacgtgaaatcgaggcaccggcttctgccggcaatgccccggtgacagtgtatgtggcgttaccggtgatgcaggccgggatcgtgaatgtgcagacagacacgctacctgcagagcgcccgctgcgctatcgggaagcctgggagacaatcgccgaccgcttcggtcaggaagaagagtcgatggcggtggcccggtttaatctggcattccgtttcggacatgaagacaacggtgcctgggatacctgcgccattgcccgtctgttacaggacgggcaggggggctggcgtcaggatcctgactttatcccgccgatggcgctcttctcggcaagtcgtaatctgtgtgaacgtcttgcgctgctgaatcgccagttgcgctcccgccgtcagcgtctgatgtccatgcgtcgtgaaagtaatgaccggatggccgattttgcggtcgctgacgtgtcgttgttctggttgctgaatgccctgaactcgcatgcacgggtgctctctgagtatgagcgcttccctgacagacatcctgagcaggtctgggccgagctggcgcgtcttgccggcagtatgctgaccttctcgcttgagcacgatctggatgccattccgggttatgaccacagcgcgccggaaaagaccttcccgccgttgtttgatctcatcagtgagctgctggaagccagcctgccgtcacgagtggtcgcggtcaggatggatcgtctggatccggagacctggaaagcggtactgcatgatattcgtctgcgcgatgaagcggatttttacctttccgtacgagccagtcagccggcatggcagattgccgaacggttcgctgagatgtgtattgccggtgccccggcgaatgtcggtgaagtatccggcgtggccgtcgagggaattggcctcattgccctgagccgtgtccctgctgcactgccggtgcgtctggagaaccagtactttgtactggacatggagagtgatgcggcccgcgaaatgctggatcagggggggtgcgtattctacgttccatccctgctcggcgagctggagcttgaactgtttgcggtgctgcgctcatga

SEQ ID NO: 148711 - DNA, 555 bp, Enterobacter cloacae
atgtcatctgtaatcgcttacgtccgtgtatcaacttctgaccagactattgagaatcagaagcagcagattaaagacgctggctatcaggttggtaagtggttttctgatgaggctgtttccggtggcattaaggcaacagagcgtaaagggttcggtgacctgctgaattatgtccgtgaaggtgacacgctaattgttatcgctattgaccgcttaggccgtaacaccattgatgttctctcaacagttgaacttctacaggccaaaggggtgaaagttatcagtctccgtgaaggattcgacctgtctacaccagttggtaaggctatgctcactatgatggctggattggcttctttagagaaggatttgatagcagagcgcagaacagcagggattaaacgtgctcagtctgaaggggttcactgtggaagaccgattaaagcaacctctgaacaggttcaggaacttctttcacaggggatgtcaccaaagcaggtgcaggatgagttacagattagtaaggcgactttctatcgactgaacaagtag

SEQ ID NO: 148712 - DNA, 276 bp, Enterobacter cloacae; identical to SEQ ID NO: 110438

SEQ ID NO: 148713 - DNA, 924 bp, Enterobacter cloacae; identical to SEQ ID NO: 110439

SEQ ID NO: 148714 - DNA, 324 bp, Enterobacter cloacae
atggctaacaaaaaacatagtgtgtttaaagccctttcaatgggctttgaaaaagttcttgatgagcgtggttatgataatggcgcttattacgtcaaggatggcaagatttggatttttgatattgtagctttaaagcaaaaattaggtgtctcttcaaatgaagaattagaagcacaagattatgatgttgagacatacctttcactggaaaaagagccgaatgaattagaagcactatatgaagatatggctgttgaagatggtgaagcggtttatcttgaaggtggaatgtatctttatcccgatggctcaattcgctaa

SEQ ID NO: 148715 - DNA, 1557 bp, Enterobacter cloacae
atgccaaaagcaatctcatacatacgattttctacaaagattcaatcagttggtgattctactaagcgtcaaagcaagtacattaacgattggttaaaacgaaatcctgattactatttagacgaatcattacgctttcaggatttaggcataagcggcttctcaggagctaatgctaagtctggtgcatttggagaatttctagccgctgtggaatctggctacattgaagcgggttcagtgttactcgtagagtctctggacagggtttcacgacaggacatcgacacagcaggagagcagcttagaaagattctcaggtctggcgttgaagtggtgacacttgtcgataacgagtggtacacgaaagaaagtctgaaagattcactgtccatgattaaagcgatgctggtgatggaaagagcacatgaagaatcagcgatgaaatctacccgcttgcgctctatgtgggctgctaaaagggaaagggctgcaaacggtgaaataatgtcaaagcgttgtgcagcatggttaaaggtctctgaagaccgttcacactttgaattcatccctgagaatgtgaaagctgttcaacgtgtctttcagctacggttagagggcttgtctcacgtcaagatagccaaacaaatgaatgatgaaggtttttcaaccctgaaccagttcaaatccgttacaggtggctggtctcaatcgtcggtcacagagttactttcaaaccgttcagtgattggtttcaaagtcccttctaaatcaatggctgtaaagggtgtgtctgagattcctaactattacccctcaataatcaccgatgagcaattctacgctgtacagcagcttaaacagggctcggggcgcaaaccctcatctgacctacctctgctaacaaatctcttcaaaggggttctcaggtgctctgagtgtgggtttatcatggttgttgcgggtgtctctgctaagaggtctggtatttacaaatgctcaatgaagagtgaagggcgctgtaatagtgttgggttcagcagattgcagactgaccgcgcattggttcaggggctgctttacaacactaaccgtctttcactcaatcgtgataacgggtctgctattggttctcttcagagtgacttagaaaagctccacaaacagcgtgagaggcttattaagctggctatgctggcagatgataccgaatctatggctaaggatttgaaagccctgaatagtcaaattaaggacgctgaaaaggctgtctcagaggttcaccaacgagagcaatcaagccagcttgagacaatcagccatttggatttgactgtgaagaaagaccggatagaggcgcaaattatcattaagcggatagtgaaagaaatccgacttaacacggctagaaagaaatgtgatgtcttcttacataacggcttgaggctgctgaatttcccattggatagggtggttgacggtgaaatcttcttagaagtcttgccagtgttagaggctgatgagttcgattttgacacttacaggatgattgagtaa

SEQ ID NO: 148716 - DNA, 1602 bp, Enterobacter cloacae
atgttaaatcgtattcgtatctcgaccacactgtttttgattctgatcctttgcggtgtgttgcaggttggcagtaacgggttgtctttttgggcgtttcgcgatggctatcagaatttgcaggacgttgaggcgagtaatcagcagcgctccgcactggcacaaacgcgtgccgtgctgttgcaggcaagcactgcgctgaacaaggcaggaaccttaaccgcgctcagctatccgccggatgacattaaagcgctgatggcaacggcgcgcgacagcctgaagcaggcagacgcacagtttaaggccttcacggcgcaggcagccgacagtgagaaagagaaagcgctgaaggcagccatgaaaaagaactttgagcagtggttcagcgatctggaccaccaggcgacctggcttgagaacaaccagctttcggactttatgagcgcaccggttcaggcgtctcaggccgcgtttgacggcagctttaacgcgtggcagcaggatattaaccggtctgttcagcgtgcaggtgaagcgagccgtatcagctatcacatgtccggcgttatctttgccgtcgtcgtgatcctagcggggctgctgaccggcggggcgctgctctgggtgcgcagaatgattgtgcagccgctggcgatcgtcagcagccacttcgacagtattgcgaagggggacctggcgcgtccggtggcggtgttcggcaataacgaaatatcggcgatctttgccagcctgaaggcgatgcagggcgctctgcgggaaacggtatccgacgtgcgtcagggcagttatgccatgcacaccgggatctctgagattgcggcaggcaataacgatctctcgtcccgcaccgagcagcaggcggcctcgctggcgcagacggcggccagtatggagcagctgaccgcaacggttagccagaacgccgataacgcgcgtcaggcgtctgatctgtcaaaacaggcggcgatgacggcgaagaaaggcggcgaccaggcgtctcatgtcgccagcaccatgcaggagattgccaccagctcgcagaagattggcgacatcatcagcgtgatcgacggtattgcgttccagaccaacattctggcgctgaacgctgccgtggaagcggcgcgcgccggcgagcaggggcgtgggtttgcggtggtagccggggaagtgcgtaacctggcgagccgcagcgccaacgcggcgaaagagattaaggtgctgatcgaagagtcggtctcgcgtgttcagcagggctcaacccttgtggatacagcggcgcaaaccatgcacgagatcgtcacctccgtgacgcgggttaacgacatcatgggcgaaattgcctccgcgtcggatgaacagcgtcgcgggattgagcaggttgcccaggccgtcagccagatggatcgggtaacgcaacagaacgcctcgttagttgaggaagcggcagcggcaaccgatcagctggccagccaggcggatcgtctgaccggtctggtcgcggtatttaatgtgaaagagcacgttgaagcagtaacagaagtcgggcggtcgcaggccgtgccagttgtatcctga

SEQ ID NO: 148717 - DNA, 339 bp, Enterobacter cloacae
atgaaaggtcatacgctgaatatttcttccgccgccattgaattaataaagaaacatcaagggctttcactggagaaatatcgtgatgaaaagggtttatgggttatcggctacggacatgcgatccgcgaaggggaacattttcgcggccttattacgcctcttcaggctgaatatttactttacgaagatattcagcgggttgagacgctgctgcaggaaaagggggttgggccattaacccagcagcagcatgacgctgtagtactgatgatattgagtttcggcgcgacgtccgcgctcccgaaagcggtgcttcaggccgtcgcccgggtatag

SEQ ID NO: 148718 - DNA, 624 bp, Enterobacter cloacae
atgtcaggtagaaaagtcattctcatggattccagcccactgctgcgtgcaggtatcaagggcttattaacagaacaagattatgaggttgtggcacaatttcctacaatcgaggaattgcacagcgcattacctgcgttaagcgcggacctgattatcatggaacatctgcaacaaagcgctgaggtattttcttacctggcgaaaataagaaaaacgcacccggatattcggattctcatcttgtcctcgtctttcagcgattttcacatccagctaagcaggcgagctggcgcggccggttacatcaataaaaatagctcgttagataaaataatcactaccatcaataacgtactctccggccagtattgctacggttctgagctttggcatcatcatgccagatatccgcgggatgcctcgttattattatctttgtctcatattgatatttgtattttgcgctacatttctgctggctatagcaaccagattattgcctcgatgctggacatgaataataaaaaggtgagcgcgtataagcagcgtatcatggcaaaatttaacattactcgtctggcggacctggtcgatctggcaaaacggaattatctgtactga

SEQ ID NO: 148719 - DNA, 4602 bp, Enterobacter cloacae
atgactctcaagccagtaaatattgcagtcgtagataaagatacgattgtcaaagctgacgttctgcgcagtgaaaaggttggcagtgctgtcaaaattaaggccatcccgaatgcaaaatatattcttgctgaaggggaaaatggtgtcgcgccagaaaacattacgctgaaacgcgtaggcaaagacctgttcgtcatgctggaaggcactgacgaggatcagccacagctgatcattgaagactatttcgataacccaggtgagctggtcggtaaaggcgaagacggtcaatggcatgagtacatcgccaccgatggcgacgacgaccacaaagccgcgttcctgctggacggtgaatcttccgcccaggcgctgggtgcgggcgcgattgcaggtctcgatggtctggccgttgcgggcaccgcattttctcctgctctgctggcgctgggtgcgttagccgggattggtgcgctggtaggcctgggcgccattattcgtcataaccgtgacgatggcggtgacaaaaaaggcaccgttgcacctgttgctacccctgaactgaccgacgtgcatgacgattacggcaccaaaaccggctcgatcccgcaaaacggcgtgactgatgacgccacgccgacatttagcggtacaggcaaagcgggcgatattgttgagttctgggaaaacaacgtcaagctcggcgaaacccgtgtcggcgctgacggcacctggacctggacgccggaaaccccgttggcgcacggcgaccatagcattgtgctgatcggtaaagacccggatggccgcaccagcgcgccgagcgattcttttgatttcaccgtcgatctggaagcccctgttaagccggctatcggtgaggtgatcgatgacgtcggtacagtggtgggtccaattcagaacggtggttccaccgatgatactcaaccgaccttccgcggtgaaaacgccaaaccgggcgataccgttgagcttatcgttgacggtcaggttgttggcactgcgattgtcggcggggacggacgctgggaagtgaccccagaaacaccgctgccggaaggcgagcacaccgggaatgtagtgatctctgacccgagcggtaacgccagcgtaccgtctgatgattttaaatttatcgtcgatctgcaggggccggacaaaccgattattggtgaggttgaggacgatgtgggcccggctgttggtccgattcacaatggtgataccaccgacgataccctgccggtattccgcggcgaaaaaggtacgcctggcgacaccgtaagtctggttattgacgataaagttgtcggcaccgcgattgttggcggggacggtcgttgggaggtgaccccagaaactccactggcagaaggcaagcacgaagcggtagtggtgatcaccgatcctcagggtaatgccagcgaaccgtccgatcctattggttttattgtcgacacgaccccgccgacaaaaccgacgattgacaccgttcatgacgacgccggtatgaaaacgggcgatctgacaaacggcgatattaccgatgataacaccccaaccttcaccggtaccgctgaagagaacagcctcgtgtacatcattgtgaacggtcaggaggtcgactctgtcaccgcaaacggcaatggaacctggacctggacaccgtctccggcactggctaacggtcactatgacgtgaaagttatcgctaaagatagcgcgggtctgcgttctgaaccgtccgatgcgttctcatttgatgtgatcaccggaggtattccgacggcgccagcaatcactgacgtgatcgatgatgtggatgcgcatgttggtaccgtgcaacagggcgggctcaccaatgacgatcgtcccacaatcacgggtacgggtcaggacggaaccactatttatctgtacgacggtactaacccaaatcctgtcggtagcgccgttgtaacgggtggacactggacaattgattttgatacggcactggcacagggcgaacaccgcttccgtgcggtagcggaaaacgccgcgggcaaccgcagcccggaaacgggtgaatgggtcattatcgtcgattcggtgaagccactggcggccacagatgttgaactgtgggacgacttcggcacgccgggagcgatcgcggataatggcaccacagacgataacacgccgacttaccgcggtagaggtgaagagaacggcaccgcgattatcgatctgggtgacggcaccaccgtacgcgtaccggttgatgacaaaggtaactggcactacaccccagcccctgcgctggcagacggtgattacacctggacggtatccattgaagataaagccggcaacgtggggcctgcatccccaccgatccactttattgtggataccagcaagaacggcatctccatcagccacgttgtggatgatgaaggcgcgttaatgggcaatctggccagcggcagcaataccgatgacacgacacctaccgttgtgggccgcgctacgcctggtgccgtggtgaaagtctatgttgacggtaccttgtctggcagcgtggtggcggatgcgcgtactggtgagtggcaatacaccgttaacccggctctgaccgtagataaaacctatcagataaccgccagcgaggacactggcgctggtgaagggccacaaacgtcaccgtttgagttgacgctggacaccgtggtaccgaccggctcgctggaccgtgtcgcggatgacgtggggctgattcagggggatttgaataacccggattccaccgatgacaccaccccgacgctgtacggtacaggccgcgcaggcgacaccgtcattatttatgacggcacaacgccaatcggttcggtagtggttggcgcgggtaacagctggagctacaccttacctccgcaggttggcggtgcgaatctggaactgaaagcggtattccagagcccgacaggtgttaaaagtgcgccaaccgcaccatggaacctgacgattgataccgaagcgccactggccaaagcggtcgcggacagcctgagcaatgacaccggggtgagtggtacggactttgtcaccaataacagccacgttggaagcctcattagcgggaatctgtcggaagcgctggaaacggggggcaaagtgctggtttccgtcgatggcggcaaaacctggcaggaagcgatggtcgatggcctgaaatgggcggtggtggacccgcagggccacagtgctgactggaccattctgacccgcgttgttgaccacgtaggcaattacaccgagtcctcgcagaaggtggtggtcgatcagatcgcgccagatgagccgactgatgtagtgcgtaatggtaacgacgtgacggtaacgctgccaggcagcgggattgtcgagggcgacaccgtgctggtgaagaacggcgacgttaccgtgacccatacgctaactgctgccgacattgctaacggtaacgtaaccctgaccatgcctgcgggcggctacaccgatattccggtgggcgcggcgattgttgacgcggcgggtaacagctccagctaccgcaccagcgcgttcaccagtaccaacagctttgaagacgacacggagttcgcggacattaacgcgggggcgtgggtacacgggatgcgtttctcccacacaccagataccggcacggcggattatgagttcaacaaagaggtcattggcacgggcagcaccaacagcctgtatctgtacagcacgtccccagataccggaatggcagccagcatgtttgttgacttccagtatggcgccagaacggtcgatttcgttttcaacccgcgctttgccggcccctcgacggtggtgacgttctacgacgtcaacggcgatgtgattggttctcagccagtgaatgcgttaatcagcaaccgtaacgtcgcggtgtcgtttaccagcccggacgatacgccggtttaccggatggagatccatcaccaggaactgacgtccagctccggatttggtttcagcatcgataacctggtggtgagcggaacggcgaaaaccgtcacgccgggtgagttcctggcggataaccagggcgatatctggtatggcgacgcggcagacaacctgtatcaggttgcggatgtggccagcctgaccggtgcggtgattcagggtggagaaggcaccgacacgctgaagctgctgggggcggatcagcacctcgacctgagcgcgctgacacacaccattcagtcagtggaggtattcgacattacgggaacaggcaacaacaccctgacgctgagtgcgggggatgtgctggaaaacgccacgcagaacctgttccacgacaacgacttcaaccaaatgatggtgaagggcgacgcgggcgacacggtgaatctgagcgacctgctgccgaacggtatggacccgggtaactggaccgatggcgggacggtgaatgttgggggagtggagtatcagtcttatcagatggatagcctgaataccgagatcctcgttcagatgggagtcacggtcacgctacagaaccattaa

SEQ ID NO: 148720 - DNA, 351 bp, Enterobacter cloacae
atgaataacacgttaactgcccacggcgaaaacactgccgatgcccataaagagatggcgactgacgatcaatttcctgcactggtcgaaatcgcgctcggcgatattttcattcagggggaagagcgtctttttatcgacgacgttaatcagcagctactgataaaaggccctcccgggcagcgggtcaatctgtccgatctgcttcctgcagaatcagagccaggagaatggatgaaagccagaggctccgttaccgtgaacggcgtgcaatatgaggtttatcaccattcgggtattgagacggagctactggtccagacaggactagacgttgcgcctcagacgtaa

SEQ ID NO: 148721 - DNA, 783 bp, Enterobacter cloacae
atgaacgagcccccctgcgcacaaaaacagctacagagcgcctgtgcgctcatcgaaagcgttctcggaagcgagctgatggcaattcacttatacggttcggcgatggacggtggcctgaagccgctgagcgatatcgacctgctggtcacggtacgttcgccgctgcgggatgaacaacgccataccttgatgcagaagctgctggcgatttcggcctggcccgacacgtcggagatttaccgggcgctggaagtaacggtcgtagtctggtcgcagattgtgccatggcactttccgcccgtgcgggaactgcagtttggagaatggctacgggatgatattacaaacgggaaatacgaaccggctcagcccgaccccgatctggcgattttactgaccaaagcgcgtcagaacagtctccctctgcggggaaaagcggcctgcgagttattcgaggctgtgccagaaaacgatctgctggagacctttcgtcagactctggcgctgtggagcagggctgacgatcttaagggtgatgaaagacacatcctcctgacgctggcgcgtatcggttatagcgttgagacgggtaagatcgcggctaaagacgaggccgctgcctggctgcggccgcaattgcccgaagctcatgcgaaactgctggaggaggcgcgtgcagagtatctcgggttggtcaccgtggactgggcagaaaaaatgccgcaggttgcggcatttgtccgtgatgtcaaaaaagcgatacaggaaaaaatggcgtag

SEQ ID NO: 148722 - DNA, 1029 bp, Enterobacter cloacae
atgaaaaaattagcgttactcgtgtgcctggcagcaggcggattgatgggatcgcctgcctttgctgctattccgggcagttgctggccgattggcggagcaaccgtttttccgattagcaaaaatctcactgccgaacatataccagggtctgtacaggagggatgggataataatcaaaacttttcgggcatatgcttctgtaaaaactcgtccgataaagaaagtgtcttctttaaatttaccagtgacgtgctgaaatcgggaagtggtaaacgtaatggcgagtttatttactatccattcgatgaagagaaaggtattaatatcggctttaggatagacattggtggtactatccaaaatcaagcgactgttgatttgcaaaatctttcaggggtagataatcaaaacataacgaatctcgactgtgacgatgttaatgaagaacatccgtttaaaacgggttctagcgggacggtttcagtagagttaaccaagaagatcacaggccatcatgtataccctgcacaagagctacttacagtttacgcccgaaaaaaatcaggtgatttcgatcccactaaaccatttgtgaaactcagctttgaaatgagtattactatcccgccaaattgtacgattaatggcggagaacccattaacatcccgtttggtgatattccagcaaatgaatttacgcctgaagccaacagtaagcaaaaaagcattccgctcaacgtaacctgtgatgacgaagcggatgtcagcaaggcgaatattaaatttcgcacctccgattttaatgacgctggttttatcagaacccgtaataaagaaggaggggatcgcaacgatttagggataaaacttgaacacaacggtaataaaattgatggcagcagttcggccattccgacacaggagggtaatgtcactattgtagctacgcccgtgcaacaaggagaaaaatctccagaaccggggaaatttgaagccacatcaacgctggatttcgagttcaaataa

SEQ ID NO: 148723 - DNA, 684 bp, Enterobacter cloacae
atgttaaggaaacgctacctgacgctgctggccttgctcctgggctcttgtttgtcacacgccagtgtgaccttatcgaatacgcgagtggtatataatgccgacaagaaagagagcaatattaatgtcagaaacaatactgccagccctttcctggtacaaagctgggtacagggcaatgatacacagggtaccaaagccccgtttattgtaacgccaccgctatttcgtcttgatggaggtaaagccaacgcactacgtattatctataacggcgccgcgttgccgcaggatcgtgagtcgcttttctggctcaacgtaaaatcgatcccgtcttcttcaagagaggatgtcaacaaactccagatagcggtaaatacccgaatcaaattattttaccgcccggcgaatttagcagatgaaacgagggacattggcaagaatgtccagtggtctgttaaaaataatgaactcatcgtacgcaataactcgtcttattacatttcatttgcggaggtgaagatcaataacaaaaaatggtcagagattgatatgctggcacctaaaagcagtaaaaaaatcactgtgaataacgcgcaactaaaaaacaacgcaaccgtacaatggaaatatatcaatgattatggcggcaacagccagttaatcacacaaaaaatagaataa

SEQ ID NO: 148724 - DNA, 558 bp, Enterobacter cloacae
atgaataaatccgtcattgccatgggattattattggctgccgctgccagtccttccagccatgcggcagatcctggtaagggtgcaggacaaatcaacttcacgggcaccattaccgcgagcacctgtgatgtcgatattaatggtcagggaggtaacccaacgattcaaatgggtaccatctcgtcttcggcgtttaaagaaaaaggtgacgttgcgggtattcaccgcatccagatagatctgtccaactgcgataccgccgttcttaaagaagccggagcacgatttggcggtgcttatgattctaatgataacaatctgctcgcgcttaaaaccggtgccgacgccgcaacgggtttgggtattgaattcctgaacgaagatggaacacctatgagactgggtgaaaacccaaataagtttgttcctattaccggtgatggcaccacggggacagccaccctgctgtattcagcccgttataaatcaaccattgatactgtgaccgccggtaaagcagatgcggttgcggattacaccattatctataaataa

SEQ ID NO: 148725 - DNA, 13173 bp, Enterobacter cloacae
atggatacccgtcaccctcccgttcgtttctcgcagcgtctgatcagctggattgtctgcggcctgatgatctggcaaccgatggctcctgccgtcgcggcggcgctcacgccgaccgggcagaccacggtggatcgggcggggaacggggttccggtcatcaatatcgccacgccgaacggggcgggtatttcgcataaccagttccaggattacaacgtcggcaaagaggggcttatcctcaataacggcacggaccgtttaacccagacccaactgggcgggcttatccagaacaaccccaacctgcaggccgggcgggaagcgaaaggcatcatcaacgaagtcacgggagccagccgctcgcaattgcagggctatacggaagtcgccggcaaggcggcaaacgtcatggtggctaacccgtacggtatcacctgtaacggatgcgggtttatcaacacccccaatgccacgctgaccacaggtaaaccgcagtttgacgctaatggtaacctgctggcgctggacgtaacgaaaggggccatcacggttgaaggccaggggctggacgccagcaggagcgacgcgctgtcgattattgcgcgcgcaacggaagtgaacgccgcgattcacgcgaacgacctgaaggtgacggcgggggcgaaccgcgttggcgcagatggaagcgttaagccgattgcgggtgagggggccgcacccatcgtggctgtggataccggcgcgctcggcgggatgtatgccaaccgtatccgcctggtctccagcgaggcgggcgtgggggtgaacctcggcaatctcaccgcgcgccagggggatattcagcttgatgcgggcggcaaactgacggtctcgaacagccttgccagcggatcgatcgccgccagcggcgcgggggtggccctcaacggcagccatcaggccggtggcgcgctgaacttgaccagctcgcaggatgtggagctcaataacagcacgctcgccagcagcggcgatatgcgcctttccagtgagggaaaagtgcagatgacgggcggcgggacgaacagcgcgggcgcgctggcggtcgtgggcaggcaggggattgcgctttcggatgcgacgctgacaggccagaccgacaccatgctgtctaccgacggcagcctgacgcagcgcgccggcagcatcaccagtaaaggcgcgctcagcgtggcggccggaaaggatatcgcgctgaccagtacccgcgtcggcagcgatacccgcaccacgctgaccggcggcacgctgtcagccacgggcagtgcgatctcggcaggggagaaccttgcgctgagcgtcggacagctggtgctggacggccagagccgggccgacgcctcgggcgatatccgcctgacgggcagcaccgtcagtaaccagggacaggtgaatgcggggcgcgacattgtgctctccggcgacagggtgtcaaacggcggccagctggcggcgaaaggccatctggatgtgaatgccggagatctgacgaacggcggtgcggttcagggtagcgacatcactttacgggggcagacggttaccaatagcggtactttgcagagcgcgggaacgctggcgttgaacgccggtaccctggagcagcagggcacgctgagcgcgaaaggggatgcgaacgtcacggcgcggcaaaccctgcgtaacggcggcagcctgctggctgacggcgcgatgaacgtgacagcaggcacacttgaacagaatggcaccctgtccggcacgacggcgctgacggcgcaggccgataccctgaccagcggtcaggcatcccgtaccaccagccagggcaacgtccagcttaccgccaaccgtagcgccaacctgaacgggcagacggacgcggcgggggcattaaccgtttccaccagcgatctgatcaccgatcgggatgcccgcctgcaaagcgggcaggcgcttacccttcaggcgcagaatgcgacgttgaacggcacccaggcggcaaaaggagcgctgttggcgaccgcaggcacgctggcgcatgccgggaaatccaccggtaacaccctgaattttaacgcgaccaacgacctgaccagcagcggggaacttaccgccggtacgatcggcctcagcggacagaacatcctcctgtccggcgtcgcaaaagcggaccgcatgaccctgacggcaggcgaccgcatcaccacccgcggttcgctggtggccgataccctgtcgctggacggtgcgtcggtagagaacggcgggctgctgcagggaaccaccctgctcaatctgaagaccggatcgctcgtgaacctgagtgggggatcggtctacagcgcgcaggatttaacgctgaacatcccggtgctggctaacagcggtcttatcaccaccgacggcacgctgcgcgtcaaaggcgacacgctgacaaaccagggtgaaatcaacggcctcagtctgagcagcgaatatctcaacctgagcaacagcggacgcctgctggcggacgagcggatcacgctgaacggcaccacgctggttaacacgggcaatattgcggccagcgacctgcacgtgacggcgaacagcctgcaaaaccagggcaccgttcagggggaagataccctgacgctcggcgtggcagacatcagtaaccgtggcgcgctgcgcagcagcggaacgctgaagctcaacggcgacacgcttgctaacagcggcgaactcagcgccaccgcgctgctgttgaacctgacccgtcaggccagcaacgatgccgacgggcgggtgattgcccgggacggcctgaccctgactaccgccagcctgacgaacggcgggctgatggcaggtaccgacgcacagttcaacagcgcggcagtcactaacggcggcacgttgcagggcacccattccctgacggcgacgggggcgcagctcagcaaccagcagtcgggcatgctgctctccggtggcgcgctcgaactgcaccacaccaccttaaacaacgccgggcttttgcagggcaaaacgctaaacctggccaccggcgagtggatcaacaccggtaacgcgctgggggaagcgggcgtgacggcggaggtgaccggcgcgctgaccaacagtggcaaggttctcagccagcaggcgctggacgtgcaggccggcagcaccgataaccggggccagctgctggcgaaagtgctgaccctgcgcggcgatctgcagaacagcggcctgcttcagggcagcagtacgctggtctggtccggcgatactttcgcgaaccaggcccaggggcaggtgacgggtggcgagaccctgaccctgagcggaaaaaccctcagcaacgcgggcagccttcaggggcgcagcgcgacgcttggcgcagagagcctgagcaaccagggcagcgttcaggcgctggacgccctgacgctttccgccaccggcaggctggacaacaaaggggctctgctcagccagaacctgtttacgctgacggcggcgcagctgtttaacgacggccagctggccgggaaagcgctgacggcgaatgccgcgcagctgaccaacaccggcattctgcagggtaacgacgcgctggcgctgaccacccgctcgctgagtaacaggaataccggacagctgatgagcggcagcaacctggatttacacctcgacacgcttgataacgccggtctgctgctggtggacggcgggttcaccctccggggaagtgacctgacgaaccagggcgatattcaggcgcagagtctggatcttggcctgagcaacaccctgacaaatacggggaacctcgttgccactgaaaatgccatccttaacgcgacgacgctgaccagcagcggcacggtggcgggcaaaacgctgaccgcaggcgcagcggaactgcgcaacagcggccttatgcagggcagcaacgccgttaacgccaccgccgatcgctttatcaacgagctgaacggcaaatggctctccggcggcggcttcacgctgaagggcggacagctgacgaacgccggtacgctgcagggcgcgacgctgggcatgacgggcagcatcctaaccaacagcggcacggtgaacgggctgacgggactcagcggcacgctcagcggggcgttaacaaataccgggctgctgcagagcggcggcgcaaccaccttcaccgcggacaccctggcgaacccggggcgcatcatgggcggcacgctgtccctcaacgctcgcgatctcaacaacggcgggctgatgcagggaacgaacggcctggcgctcatcggcaccacgctgaccacgagcacgaattcgcgcacgctttccggcggcatgctgacgctggatgcaggcctgctgaccacccagggcacgctgcaggggaacggcgcagacgtccgcgccaccgactggtcgcacggcgggtcactgctcagccagggaacgctgacggcaaatgcaggcggcacgctgacctcaaacggctcgctgatgagccagggcggagcggatatcaccgcccggacgctggataaccgcgggcagcttctcagcgaggataacgtgacgctcggcggcagcacgctcaaaaacagcggcaccgtgcaggggaaaagcctcacgctgagtcagagcagcatcaacaaccagggcaccttaaccggcctgcagagcctgaccctgcaggggcagcagcggctgatggcgcgcatggcgatggccgcgccgcagcaggaactcattaacggcgcaggcggcaagctgcttactcagggcaccctgacgatgacgtccggcgcggtgaccaacgccggaagctggcaggcacaaaatatcctgctcaacgcccagtcgctcaccaacagcggcgcggtgcagagcgcagacgcgctgcagatgacgctggccgacacgctcactggcaccgcaggcagcaagattaccgcgctgggcagcgcgacgctgcaggctgccacgctggcgaaccaggggcaatgggcggcgaaaaacctgacgctgaaaagtggcacgctcagcaacagcggcgccatcagcggcgtgaacggcctgaccctcagccagaccggcgcggtgagccagcagtcatccggcaccctgctctccggcggggcgctgaacgtcacggcggccagtgtcaccagtgacgggaagattcaggggagcacgctcggcatcaccaccggggcgctcaccaacggcggacgtttgcagggcgataacggcgcgacgctggccctcagcggcacgctgaccaacaacggcgggggcgaaatcgtcagccgcgatggcctgacgctgaccacacccgcgttgtttaactacggcctgatccagggcggcggcgagacgcgcgtgaccgcctcctcgcaggcgcgtaatgacggcaggctgctttccggcgcgcgcctgacgctcggcacgccgcagttcaccggcaccggctggctgcaggccactgacctgatcctcaatgcggcgaacgccactaacggcggcacgtgggtggccgaccgggccaccctgaccggcaccacgcttgccagccagggcaccacccaggcgggacagctgacggttaactacggccatctgaacaacagcggcacgctgctcggcaacgcgcagctgaatattaatgccgaccaggtgacccagagcgcgggcggcaagctgctgagcggcggcaacctgtggctgcagagccgggggctggacctcaccggccagctggtttccctgggcgatttaacgctgcagctgacgaacgcgtttaccagccggaccgccgtggcggcaggccgaaccctgaccatcagcagcggcggcgacatcgataaccgcagcgtgctgcaggggcaggcggttaacctcagcgcgggcgggcagctcagcaacaacggacaaatcaccaccggcggcggtgccagtatgctctctggcagcaatgtggcgctgaacgccgcgggctcggtgcagggcgggggcgatatcaccgtggccagccggagcaatattaccgtcgacggcttcaccggcacgcgcggctcgctgactctcagcgcgccgggcgccatcgtcaacaccgcgctgctgtatgcggccaataatctggcgctgttggccgacagcatcaccaaccagcgcggcgacatcatggcggggaacaacctgtggatgcagcgggatgcggcggggaatgctaatagccaggtggtgaatacgtcggggaatattgagacgcagggtggaagtcttaatattaaaaccatcaacttacgaaatgagcgggaagggcttaaagcgtcaactgagagtcaggtacaaccagttgatgactggatgacaggtgagtcgacaatagatgtacctgttacggctctgccagatggaagttatggtttttattcgcgtgaagtcattactggtccgggtgctggtaactgtggagctaatagtgcatgtaatatccatcgctccacatactattatctggctccttttaaaaatacagtcaggcagcgtttttccggaagatacagcacaactgttattacagggggcgattctccagtagggcgtatcgcttcaggtagcgacctgaatattcaggcttccaggcttgataataatgccagcaatatattggcaaacggtgatattcacctgtcaggaaatcaattaaataaccagagctggcaggcaggtagtgagattgactacctgatttatgaatataaaccgttatctgcatctgttggttacgcaacaagtcagttaggcacggctggtagtaagaatataaaattcaagaatgatactattgagtacaatctggttgggcatgaaacagaattccaaccgggtgaactctaccgagccgtcatccaggcgggcggcaacgtcacagcaaacttcaccagcaatatcagcaacaccaataccaccgccaacgcgggcggcgtcagcaacgttatctccgcgccgtccctgaacaccctcagcaaccagaccatcggcagcggggtgcaaaaacaggggctgagcaataccggtaccgtggcggtaaactcgccgcagtggaacgatcagctccagggtgcgctgcagcagcttaacggcggcggggcgctggaaaatggcggtgcgtccggcacgtctctcagtaacattgccaccacgcagaaaggcaacgccaatctcggccagctgggcgccctggctaacgccggggccaccaccgccgatctcaaaaccgctcagggcggtgccgtcgggcattatcagggccagcgcgtcgataccagcgcctacccgctgccttcgggcaacaacggctattttgtcttcaacgacaatccgaaaagcccgtacctgatcaacattaacccgaaactgaacggcctcggacagctcgatcccgccctgtttgccgacctgaacgcgatgctaggggtcaaaccgtcgtccacggcgccgcaggagacgcggctggcgtttaccgacgagaagcagttcctcggctcgtcttatatgctgggtcgcctcaacctgaacccggattacgactaccgcttcctgggcgatgtggcgttcgatacccgctatgtctccaacgtggtgctcaaccagaccggcaaccgctacctgaacggcatcggctccgatctggatcaaatgcgctatctgatggacaacgccgcggcggcgcagcagtctctgggcctgcagtttggcgtctcgctgactgcggaccagattgccgcgctcgaccacagccttctgtggtgggagaaagccaccgtcaacggtgaaacggtgatggtgccgaaactctacctgtcgccgaaggacgtcaccgtcaataacggcagcgtgatcgcgggcaacaacgtcacccttaagggcggcaatatcaccaacagcggcagctcgctgctggcgaataacagcctgacgctcgacagccagaacagcatcagcaacctcaacagcggcctgatgaaagcgggcggcgacctgaacctgagcgccatcggcgacatcaataacatcagctccaccatcagcggtaaaacggtcgcgctggagagcctggacggcagcatcaacaacctgacccaggttgagcagattgatatcaatgccaaagggaaatacagcaacatcagcctgaaagacacgcttctgggcaacacggcgtccattaccgcgcagaatggcctgtcgcttgaggcggggaaaaacatcaccgtgaccggggcgaacctggcctccggcggcgacatgttgctgaacgcgtggggcgatattgccgtcaacgcgaatcagatcaacgacgcatacagctccagccgggagaaaaccagccgctcgtccgtcacgtatcagggcagcaacgtcaccgcgggcggcaacctgctggtgaatgccgggcacgaccttgacgtgaccgccagcgacctgaaggcgggcggcagcgcggggctgagcgcgggcaacgatctcaacctgaacgcggcacagaccagcgaaagcagccagaaagggaaaagcgaatcccacagcaccgggatcgaccgcaccacgatttccgcaggcgataacctggtgctgaaggccgggcaggatatcaacgctcaggccgccgcgctggcggcggagaaaagcgtcgggctgcaggcggggcgcgacgtgaatctggctgcggaagagaccacgcagggcgacagctacaggtcaggcaagaaaaccgttattaacgagtcggtgcgtcagctgggaactgacatcacggcgggtgggaatgcgacggttgtcgccggacgggatgtgaccgcgcaggcagcggatatctatgccgcaggcaatacggctgtggccgccgggcgggatatcacccttaccacggcgaccgaaagtgactatgcataccgggaagagaaaaagacgtccggcgggttcctgcgtaaaaaaacgactcacaccatccatgaagaaacgcacacacgtgagaaaggtacgcagctttccggcgataacgttgctctccaggcaggtaacaacctgacggtgcagggctcgtcggttgctgcggagcgcgatgtggccctgaaggctggaaatgatctgacggtggaggcagcaaccaacaccgacacgttctacgacatgaagaagacgaagaaatccggcgttttctccagcgggtcgggattgggtatcaccatcgggtcgcagtcttcaaaaagcacccgacagggggcaaatacgacgcagagtgatgcccgcagcacggtgggtactactggcggtaatgtcatcatcagcgccggaaataacgtccagctgagtgcaatagatgtggttgccggaagagcgaaggatgattcctcccgtaaaactggccatatcgatatcactggcgacagcatcgccatccttcctggacgggatacgaccactgagtccgtgaagcaggagaccaaatcgtctggcgtaacggtcagtgtgaaagcgccattcgaagacacggtgcgtaatgtgcgcgatatcgtgcgcggtaagggcaacagtggcaacagtaccgtcgataaagtgaagggactgggagctgaaggcggtgcgctcgggcttgacggaccaggacagatgatggccgttgccgcaggcaccacccggtcttcctctgagtcgtactacgagggcgagtttaacagcggcagtcatcttgccgccgcaggtaatatccagatgactgccaccggtaaacagggaggcagcaacagcggcaatatcctgattgccgggagccaggctaaggccggtgaaacggtgatcctcgatgcgaaacgcgacgttgatatcaccacctccacagacagcgagaaatacggcagcagcgctaaaaatagcggctggaatctttcgagcgacctgagtgccggaagtgctgttcgtgccatctcgggtgggggttcccacggcaatcagctcctgccgggcgggatgagcaaggcggagaacaacagtagcggcacccggaccacacaaaacgcgtcggtcattcagggctcagatatttacgttaacagtcgtgacggcagcgtgaatgtcagcggcagccggatgaccgccacggatgatctgttgctgtcagccacaaatggagatatctccgtttcagccggacgcgatacatcacgtaatgagagcagcggcagcagcaaatcgctgggaacgctgggaggcgatggttacagcgccacagcaggctaccgccatgaaaaaaacagcagtcgggaagacagcagcctcgaaaacggattgcgcagccagctaagcagcaaaaacggtaacgttgtcgcacaggcaggtaacgatctttccctgtcaggtacggatatccgtgccggtaaatcggtctcactcagtggcgaaaatgtactcatgggggtgagccgggatacccgtgacggtgaaaaccacagcagcagcgctcagtatggtgtgacggcatctgctggtggttgggctgtcgatgctgcaaaagccgctgagacggctgcccgcagcgcagaaaacggcgatgaccctaggctgaccgccatcagaacaggccagtcggcggcaaccgcggcacagggcgcgatgtcggactcgtcgctcatcaaagctaaagtgtctttaacggcggggacgtcatcacaggacagtcgttaccacagtacggacacgcagggcaccaccattactgccggtgagaatgtttctgtccgcgccagcaatgacattgccggcgtgggggtacaaatcgcgggtaaacacgtggcgctggatgcggggcgggatattctgctggcggcctcccagaacacaaccacctctgagagcaaaaatagcggtagccagtttagcgtgggggctggtgtgagcctgattggtgcgcaaaacggcatctcggtggagctgggggcgtcacagcataagggtaaggaaaacagccagtcgcagcgcaataccaacagcgttgtccatgctgatgaacagctcacggtgaacagcggacgcgacaccaccctgaaaggcgcggagctggaaggtaaccgcgtggtggtgaacactggacgcgatctcaccatcagcagcgtgcaggatacggccagttatgacagtaagcagtcttcgtcaggcgcgtccctcagtctgtgcataccgccactgtgttatggtgcctcttccggtagcgtcagtgcatcgggtgagaatatcactcagaatggtaagagcgttgctgaacagagcgggatattcgcaggcaagggcggctttgctgtcaccaccggaaatcatacccagcttgacggcgcggtgattgcatccacggcgtctgctgataaaaatagcctcgacaccggtacgctgggtttcagtaatctccacaacgagagccagaccagcggcaacggctacacggtggcgctttccggcagcgcgggtggcagcggaaacggtgaaaaccgcaacctggcaccggccatcggtacgggccaggcagaagagagccacaccggcacgacctcatcagcggtgagtggcggtagcattgtcattcgcaacccggcgggacagaaacaggatattgctgacttgagccgtgatacggctgacacccaccacggcgtggacgtgaacggtgatgtgcagaaggtcagggataacctggcggtccaaagcgaaggcgcggcgctggccacatctgcgctggatgcttacggcaagtatgcggagcagaaagcgcgggaatccaatgcggcgctgggcgcgaagctggcatctgaaggaaaactgcagggcgatacgccgcaggagcaggaagcgttcctgaagacgcagcccggataccagaatactgagtacggtccggggagtgacttctggacgaagggtagcgcagcggcgggattactggcaggtgcgcttggcggtaacctgaaggcaggcgcggcagcgggggctgcccctcttctggcgtccctggtcaaagagcagaaagacccgacagcccgtgccgcgctgcacggtattgtggctgcggcgctgacgcagctgagtggcggtagcagtgctgatggcctgaaggccggtgccataggggccattacggcttcggcgatgaccgaccatctggtcagtgcgctgtatggagataaaaaatccagtgacctgacagcggatgagaaacggctggtcagtagcctcgtgagtatcgcgggaggtctggcgggcgctgcggtgacggatggcagtgtctccatggcggcgatggcgtcggaaacggcgaaggtggaggttgagaataactcgctggccggggaccaggcccgtgcagcggcgaagcaggctgctgaatccctgaaaaatcaggtaagagacaagctgggcgaaggtacaacttctgccatcgcgaacgctattatcaatggtcttgctgaaaccggcgatgcagcattaggttcagcggattatgctgctgatgcggcaatggcgctggcttcctgtgctgcgggtgacagctactgcactaaggccatgagtgatctggccgggaaaaatcaggcagtggcggatagcgttacggcgctgatgcagagtgaaacctggtcagcggttgcggatacggttaaacaggcggccggaggaaatcaggcagcgctggaagccaccgggggaatgctggctggcattatgctgccgggtaagaaaataccaaacacaacaaaccgaattgaaacgatacttaaatctgagaaaagctgggaaagtgcacgaaacaaggcattggatattgtaggtaatttaggggccgactctaaacctgtcatagggcgattggaggtaagtgcaggtaatggaaaagtaattgggcgtcaatccagtgatggtaaagttggctggcgtgttgattatgatcctgaaaaaggaactcatatcaatatatgggattactctaaaggaaaagggccgggaaaagcagtcaagcaggtaatcccttttgaaggtaatgaaaaatcatttgaaaccatattgaaacagttaaataggtag

SEQ ID NO: 148726 - DNA, 372 bp, Enterobacter cloacae
atgactctatttgatgaatgtaaagaagcccttagtgctgatttcaatgtgcttgaaggtcagtgtgagaaggatgttattgatattttgcatgaattcccatttcttaaggggaatttaatgtgggaaagcattaattattcggattatgatgatataaatgctcttgtatccgatgaaaatagaaatgacgatgtgttcgtttttgtcgatgatattaatgtccctattttcaggactaaactatttttgctcgctgagaatgtttatgacgttatggcattgtcaccaaagttatttatttttaacaaaaaaataatattgcagcctttatttccaactgaaataatccgtttgggtataaagaattaa

SEQ ID NO: 148727 - DNA, 267 bp, Enterobacter cloacae
atgaatgatcgctttttatatgagcaagttagaacagttttattacaagaatgggatcctataggtatcaatgatctcattgaggccagtgatgaatatgatgcatatgtacagcctatttgtgagatgttatacgcgggaaaagaaatcgaagatatttatcaatatttacattgggttgctacggatcatatgtgtttgaatggagatagtgatttggatcgtataattgctgaaaagttattttatttgccaaaaactcactaa

SEQ ID NO: 148728 - DNA, 252 bp, Enterobacter cloacae
atggatattaatgacgaaattagacaatttggtgaaggattaaaagatcgtctggaaccttcgttagttgactttgcccttggttatcttgggttttcagagaatgtattagcattcgaaacgctatgtgatcatattgctgatcatgatgttgtgatcagtaaagatgagtacacgcaagtgcttaaaatagctaatgatcttggtctggaaattgatagtcggtatacatatataaatccagaaaaataa

SEQ ID NO: 148729 - DNA, 555 bp, Enterobacter cloacae
atgcaagtaaatgacgaagtattacggcaaattgttttagaaagggagaggttaacaacccctccccaggcgatgagtaaggcatctggagtcggaatcgccaggttcgttgtgtcgtgtaatgatgcttatttagttttgacacttgcgaaagatgttatgactattataaataattattcgacacaaaattggccgtctcttgatagatggttaaatatacttccacttcaatttactcattgtttcttgcctgagttatcggaagtcgaaagggaaaaacaaacaaaagactgggaagccctgacatacgaagagaaactaactgaagcttctcatgatgaacagtggacgttatcgtcatggttatcatggatggagccaaatgagcgtgaatggttttggtgggatactattattttcgatatgcccttaaataatacccactttttaatagaagtaacgactttggactcaatgtttatggccggagcattgaaaaagttatttaaagcctgtggagcgatagacgttgtctcagaagatgacctgtag

SEQ ID NO: 148730 - DNA, 423 bp, Enterobacter cloacae
atgaaaaaaacaacacacaacgttttacttgctgcactgctggctctggtttctgggcaaagtgttgctgccgtaaaggatgacgcgctggcgcattttaacgctatcgccgacgggaaaaccgcagatctcaagcaacagtacgcgcaagacgcgcgtctggattggataggagggccgctggacggcacttatacctcatctgacgcgattggcggagtatggagcaaattcatcacggctcagggaaaactgagccacaaagtcgataatctgaatgaggtcacaaacccgaaagggagtaccgtcacctcacgtgttcagtttgccgggaaaacgacaatcaatgtcttttatgtcctgacctaccgcgaaggcaaaatcgtcaatgaaacgtggcagattgatcctgcaaaaggttaa

SEQ ID NO: 148731 - DNA, 732 bp, Enterobacter cloacae
atgaaacgagtccttactgcatccctgttcgttttgtctgtttccgccttcgcggaatcgaccccgcactgggcgtatgaaggaaaaggtggaccggacaactggggagaactcagtgatacattttccacctgcaagaccgggaaataccaatcccctatcgatatccgccatccctttgatgccacactgccgccgctgattctggattttcataccgcagcagaaaagcttgtcaacaacggtcacactcttcaggtcactgctggagatgaagatgaattccgtctggatgacaccaagtttatcttgcgccagtatcatttccataccccgagcgagaaccggattaacggtaaatccttcccgcttgaggcgcactttgtccatgccagcgaagacggcgacatcgcggtgcttgccgttatgttcgaggttggccctgaaaacaccgctctgtccccgctgctggcgcgtcttccgaaagagaagaaccgcgaagtctcgattgataaacgcttcgacctccgcccgctgtttccggccgatctccactattatcgcttcagcggctcactgacgacaccaccctgtactgaagggttgcgctggctggtgatgaaaaatacggtaaacctatctgaaaaacagctggaaacatttaagcaagcacttgagcacagcaataaccgcccactccagccgctaaatggacgggttattgttcagtaa

SEQ ID NO: 148732 - DNA, 981 bp, Enterobacter cloacae
atgacgcaatataacaatagtcaggttagtagaagcaatgaccctgagcacattgatttacttgatttaatgctacagctgtggcgagggaaatggacgatagcaatctttattgttgtttttattgtcctggcaattggctatctttcttttgcaaaggaaaaatggacttcaagggcgattattgcgcaacctgatgcggcccagattgcaacctactcaaacgcgttgaacattctctacggtagcgcgtctccctcaatgctggacattcaagcgcgcgcgattggccgttttaactcttcgttttcagcgttatcgcaggcgctggacaatcaggaagtgccagaaaaactcactattgagccaactgttaaaggggaatctctgccgttaagtgtctcatataccagtacatcagctgaagctgcacaaaagcagttggcccagtacattcaacaggttgatgaacaaacagcaaaagaacttgctgttgaccttaaagacaatattaaggagcagattaaaacccttaacgactctctggtaaaccaggagaaagtcgctcaggagcaaaaagatctgcgtatcaaacagattgttgaggcactcaagaatgctgaagcagcgaaaattacctcgccgcgcattcagcaaactcaggatgtgactcaggaaacgctgttcttactgggaagcgatgggctgaaatcgatggttgaaaatgaagcttctcgcccgctgaccttctcagctacgtattatcagaccaaaagaaacttgctggacattcagaatctgaacgtaaatccggacactatccacgtgtatcgttatgtaatgaagccggatctccctgttcatcgcgatagcccgaaaaaacccattattataattcttgctatattgttgggcgggttaattggtgctggtgtggtgctggggcgcaacactttccaaaagtataaaataagcacttga

SEQ ID NO: 148733 - DNA, 1200 bp, Enterobacter cloacae
atgcccctggtggtattaattgcatgcctgtccgtgggcggattaatatctaccgatatctttttgcctgcgctaagtgaaatgcaattgttttataaggtcacggaggcgcaaatacaggatgctatcgccctgtttttatttggcgttgcgttttcacagctggtgtacgggccgttaagcgacagtctggggagaaagaaaacgcttattgcggggctgttaatctggttggtttcgacggtaggcgttatttactctactcatattaatgagctgcttattttacgcttattacagggcatcggctcctgcgctggtatcaccgtcagccgggcgattattaatgacatgctggataagaagtcttcggctcagctttatcttgtcatatttccctttgtgggtatgtcgcccgccattgcacccatgatcggcggcgtgttaacccaacacttcggctggaaatcctgttttatctttttgaccttgtttatcgtcatgacgctgggactgtgcctcaccgcactgcgcgaaaccttaccgcctgagaaaaggcaaaagctgagcgcggtggcggccatggtcaatacgcttgtggtgttaagaaaccggcagtttttgttttatgccgcgattccctgttttgcttatgcagcctatttttcctatatcgtagagtccccctttttgctgggcaaactcgggctttcgccgctttatatcggttacacctatattctgctatccgtaagctacgtagcggggaatctgatcgctaaaagaagatctcgtcaggcgggtattgaagagaccattagccttgggtatcgcatatttgtcctcggcggcattatttttgcacttcagatgtacttaagccctgtgcctttgtttaccagcattctctccatcggcattctgacctttggcaatggcttcctgctgccgttgggcacggcgtctgccatcgcggcgcacccgcaggcgtcgggtaccgcttcgggtgtaatgggggccttacagctcggaagcgcagcgctcgcaaccttcctgattggaaaactttcagcccatgctcccgtcatgaccgcgctgattattgcctgcgtctgcgttgttggtttccttgtatatgtttttggtcaatatgggtttatggaatttgtctccagtaaagagagtaatatcaatgattaa

SEQ ID NO: 148734 - DNA, 942 bp, Enterobacter cloacae
atgattaataatatagatgtcacattaagggatggcgggtatcaaaacaatttcagctttcctatagactacgcaattaagcatgtgcgcgcactggtgggcagtggcgttgaatggattgaaataggttaccgaaacggttcatttaaacccatcgcggatattggtttaaccggaatgtcgcctgataattatattcaggcaattcatgatgccgtgcccgaagcgaaattagttgtcattgcccacccccataatattacccggcaggatattattcgcctgcgggaatgtggcgttgcgctgcttcggctctgtattaaaaccgacaatccccaacccgcgctggaactgtgtgaggtggcgaaagaaaatggcctgcgcgtgagcatgaactttacgcgcgccagccaaattaacgcgaagacgcttgttgacgtggcattgcagtgtgagaacgccggggccgatattatttgcattgcggattctaacggcagcctgcggcctgaacagaccgcccgcctggttaacctgcttaaatgcgcaacgccgcttgaggtgggattccatgcccacgataacctggggctggcaatggcaaactccattgaggccgtaaaggccggcgcgacctttattgatagctccctgaccggcatgggaaaaggggcgggaaatctggcgatggaaatctggctgtcgctgtgtaatttcaacgaaggcaaagaacgttatcacacggagtggatatttaatcaggtgcatcagctggtttcgaaggaattttacaacgcctcttaccgcagcgtagtggatatgatccttggggtgaaaaatctcagcgtggagaaccggaaaatggttgaagagtcattgacgacagagagtcagcgtgtcttcagcgctattgaaaacgtgatcacagggaccgcagcatga

SEQ ID NO: 148735 - DNA, 717 bp, Enterobacter cloacae
atgaagttacaggatgcggtgatactggcaccggtcatgcctgcctgggacggcggggcattttgcgctccgctggttaccttgctcgaagaaaaaggtttttccgtcaccatcgtcgatacgttgagcctgattacgcacgacgacccgcagagcgcgattgacgcgctttgccagaagctaaatgcccatgtcaaacgtccctggctgctggtggggtttgcgatggcgggcacgctggtgcagctgctggcacaccgtttgcgcggcgtagcgggtgtcatgagcgtgagcgcccccggttttgccgacgagaaattaacgcagcggctggtgcgtctcatcgcactgcttgaaaaaggtgaactcggttcggccatggatattctgcatcactacgtcctgcccgaaggtcagcctgcgccgcaggaaaaattttccctgccagatgcagagaaaatggcggcgattaagcgcatgctcaccggcttctcactgctgttaaagatggatgcccgcgcggatattgccgcctatgacggtaactaccttgcgattgtgggtgaaaaatcccagctggcctcatgggaaaaccagacccacagcccccgaacccagcactattacaaacgcatccccggcgcggggatgcgtccgtggaatgacaatcccactgcggtgaatgcgctgctcaacgaatggatcgataccttatga

SEQ ID NO: 148736 - DNA, 2163 bp, Enterobacter cloacae
atgaaaaaaaatgttctggttttgccgggagacggtattggtcaggaggtttgcgacgctgcgctgcccgttatcggtgcgctggatctccccatcaacctgacctttggtgaaataggctggtcctgctgggaacgcgagggcaatcctgtgccggcccgtacctgggaacagattgctgaggcggacgcggtgctgctgggcgccatcaccagcaaggggaaagtgcaggctcagcaggcgctgcccgtcgcgctccagcagaaaggcattgagtatgtttcaccggtgattcagctccgtcagcggcttgggctctatgccaacatccgcccggtgaaatacgtgacgggagatcgccgtcctttccgctgctgtgtgattcgggaaaataccgaggggctgtacgccggtatggattttaaaggtgtcggtgagaacgtggccagctggcttaaacacccgaatctcgaaaaatatggcccggaagaggcggcatggtcagtgcgtctgcaaacgcgctacggcctggagcgcctgtttctgacggcctttgactatgcccgccaacaccgcttttcacgcgtcacgtttgccgataaacccaacgtcatgcgcgaaagcggtcattttgcggcaacaatctttcaggaagtggccgcgcgcttccctgacattcgggcagatattcacaacgtggatgcgattgccctctggctggtgcgtaagcctcacgagtttggcgtgattgtcgcggaaaatatgtttggcgatatcttgtcggatctggccgccggcgtgatgggcgggcttggcctggcgcccagcgccaacattggcagcgaagtggcctattttgaaccggtacacggcagcgcgccggggatggcggggcagggaaaagccaatccgtgtgcgatgttctacacaattgcgctaatgctggcgtacctcggctttgaggcgcaggcggaaaaactgcagcaggctgtcgatcgtgttgttcgtgaggggaaggtggcgacctacgatttaggcggcccggcgacaacggaggagatggcaaaggcgataatcgacgccctggttcagccagccatcgctaaaacggccagcgtgattgcgattggtgatgagctcctgtccgggcaataccttaacacgaaccagcaggctatcagtcaatgccttgaaaaggcgcactaccgtgtcaaatttcaggcgacctgcgcagacaacatcccgcagataagctcggtagtaacagggcgtatcgggcaggacgatctcattgtggtgtgcggcggccttggcccaacctctgacgataaaacccgcgaggccattgctcaggttctgaacaaaccgcttgtgcacgacgaagagacgtggaaaaccattgagagtcgtctcgtgacgttcggggtgaaaagcgatccttctaaccgtcttcaggcgcgtttccccgaggacgcttccattctggataacgcttgcggcaccgctccgggtttcagcgcatgcgcggcgggcagccagctggtggttctgcccgggccgccttcccaggcgctgccgatgctggaagaggcattagcaaataacaaagataccgggcctgaaaggcaaaagtactgctggaccctgatcgggatcagcgagagcgaggtcggttctatcgtcaatgcgctggccacctccaccgactgggacagtcattttttatggaaaagcccttacgtcattgtgcagatcgaaacccctgcacaccggcctttaccgcttccggtgaggcaaagtctggacagcgcgctgcgtccctatctggtgagcaaacgtaataaaacggcgggcgaaatactgcgggatgcgtgcagtatccgctggcatacgccagatgcagcgctctcagcgtatttgcctgccgggggcctgtctcgccagggagagccgacggtgcagatggatgtaacggtcagcccgtcgttctcggagcttctgaacagcgacgcacggctggggaaaatgaccctgtcggttcgtcatcaagatggtcaggcgcatcagataacgtttccagtgaacagaacactgctcgcgcaaaccctgccggaatatgccgcctggtgcgccttaaaaaccctgataacacagcatggataa

SEQ ID NO: 148737 - DNA, 669 bp, Enterobacter cloacae
atgacgactcaatcaacgcttcagtcgcgcctgctggcgctggacacggcggccgtttcggacgcgctggacagtttatacattgcgggaggccttgcgggcatcaagcttcaggccgggggcaggaagctggcgggccctgcctggaccgtaaaatatgaagcctgcgtggcggagaaaaatcagtttatgaatgccgggaactatatcgatcgggttccggctggcgcggtcatcgttgtggacaatggcggccgtacggactgcaccagctggggcaatattctgaccaccaaagccgtgcttaaaggcatcgccgggtccgtcatctacggctcagccagggacattgcagacattcgtcagatgaattacccgctgtacgccagcaacatctatatggtttccggcaagaaccgtgcgcgggtcactgcggtgcagtgcgcgctgcagattgaaggggtaacggtctgccctggcgactggattttcggcgatgagaatggcgttctggcgatccccgctgagcagctggaggaggtgatccgtcgggcagaaaacgtagaaaaaacggagcgtgagatcatcaacgcagttcgtgaaggcacctcgctggacgtagcccgacaaacgctgggttaccatgtgccctgggaagcaaaagcatga

SEQ ID NO: 148738 - DNA, 894 bp, Enterobacter cloacae
atgacgcgcccgttttttgactactgggcgtcccgtttgcgctttctggacgtgcactatcacgcgcgcccggatagctaccagcggcgttactccgccatggaggccggagaacgctacgcgcagtatcaggggggcgtggtgcttaagaaccatctgggaagcgtcagcgcgctggcatcggcaatgcaggagcaaggtctgcccgtctttggctcggtcgtgctgaatgccgccgccggggggataaaccttaacgtcgtccgccaggcgctgagccagtatcagtttgagggtgcgcccaggctgctggtgcacttgccgaccgtggttccaacggcgcataaaagcgggttatcccgaacgttcagcaacgagtacgcccggcatttcgccgggcagccgctctcgattgctgatgaggcgggtgaactgcgttcaggcgtaaaaacgctcattcactttgcccggcaccatgacattgtgatctcctcaggacatgcgacgaaagaccaaacgctgcgtctgattgaggccgttgagcgagtgggcggctgcaggctgatgctgaaccagccggcgaatccgatgacgggatttaccgcccgggaactgcgcgcgctcggcgaacatgagtggctctttgtggagcagtgcgccctgacggtctatttaggctatcagcccctcgacgatctctgtgaggtgctgacgggagtgcataacctggtttacagctcggatctgggccagccgggccagcccgacatcggcgagtggctggaggacagccaccgctggttcagagaggccggactggatgcggcgcgcattgaggagatcgcgctgctgaacccgctcaggatgctggcgccggggccgttgccaggttaa

SEQ ID NO: 148739 - DNA, 894 bp, Enterobacter cloacae
atgctggaaaatatgaaagccttcagaatggtcgtagagtgtcaggggttccgcgccgccgcgatggccatgaaactctccccggccatgatcagccgcagaattgaaaagctggaaagcgaggtgaatgcgcagctgattaaacgcaattcacgtcgcatttctctgacgacggccggtgagcaattttaccagcgctgcctgctcattattgatgaatatgaatcctgcctcagggatgttaaaagcctcagtaacgaaattggcggcaatctcaaagtgggtatcccccattccatcagcaatcagcacgttattccgcaccttggcgccttcctggaacgctatcccaatctgaagctggatatcgtgaccggcaatcactgtatggagcttttcagccacggcttcgatctggcgctgcagtgtggcccactgcccgacagcaacctttactacacgctgattggctactggcgaaaatatacctgtctttcactctcctacgcgcagcagcacggcattccgcaacatcctgacgatctgcgccagcatacctgtctcctgcattttgataaccaccgccgcagctggaagtttgtgattgacgatgagctggttgaaatccgccctcattacgtctccagagtgagtaacagcctcgacctgtgcaatatggtgcatcacgggttagggatctgttacctgccggaattcaccgtgagagcgggaatggaatcaggagaaatcatcaccgcccttgacgcgtttatgcctgcccctcttcccctgtatgtggtgcatatcaatcctcacccctcccccaaggaacaggcattcattgatttcctccgcacgcttaacctggcaacggccccggcgccagcatcctga

SEQ ID NO: 148740 - DNA, 210 bp, Enterobacter cloacae
atggatcgacaaccagtagtttcaagtaatattcgtagcattggttatgatgctaatgattcaatccttgagattgaatttaacaatggtgcgatatatcaatattttgatatacctgaaaacatatactctgatttgatttcttcagactcgattggaggatatcttgcgcgccatataaaagggcattttagatactctcgcgtttag

SEQ ID NO: 148741 - DNA, 1872 bp, Enterobacter cloacae
atgtctgataaagaatcatatttaggaaaagttcaagatgtaaatggcaccacagttagtgtttcattatccaaagattctttaagtggattcatctatattgatggtcaaggctatagggcgggacaaataggtagttttgttagaataccaattggatttaacaatttatatggaataatcagtcaagttggagcaagtgcatcgccattagaacctgacgaaaatacaccagtggataacagatggctccgcatacagcttataggagaagcacaaagaaatggaacatttcaaagggggttatcacaatatccgacgatcggtgataacgtccatttagtatcggaaaaagaattaaagcaaatatacggacagcctaatgaaggatattttgttaaagtaggacatatatcaaatgcagattcaataccggctcttattgatattaataaacttataaccagacattctgctgtagtaggcactactggttcaggaaaatctacaactgtagcaagtttgataacagctttatctgacaataataaatatccttccgctagaataattatgctcgatctgcatggtgaatatggtagatgcttaaaagatagggctaatatatttaaagtcaatgcagatcctaaccctattgtgggtgagaatgaattatatataccctattgggcacttaattttgatgaactttcagaagtatgttttggtgggatagactcagaaaaagaacgtaatatattacttgaaaaaatacaaaaagtaaaaagtgagtcgcttaaaaaagtacctcgcgatggatcaaatcaggatactttgagcgcagattcacctatacctttcaatttgcatagtttatggcatcaattgtatacagaaacctttgggacatacattaaaacccaaggaaaacaaccacttgaaacactagcttatgaaacattagatgatggatctgagttgaagggtaatgcactatcgggtatacctcccattttcaagaatgtatcaaatgaagcaggtgccacaaagataaattacctcccatccccacttcctttaggtaagcaattacaggcattaggttcaaagctcagaattccaaggtatgacttcattttcaaaccgggtgaatggacaccatcaatagatggtgatattagtaaagacttagatcagcttcttaaaggttggattggagataaacctgtaactattctagatttatctggtgttccatctgatatattgaaaaccatcataggtgctgtattaagaatattatatgaagctctattctgggcaagaaatttatctcaaggtggtaggcaccgacctttattaatagtcatggaggaggctcataattatttaaatagtcaagataacagtatcgcgtcacgtatggtgcaaaggattgtaaaagaaggaagaaagtatgggataggaacaatggttgtaactcaacgtccatcagaaattgatccgaccatactttcgcaatgtggcactttttttgcccttcgccttaacaatgcttctgatcgaagccatataacttcagcaatatcagataatcttgatggattaacaagtatgcttcctattcttagaacaggagagtgcattgtattaggtgaggctgtaaagttaccaatgaggacattagtaatacctccaccaaaggaccgcagacctgatagtcaagaccctgttgtatatgatatcctcccacaggatgaatcaatgacccccggtggctggaatatattaccagaaaagctaccaaattatgccgaagtcatcgaggcttggagatcgcaaagcccacgaataagtaaagtaaaattatag

SEQ ID NO: 148742 - DNA, 990 bp, Enterobacter cloacae
  misc_feature (962)..(971): n is a, c, g, or t
atgaatactacacacgatcctatccgccatataaaatatttaagacaatcattatctcaagataatgaggctatcggctttttcctgtccgcaggatgcccgctatcagttgatatgcctgaaggccagtggccattaataccagatgtagttaatcttaccaagtatattcatactgaattaagtgataatcagcactatgcaaaacttatatccgaattggagaaagcagagaaaaataaagataacatagaagatatccttagctttttgcgagcacttgtatcggtgtctaaaggtggtgaagttagagggttaactgaagagcagctttcgattctggaaataacaatatgtgaaaaaatagcaaaaaaaatcaacgtgaatctaccaaattccgaaacaccatatcataatttggctaaatggatacgttcaatagatcgcaagattgctgtggaaatcttcacaacaaattacgatcttttaatggagcaatcacttgaagaaatggaaataccatactttgatggtttcgttggtgctaacaatccattctttgatcttagagcattggaagataacctcatccctaaacattggtcaaggctttggaagatacatggctcaatcaattggtgtcaaaaacatgtgggtaatcaaaaaagagtatatcggactcatcccaatcataaagagtcatcacacttaatatacccttcacacctgaaatatgaagaaagtaggaaaatgccatatttagccctactggatcaactaaatagatttatcagaaaaaaatcttcatttctcgtattatcaggctattcctttaatgacggtcacttaaatgatgttatcgtcagtgcactaaaatcaaatccaacagctatggttttaggattaatgtatggcgattattatattgatgataaagaaaaatacccagaagcttatcgatnnnnnnnnnnaaaaatcaacataatttga

SEQ ID NO: 148743 - DNA, 411 bp, Enterobacter cloacae
atggcaggtgtattagcaagcacagcggcagctatagggattcttgataaagcggtaagcatcactcagaagctggcaaataacagcgatgaactggacaaggctacgctcaaacttgagttagccaatctaatggtcgaacttgctaacgccaagattgaagcgataacaacacaaacgctacttttcgacgcggaacagaaaaataagcagcttgaagatcagctgaaagataaatcgacatttatcttcgagaataatgtttattggaaagctggagatgaagttccgttttgtcctcattgttacgaaacaagcagtatcaaaagacacatgcaacagtttgctgttacgaggggtcaaaacgcttggtactgtagtttgtgcaaattgagtgttcgattctcataa

SEQ ID NO: 148744 - DNA, 948 bp, Enterobacter cloacae
atggccggcgtaacaaatacagggatagtaaactatatatcaaacccagtggccacttttccaggaaactccattaccattgacatttttggtaatactttttatagagattattccttcggtgcaggagatgataccggtgtctactggagtgatgtatatgattactcaaaagaaacgatgaaattcttcgcaatttcaatgagtaaagctgtagaaggcaaatttgattttggtaaaaaactaaggagctcacaaagcttgcatctaaagatgatgctgccagtaaaaaatgatcaaatagactttaattttatggatgattttattgaagaattagagaaaaaatacatttctgaattagaattttatttatctagctgtaatttgaaaaactgcgacttaactccggctgaggaaaaggtgctgcgtgattatgaacatatagattttgcagattttaaagtagtcgatatttttagagtcaaaaatgcaggaagtattttatcgagggatatagttgaaaatagtggcaatacaccttatctctgcgcgagccgtgagaataatagcgtaagctctcacatttctttcaatgaaaattatttggatgaaggaaattgcatttttattggtgggaaaacttttgttgtaagttatcaagagaaggatttttactcaaatgatagccataatttaattctttatattaaagacaacaaaaaaagaacacgattagatcaattattcttagcaacatgcattgataaaagtttagggcataaatattcttggggggatagcattagttacaaaaaaatacaaaaagatatgatcgcattgccctcaggacataagcaacccgatctttcttttgtagcgactctgatttcagctattcaaaagttagttatcaaagatttagttcagtatgtagataaaagttag

SEQ ID NO: 148745 - DNA, 2235 bp, Enterobacter cloacae
atgcaagttatattaagcacatttaacactatcattaaaaatcgtcaaatcaaacggttaccacattttcatgaaaatttcccagtcaaaacccagcaatggatttacaattcaaaagaaaatacttatcattctatcattataatagttgtgatacactttgcacaaacatacgaaacatggaatatgaagaaaatggcgaaagtacaatcagtcgaaccgaatattgcagatctcgctaacggttggctcaaaacctacaatctaaattacaagcttgagcaagagtctttaaattctgaaatagataaagctctttacgactactttacaaaaagtggtggtaatggtggcaatcgtccggatgtcaaaattttaatgcaggataaaaatcttgaatattaccctattcttattgaatataaaggctataaaaataagcttattaagttaaatgctgatggattagtcgataattctacatccaaaaacgaacctaactttaaaaatattagagaatttgcagttaatggtgctatacattatgcaaacgctttgcttcatcacactagttatactgatattatagctataggagttacgggttataaagatgaatcaggaacattgcagcatgaaatcggtgtttattatgtttcaaaaaacaatttaggtgtcggccaaaagattggcgactatactgatttttcttttctaagcaatctttacttcgatcagtttattgaaaaagtaaaatcattaagtctttctcaagatgaattggacaagctcaaaacacaacgtgaaaaggaaattgataccagtctagttcgcctaaataatgatatataccagaatgaaaaaggtttaggtgaaaatgaccgtgtatatttagtagctgcatcaattatggccactttaggcataccaggaaaagtcgctccattagaaaaatccgatttgaaatcatccacggaggtgggcaacagagatggtgacattttagttagaaaaatcaaagcgtttctgaaagaaaaaaatatccctgttgaaaaaagcgaactcattaccagaacgcttcaaaatactcttacaacagaaaacattaacagagtcatcaatggtgaaagtcaacttaaaagagtttttacaaagattgttgatgatttaggaatttattataaaattggactaactacagattttaccggtaaactttttaatgaaatgtacggctggcttggattttctcaagataagctaaatgatgtagtactaacaccgtcatatattgcaactctccttgccaagctggccaggatcaacaaaaattcttatgtttgggattttgctacaggctcagctggtctattagtcgcagcgatgaatgagatgctcattgatgcaaaaaatacaattacgtcacctgaagaattagcgattaaagaagcaaaaataaaagcagagcaattgctaggtctggagttactatcaagcgtctatatgcttgcaatactaaacatgatcttaatgggagatggtagttcgaacatcctcaatgaagactctttgaattttgatggtaaatatggttttggtaaaataaatgagaaattccctgcggatgcttttattctgaaccctccttattctgccattggtaatggtatgaactttgttgaaaaagcattaaacatgatgaacaagggctacgctgccattattatacaaggttcagcagggtcaggaaaagctattgaaataaataaaagaatactgaaaaaaaacacactaattgcaagtataaaaatgcctattgatatttttattggtaaatccagtgtgcaaacctatatttatgttttcaaagccaatgaagcgcatcataaagatgaaatggttaagttcatagatttttctaatgatggatatacacgaacaaacagaaaaaaagccagcaacaaccttaaagatactaataatgcaaaggaacgctatcaagaaatcgtcgatcttgttcggtttggcgaaagcaaactaaatattttcacaaaaaatgaatatcatgaaaataaaatagatccggaaaacggagctgattggaatcaaagctttatcaaagacaataaaccaacaattgaggatttcaaaaaaactgtcagctcctatcttgcatgggaagtttcaaatttattaagaaagacatataatagcgaacacaatttgggaaagtaa

SEQ ID NO: 148746 - DNA, 324 bp, Enterobacter cloacae
atgaatattgcacatgtcgcactctggacccgcagcctgaacgcacaggttcagttctgggaaacggtttttaatggccgcagcaacgaacgctacgtcagtaaaaatcgccccggtttcgaatcacactttattaccctggatgacgggccgaccatcgagctgatgacgctgccggacctgccggacgcccccgcgcacccgcgcacccggagtttatcggctgggcgcatatcgccatcaacgtcggcagcaaagcgcaggtggaccgtatggcagcgcaggcgcaggcaaaaggcacgctgctcagcgccccgcgcatga

SEQ ID NO: 148747 - DNA, 1170 bp, Enterobacter cloacae
atgactgcagttatagatgatagctcaaactcacccggaacccatgcgcttatcattggtgtaagcgcgtatgaccatctgatgggctctagtgaaggggaatgcagtgagcaaggctcagattctggtctcggacagctaagtgcggccgcaagatctgcttcccagtttgcgacgtggttaatgaaagattatcgacgcaaggactttccgcttcggagtttgcgggtacttttatcgccagcgactgaagacgaagtgggtgaaaacctcaagggttatcttaaagaagattcaatcccaacgagggaaaatgtatcaaccgcatttagaaaatttaaacaggcagccgcaagaaatccggataatatcgcaatcgtttatgtggcaggacatggagttcaatttactaatactggagcagtactcctattaaaggattttgcccatcctgatcatgaggaagaacgatataagggagctgtagatattagagccatgcatgaaagcatgacgtatacaaacggggcgcggcgtcagttttggtttgtggatatatgcaggcaaagagctccggatgctaaagagttcgaggaattagctggtgtattaaaattcaacaaagttatcaatacaggtagttctggagcgaccatatgctccccgctatttctggcggcatcatcgggcgagcaagcgtttgccaaacctggaaagctaactcttttctgcgaggccttgatgtcagcccttgttgaaggtcatgctgcttcctccgatggggagcgcagttcaccatggctagtatcaactagtggattacagatgtatcttagagacactgtagaattgttagctgcctgtaatgatgaaaaacaattaatcgaatgctcagggatttttagcaatgaagtctttcatgaatgcgaaaaagctccgaatgtagatttaacaatacagatcaaagacggcttgcctggggcccactacagtgcaaaattgtctcatctcggcagagttctttatgataatcatacaacatggccgcttcgcgacagcatacctgcaggtatctataagatagaagttacaactctaacgactaatgagaaagactcagataatctcaaactttcgcctccaagtaggataaaggaacttccactatga

SEQ ID NO: 148748 - DNA, 1041 bp, Enterobacter cloacae
atgaatgaggtcacacctaaaaacataaaccttagtattagagtgaagtctaaattcaatttcggcggacgagacacgaaaatcgacatccgagatagtgaactcattcttgttgagaagctcactacaagcagagagttcagtctgctccccggactgtatgaagttagcacatttctgggcgatggaaagagagcatcgcagattgttgaagtattcgaatcacaattaactgagataagtttagagccagacattgattatcagcctgcgcctccaaaagatgacagtcagtttaagaaaatcgaggagttgaatcaggataatcgatttggtttgactattcttgatgaagatactgactttactatttatccggctggaagctattggatcgtgcaacacaaagacgcaatgcaaaagatgcctataataacactcaaaaaaaatgggtcgtatattcaagctagcctccctattagccaaggccaccgttattccgttacttgtcatgtgaaacaggtcttaaattcgaagtatggccacgtagaaataaacatctcacagtctagagctatggcttttggcttggagtgtatgctcaaaagtgggcaaattatgaatgcagccgaggtggcttctaatgcactagaagccttgatagaaaaatacacggaccctacaggagcaacacttgcagcactgattctttacaagacatgccgacttgatgagtcgagcaaaagacatttaatcaatttggtaaaccatcatgattggttacctgatgcaaaaataatattagctttatacttagcacgcactggcaacctggacgaatcaatgcaacttgcgtgtgaagctagcaaaaaacgtattcttttaactgagagcttttcattattattggatcttcttcgttattggccaggaacagaacacgatgagaaaagaagcgaagctctcgcacgtttagcgcaaatcgcgccattcgtaatttggaagtctatgtatcttaccaccagtatgaccggagattaa

SEQ ID NO: 148749 - DNA, 267 bp, Enterobacter cloacae; identical to SEQ ID NO: 106251

SEQ ID NO: 148750 - DNA, 156 bp, Enterobacter cloacae
atgagccacaaggaaagcaatagcgttcgtgctgcttatgcccacaaggccaagcatctcgagcagcgccgcctgatgctacagtggtgggctgattatctcgatgacaatcgaaacgatatggtcaggccgtttgagtttgttcacaaaaaatag

SEQ ID NO: 148751 - DNA, 237 bp, Enterobacter cloacae
atgaagcgtaaacacttcgttcccctttgtaagcaagccatgaggatactgaaagagatccgacaactgacttatgaagaaggccatgataatggattaatcttcactggctgttatgactcgtttaaacccatgagtgaaaacaccatcaacaaagcccttctcaatatgggctatgacacgaagcaggacatctgtgggcacggtttccgcacactggcctggtgccttaattga

SEQ ID NO: 148752 - DNA, 1611 bp, Enterobacter cloacae
atgaccattccctttacccgctggcctgaggaattcgcccggcgctaccgtgaaaaaggttactggcaggatctgccgctgacccacatcctgacggaccatgcggacagcgatgccgaggcgattatcgacggcgatcggcgcatcacctaccgcgcgtttcatcaggcggtgaacaatctggcgtccgcccttcaggcgcaggggctgcaccgcggcgagaccgcgctggtgcagctcggcaacgtggccgagttctacatcaccttcttcgcgctgctgcagatcggcgtcgcgccggtgaacgcgctctttagccatcagcgcagcgagctgaacgcctacgccgtgcagatcaaacccgccgtgctgatcgccgatcgcgaccatgccctgttcgcgggcgatgattttcttaataccttcgtggatgaacaccgctcggttcgcgccgtgctgctgcgcggcgataagggcgcacatgctctggaagcggcgactgcgcgtccggcggacaacttcatcccgaacccgacgcccgccgacgaagtagcgtttttccagctctccggcggcagcaccggcacgccgaagctgatcccgcgcacgcacaacgattacgactacagcatccgccgcagcaacgagatctgcggcatcaccgccgaaacgcgttacctgaacgcgctccctgcggcgcataactatgccatgagctcgccgggatcgctgggcgtcttcacggcgggcggctgcgtggtgctggcgaacgatccgagcgccacgctctgcttcccgctgattgaacagcatcagattaacgtcacctcgctggtgccgcctgctgtcagcctctggcttcaggcgattgccgacggggcgggcaacgcgcagcttaaatcactgaagctgctgcaggtgggcggcgcgcgcctctccgccacgctcgcggcgcgtattccggtagagatcggttgccagctccagcaggtgttcggcatggcggaaggcctggtgaactacaccgcgctcgacgacgcgccggagcgcatcatcaacactcagggccgcccgatgtgcccggacgacgaagtgtgggtggcggacgaggacggcaacccgctgccgcgcggtgaggtcgggcgtttgatgacgcgcggaccgtataccttccgcggctatttcaacagcccggaacacaacgccagcgccttcgacgccgacggcttttactgctccggcgatctgatcgccattgacgagcagggctacatcaccgtacaggggcgtgagaaggatcagatcaaccgcggcggcgagaagatcgccgccgaagagatcgaaaacctgctgctgcgccacgaagcggtgatccacgccgcgctggtgagcatggaggacagcctgctgggcgaaaaaagctgcgcgtatctggtggtgaaacagcccctgcgcgcggtcgaggtgcgtcgtttcctgcgcgagcagggcgttgccgaatttaagctgccggaccgcgtggagagcgtggatgcgcttccgttaacgccggtcggcaaagtcgataagaaacagctgcgcctgtggcttgctgaacgggcacagggctga

SEQ ID NO: 148753 - DNA, 255 bp, Enterobacter cloacae
atgacaaagaatcagacaccaaaaacaatcagcatgccgacctttgacggcagagagttaagagcacaggcggggctacagatgtcaacgagtggtgctcaagttgaatccagggggatccagatggctacgcgtccacaacaaggtaatcaaatcccagggtatggtcgtcagacttctgctcagacaacatctcagggtacttttgcccccgtgagtggcccgaagatcccgccgatgaaaaaatgtttgtag

SEQ ID NO: 148754 - DNA, 699 bp, Enterobacter cloacae
atgaacacactgacagtatctctggtaacaataatgatcccaggtgtcattatggcactaatttatgatacttacactcaacataaatcctgggattcatttcgatatgttcttatgtcggttgtatttggtatcgttacttatctggcaatgcaggcagcagtgagcttatttcaactgattgctgggatcggtgataccaaatccattaattggagattactttcagtctggtcaattcccaatgaggaaaagatagcgattaatccattggagatcttactgggcgggctttgtgctatccccttagggctaattgctgtctatcttgcgaccaaacggacattgcatgaactgttactgcgtaagggcatttcaaataaatacggtgatgataatgcctttatacggtcagttgagatcatgcacagaaatacagggcaatgctacgtactgctgcatgaaaataacatgcttattcatggaacagtctatctgtataacgaaaatgagaaaacgcaggagctggggcttctaaatgctactgttctgagttcggaaacaggtacagttctctggactacgggatttatctatctttcaaaagaatacggtaaaatggtcgtatttgaaaattatattgaggttccacatgacaaagaatcagacaccaaaaacaatcagcatgccgacctttga

SEQ ID NO: 148755 - DNA, 345 bp, Enterobacter cloacae
atgaaaaaaattcttcgtaatatcattcttactacagctgtggtttctggttcagtattcgcagcagatagtagccagaaggttgcactttctgatcttcattttgccacaacacaaaatggaatgcagcaaattgaaggtaatggtattaatactaccagtcagacactcaagcatgttttcgtgaaatttaaccttcttcaaaataataccgtagtggggcaaaccatcgctatggtagagaatcttgaggccggacagaactggaaagtacaggctccttataatagtttttctgttaagcctgatagttttaaggttactgagattaatgttataaattga

SEQ ID NO: 148756 - DNA, 927 bp, Enterobacter cloacae
atgacaatgtttcatgatgttcatctggaactgctggtcgacgcctattcacttccccaggcagaacgacttgcgtacatagatctctgtattcgctatcttggcagcatctccagagctgaaattatggctgagttcaaggttgctcaggctgcagcatctaaggatcttgctctctatcgggagctaaaaccggataactgcagcattgatactgcaactaaaagaactgttatccttgcagacagttataccccactaattaggattggtgttcacacggcccttaaccttattcagtatgggtttacacgctccgaattaatgcaaaagcggccaatgctacccattgatgaagtggacccgctctatcagccggaacgtctcaaagaagaacaggtagcggcggtaacaagggcaataaaaggacaatgtgccattagatgttcctacggttcaaaaagtggtgatcacagggaaaggatactgtttccatcagcattgtttgttgaccgtaagaactggtatttccgagcttatgaccgaaatgaggaacaaccacagcgcagtggttttaagaacttcaaactatcaaggctttttgatgctcatttggaaacaacaatttcgccgacacttgctgagaagacggatagagagtgggacgaagaaatcacttttatcattgaatttaaaaagaatttaccaaaagaaacaattaatgagatatcgcgcgagttctctataaatggtaacgtccattctgttacttgccgtgcagcattggcctgttatgtaaaaaccaattggaaaattgacttggtcaatgatgaaaataataagtggttatactttgatgtactgaatgcagaggctttacaagacgttcagtgtttggctccattgtttgaacaaaaaagcagttaa

SEQ ID NO: 148757 - DNA, 519 bp, Enterobacter cloacae
atggcctcgatcatcgagcgtgataacgcattgatggatcagattgcggtcatacgagccagaggaaaggccatattggtaccgctaatcaaagtactgactcacttcaaaatccacttcagtcttgtccatgattcggattcacctaaccgctccgatggagttaaaaatggaatgtggactgaaaaccgaaaaatccatgaagcattgtgtcaagccagaaacgcgggactaacagtccgccatcgagtcagtgtgcctgatttcgaacgcttccttggtcaccgagaagcatacaaagataagccattgaatgcttacctgcagatcaagttggatgatgagttagcggaacgggttcagtggctcatggattcccttctgaactctgatgagcattgctcgtttgggaatgaaatcgatcacgatcgttatatggaaaagctactgggagttgtttctaggtgggctgaggataatggatatgtggaggatctgcgctttaagagccaaagataa

SEQ ID NO: 148758 - DNA, 531 bp, Enterobacter cloacae
atgaaagctaatcgtttactggtttcttttgctatttctgctgcattattttctgcgagcgcaatggctattgacggaactgtacactttgagggtgatattgttgatacgccttgtgtcgttgctcaacaaagccaaaatcagttagttaaacttggccaagttaaacaaagtacccttgatggagctgctggccaacgctcagcagggacacctttccagatcgttttagaggaatgtaagcttgacccaacaacaccagaaaaagcttatattacctttactggtatttcctcacaatcaaacgtattagatgttgctatgcagtctggtggggccactggtgtaggtatagagttaacggatgcaaatggaaatatcattccaattaatactcagcaccaaaatgctagtgatctggtagacggtcaaaacatcctaaacttcaaagccgcatacatttcaaccgccgctgcagtaaccactggccacgcggatggcacggctgatttccagttcgaatataaataa

SEQ ID NO: 148759 - DNA, 549 bp, Enterobacter cloacae
atgaattatcatctaatttcagatgacagtttttttttacttggtatacgtgaagttattgagagtttgagtagccaatgttttgtgcacaacgtgaactgtgaaagccgcctcttttatccaatggctggtgatgtagttatcatcgctgttaacgatttaaaattgcgaagtcacttgttgcgcaacccaaaacttaaacgatgcagacttctgttgatgatggatttacctgtgcttcctgtaagattgttctacttcccatggctgataccaaaaaacatcggcacagaagcacttgtaactacaatcaacagagccgtacgttcaatggtttatagaaagaaagtcgatcaaagaacaatgagtatttttgatgaactttgcgccggaaaatcgacaacgaacctcgcgatgacgacggaggacaatgctaagtatatatataaaatcaaacgcgacatcattcgcgaatatggattgttgaaatgcaactcagtaggattgctactttgccgagatatgctttgtttgaaacctaaatactga

SEQ ID NO: 148760 - DNA, 1026 bp, Enterobacter cloacae
atgaaagtatcaactcttggtatcgacctggcaaagaacgttttccagcttcatggtgtcgatcacgcaggtcatacagttttgcgtaaaaggctcacccgggccaaattcgttcagtttgtcattcaactggaaccttgtctgattggcatggaggcctgctcgtccagccatcattttgcacgattattcagtcgtcacggccatgaagtaaaactgattcctccgcaatatgtgaagccatatgtcaaaacgaacaagacggatgcagcagatgctgaagcaatctgcgaagcggtaacccgtccgaatatgcgttttgtacagataaaaaccgaagagcagcaggccgttttagcgttacacactgaacggggaatacttatccgcgagcggatcgcctgttccaatagtttaagagccacacttgctgaatttggtattacgattgcagccggacaaagccatttaacccgtgagctaccagccattctggaggaccgcgaaaatggtttatctccctttgtcagagccagcatctacagacaggctaaccatattcgggaacttgaggagcagattaaacaggtagaagaagctctggcctcctggtataaaacgcagacggcctgccagagactggccaaaatccccggggtaggcatgctaacggccacttatgtggtagcagcagtgggtaatgcccagcaattcagcaccgcaaagcaattcgcttcatggctggggctgacaccaaaagaacattccagtggcggcaaacagcaactgggcgggataagcaaacgcggagatggatatttccgataccttctggttcacggcgcacgagcactgactgcctgggtcaaccggaaaggctcagttgaggaaaatgcctggcttcaggggttgcttgagcggaagcactacaatgttgcagttgtcgcgatggcggcaaaaacgtcgagaataatgtggtcaatgctgacacacgatacggaatataagcctcgtcaggccgcctga

SEQ ID NO: 148761 - DNA, 144 bp, Enterobacter cloacae
atggccctaccatttgggaacaagaaatattatatatttacattcagaaaaacatcccctgatttttttaacaaagagaactataattttctttttatccttgattacgattttaaatggggaggaagtcaccagattttatag

SEQ ID NO: 148762 - DNA, 264 bp, Enterobacter cloacae
atggaaaaagagaatgagctggggctgattaatcaaatcgataaagagatccgtgaatcagacgcgttcacagtcctcaatggcgataactacatccaagattctttcattgaaaatggctcaattttagggttgcgtgagaacgccgtggaactttccgccaaggagttaaaaattttcggtagaagtatcgaaagcctaattctcgaagtgctacgcaatgaattaaaaacaggtgggattctctccaatcataagaagtga

SEQ ID NO: 148763 - DNA, 393 bp, Enterobacter cloacae
atgctggaagcggagatcaacgtctgctttggtcatgacgacgttttcgatccgtggtatccgctgggaaccgcgaatatgcttcaggttctgcatatggggctgcacgtttgccaactgatgggttacgggcaaataaatgatgggcttaacctgatcactacccacagcgcgaaaacgctcgatttgcaggactatggcgtgcgcgttgggaatacagcaaacctggtgattctcccggcagagaatgggtttgatgcagttcgtcgccagacgccggcacgatactctgttcgccacggcaaggtgattgccgagacggtgcccagccagacaaccttgcacctgacgcagccggaagcggtgacgtttaagcgccggaatatcgaataa

SEQ ID NO: 148764 - DNA, 519 bp, Enterobacter cloacae; identical to SEQ ID NO: 120062

SEQ ID NO: 148765 - DNA, 381 bp, Enterobacter cloacae
atgaaaaaaatagctcttgcagtgattattgccacaggccttgttgggtgcgcctcttctggaaatcagcaactgaaaaacgaaactgaaaccagtgttcagacaaaaattcaggaaggaaaaaccaccaaggcagaagttaaatcctactttggatcacctgatgccgtgtcatacactgatggcggcaatgagatttggaagtatgccttcgccaaagttaaagttaacggcactactttcataccgttctatgggcttttccataacggaacgaatggcaccaagaaagagctgaccattctcttcaaagatgacaaggtccagaaatacactatggccgaatcagcgattaatacaaaatcaggatgggctgattaa

SEQ ID NO: 148766 - DNA, 819 bp, Enterobacter cloacae
atgagttcactatcccagctttacaagcagaaagacaagaatggcaccgagaccactgtgaagaagacgtttctggttccattgtcagaaatctacgtcgaaccgggctttaacgttcgcgaaattgatcaacttcatgttgaagagttccgtgatgcgtttattgccggtgagtttgttcctcccctggcggttcaggtcactgagcagggcatcaagatcatcgacggtcaccaccgctactacggcgcgctggctgcaacagcagctggaacggaggtggcccgtatcgagtgcaaagactttatcgggtctgaagcagatcgcatcgccttcatgatcaccagtagccagggtaaagcgctgtctccgcttgagcgtgctgcggcttaccagcgcctggtcaatcagggccgcaccccggctgaaatcgcgaagatggtgaagcgctcggtaggcgatgtcgatcaccacctgcaactcctttcctgcggcgatgagctgatcgacatggtgaaagccggtgaggtttcagcttctactgctgtggccctttcccgggagcatggcgctcaggcaccaaccgtagcggcccgtcagatggacaaggccaaggcagcaggcaaaagcaaactcacccgcagcgctgccatcccgcagctatccccggcacgctcccgtcgcctggctgagttactggttgatgcggaaatagaaaataaccgcctcacagtgccctctacggcgattgaagaggtgctttccatcatcggtgagcaaaaaaccttaatgcgtgacagcggctgggaggaagcgtga

SEQ ID NO: 148767 - DNA, 1026 bp, Enterobacter cloacae
gtgaatacagcagaaattctcaaattcccgggcaccgccccggggcaactcaggagcaacaggatggaaaaccagaaatctggctacatcccgttgtaccggagcgtgctgaagcaagcatgggctaaagacgtctacctcagaaccctctgggaaaacctgcttcttaacgccgcaagaaagccattcatggcccgtttcaaaggtcatgaatggcatcttcaacccgggcaactggtagtcaccgcagctgatttaggccttcagttatgcgataggaagggcaacccgacaagccgggatgctgtggagcgcatgctggcggttttcgtccgggaagggatgatcaccatcgagggggagaagcaaaaaggcagagtgatcaccatcacgaattatgctgaatatgctcaaaaaaacgacgatctacccgcacaaacatccgcacatggagccgcacatacatccgcacatggagaggccagtaatggcgctggtttgaaggtggtagccgcacatgatggcgcacatggatacgcacatacatccgcacatcatgaacaagaaggtaataacaataataaaaacattaaaacctctacgtccgagaattctggcgaatcctctgacaagcccgctaagaaattacctgttctgaaacctgatgctgcgatccagagcggcggcaagtggggaacctctgaagacctccgctgcgccgagtggctgttcagtgaagtccagcgcattgccccatctgcaaagcaacctgcctgggcgggatgggctaacgatattcgcctgatgcgcgagagagatggccggacgcacaaagaaatcgctcagctgttcaagtgggcctgcaacgacagcttctggcagggcaacgtgttatgcccgtcaacgctacgcgaaaagtggactcagctggatatcaagcgcaacaagcaggcggcggcaccggccactggtaagccaaaaatcgacatgaacaacactgactggatacacggggtggacctatga

SEQ ID NO: 148768 - DNA, 702 bp, Enterobacter cloacae
atgaaaagccttgccgagcagatgcacaatttcgatcgggagcagatgcgccgcgtagcgcacaacctgccagaacagtacgaagaaaaagcgccggttgagcgggtggctcaggtcatcaatggtgtgtttacccagctcacggccacattcccggcggctgtcgcaaatcgcagccaggaagacatgaacgaattgcgccgccagtgggtgatggcatttcgggagaacggcatcagcacgatggaacaggttgccgccggtatgcgcgttgcccgccgacaggagaaacctttcctgccttcgcccggacagttcatcgcctggtgcaagtcggagatggcaagcgtcgccggactcccaactgctgacgagctggtaagccaagtctaccagtactgccgcgatcggggcctgtaccctgatgccgagtcatacccgtgggagtcgaatgctcagtactggatgatcaccgggctgtaccagaacatgcgagcaaacgacctgagcgatgccgagctgcgccgcagggccgccggtgagctggcactcatggcaaaccggataagcgccggggaagtgattccagcgccaaccaagacactccctatcttgggtggaaaacctctgggcagatcgcagagcctggccaggctggcagagattcgcgtaaagcacgggttgaggggaccgaaatcatga

SEQ ID NO: 148769 - DNA, 345 bp, Enterobacter cloacae
atgagcatgacaatccgtgagcagttactggcggcgatgcgcaataaccctggaatcaacaccgtcatgctggcctcaatgctgggcatgaccaccaagaagatatccgggccgctgagcactctgctggctgacgacctgatagctttcgagggcaaacacggccagcgcctgtacagccttaccagttacggcatgcgctacgcaccagacaccatccccgaaattacccgcggtaaatcggcgttagtccagcgtagcgacagcaatgtgatctgccaggagtgccgacagagcgaggctatgaagcgcgttctgatggtgtggggaagggcgccagcatga

SEQ ID NO: 148770 - DNA, 414 bp, Enterobacter cloacae
atgaaagcgaacttaatcgaaatggaaggatttttacgcggcaagtgcctgcctggcgacatgctggttaacgaaaccaacgctcaatatctggtgcgaaagtttgcagaggctgagggcaagtgcgcggcgctggctgctgaagttgaggctgtgaaatcagcacatcaagatgctgtagacaccatcatgtatacctccaagcggactggtgttttatacacagagaagacaattcaaatgtcctgcaaaactccggaaaccgatgccttcctggctgaagtgcgggcgcagggtgtggattctgccatagagcacctcaccaaaaagtttgaaggcacagggcagatcggcgtgccggtgatggcgcttgaatggctggcacaggaaattcgccaggaggcagctcaatga

SEQ ID NO: 148771 - DNA, 318 bp, Enterobacter cloacae; identical to SEQ ID NO: 133996

SEQ ID NO: 148772 - DNA, 1449 bp, Enterobacter cloacae
atgagcatacctcaagttgtcagtttctctggcggcagaacctcggcctatctcgtccatttaatggagcaaaggagactgtctggcgaagaggttcactatgtctacatggacacaggggcagagcacagagggacctacgagttcatcaagaagctggcgcgcgaatggtcgattaacctgatctgcctccgtgtaaaggttaaccctgaactgggtaaggcaaacagttactcggtggtaccgcttgatgatatcggccctgatcttcagccatggaaagatgtctgcgaaaagtacggcaccccatacgtccacggcgcgttctgcacccggaccatgaaaatggaagttttcgaaagatattgccgggaaacattcggccagtatcacacatggattggtattcgggttgacgagcagcgcaggctaaagcctcgagaaggcgttagttatctggcagatgtaagcgatttcgaaaagcaggacattctcgactggtggaaggatcagccatttgacctaggcattccagaacacctgggtaactgtgttttctgtatcaaaaaagggataaacaaggtcgccctcgccgcacgcgacgagcctgagctcgccgctgacttctggaatcttattaccgacccgtcagtaagggttgtggaacgacgccagcaagaaaacaaaatcatgtatcgcggcaacaattctctggagagcgtgatcgcaatgttctctgacagttcacgcgaagatattgcagcaacaataaaaggaggcggcggatatgaccctaattcatgcactgaaagctgcgaagccctgacgtgtgaagtggatgataacccagagccagaggtagaggagcccgaggaagaagaaagccaagtttcgatccgcactggatatggaggaagccatactccagcagatcagcgcgacctctggcgtactccaccagccctcttcgcttctcttgatgctgagttctgcttccagttggatgccgccgcggctccgcataacgcactgtgccggaagttcatcacctccgagcagaacacgctggaaacgccgtgggctgattacctgaatgtgccaggctacgtctggctgaacccgccatacagcgacatcacgccgtttgtgaagaaggctgccgccgagagcaacaatcagatcggcacggtcatgctggttccggcagacacatcggttggctggtttaaggaggctatccagaccgccagcgaagttcgctttatcaccgccgggcggctggcttttatcaacccggtcaccggtaagccggtctcgggaaataacaaaggcagtatgctcatcatctggcgaccgtatccgcgtacacactgccacttcgcaactgtggaccgggacgagctgatggctttcggggcgaaacttctcgcccgccgggaggccgcataa

SEQ ID NO: 148773 - DNA, 384 bp, Enterobacter cloacae
atgacgccagaaatgtatgagcgcgtgcgcaatttctttgttgatgctgggcttactactggtttcatcgttcagatgctggcttggaatgatacaaagaagttaaccgatgcatttatcgtattccgacctaacggtggcacggatattcttaacgatattggctcggatttctatgtgctggtagacgtcatttccgcaaaggataagcgtcgtgcagcagcggaaaaagccaaggagttaatcgaatacgccacccaaaatgatgttagcgatgagtgccttgggttaattcaaaaccgaggaggttttccatcgcccatcacgaccgaagagggccgcctggtcttccgactccagttcatgtgcgtttacggcgaataa

SEQ ID NO: 148774 - DNA, 360 bp, Enterobacter cloacae
atgaaaaaagtctttatccttggattaggtttattatctttctatgtcagtgcctctgaattttctgagcaggatttaatcgagttaggaaaaaaagaaatccggactgaaatctcattgccaacatctttttcacaggaaaaatttattcctgatactcgtgacaatccatcttctcgaagtggaaatgtttgccttaaagtctctggaagaaagaatgacggaactgcaatggatctagctgtctacggagtgcacatagccacaaaaggtgaacaagctacttttggtgaaatttttaaatttattggcgaatctgaaatgcaaagttcagaagccaaagaatcttgcaaattttaa

SEQ ID NO: 148775 - DNA, 732 bp, Enterobacter cloacae
atggcgtgcaaaaaatgcggtaaaaatgaaactataaaggcccatctcatcccaaaggtattttgtagagagattcaggtcggaaaaatgcatgctgcaggtgtaatcaatagtaataaatttattccatctcaatctggtatttttgataagcaaattctttgtgcaaaatgcgatggagagcttggtgaattagaaaattacgcagcgaagacattcagaataatcagggaaaactatgtaaacaatgctgatggtattaaaaaaatcccgtctagagaccctgatataatttgtcgatttgctgctggaatactatggaagtatagtatcgcggcagagaatcttggcaagatagatttagaagatttcagtgaagatattaaaaaatatgcttacggtgaaatagcacgaccgtcattttttgatggcttattcatatggttaagaatatataaaggtgtcccggatctatttacataccgggctccatttccaataaagttagaaggtattaatgcctttcgatttttattgggtggaatgttgtttattataaaggttgatgcaaatccttttaaaccctcacctttgtcaggtactttttttagtaactcttctgatttgaatttttcaatcgcacccgcacaattttttgaagaatatactgatgcaaaaaaactagcgtttgaagacggatcgcttagcaatttcctagacaaaaatggttga

SEQ ID NO: 148776 - DNA, 618 bp, Enterobacter cloacae
gtgggatgggttgcccttcgccagcggcgacggacgctgcgtagtgagaacgttgatgcagcccgcctgatcgatacggttcgcatccgggttataccaggccccttcccccagcgcgacaacgccaggcatcatacgcggagtcactttagcttcgatatgcacttcgccacgtccgttgaagatacgtacgcgatcgccattactaatgccgcgcgctttcgcatccatcgggttgatccacatctcctgtcggcaggccgctttcagtacgtcaacgttgccgtaggtggagtgaacacgcgctttgtagtggaaaccggtcaactgaagcgggaatttcgccgtcagcggatcgttgtagttttcgaagcctggcgtataaatcggcagcggatcgataacatccccttccggcaattcccacgttgcagcaatttttgccagctcttcggagtagatctcaattttgcccgacggcgtggtcagcggattggcctgcggatcgtcgcggaaggctttatacgccacgtgatgcccttcgggatcgcgctgcttgtacatgccctgcttgcggaaggtatcgaagtccggcaggtcaggaatggctttgcgtga

SEQ ID NO: 148777 - DNA, 429 bp, Enterobacter cloacae
atgaaacgcacaccattttaccgcaggccagggcgaaccgggcaattctccggcctccgtgagcgcgttatctggatgattcagacgcgcggccgcccggtcaccggcagcgaaattgctgagaagttcggcgtaacgctcatcgagtttaaccgggtcgccaacggcattacccgcggctccggacaaatagctcagatcgttgagtctgagaaatggctcaacgaggacggcatctgcgaccggacattcgacctggtcacgaagccaaaggtcgtaacgccgcagggcaaatcacgactattcacccggcgcgccatagagcaatcgcaggaaggcagacggcaggagtgcatagctcgtgccgcccgccgtcgccgactgattgctcagggcctgtacatcgacgaaatggagtcagtgctatga

SEQ ID NO: 148778 - DNA, 516 bp, Enterobacter cloacae
gtgagttattcaacagttataaaagtttggcctggcgagaagtctgaagaagatgaagagctccgcaatggctggggaagtggccctgtcatctggaatgacatggcaatgaaatatcttggtcttccggcccatcagtacatgatgaaaatagacagcctttggcccttggctaaccgccttgatattccctatcaccatcgcgctgtcctcgctatgacatacgaccgcatgtatgtgaagcaggaacattacgcgctggcagcagattgcatccgcaaatacctaactgacttcccggctgatgataaatatgtaaaccactggccccgcattgctgaaatttttgaaagcacacctgaatgcccggctattggtttatggctcacatcggtatgcgaaaacccatttcttggtgagtgggatgaagaaaccgaagattacaaacagcctgactggtctcgttactggagcctttttgatgaccttgacgcaagcgaaagtggtgccgcatga

SEQ ID NO: 148779 - DNA, 1032 bp, Enterobacter cloacae
atggacaacgctgaacagcaatttctgaacgatctggatactaaattctggaaagccgcagataagctacgcgccaatatggacgcggcaaactacaaacatgttgtactggggctgatctttctgaagtatgtttcagatgcctttgacgcccgtcagaaggaactgagagggctgtttgaagacaagtccaacccggacaacatttacgcgctttttcgtgacgattacgacacagaagaggcgtaccagcaggcgatcgcagaagaactggaagtccaggactattacaccgagaaaaatgtcttctgggtgcccaaactggctcgctgggaaacactcaaaaccaacgcagccctgcctgtaggcacgattctggggaaagacgatagcggcaaagatatcgtcatgacgtcagtatcgaagctgattgatattgctctggatactatcgaaaacagcaacccgaagctgaaaaacattcttaaccgtatcgggcactatcagctcggtaatgacctgttaatcagtctgattaacgttttctctgacaccagtttcagcgaacctaaatacaatggcgtgaagctcaatttgaagagcaaagatattctcggccacgtctatgaatacttccttggtcagttcgcgctggcggaaggcaaacagggcggacagtattacacgcccaaaagcattgtcacgctgatcgttgaaatgctccagccctacaatggccgcgtttatgacccggcgatgggctctggtggtttcttcgtctccagcgatcgctttatcgaagcgcacgctgatgaaaggcattacaacgctgctgagcaaaagcgtaatatttctgtttatgggcaggagtccaacccgacaacttggcgcttggcggcgatgaacatggtgattcgcggcatcgattttaactttggaaaacaaaacgccgatacgtttctgaacgatcagcacccggatttgcgtgccgattttgttatggcgaatccgccattcaacatgaaagaatag

SEQ ID NO: 148780 - DNA, 591 bp, Enterobacter cloacae
atgatccatcatctggccccgaaaggttcaatggcgctgctgcttgcgaacgggtcgatgagttccaatactaacagtgaaggtgaaattcgccgggcgattattgaggcggacctggtggaatgtatggtagcgctgccgggtcaactatttaccaatacgcaaatcccggcctgtatctggctgctgactaaagacaaatctggtggtaacggcaaagcgcaccgtaaaggtgaagtgttgtttatcgacgctcgccagattggctttatgaaagatcgcgtgctgcgtgatttttcggcagatgatattagaaaaattgccgatactttccacgcctggcagacggataagaattatgaagatgaggctggtttttgttttgctgccacactggacgatataaagaaaaacgattttatcttgacaccggggcgctatattagtgtggttaatcaggacgacgacaatgagcaatttgccgagaagatggcgcgattgaccgcacaacttaaagaccagttggaagaacgcgaaaaactggaagtacagattaaggtaaatctggcggagatgggttatgaattctga

SEQ ID NO: 148781 - DNA, 891 bp, Enterobacter cloacae
atggctgaccctattgcgacagttttgtcgcacttaactaaccttgtaaccttcaggtcatctttaaggctacttatcattgctggttcgataatttgctgctgggtgtttatcgagccaaaactcagtcctttcaagttgccaaatgaattatcgttaacattaataactgtaataggattctcatttggcgctttattatctgccaccttgtttaacacattagatttggtaataaaatttgcgacaaagaaaatcgacttaagaaataaacaacgtgaaatccaaaaagaagaagaaactagaaaagcgaatgaacataaaaaagtagaattgtttaagaaaagtttcaacgattactcactggatgctaaagaaatactactaaaattaaaggataatgattgcaccattgagtcaggtacaactgtcggggaagcacacaataatgccctcttggggcttctagaaaataaaataatactaccacagcatagactggataaaaggcacacttattgcacaatcaacccattgtataaagatgctataattcaagcatttgacgaaaaacaccgaaaggaagtcgatgaactcttttctttagaatctaacgatttgaatatgcttttgaaaaaattcagcaacaaaacttacgaagacaatcatgttttcaatattgtccacagcatttatcggaatagatacaattatatgcctgtcataaagcatgagttttatgacgagggtgatttcattgaaaactgcaatattcaattttatgtttccgatcctcactacccatttgtttgcgaaaaattaggttcggaaattaggggttacattttaggaaactataatgaagaagtggttagaaaaagacgtgggtga

SEQ ID NO: 148782 - DNA, 516 bp, Enterobacter cloacae
atgattatcaaaaaatttcgtctggctggtactgaagtcattgaaggtttcagtattgctaatttggtttctgaagatggtaaagactggtatgagtcacaggctttatttaatgcagataaattaaagtttgagtttgatgaaaacggcgtgattacacggttttcttacgatgtttctatgctgtggccagtagataaatctgtagccgaaatcggaaagaaatatgtgccggaagggcttaatgagaatggtgaatggatgttcgacgggaaaaaaatcattcctgtccccgttgattatgtcgcccaggctgaatttaaaaaacagaatttaatgagtgccgcaacggccgttattgccccgctggaagatgcttccgttctggggattgccactgaagaggaatccatttttttaacaaagtggcaaaagtatagggtgctgcttaaccgtgtagataccagcaaagcgccggaaattgagtggccagaggtgcctgacaatgtggcgtga

SEQ ID NO: 148783 - DNA, 276 bp, Enterobacter cloacae
atggaactgaacaagcgcaaacagttttcaaaagagcagttaatcaatctaacccgtgacgatgttgagttttggcaagagcgtaacgagttaatcccgtccatgcatacgtcaatgcgtctgtaccaggccgaaatcgcgctggcagcgctgaccgcacctaatgatgtaccgcgtattgtacttgatgggatttgtgatttgagcgatggcggcgttaatgcccaggcaatctgggaactgtgtaaagcggcggttatgggaggggcgcaatga

SEQ ID NO: 148784 - DNA, 243 bp, Enterobacter cloacae
atgagctacgaagaaattcctgtagtcattcctggtgaaatcgaatgcagagatcacaatcaactcgcttgcattcgcttccattaccatctcgaaaaaccagaaacacttccgaacgcaggtgaactgttcactgcactaacaccagaacaagcagttgatgttgttcgttaccttcagggttacattcagcgcgtgtccatttctcaaggtcatcttcagaatggtggcaagcccaactaa

SEQ ID NO: 148785 - DNA, 321 bp, Enterobacter cloacae
atgccgcggcgtaaaatcgttgacggtgtgatgtatgacgcagggatgtacatgctggataaagtctcttttttacccggaatccctatgccagcctctcccatatgtgtggtagaaggtaataatcagttcattgttgatacttcattcacagaagtttatgacgatcagtggcttgtagagattgagggtaaaatgagtatccgtacccttacgcgtattccgattaagaaagtcagagttagcggcgttggtatggcatttgattgtggtatcgacgatataaccgtaattgggcgcgttgttctgacgattcagtga

SEQ ID NO: 148786 - DNA, 1035 bp, Enterobacter cloacae
atgactgtaagaaaactcagtgatggccaatgggttgcggacttctatgccgtcaaccgtagcgatggcaagcaagggaaaagagttcgcaaaaagttcgcgactaaaggcgaggcgttagcatacgaaaactacacccttcaaaaagttgaggacacaccttggcttggaaaaggaaaagataaacgccgcctttcagatctaatacatctctggttcgagcgtcacgggataaccctgcgtgatggtgaaaagcgtaaaagcgccatgctatgggctgatgagtgcatgggttctcctatggctactgagttcactgcgcaactgttcaccgcttatagagctaaaaggttggatggccattttgcccgtacaaagcgtgtcactcaggtttcgccgcgcaccatgaacctagaacacgcgtatttcctcgctatatttaatgaattaaagcgactcggggaatgggacgcaccgaaccctttagagaatgttcgccagttcagaacagaagaaagtgagatggcttatcttactgaagagcagattgacaggctcttagaggaatgcagccacagctctgctaaagatttggagattattgtcagggtttgcctgtctactggcgctcgctggggagaggctgagaaattgaagcgcagccaaatttctactggaaaaatcacattcatcaaaactaaagggaaacgtaaccgcaccatccctcttgatccgaatatcatagataaactgcctaaaaagaatggcgctcttttcagcccatgttattacgcttttaggtctgcactccagagagctggaattgaattgccagccgggcagttgacgcacgtactcaggcacacttttgcgtctcactttatgatgaacgccgggaatatattggtgttacaaaaaatcttagggcataccgacattaaaatgacaatgcgatatgcacacttcgctccaaatcatttagaagaagcacttagattgaatcctttaagtaaattaaataagcgagatgtctaa

SEQ ID NO: 148787 - DNA, 1800 bp, Enterobacter cloacae
atgaataaaaataacctacagctttatttagactattatttaggattaaacaccccgggtttcgcggtactagttactggtgaatggggttctggtaaaacattccaagttaaaaactcaatcccacttgaactacaatgccatgtaagtttgtttggaattaacgatgctcaagaggtttataatacagtattttctaaaatgttccctggaaagcatcttaccaagaagctaatcgaaattacaaaagatttatctggtgaattcaaaggtattacatttggtgcaggctcattggctggcaatatacttagcccattaatcaagatgaatgttgatcggaacaaggtaataatatttgatgatctcgaacgatgcccaatgtcgaacaaggaaatatttggtgttataaatcaatacattgagcatcatcaatgtaaagtaatcattttagcacatgacaaagaaactcataaagatttcatcaaaaccaaagagaaaattattggtcacacaatacaaattgaaccccaaattgacgatgccgcagcagttttctttagcgaaaaatttaaattaaataatttcagagccattaaaccagtaatcgttgatgcttttctgaaaactaactgtaaatctctgaggatattgaaatatgttataaatgattgtcacaggcttcttgaatgccttgaacctatccacttaaaaaacactacagcaatgaaggcactttttaatttcttttgcatagtaaatattgaacataaattgggtaatatcagcactactgacatagagaacatttctcaagactacctccaatatgcaattattttacaacgtgaagatgcggaacattctaaacatgataaagcaacaaagaaaagattagctttttacagaaaatataatgacatggatttaagaagtgaaattctggatttgaacttaaccgcaaatattatcgaaactggtgattatccagaaagtgagattcaaaacagtttaaatatgtcaagattttttattcagaaatttgacactccgccatggctaataataattaattataacaatcaagaaagcaccactgttagaacagctataattcggatgtttgaaaagtttaagaatacggaaataattgacataggcgaaatgatacatagtttctgcctttcttatatgctatcagaaaataatgaaatcaattactcttttgatgaactatttgactttcaaatagagtacgttgataaacttttaaatgataacttactctctccaaatcctttaaatcctgatccatttagcgataacttatacgagtcttcctactcatacaggtactggattcctaattcatatgaaacttatgcaaataatattatcaatcatattaaagattcaagagagaaagcaaaaatcaaaagatatcccttatttgctaatgaaattcttgaagcaataggtactgacattgattattttaaaacacttttgataggtaatccaaacgagcatggattatattctaatatagatataatgaattctatagaccctgacgattttgttattcactggctcatgctgccaattgaactatggagcaaagttagttcaattttaatcgctcgttatagaggggcagcacacaacaatcttgctaatgaaaaaaattggttgcaaaaagtgattataagcctactaatcgaagcaagattacataggggattagataaatccagaattgaaaggctggcgccataccgcgctttaaaattcttttag

SEQ ID NO: 148788 - DNA, 210 bp, Enterobacter cloacae
gtgaaaaacgcggtcaacaaatggcaactgccgtaccgcgtggtgacggataataactacaaaatctggagcgcgttcggaaatcagtactggccagcgcattactatttcgatgcgaaagggcaactgcgttacacctcgtttggcgaaggtaactacgacaagcaggaggccgtcattcagcagttgctcaaggaagcgcgttcctga

SEQ ID NO: 148789 - DNA, 321 bp, Enterobacter cloacae
ttgcacggttccgttgacgatgcgctggccgaactggggacaaaacgtaaaatcgccagcgtcgtaccgggatttccgacggcgctctccgtggcgctggaatcggatcttatcgccatgatacccgcgctctatttactcaatcagcaggtaacggaccaggtacacgttttcgagctgccgttcaaaagccgtcgtattacggtatcgcagatgtggcacccaagaatggaacgcgaccctggtcaccgttggctgagagagcaaattcttgcgatatgcggtgtggagaggtcagacatgataaagggcgctgtatag

SEQ ID NO: 148790 - DNA, 1224 bp, Enterobacter cloacae; identical to SEQ ID NO: 132206

SEQ ID NO: 148791 - DNA, 483 bp, Enterobacter cloacae
atgaatacagaaaaacagttttttaaggcgttcgacgaagccagttgggaatttacatatggccatctggataatatggactataacgtcttacaggtaggtctgacagccacgctgtatattaacgaaggctggcgtccggaaaatcgggaagcaatggcgaacgcgattgaacgttatgttgatgaattcggcaataaattaaaatggggttttctgggggatgtaaacaagccagaaccttttgttctagccgacaatttctcaagaaaacaacgcctttcagatcttgaggatgatacggcagatgtccagtggggctcagaatattataaggattatgtcagcgattatcagataaatatatactcaccggcaggatggtttgaacatatccaccgtcgtatatcatgcataaccttctttctaccagtgtcggaattaaaaaaaatggacgggaggattttgaaacgctggtattag

SEQ ID NO: 148792 - DNA, 219 bp, Enterobacter cloacae
atgaatagtcgtcacgtcataggctgcaatacgacggccaaagcgcgcgacaggagtcgtaccactatctccgatcagttctttatattgattagcatagcgagtgagaagcgcgacctgctgatcggcgcggcgcgcaggcatatccttagtcacaaagtcccggaattcattgtaaaggcgcgacaaatccacctcactgcgtttttcagcctgtaa

SEQ ID NO: 148793 - DNA, 2895 bp, Enterobacter cloacae
atggacgccggatcagttgtatacatcatcaaagccgaaacagaccaactgcttaaggccaataagcaggtcgataaattcctttcacaactacagtcatcttttgacggcgcggacaaagcagcggataaccttggcgatacgctcaagcaggctggatcggctattgatgataccagtagcgccgctggtggtatggctaagaatgttgccgccgtagagggtgccattggcaagctaaataccaatatcaactcactgacgcgggctatccttgagtctcgttctggcgtcagtggggccagttctgaatttagccgggcggagtccataattgaatcgctgggtaatcaactggcaattctggaagaacaacaggaaggtagcgccagaggtgctgctattcttgccgcccagcttcgtgccggttccaacgctacggaagcagagaaaaagaccatcgccgatctgactggccgtctgtatgacatgaagaacggtactgaagcaggtgcaaagggtactaaaaactggaaatccaccatgcagcaggcgggttatcaggtacaggattttattgtgcaggttcagggtgggcaatccgcgttggtggcatttagtcagcagggttctcaactggccggcgcatttggtccgggcggggctgtgctgggcgcagtgattgcgcttagctcggtaattgccgggacgctgattacatcgttaagtggcggtaaaaatgccatggaagcccttaaagatgcgacggaggcgatggatcgggtaattaatatctctcaaaacggagtggctgccctatctgataaatacgcgatgttggctaaaacaaatgcagaagcagccactatcctccgtaatcaagccattattgagtacaacgtcgctgtttctaaaataccaaaggctataggtgacgcagcagcgtctgtaatcaactttggcgacaaggcattaagcgctttttcgggtgggtatgcgtcaattcagggatttagtgatcggcttgcggcgcttgaaattactaccgatgactattccgaggcaatgaagcaggcgtacggagctggtcaggcattcgaggctacggcgaacagtattgggaatacagtgggctcagttgcgagcaagtttgggatatcggagcaggccgcatttaaactggttaagcagatggacgaggtgcaaaggacccgaacgcctgaagcacttcaaaggctggttattgaattacaaaataccaaaagctcctccgatagtggtgccagcgcaatcgctacgtttttgaagccccttacagaattagtcagcgccgcgggaatggcgaaagttaatttggctggaatgaatagcgaaatggatcttctgactgccggccagaagaacctcatcaagcagtctgagcgtaaccttgcgctttcaaagctgcagggggaagcgcgcgcacgattgcaggcgcaatatgctgctgaagatgccggatttgcgaaagacgatcctcacgcaaaacgcatggaagatgatgccgcagcgacataccggaatacgcagtcacagaaaaatctccagtccacacaaaagaaaggcgcagcacaggctgaatctatagctcaaaaactggagagactaaaacaacaggcagaactggctgccggttcgacaaaggaactcagtcgggagcaagccatactaaatgagcagcaatcactcggtaaaggcgctacgccggaggatattgctcttgctggaaaatatgcagcggaaaggtgggatactgttaatgcgttaaaagcacaggccgctgctgagaagttaatccctgaaacgagagaaaacgcctcctaccagaaggatgttagtgatttaaaagcggcgcttaatgcgaaaaagatcacccgggagcaatacgacgctgcgtctatcgcgatggagcagcagcaccaggctaatttggctaaaatccgcgctcaacaggtggttactccgcagcaggaatcagccggaatggttgatcctgtccagcaattagccaatcagcacgcgcaggaactggcgcttatccaacaatttgagcagcagggagtaattgcacaccaaaacgcacttgcattaaagaacgccgctgataccgaatacgaacagcagcgcattgaggcgcagtgggaaattttccgcaatcaaagccaggctaacgagttgctggcatcatctctggatggtctgcaaagtggggccagtagcgccattaccggtcttattaacggcactcaaagcctgcaagaatccttcgctaacatcggcactacaatcctaaacagtgttgttggcagtctggtacagatggggatggagtacgttaaaagcgcggtgatggctcagtctgctaacgctaccgccgcaacaagcgccgcggcaacaggtgcgagtattacggcttctatggctccagcagcggcagctacaaacatcgccacgatggggcaggcgtcaactatcggcatggcggctatgtcggctgctattcctgcaatggttgggctgtttggtggtgctcgttacaacggtgggccagtaaatggcagctcaatgtatcgcgttggtgaacacggtaagcctgagatattccaggcgaagaacggaaaccagtacatgataccgggtgacaatggtcgggtgataagtaacaaggatatgcagggaggcggtggcgcagtcattcaccagcagatgaatgtgactattcacacgacaaatggcattacagaggaaaatttacggcagattgaatcccgaatgtataaagttgggagaaaagcggccctggatgagatgtttaaccaacagaggccgaaagggatattgcctccaaggagatag

SEQ ID NO: 148794 - DNA, 321 bp, Enterobacter cloacae
atggagcagttaaccaggctggcggatacaattgcagaaacgtatacccgtgatttgaagcgagagactggcagcaataccgttgaatataacggtgtatcagggcaggtagtaccacaccgtctttcctccgggctggtggataacgttatctctgccgtgtgtgatgacgctgacaaagaggcagcggcttataaattgctgctaccactaattgatattaccggacgtgaatatcgcgtcacggaacgtggtgttctggtgatagaaagtatgatcaggaatggcctgatgagtagcaataaacgtgtggttcactaa

SEQ ID NO: 148795 - DNA, 348 bp, Enterobacter cloacae
atgattaccaaaaacttccgactgaatgcgctggctgaccagtacgcggcggcattgtataaccatatcaccgccaccagcggcggcgagtatttcatgattgatgcgggcggcgagtccgtccgcgtgaacattctgggcggcgtaaagggaatgcgcgaccttgtggatggctacgcgctggaagcaatcaaagagcattatccggcggctcagtgggaaagtatcgggatagcgtacctgtcacgatgcgttgatgctggcgggctgactgatgcgggattagaggcgtggggcgatatgaccgccgacatgggtgcgaccgtcgcagggggtaagaatgcgtaa

SEQ ID NO: 148796 - DNA, 813 bp, Enterobacter cloacae
atgaagaagaatgtctggcaagaaaagggaatacctgttttacccaaagcacccgttccacgcgtttgtgatttgattgagtgtgaattacaggatctgctcacgttatgttcctatggcatgatttggattaaaaggaagatcagcgaggagccagcaagggcaaggatattatgtgctaaggagtttgaggaaaggactattgaaatactgagcacatcgccttttagcagcctatcccttgggtatgaaggaattaacatcaacatcctttcagagcccaaaaaagttgaagattatcctcgaactcatcattccctattggagtttgaagttaaagcttccggagagtacatcttgaagcctctcggctatatgatttcaaagctaactatcgaagcagacccgtccgtcttagttaagttcaccacacacccgaagcttagttatcttcaactggaccttaaaaatcgaagccaaatttcagctaatgagttgtggatcgatagggaagatatcgacaatttatatgcttccaaaatcagtggcgagattattcagtcgaagatatttccagagcacaactcagatggcgcagtgatagaccttaatattgcccgggtgacggcaaagcaaaccacggtgattgtctcattgcttaaagctgtcggggtaacagatgaagaattaaaaggtagcactccaaggctattggcaaagctccagaatatagccgccaagaacgggatcgactttcctgatattgaccctaagacttggagagaatggctttcaagggagggggagaggtag

SEQ ID NO: 148797 - DNA, 138 bp, Enterobacter cloacae
atgcaaagtcgtgcttttgggtacgccttcaatcaatttgggtacatttcatggtgtacccaactggatgacggcaaggttttacaggtattcgcacatgccaaaacttacagacatgcagatccgcgcgtggattaa

SEQ ID NO: 148798 - DNA, 555 bp, Enterobacter cloacae
atgaatcctgattatatttcttacgaaacactcactgcaactcgcgagtcagctgagtgggctttctgggctatggttgcagcttgggtaagcgcaggggcaacgattattactctcggcttcgcttatcgagcactgtccacttggagagagcaggaaaaaacaaaagttaagttagattttagggcttcccttaggcacttgaaatcagctttactctttatgcccgctaatcttgatcccaatgagctagaagctgagcgtgagcaggtcatagcaaaatggttattcaaagacgtggacttcataactcagcagattgagtctggagaacaaaacgtacaaagatttgatgatctgctagcggcatttgaaaattgtatttcagcatggttagcaacagagcatttgtttgatggaactgacttggctagagtttggcttgttattgaggatgatttcgaaaaatatatttgtggtgaaggtagcaagtctccattaatacagtcgctgaataaattaaccgcaactagatttgtatttgactctaagtaa

SEQ ID NO: 148799 - DNA, 672 bp, Enterobacter cloacae
atggcggagtatggcgttttactgacgaccacgagcggggaagtatgggtgaccgctaacagctcgccaatcgctcttcaggcgcgaaagacagcggcacttcagggaacatcggggttcaataccaaagtgacgcacacatttcccgcaggtcagcctgttgtcgccttcgttcattgcacggttgaggtcgaaataactcagacgataagcgggaacaccatcacgattgattttctcagaccgaatgcaaccggcacagcgtacgtttattttttctctattttcccgcagacaaagccagactacgggctggctgtgtgggatgcatcagggacgctgattttaacaaacgaaacgcgcacgctgagcgatgttgtcaccctcggtaccgccggggtggatgccagctcaggatacaacatcaatacaactctggcggggaagtgggcctgcatgcctgccatgctgggactaattaccggggttgtatcggctggcggtcaaccgcagccctactcggccatatacaagagcatggcaaaacttgagggaagcaatacgcggatattcgccaggccgcagacaacccccggcggtaaccttcagaacgttacgtattcgaatctgaggaacgtgattatggccatcaactgcgccaactatgattga

SEQ ID NO: 148800 - DNA, 552 bp, Enterobacter cloacae
atgggtaatttagttgttgaggcaatgattttcgccatgcaggtacacaaagaccagaagcggaagttcacaggcaacccttactttaatcatctatcagaggtggcagggatcgttggctcggtggagcgtaaaagcgacattgttcaggcagtagcttggctgcatgactcgatagaggatcagggaataagccctgacgaaattgaaatgcgattcggtaagcatgtacgcatcggcgttgaggcgctgtctgaccttgaaaccggaacgcgtgaagaacgcaaacacctaagcagggacaggctggcaaaacaaccaggatggatacaaaacattaaggtagcagacatcatcagcaactgctccagtgtgctaatgcatgaccaatcgttcgcaacagtttatttggcagaaaagcgcctgcttctggaggtactgaccaaagcgtcaccagaacttctatccgtggcttggttaatgattaacgctaacccattcgagagatcagccaatgttccagctaattcaacggggtcagatttacgctga

SEQ ID NO: 148801 - DNA, 249 bp, Enterobacter cloacae
atgggaaaggtgacgtttgtatttgagtgtgaagatggcaaagagccgccagttaacgctggcatggagtttatgggaggtaagattgttgcagtctcgtttagtgatgcgcttgagtgcctcgaagaggattttcatgaatgttcacggggtaatttaacagttgaacaaattatttctgatctcaacgagtctggtccgataagcagaaccttgaccggcaatatgaatatcaaaaccattggctaa

SEQ ID NO: 148802 - DNA, 1050 bp, Enterobacter cloacae
atgtccggtggtatttttgttggtatggacaaaaacatcatggatggactgaatgccgtactggaaggccagtcttccacttacggcacaatgatcagcgccatcattgtcagctcttttaccttatttatactctatcgcggttatcagacgctggctggcaaactccggaccccggttgaagatgtcgtctgggatgtggggcgaatgctgcttatcaccacctttgtgttaaaccttgatggctggctggatatggcggtagcggcaatccagggactcaaagacggtatcagcggcgatgataacatctgggcgctgctcgataccgtctgggaaaaggcacaggcgctggggcaaaagttatttaatatggacacctcaacttacgtcaaactgaatggcggccttgccgaggtgctggtatggggcggcgcgattgtcctgctgatggccgccacttttgccaacctgctcgccgaaatcaccatcctgttaatgacgaccaccgcgccgctctttattttctgcctgctgtacggttttcttaaaccgatgtttgataactggctgaaaacgattttcgcggcaatactgacgatcatgttttccgccttatccatccgtatcgccattaattacctgaataaaatactggataccgcagcaaaaacatccgcagaaaccaatatggtgacgctggcggcgcagtgcctgctggccgggacagcggcgggtgtggtggtctggttctccgcaaaactcgccagcgcactcagcggagccgccgtacaagcggtactgcagggcgcagccatgagtggcctgggcggactggcgaacaaatccgccgatctcgccggacccggtataaaaggcggtgcccggatggccgccagaggtggcatggccgccagaggtggcatggccgccgccacggtggctggcaggctcatcagcgcaggcgcgggtaaaaccgtgaacgcctggcagaaacgcgccgccgccatcgaaagcatgaaacgcctgaaccggcagcgtcaccgttaa

SEQ ID NO: 148803 - DNA, 363 bp, Enterobacter cloacae
  misc_feature (316)..(325): n is a, c, g, or t
atgccgattcgggtgcaggacgagctaccagccgtcaatttcttgcgtgaagagaatgtcttcgtaatgacaacttcgcgtgcttctggtcaggaaattcgcccgctgaaggtgctgatccttaatctgatgccaaagaagatcgaaacggagaaccagttcctgcgtttgctctccaactctccgcttcaggttgatatccagctgctgcgcattgacgcgcgtgagtcacgcaacacgcctgctgagcatctgaataacttctactgtaattttgaagatattcgcgatgagaatttcgatggactgatcgtcnnnnnnnnnnatcgtcaccggcgccccgctgggtctggtggaatttaa

SEQ ID NO: 148804 - DNA, 201 bp, Enterobacter cloacae; identical to SEQ ID NO: 112537

SEQ ID NO: 148805 - DNA, 492 bp, Enterobacter cloacae
atgaaagtcactgaaacccgactggacaccctgatcgataatctgaacaccctgatttgtgaagatgatctgctcacccgccaggagcgtgaaaccctggtgcgggccgtggcggccatcggcgccatgaaagcacgcgtcagcatgaaaaagcctacggtaccggcagcatcgaaaccgaaggaagagaaacaggcacctatacctgacccacgctttccgaatgcccgccaggcctgggtggctgaagaggaaactttattactggatgcgctcgatggcgtcccgaatgatgatattggtaagcatcttttctggctttccgagaaactggggagaacgccgttcagcgtcgcctgtaaaatcgcgtcgcaaagacatctgacaaatggctggaaagagcagttcagggaggtttcggataaaattcgtttgtccggcctcagtatcagtgattatctgaaacagaacaggtcagacctgaacgcctga

SEQ ID NO: 148806 - DNA, 1233 bp, Enterobacter cloacae; identical to SEQ ID NO: 112536

SEQ ID NO: 148807 - DNA, 795 bp, Enterobacter cloacae
atggataatctgccagataagaccttcgctgaggataacgtgcccacttccgaacgcgtcctgctgatactccgcatcgttgcgggttatgggcgacctgtcagtgccagcgacttgatgcgggaaaccggactgaataaaagcacgctctaccgcctactggcctcgctgcgccgttggggattcgtgatggaaaccgatgcactttattcaccagggtcagcctgcctgcagttgtcactcaattttgatgtggtaccgctgctgacgctgcatggctatgacgccatgcatcagctcaatacgctcacgcaagaaaccgttgctattacggtcgtgatgcaacaggaagccgtatgtatcagcatgatcgaaccccgccagtcactacgctgctcctttgaaaaaggccgcagtctgcccctgcacagcggtgccaccgcgaagtgtctgcttgcgcatctgcctgccacagtcagtcagcctattttgcagagccagttcggcaacatgttcgaacgccagacgcgtattgaagagcttaaccgcattcggcagcaggggtacgcctgtaccgaaagcgaagtggatgcgggcgtatggggtattagcgtgcctctcctgacgcaaaaccagcagttgctcggtgccctgacgctgatggcaccgattgttcgtgcacaggataaacaccagcagcttattgcggccacgctcagcgcggccgatgccattcatcaacgattacgttcggccttaacgcaggaatcccctgctttttctaatcaatcttaa

SEQ ID NO: 148808 - DNA, 753 bp, Enterobacter cloacae
atgtctttcattaaacacacagtgaaacctacccttcttgccctggcacttatcggcacgtctctgtccgcaatggctgctggtgcgcccattaaagctgttactgacgcgaccttcccgccaatggagtttaccgaaaaccaaaaaatgaccgggtttgatatcgaactggttgaggcgataggcaaaaaactcgaccgccctattcagtggactaacgttgacttcaaagggctgatccccagcctgacagcgggtcgcgcggatattgcggtatcggcaatttatatcactcctgagcgtcagcaggtggtgaacttcacgcaaccctacctggccggtggtctggtggcgctggtgaaagaaggcaacagcaccatcaacagcgccgaagatttgaaaggtaaaaaaatcagcgtgcagaccggcaccaaatccgttgagtggctgcacacccatattccggatgcgcagaccgttgaggtggaaaaaaaccagcagatgttcaacctggtcagcattggacgcgtggatgccgcagtgaccggcaaacctgcggcgtttcagtatgcgcgcacgcgcggaggggtcaagatcctgccgggatcgctgaccagcgaagagtacgggatcgcggtgcgtaaagatgaagcggcgctggtgggtgagatgaatgatgcgctgaaacaactgaaagcggatggcagctaccagcaactggtggataagtggttcccgaatccggtgaagtaa

SEQ ID NO: 148809 - DNA, 672 bp, Enterobacter cloacae
atgagtttagatctgaattttgcaccggtttttgccagcagcgatgcgctgctggcaggcacgctggtgaccattgaaattacactctgcgccctgctgttgagttgcctgctcgggctgcttatcggcgtggccagaattaatccacaagggaaagtgctctacgggctggcaagtggctatgtcgctatcattcgcggcacgccgctgctggtgcagctgtttatctggtattacggcctgccgagactgggcgtcatgctgccctcttttttctgcggcgtgattggactgggcctctactccgcggcttacgtttccgaaattgtgcgcggcgccattatgtcggtggagcgcgggcagaatgaagccgcgcgttcgctgggcatgtcgtcaaagcaggcgatgataaaaatcattttgccgcaggccatcgtgcgcatgttgccgccgctcggcaatgagtttattgcgctgatcaagaactcggcgctggtttcactcatcaccattcacgatgtgatgcagcagggcaataccatcatcagtaatacctatcgcgacctggaaacctatctggtcattgccgtgatttatttcgtgctgaccagtcttaccgtgacggcgctgcgtcattatgaaaaacgtcatcatcagaaaggggtgcagtaa

SEQ ID NO: 148810 - DNA, 774 bp, Enterobacter cloacae
atgaccaccagtgagagccagcaggcgcaaatcagcatccggggtttacacaagcgttacggcgacaatgtggtgctgaacggtatcgattttgacgtactccccggccaggtcattgtaatcattggcccgagtggctcaggaaaaagcaccttcctgcgctgctgtaacggactggaactgcctgaacaaggggatattacgctgtgtggtaaagcgctgatccgtcaggggaagccattaccagagaagcagttaaatgctctgcgccaggacgtcggcatggtgttccagtcgtttaacctgtttccccacctctccgtgctggaaaacctgtgcgtagcgccagtcatgctgcgcggactggataaaacgaccgcacggcagcaggcactctccctgctggagaaggtcggtctgagcagtaaagccgatgcgatgccgggcagcctctcaggcggacagaagcagcgcgtggccatcagccgggcgctggcgatgtctccgagcgtcatgttgtttgatgagcccacttctgcactggatccggagctggttggtgaggtgctgcaggttatgaaaatgcttgccagtgagggaatgaccatgatggtcgtgacccatgagatgggcttcgcccgtgaggtcgctgatgtggtggttgtgatggacggtggaggcatcgttgaggcgggcacgcctgaccagattttcaccaacccgcaaaatgagcgcacccgtcagttccttaatgccgttttaacgcgtcagtaa

SEQ ID NO: 148811 - DNA, 1386 bp, Enterobacter cloacae
atgagtaaccatcaactttttgcacgtcatgcctggcttgaacagggatggcaacaggatgtgctgataagctggaatgaggcgggcacgatcacggcggttgcagccggagcggtaaaacccgatggcctgccatctgtcagctggctgctgccggggatgcccaacctgcattcccatgccttccagcgcgtctttgccggtttaaccgagtatcgccatcatcctactgacagtttctggagctggcggcaactgatgtacgccttcgctcagcatgtcacccctgcgcagctcgaagtcattgccactgaactgtatcgtgagatgctggccgcgggttacacctcggtgtgtgaatttcactatgtgcatcatcaacccggcggcgcaccttaccctgatgccatggcgatgagcgccgcactggtgcgtgctgcaaaggccaccggcattggcctgacactgttgccggtgctttatcagcatagtggcttcggtcagcagccgccggaggcgcatcagcagcgtttcatccatgataaatccgccttcctgtcgttgtgggatcagctgtttgttttgtgccgcaatgccggtgccaaactgggactggccccgcactccttacgcgccgtcagtcctgaggatctgcacgcgatactggcgcacattttcgctgtcgatgcgactgcccccgtgcatattcacgtttcagagcagcagaaagaggtggatgactgtctcgcctggagtggcaagcgcccggtgcaatggctgatggataacttcgatgttgatgcgcgctggtgcctgatccatgccacccacatggatgctggtgagtatcagcgggccgccgccagcggcgcggtggttggtttgtgtcctacgacggaagcgaacctcggtgatggggtttttgacttccagcactggaagctacagcgcggtagctgggggattggctctgacagccatatcgctgtcaatgccgcagaagaactgttgcagcttgagtactctcagcggctgctgttccagcagcgcaacatctgctgtgatgcagaagaaccggatgtcgccagctacctttatcgtcatgcgctgctcgggggggcgcaggcatcgggtcgctgcatcgccgggattgcgccaagacagcaggctgattttgtcgagcttgatggcaaccatcctctgttgatggccatcccagcggaatatgttctctccactcacctcttcgccagctcgcgtcagtcggcgattaaacaggtctggacgcgcggcatagttcgtgacattgctcagacgtccgccgggagcgaagttgcccgcatccgccagaagatgattgcggcatttgccggagaaacattatga

SEQ ID NO: 148812 - DNA, 801 bp, Enterobacter cloacae
atgagtgagactgaacactatatttttcatcgcggcactgaaccgctgtttatcaccatgccccatgtcggcaccgacattccgcctgggatagcggccaggttcagtcgcgaagcccttaccgtgccagatactgactggcatattgagaagctgtatgccttcgcgcgtgacatgggtgcatcggtgcttcaggctaagtggtcacgctatgtggtggatctcaacaggccgccagacgatcaatcactctatcccggccaggccaccacggggctgtgtccggtgatccgttttgacggaggagaaatttaccaaccgggtcaacagcctcaggcagcggaaacggacgaacgacgccaacagtactggcaaccctggcatgataagttgcaggagacgctcagttcactgcgtgaacagtttccgcgggtggtgatgtgggatgcccattccattcgctcggttctgccacagttcttctgcggcaagctgcccgatttcagcattggtaccaatgacgggcaaagttgcgatcctgaactggagcgcagcatcgcagacctcgcgcagcagagtgctccctttaccatggtcagcaatggtcggtacaaaggaggctacattacccgacactatgcggcgcctgaccgaggtattcataccttacaaatggagctgactcagagtgcttatatgcgggaagccccaccgtggacgtgggatggtgggcgggctgtggttttacagaagcgactgaaagagatgctgggcagtgctttattgtttgcaaaaacataa

SEQ ID NO: 148813 - DNA, 603 bp, Enterobacter cloacae
atgaataacgacaacctgaacgttagtcacctggcgtggtgcggcctgattgcgctgcataccgcccgccgcgacgggatcgtgacttcacccgcacaggacaacctgtttctgacccgctggctggccaccgccgaaaaacagcgtcgctttccccgggcgctggcgagtgacatcagctggctgctgaaggaggggcgggagaagggcctgcgcgccgacctgcccggcaagctggaatacctgtggcgcgccggaaacggccacctgcaggcgcagaacgacctgttccggctccagcacgccctgcacgccgttaagctcaccggctggatttatatggtgctgtcagaaaacgaatggagcggccgccgccagctgcggctcagcccgtccgtttccggtaattacctccggtgcagcgcactggataacggctttgacgaacgtggacggcagcacagtcccctggacgcgcgcataaccggcgacctggccgcgctggatgagctgctgcagcgttcgggctggcgacgcgaggcggccggaggttatgatgaacatcagcatcttctcctcgcggacggattcagtgcagagtga

SEQ ID NO: 148814 - DNA, 234 bp, Enterobacter cloacae
atgaacaggcatgaagtgacgtctcagctgtttcgcagcgcgggctacgatccgaccaccggcgtgccggagctggagtaccggaacggcgcgtgccggcgctggctcgcgctgccggcaaaggtgtatcaggcgttctgcgcggccgcggacggcgacgcatttttcaggagcagcatcggggggcgctatatttccctccggggcagcctcagcctgcggcgcggcgtctga

SEQ ID NO: 148815 - DNA, 156 bp, Enterobacter cloacae
atgaaagtatgggttgtaatctcaggcactccgtacgaatcgtcggaagctatcgaaggtgtctactcctctgaagaaaaagcagaagaaaagctttcaacgctcaagaatgactctctcaactacgcatacatggaagagtgtgaggtcgaataa

SEQ ID NO: 148816 - DNA, 204 bp, Enterobacter cloacae
atgagcaaagcaaagattaacaatactgttcgcatctcattcaccgtgattgatgaaaatggtgaagaaactttaaatcgcgattactttctgccgtttgagaaaattaagcaggcgagtttccctgttcttcctgacgttgcgcagactgaggcgcaaaagtttcacgaagctgctgtgatgatggactgctttggaaagtag

SEQ ID NO: 148817 - DNA, 225 bp, Enterobacter cloacae
atgagcaaaatacagtacccaatgactaccgctgctgtctttgatgacgtggtgtatccgatccatcttgatggagctcaccagatagagcgcgaggtatccggcgcaatcaattggttttgtcgctggaacaatgaggaaaaagctgtagtgaaagcgcacgtccatttcagttgctggggcctttacctgacgtacgaacagctaatggcggaggcagcatga

SEQ ID NO: 148818 - DNA, 549 bp, Enterobacter cloacae
atggatattatcttcagggtattctcgtggggtatgaacatgatatggaaattggatgtaattgactggaatgtgatagctgcgatcgcttctgcaattggggcgtttgcctcagcttgggcggcgtttaatagcaaaaccatctcgaaaaaagcacttcaattacaacaaagaacttttctctatgaagcgttaagggcttgcgcagacagggcaaattcatcggcaaaaggtaagagtggatcggaatggagcgttaatgacgctgctgatatcatcagatgcttagttagggcgatggagattatccagcaagatacccagcagaaagaaagcaataaggcattgatgcttaaacagtactttgtaaatctgctgatcatggagttatatgaagaagtgcacaacggtgatgctgctgattctgtatttaaaaccatggagcctgcgagggtcattgataatttatggagtcaatgggatgctgctgtcgcgttctttgatatttggaactatccagttgcgactgatgaagatttggcagactaa

SEQ ID NO: 148819 - DNA, 1851 bp, Enterobacter cloacae
atgcttgagattcacacaagttctatcgtcaacacggtacgttttcaagtttcgaaagaggacattgcagaggcgaagaaagccgctgatgatcttcaacgccatttttctaagattaaagacccgaaaattcgttttcagaatcaaaagaaaaacaggcagaaagctcgtaaacaagccgatgatgcgaagtttaatagctctcctaagaatacggctgaaatgaaagcgcagcgtacagcagagaagcagaaagccagggatgaaaaggccaatctgaaagcgaagcagcagctacagaaacgacaggaaacagccgagctaaaatttcgccatgcagggctacaagtttcaggaattaaaggtaaatacgggcttgatcctaaatctctgtatgaagcgttacgttatattcatcagcaaagcgaagagtttgcgaaggggaatattagttctcaacgtatgaatgcgcttatacgcgagcgtgtaactctgttacgcagagaagccgcacaacaagcgaaagtgacacaggcacagcgtacccagtatgccgcagcagccactaagctaaaggctcagaagggcgggaatgctcctatcgtcggtggtggggtattaggaagccttgcgttaacggcaggttccctcggagtggggcagcgaattattgacaaagggaatgagaatcttgagcttgtccgtatgtcggaacgcacgaagttgaatccaaatgcagtgaaatcgattgtcacttgggggcagcaacacggggtttcgagcgccaatgtggacaagatcacggacggcttcgggaaagatacccgcgaaaaaatcagtgaaaccctgatgaacagccaattcgataagaagtctggtggctataagggcggcaacgccaacatagaagaaatccttaacaagtttggttggaacaagtcgcagctttcacagtacgaagacaacccgctcgattttctccaggcaactgttaatgagggacagcggcgcggatattcagatggagagcttgctcacttgctggaaaacattttcgatgatggggcgcactatgtagacctgttcaagaataatggcgagcagtttatttctaccctgaaaagccttgttgaaagtggtcaaactcttaacgacgagcagatcaagcaaacctacgcttacggcgatctgtctgtggtaatggataatctgatgaatggcgttgattcagctctattcactggctttatgtccagtttcgccgatagtggcgatgagctggtgaaaaatacacaggcaatcaatcagagtgcagggctattaggtgagggattaggtaatctggcatctcagatgacaggatttgtttctcaaatatccggtgtagtgtctgatcttaacagtgctctccgctcgcgctatcctgaatggtttagcgatactaagaaacctgctgttcaaaatctttatgatggtgctgtgggtggctctgcgaatgctacagcggattggattcaggataaaacggggtttgatactcgctctttggctccggctattaaatcattgtttggcattggtaatcagcaagcagggactgcggcgaatcaatataaccttgcaggtgattctctgcgtgattctgcaatgtcactcagcagcaacgcgccagcgtatacgctaaaccctacattcaatctaaccgttgcaccgtccgtaccactgacaatccaatctgatacaggaagattagcggattatgtagatttccaagcgagagcttctcaagccagctttgcacagtcgttaacgctgcaaatgtcatccggtcaatcgtcaacaggcgggtga

SEQ ID NO: 148820 - DNA, 2208 bp, Enterobacter cloacae
atggatacacttaaatggaccgggagaaaacagcttcctctcacccgacagacagagtcagcggaatgtggtctggcatgcctggtcatgatggcctgctggcatggtctgcaaacagacttacccacaatgcgcgaacgtttcagtatcagctcacaagggatgaccctgcagagactgactgaatgtgtggccggtatcggattatccagccgggcagttcggctggagcttgaggacctaagatccctttctctcccgtgtattctccactggaacatgaatcattttgttgtgctacataaagttcgcggaagcaggctggttattcatgatccggaaaagggaaaagtaacgctctccctacaggatgctggaaaacatttcaccggcgtcgcgctggagctgatgccagccagtgattttaccgctcgggatgaaaggaaaaaaatccatctgcgccaactgacaggtaaaacaccgggtctgttgtcggcaatgtcgcgaattatcgtttttgccgtggcactcgaaatcctgacactgggaagcccgcttctcaaccagctggtgattgatgaagtcctggtggctgccgaccagagtttgttgaccgtcattattattgcgcttctgctgatgtcactgacccagatgctgctgtcactggcccgccagtgggcgagtattacactgtccgtcaattttaacatgcagtggacagcacgggttttccatcatctggtccatcttcctctggcctggtttgatgcacgcagtaaggggagtattaatgctcgttttgaggcggtagataccatccagcaggcgctgactacgcaagtgctggaaggtattctggatgtgttgctcgtggtgactgcgctttgcatgatgctgctgtacagtcctgaaatgacattgatcgccgtacttgcagccattttctatggtgtgttgagggcactgtggtatccgtcccttcgacagtcggcagaagatgcctgggatgcaagtgccaaggagtccgggcattttcttgaaacactcaacgggatcctcagcctgagaattaacggtgtgacggcacatcgtgaggccgcctggctgaatctcaacgttgcccgcagaaatacgcagttgcgtcagagccgtctgctgatgtgctatgacattgctcacactcttaccggcagcgtggtatcagcaatcattttgtggaaaggcgccggggaggtattgaatggaaccttcaccgtcggcatgctggttgcttatttatcctatcagacgcgtttttcttccagtatcagtagcctgactgataagtttttttcctggcgtatgctcgatgtttacaacgaacgactggctgatattgtactgaccccgacagaaggccttcagcaacagccttttcgtgagcataacaacgcttcgcacattccttctgtatcccgcagggagatgaatgaatatgctcatgctcctctagtacttgagcacatcatcttcagccacaagggaggggaaaatccgataatcggcggggtgtcgctgacactcaatcccggagaagtcgttgccattacaggtaaatccggatgcgggaaaacgacactggtgaagcttatccttgggatccacatccctgatgagggcaggatcagggcatttggcatattgcatacgcatccggattattttcaggttcgtcagcgtatcggtaccgtactgcaggatgaccatcttttcaaaggttctgtagcagataacattatttttttcagtgatgaccgaaattatgaacgaatgatccagtgcgcaagactggcacttatcgacagcgatgttatggcaatgccgatggggtatcagacgctgattggtgaaaccggcggagggctttccggaggacaaaaacaacgcattctgctggcaagggcgttgtacaagaaaccgggattcctgttactggatgaagcgaccagccaccttgatgttgagaatgaaatccggataagccagaccttacgtcaactggggcttcctgttctgctgatagcccatcgcccggaaaccatagcctctgcagaccgggttttgtatctggcagacggctacttaacggagctgaatctccagcatacagtcaataatggcgagtctgtttgtgaatatactaatgacgtgatggcaaaaaattaa

SEQ ID NO: 148821 - DNA, 696 bp, Enterobacter cloacae
gtgaacgaatataagattaagcatcataaactaatcaggtcggtattgaataatttcaatgccgactttttttttgctaactctatttatttcggagggggaactcgtattgcccttgaaatagatgagtatagagaatcgatcgatgttgattttttgtgccctgataaatcatcttatcgagccgtacgggaacaggttacatccaactcacttggcaacttagtaaaacaagacttccagtatgccagagaaataatgtttgatagatatggagttcgcaccttcataaaagaacaggacgcaacgataaagcttgagatagttagtttcgataactacgatttagtagctgatacgcgcaagttgttccctattcctttcatagatcaagaaagctgtttttatactaaattattagcaaattcagatagatgtatgcatgggcagtgtaaggatatttttgatattttggctatgtatgatgcgtggggaggcataccacaaagcgcaatcacaaaggccgaaaaacattatggttcttctgttttaagcgatctaatccgctcgcttaaagatatacaaaacaatagtgctcattattatgagcttgccgatgctatgttaattcaacatgattttgctcaaaaactcattggtgatgttgctccacaggtactagcaaatctatcttaa

SEQ ID NO: 148822 - DNA, 207 bp, Enterobacter cloacae
atgggtgaaattattcgaggcaactatcctgaactggataaagtgctgtgggattttcacactcagaaaattcccgcaatgttggcttttcgtatgtacgaagagcgttggaattttgttgatgaaaaacatataggtcaaaatgaacgccagttgattgatgccttaactgatttttacggtaacggtgtctttatggctgcataa

SEQ ID NO: 148823 - DNA, 132 bp, Enterobacter cloacae
atgccacaaccggtttcgtgtcaaaaagtgctattcctgcaattacccttcaattatattgttgtgattaccacacacggatgtgttggccatctcctgatgggtgccaccggcgctttaacgtttctataa

SEQ ID NO: 148824 - DNA, 2244 bp, Enterobacter cloacae
  misc_feature (2155)..(2164): n is a, c, g, or t
atgattgaatattttgcaccaggagatcgccctgatgagtcggggcgagaaaacctctacccacagactgtatcgttgttaaaagcatgcgaaaacaacccatacataattgttagggaagtacgaatttctgagacgagcccaactcgttctgaattcatcgttattgatgccgctgacggaacggttgcatcaggtaatcaggcgggtattcgtcgtaaagaacgcttagctattgaggttaacccaagtgcagaacccccggtccttgttcttgcattgcgcaaagattttcctgtcctttctcatcagcatgccagtgaacctaactcacctagaattctttgtctttacgaggtatcctggagcgcggtagaacgtaattggacgccagagagattcattcagcgaattctctggtggctaagggaatcggctgggatgggtctgcatcgggaagatcagcccctggagcagcttttttatctgagcccgtaccagctaattttgccagcaaaccatctcgagtattttaacgcaaccggccgcaagctctgcatccagaaaatcagtgaaggtcgaccagtcattttaagggctgtgcctgaacaggttaaacccactgctatgccatttcgcttattagccctttcagttccgcctgtcgatgcttcggtggttgccgtctatcctgatgatcttggaaaattagaaacgcagcttaaagcctggggaagtgagcttctcagtccactgactaatactgtatatgaagcaatacctgaagagggtatccgaccggcatcaggttcaggcgaaggattacttatactgctgtggatacctcgaattagggatgggaaaatagaacgtacggatataatgggctatgtcgtacaaagttcattcagcgaactagctaacgcactggacatcttgggtcccaaaaatgagcatggaatacagcatcgcgcacggttgcttggcgggcctgtcagtacggaatggcaagcactcccgcttgaacccgtcgaaatacgttcggccctgaatgctgcccaggcgagagacatgtctgctgttgatggcgccagtgcatcattctatggcattctggctggtgttggcgctctcggtagtgcattagctgaaatctggaccagaattggatggggcaaatggacttttatcgatcctgaccgacttcttccgcataatttatctcgccatatcggtgaggattgctatattggactgtataaaccgcatattgttcagcatttaactcagtctatttatcctaatgagcctaaacatcaggcaataaataaaagcgttctcgatgacgatgatgaaattgccagtgccatgaaagtggccagcctggttgtggatgtcagtaccacctttgaagtgccgagaactctggcactcagggatgatgccccaagaacggtcagcatgtttctgacaccgtcagggctgtccagcgtgatgttgatggaagacaaggataggcaatacagaatcgatgcgattgaaggacaatactaccgcgctattttagaacatgaatggggcactactcatcttcagcacaattatggcgatcgctgggttggtggagggtgtcgtgatatttccgttcgtatgtcatatgaatgtatttatcttcattcaggtatcttgtcacgccagctccgccaaagtgtattctcagaaaatgctcgcttgtgtatatgggcgtctgatgatatctcaggtactgtgaatgctcatgaaatagagctttttcctgtcgtgtctgtcgatacaggggaatggactgtcaaatatgaccagggcctgatgcaaaaattgcagcagatccggcagcaggctcttccaaatgaaaccggtggggctattcttggagtaacagattttaagaacagaacgatagttctggtagacgtacttcctgaacctgccgacagcaaatcatcaccaacttcttttgttcggggggaagaagggcagcaggaatcactggagcgtgttcaacgactaactgcccgcgttgttgattatgtcggagactggcattctcacccccaaggttatacagcaaaagccagtagcgaagatgaaaaattaatcgaaaaattacatcagnnnnnnnnnnatcagaaaatgagcgtggacggattacccgtcgtcatgctgattgtagcgaaagatgatattaatattgtggtcaaatga

SEQ ID NO: 148825 - DNA, 1161 bp, Enterobacter cloacae
  misc_feature (1109)..(1118): n is a, c, g, or t
atggctgcaaaagtaactttcttccaggttggcaatggtgatatgactctggtgcgtttagccgacacctcaggaacatcgattctgacggatgtacacatccgctctgctgccgataaccccgatgatgacacagccgatgttgcctcggccttacgtagcagactcaaagatgacaataacggacgtccatatgttgatgtctttatgctgagccatcccgatcaggatcattgtggcggtctgcgtaaacacttctggttagggtgcccagaggactacccggatgatcatttaaaacgttcagagaagcgtatcgttatccgggagttgtggtcttcaccattgattttccgtcgccgctcaaaaaaccatacgctctgcgaagacgcccaggcatttaatactgaagcacggcgacgtgttaaatactggcgtgaaaatggctatgcgttgagtggcaaccgtattcttatcatgggtgaggatatcaatggcaaaaccgatgatttgacggccattcttgttaaagcgggagagacctttacccgaattaacgggcaaacttctgatgtgttttctgcacaacttcttgctcctgctccccatgatgatgagagtcttgaagaagaactatcaaaaaatgaatccagcatcgtgatgaaaatgaagctgaaaccttcgacattttcaagcgattcaatgcagtttctgatgggaggagatgcagaggttctcatctgggagcgattatggaatcgttacgaaagcacaccacaagttctggagtatgatctcctactcactccgcatcattgttcgtggcattctctttcccacgatagctggtcgatatggggagagagtgctgaagtgtctgaatcagcacgtaatgctttaggtcaggcccgttccggggcaacgattgtttcgagcagcaagaaaattgttgatgacgagctcgatcctccgtgtatccgtgctaaacgtgagtacgacgatattctggaaaatgctgatggctggttcagctgcacgggtgaccttaaaaatgcagcagtccttgaatttggtgtcgcgcgtgacggaaagctactccctgctgttgnnnnnnnnnngcagcaagtgctgctacggcagcggctcctagggcgggtgtaa

SEQ ID NO: 148826 - DNA, 855 bp, Enterobacter cloacae
atgattgaaaaaacggtgcgaactggccattggggtcaggagagacgacttgaattcatcgattttcgcctgcgttgggaggggcgactcaaccgtgcggatatcacgacatttttcagaatttcagtaccgcaggcctcactggatttggctaaatatcaggaagttgcacctaaaaacatggtatatgaccggacgcttaaggcatacattacgacgcctgattttaaacctgtttacgaaaattttgacagtaaccactatctgaatgaacttctcgggcgcgaaaatgaaatactggatccttgtgatagcttcattgggtgggttcctcccgtcgcgagtcttcctctgcctgcaagaaccgtagagcctgagattctggtttcgctgatccgggccatgcaaaatgagcaggctcttgttgttgattatcgttcgatgacgaatgaacctgctacacgcacgctgtacccgactgcattcgcccatgacgggcacaggtggcacattcgcgcctactgcttcaggtctgcaatgtttaaagacttcgttcttggccgattttttaacatcgcagaatttattaccccgccgacatcaattcccgaggatgtggactggaatacatacatcgatgttgttatcggtcctaaccctaattatgatataaacaagcgtctttctattgagcatgattatcaaatggtaaatggcgaagctaaaattcgcatacgtaaggcgcagttatattatcttaaccgtcggctgaatctggatgtaaaaggcgatggtgcgactgatgatagacagcaaatcatcttactcagaattgaagagactcatatttcttaa

SEQ ID NO: 148827 - DNA, 180 bp, Enterobacter cloacae
atgagaggtagcctcagtacgtcagaacgtcgcagagagtgttacaggctgttttgtgagtttcttgtggctatcttctctggtggcaagttctaccacaaatttcaattaacagcaaccatccatttttggtataaagcacgtaatgcacttgactttttcgaagttattgaaaaatag

SEQ ID NO: 148828 - DNA, 834 bp, Enterobacter cloacae
atggcaaaaaccctcgccgagattaaggcagactaccaatacaccgacaagaaaactggtgaagtaaaagatcgtacaattaacaccccacattatttccgagacattcccagaatttattctcccaacctccaggatggttacatggacttttgccccaaggcgcaaaagttgtactgctattttcagggatgggaaaactcagggaatttctgttacgaaagtcaggcagaacttggaaaggtgatcgatttatccagggagagaacctgcaaactcattaagaagctgcaagatgcagggctaatcacgaaagagaaaaaccctggttatcgttccaaagtttaccgcacgtttccgatcactgatgcgcacattaccccaccagaagcactggcagtgcagcctgatatcatttctgacgtagtgacacaccaggcagcgcctgaaccagctaccgcagaggaaacgcaggatgatgcgccgaattgggatgcaccagaacacctggaaccgccagcaccaacaatgactaatgtcatagaggacgctgtgatcgttgctgagggcacccatgaaagcgttgcaacaaccacggaaagcgatcaaatggtcattgatgatgatgtgattgttgaggctgtttgtgagcggctctcacgtcccgaaagtctgagacaaagccaaagattcgacacatttacagcgtatgcgcgtcgtgtcctacagaatgacggtaaacgcctaccaaaaagaattgaggagaggttagaggaacgctttgaacaacttcacccgcatctttattcaagattcgacccaataccattttaa

SEQ ID NO: 148829 - DNA, 381 bp, Enterobacter cloacae
atgtctaagaaagaacggaacacgctcacacgcattgagcgagagaacaccaccagagttaagccttcccgcctgtacgtaaagtctcttgaagaaatccctggtgaactaatagaacacgttgaagaagtgcattcacaaccgccctctgtggaagagtgggctgctttgaatgatatcctcacttcctgtcctggtgcgtattaccgcccacgtaaacggaaggtttacacctgggatgatagccagcttaaaaaatggcagtgcctcggtttcacctctttacgtcattacctcacattcaacgcaatgaataacaccgtggcgggagtcagggattttgatgaactatttaacatcggagacagctacacagaataa

SEQ ID NO: 148830 - DNA, 258 bp, Enterobacter cloacae
atgaaccacatcgaatttatcgagaagcatgtacgcgatgaactgatcaaacagggattcaccgtagcggtggctcaggggggggcatttcaggccgtcgatatgtacaagcgtatgtcacaggccagtcgcaaggggaggattttcgatgacgtgttacgacacgcgaaactttgggcggagaagcaacaggtaccgtcagacaagttcgaaaagaagcgcgttaagcgtgtgcagcagcagcctggcctgctctga

SEQ ID NO: 148831 - DNA, 1149 bp, Enterobacter cloacae
atgaatcagaaatggaagacgctgttaatatcgatattaacaccgtcgggtatcatgtcagggattgcgctgacagtactctggggatatttcagtcgtctggacagactggatgttttctttgaggtcatgagtatcaagagtatttttgttctggttttcctggcagcaatgctttcgttagctctcctgttatttatattttttgtgatctcgctgtttattcctgttgttattcctcaggatatgaataatttacctgcttatgataaaatacaaaataaccttttaacggtactgatgatttccggtatccttcctgtaatcttcatttatattttttactacgtgctccatgtcagtcaaaaagttaaagattattccggctggatatccatgataagtatcgttctgatggccatcatcatttcagctttgatgaccagaaaacatcttgaacgggatttatcatttaaaaacagaacgataaagtggactcgtagagggcagatttacctgttaatcccaatgtgtatagcctttctcgctcatttacaggtgtttccactggaaatagtgttcagaaatatcaacgcacctgatgaaaaagttaacttctggacactgaccggactggccttcatttgttacatgttgtattttgtatcactgttaccaggtctcgtatatcttcgcatggatgcaaaaagtaatttacagaagaagataagcacctcccttatagcatcattgatggttttatttctcatatcaaccaaaatcaccgtggtcccggtaattttcactcatgcagttatcaaattttccggcataagtgatttcaccgcgcatagttatatcataaaatcagatgaatatccggaagaattttttagtaatccgatatgggaacagaaagaaattaaaccaggaaagtattacaaaatccaggctgtctctatgtttacaaccaatcgatttaatcttctttgccctgtggaaatcatagaggcctaccgtgcaagctggaaattcaatccatgggatacagagtttgatagtgatgtaagacgtaagcttcaggaaaaagcctcttactgtgttccggtatcagcatctgcgttaaaaagatgggatgttccattataa

SEQ ID NO: 148832 - DNA, 333 bp, Enterobacter cloacae
atgaagactttcaatgagtggatgaacgaaggacgaaagtgggaagggttccgtttctttaaccgccgcatagtatgcgctgatggatatagcatcagcattcaggcgaacaactcagcttattgccagcctcgtgaggacatcgaggatgtggccggatacgacagcttcgagcttggcttcccaagtgaagtcgacaaatcaatcctcgcgtatgccgaggatgagagtcagccagtcgacaccgtttatccatatgttcctcgagaactcgtagagcggctaatagcagggcatggtgggattagagagtttgcagccaaagctgcttaa

SEQ ID NO: 148833 - DNA, 363 bp, Enterobacter cloacae
atgacacgcagaacagcattcaatgggtcagcatcaggccgtcgccgtgagcgtcgtgcagcgttacagagcgcagttgcggtgagcgctgagaagatgcaccgccctactctcagtcgtgcgcagattcaggccaaaggcactcacgaaacaccgaagcgcatcgatgatgcaaaacctctcaagtttatggctcaggacgcattctggaatctcagggaatacaagctgcaaattgagcgggcaacaatcctctatagcaacgagttctggaataagccgctggaaggcgggatgtgcttgccagatgtggccatatatgcggccggtcaccgcaagagcaaatcaatcacagctcgttga

SEQ ID NO: 148834 - DNA, 180 bp, Enterobacter cloacae
gtgtacgaactgaaaaaggcggtgaccgaatccggttggctgagcgattcgaaggtgaaggttccttgcactaagacgctggtgatcgccaataccgatgcgggtgatgacatgctggaaacggcctcgactgtcctgttgaaaaacctgagccgggtgctcggcaccaacggtaaataa

SEQ ID NO: 148835 - DNA, 1023 bp, Enterobacter cloacae; identical to SEQ ID NO: 94639

SEQ ID NO: 148836 - DNA, 528 bp, Enterobacter cloacae
atgacagatctggttggcacgcgttttgtcgtattgttatctgaggatattgataccgtttgccaggcaattgaatcgctaactgaatttgatgctagaatatcgaaaaactatcttgatgagatagaattaaatcctaagctatttgattatcaatcaaaacattacgaaatacgacccaaaaatgagttacatattggcgatttgaaaatcagtaaacaaatatgctgtgaggttcaagtaagaactttactgcaacatgcatacgctgaattagtacatgatagtgtctataaacctgtgggtatagttccaaaatctgctgagcgacacatagctcgaagcatggcacttatggaaaccacagatgaccttttttgttcaactatgaaattactatatgagactaatgttgaacgtaacaaattcaataattctttatctgaattatatagagagtttgttggtactgggtatatgcctgtctcttatacacatctgacgctgccgacgatctactctgtgtag

SEQ ID NO: 148837 - DNA, 663 bp, Enterobacter cloacae
atgaatggagtagacaatcagttgtttacaggctggatgaaaggctttgccgatgggggcgacgatctggtaaggaaaaccaaaattatcaccgaagcggcgggaatgcttggagagggcttaggcaatctctcgaaagaaatcactgggtttgtgggtgagatttccagtgttgtgagtgatatcaataaagggctgaaagaacgtttccctgtatggtttgctgaaaaagataaaccagcggcccaggctctctatgatggtgctgttacaggctctgccaacagtgctgccgattgggtgcaggacaagacagggtttgatacccgtagtgtaggtcatgctgttaaagattggttaggaatagatgatcagcctacagggacagcggtagaacaatacagtctgaatggtgattctctgccagggggatcgcttcgtgattctgctatatcatccctaaccagcaccaatagtgcgccatcgtacaattttgcacctgtattcaatctcaatcttgaggcgtctgttccgctcacaattgcgagtgattcaagtaggcttgcggattatgtggattttacggcgaaagcttcacaagcggcgtttactcagtcactaaccttgtcagccttgagcggtcaaagcagtacaggcgggtga

SEQ ID NO: 148838 - DNA, 246 bp, Enterobacter cloacae
atgccagtaacaattcaggacatcaaagaacatcgggatcattttggtattggtgatattaccgatatggatattgtcgaatataagcggcttttgaatgacggcgcattcttctggataaaccacaacgagattatccggcatacattatctgaagaatatattgctgcaacgccggaacaggttgatgcacttatcgagcagttaaaacgatatcgggagaaaatgagagcagcagggaaatag

SEQ ID NO: 148839 - DNA, 249 bp, Enterobacter cloacae
gtgagtgataaaggcggctataagcctggtgagctggagcaggaaattatcaaatgttttgagggtttcattccgaaagacacaccagcaagatttgcaaaacaggcagcaaaagcgatggcggctatcgatcaggcgattgaaatgggtggagtttcagggctcaagccggaagaggcgttacatcggctcctgatgtcgctcaaatatggtaaagatatgccggaacgcggcgaaacaatccattaa

SEQ ID NO: 148840 - DNA, 264 bp, Enterobacter cloacae
atgtacagcgcatgttttgatctcgcggattatgctgaggaaaacaaatggggaaaaacgacattacggacacgtggatcggatatagacactgcacccttaatcgatctcggcatggtctgttatgagttaaatcaattcgaggaagcgtataaatattttaacgatgcttataactacagcaaagagcgtgcgtttcaggatagacctaaaaaatatctagagttctatctgcgcaaaagggataagttcgttactctataa

SEQ ID NO: 148841 - DNA, 129 bp, Enterobacter cloacae
atggtaaaccagcagcagatcagagaggcccaacggctcgcctcgttcgcggtactccatcgcaatgctccggcgtgggaagaagcaaaacgcctttacgccgtcgccatcgggaggactcttcactga

SEQ ID NO: 148842 - DNA, 450 bp, Enterobacter cloacae
atgaacgaacaagcgaacaaaattctcgttgagctattacagaaagcggcgaatggcatcgatgctgcggtgtcatttagccaggcgcagattccggaagttgtgcatcagttgctggtatggaaattcaccaaaagcatgatgctcacactggttattctggcgactatcccggttgcgattaaattcttcagggtaatgatgaagcgcgagcaggacggagtttatggcgaagagggatattcatgggaacgcggcaagccaaaatatagacctacattggtctgggacaaagacggcactatcagtgcttcctcagtattttttggcaccattatgttcctgtattcggtcatctccttcgtcatcttatctgacctgacgtggctaaaaatctggctggccccaaagctttatctcctcgaatacgcagcctcactaattaagtaa

SEQ ID NO: 148843 - DNA, 180 bp, Enterobacter cloacae
atgagtaatgcggtttgcagtaatgagaaatgcaaaaaggaattcatttactgggagcatagtggcggctatccgggtgggaaggaaaaagaaacaatagtttgtccttactgtggtcatgaaaatggatttgtgatgaccagtggtttgatttcaagtaagaaacttgaggataaataa

SEQ ID NO: 148844 - DNA, 2403 bp, Enterobacter cloacae
atgagtgattcactgttaaacgatgcgactggtctggtcaggcagttgctcggtcagtcacgttatcggctggatgtgcatggctgcactgaatttcttgatgtactgaaattcagttcggtggagactctgagccaaccctggcgatttgatatctccgtgacctcttcctcgccggatattgccggtgacgctgtgctgttaaaacccgcatcttttacgtttcagaccccggtgtttgacgggacgccggctatgccggtacgtaccgtttatggcatggtggaatcgtttaaacgtgtatccacctcaaaagaagataccgtatataccctggcgctggtgccacgtatcgccctgttagcgaaaacgaaaaggtgtgagatttttctcaatcattccgttactgacgtcgtggaaaaagtactccgcaggcacggtctggaaggggcggactttgagtttcgtctgtcccgtgaatacccagcccgagagctgattactcagtggcgggaaaccgatcttgaatttattcagcgactgctggccgaagtgggaattttctggcggttcgaaatggacagccgtcttgaacaggatgtcattattttccaggatagcccggagcagtatcagtttggcgtgaccctgccgctgcgaaacccgtccggcatgagcgacagcgggcaggaaagtgtctgggatatccataccgcgtaccatgttgtcagcggcggggtgactacccgggattacaactaccgggatgcgctgacgccacaggacagtacggtcagcgtcagcgggcggaaagggatcaccacaggtgagatctatcattatgcagagccgtttctgacagcaggcgatacggaaagtcctgaaaccggtgcgttctttgctcgtctgcgccatgaacgcatcctgaacgaacagtataccgtcagtgggcacagctcctgcccgcatctgacaccgggccaggtgctggaaacggatgcaggtctgccggaggtgttgaaggacgggatagttatcactactgtggaagccagcggctcgcgtcaggacagtttccgggtgaagttcgcggggatcccatacagtgaaacggtctgttaccgcccgaaatcgctcaaccgcccggtgatctccggttcgctgccggcaagggtggaaagcatgcaaaaaggcgacacttacgcctggcttgattcacagggacgctaccgggtcaggcttgactttgaccgcaacagcactgaacagggatatgcgtatctatggctgcggctggcaaaaccgtatgccggtgatacctacggctggcatgcgccgttgcttgacggcacggaagtgtcggtgatgtttgacagcggggaccccgatcgtccgtatattgcatatgccctgcatgactccgaacatccggatcatgtcactcgtgataaccatacgcgcaacgtgctgcgcacgcctgcaaataacaagctgcggcttgaagacaaacgcggtgaggagcatatcaaactcgccacggagtacggcaaaacccagctcaatatgggccatctggttgatacgcagcgctcacagcgcggtagcggttttgaactgcgcacggatgaatatggcgcggtccgtgcggcgaaaggactttatctgtccgcgcatgaacagccgaaggcgcacgggccggtactggagatgagtccggcggtgaatcagattaacaaggctaacagccagatgcaggcgctgaatggcgcggctgaagcagccggtgcgctggtgtcggatatcagcacgcaggctaacctggtctcggaacggttaagagaacttcagtcggcggtgctgctggccagcgccccgcagggagtggctgttacctccggtgaacatcttcaactgaccagtacgaagaacaccatgataaacgcaggtgaacaccttgatatcggtgcaatgaaaaacctgtcggtttcggtggagaaggcgctggggttgtttgtgcataaggaaggagcaaagctggttgcaaaccagggggatgtggaaatacaggctcagcacaacaccctggcgttgtttgctgaaaagcaactgaccgtgacgagcagcgaagatgaaatcatcatcagcaccccgaaaacgctgacgctgaatggcggcgggtcatacctgaagctgaaccagaatgggatagagcatggctccgaagggatgatgataatgaaagtggcgacctatctggttcctggtacaggggcgtcactgaagaatgtcgcgcaggtattcgaaagaaccagcctcagccagatcccggtttccccggcagagcaacagcaggatggaccttcagtaatacctgcgcagcggcgcggacgtttctcacgctaa

SEQ ID NO: 148845 - DNA, 834 bp, Enterobacter cloacae; identical to SEQ ID NO: 147922

SEQ ID NO: 148846 - DNA, 1770 bp, Enterobacter cloacae
atggatgatttaaccctgcgctattttgaagccgaaatgcgctatctgcgcgaggcaggaaaagaatttgcccgggcacatccggaccgggcggcaatgctcaatctcgataagcccggagcccgggacccgtatgtggaacgcctgtttgaaggctttgccttcctgatgggccgtctgcgagaaaagctggatgatgatctgccggaactgactgaaggactggtgagtctgctgtggccgcactatatgcggactatcccgtcgctggccatcgttgagttttcgcctgactggcgtggtctgcgtcaggccgaaatgctggttgaaggcttctccgttctgtcacgtcctgtcgggccgcataaaaccgcctgtcagtaccggacgacccgcgatgtgccgctacaaccgctgcaccttgcagatgcccgcctgcatactgaaaacgatggacgctctgctatccgtctgcgtttcgaatgccctgaaaaagtggactggagtaaagccgggatcgacaaggtcgccatattccttaacgcagagagtcctgtgagttctgcgctgcatctggcaatgacccggcgtgtacatgccatgtatgcgcgtcatgccgggacgcatactgaacgtcatcagtttgatggctggtgcaaacccatgggcttcgatgacaatgacggcctgtggaaaaaagccgatacggccttcagtggttaccagctgctgctggagtatttcagcttccgtccaaagtttatgtttgtggagctgcgcggtctcgacactatcgggctcaatgcggccagcacctggtttgaaatcgacattgtactcagtgaagcctggtcatccgatctgccctttgagacggaagacttccggctgcactgtgcgccggttatcaacctttttaccctggaagccgacccgctgacgctaaatcctctggagaacgaatacctgctcaggccattgcgtcttcaggatggtcacaccgagatttacagcgtcgataatattcacggcgcggtcaagaatggcaaacatccttatgtaccgttcaccagcttccgacaccggggcggtatgatgcgccacgatgcccctgaacgttattaccacacccgcgtgaaacgcggtccctctggcctgtatgacacctggttaattctcggtggccgctcgtttgaactggagcagttgtccgaaaaaccggagtcactctcgatgcgaataaccgggaccaacggtcagcttccgcgtaaggcactggaaagtactttgctggacagggtggtcaaatccggcaaggtgcccgtcagggtcctcaacctcacagcaccgacgatgccgctgtacccccctgcaaacgaccgctttcactggcgagtgatgagccacctcggctcaaacttcctcagcatgatggacaatcctgaggtcctgcggggcacgctggcgctgtacgactggaccgacgatgaaatgaaccgccgtcggcttgaagcaatcgtcgccgtgaagcacactctgatccgccgttttgagaagggctttatgctgcggggagtggacattgaggtcacgctgaatatggacaattttgcaggcgagggcgatgtgaatctcttcggcgagatgctgcaccggttcttcgcgctctatgccgatattcacctctttaaccagctcacgctggtactgcaaccgacagggaaacgactgagatggcgcgagaatcacagccagcacgtaccgggctga

SEQ ID NO: 148847 - DNA, 612 bp, Enterobacter cloacae
atgaagccgggcataaaatgcgccggattcggtttccggctccgggtcgctgtcgtcgcctgcttcccggtacggcgcggcgtagcggtagtgctcgcccgtcgtcaccgcatcactgcgtacgctgaccgtcgcatccatcggcgtggtggctgtccggtagttgtaatcccgcgtggcgacggtgccggtgacaatcctgtgccaggtccgcacatcccagaccgattctgccgcaccgtcaaacagacccgatggttcgcggtacggcaggcgcacgtcaaaccggtagttaagctggctgtcggcaaaaatgtacgtatccagaccgcacacatcatccatctccgtacgccagtaaatccccacctcagacagaatgcgctgaatgaactgcaaatccgtctcccgccactgggtaataatttcacgcggcgggtagctgcgctccagccggaattcaaaatcaggcccctccagcccgtgtctgcgcagaacctgctccaccacctccggcacggactggttctgaaatacggcgcactgccgggtgtatcccagcagcgccagccgggaactgagcgtgagccggtagtgagactggtcttttga

SEQ ID NO: 148848 - DNA, 255 bp, Enterobacter cloacae
atgtcggactacaccttcaacatgggtcccctgcgtagtgcgatccatattcagcttcacacccataacgctacccgactgtggaccgggcggcgggcaaccgagaacggccctgcgccaatcatcggaatgccgcgctttatcgaaattctcaatcagatgcgcattgatcctacccgcgtaatatggacacaaccctacgcgaggttctggttttcaaattgttccggactgagaccgccacaggcactgtga

SEQ ID NO: 148849 - DNA, 1590 bp, Enterobacter cloacae
atgagttggacacccaaatctcttggtgacattttagagcaatcaggaagtgaccgtgctggtgagcaggacctgcctgtgctatcaatcaccatgaggcatggcttagttgatcaatcagaaaagttcaagaagcgcgttgccagttcggacacctctaactatcgcattgcgtacaagaatgaattggttgtcggctttccgattgacgaaggtgttcttggttttcagacgaaatatccagcaggcatcgttagtccggcttataacatctggaagttgctaagtgaggcagattgtcatattccctatcttgagcgttacttgcggtcatcgcaggccaagcgttcgtacgcttcacgtatgcagggggctgttgcgaggcgacgcagtctgacaaagaaggactttctcaacttggaaattccgttcccacctctcgacgaccaaatccgcattgcccatctgctcagcaaagtggagggtttgattgcccagcgcaaacagcatctgcaacaactcgatgatctactcaaaagtgttttcctgaagatatttggcaatccggagcgaaacgagaaagggtgggataagcctgtattgaaagactttggaaaaatttccacgggcaatacaccatccagaaatgatcctgccaattacgatggcgatttcatcgagtggattaaaacagacaacattactagggatgctattttcgttacacctgcttcagagtttctttctgaggttggtgcgaaaaaagcaagaatggtgacgaatggcgctttgcttgtggcctgtatcgcgggcagtgtcgagtcaattgggcgtgcagcattaacagacagatctgtgtcgttcaatcagcagatcaatgccattcagcctggaaaagatgtgaatccactgtatttgtatggattgtttaagttgtctcagacctacatacagagccatgccacgaaggggatgaagaagattctgacaaagggggattttgagaagatcacgatgatcaaaccgcccattgaaatccagaatcaatttgctttcatcgctgaaaagatcgaaaccctaaaatctcgctaccagcaaagtctcactgacctggagtacctttatagtgcattaagccaacaagcattcagtggcgagctagacctatcacaagtgccgatgccaataccgtcgatgcaagatgtcaccactgtttctcaagaagagcaagccaccatgcctgccctcgttgtaaaaactgtgtctgccattcatttgcccgataccgataatctgctggctgccttggaaaatgctgaggctcgcaaggcattgattacagaatggctggaagcctatcgtacgcaacttgctgacactccattttccttacaacaattcatggagctggcacagagtcggctggctgagattcatccagacaacgatttggtgctgggtacaagcgactttgaacatatcaaagattgggtattcgaggcggtggcgaccggcaaattgtcccaggtgtttgacgatgcaagcaattgtattgagctcaagtctgttatcgagcaaggtctgatatga

SEQ ID NO: 148850 - DNA, 156 bp, Enterobacter cloacae
atggatgacaaactgtttagtgaattacttgatggtgtgaatgaaatggtcgccatcgaaaaaggcgaaattcagccgcctcctgactatgtttatagccatggcattcctgatgtaaaggcgaggagcactggggttagaagcggatccgattag

SEQ ID NO: 148851 - DNA, 684 bp, Enterobacter cloacae
atgggaagtatctcaaatgaaaaatataacgtagttttagataaattggctcaaatctgccgcgatgagaagttacctgtatttggttttgaccttgatgtgaaacgttttcatgggaaatattacgcttcggcggaacattacgggaaaccaacgaaaccagaagaaatggggcgttataacgacctgtctagtaaaaccggggtttgttactttgcagagaatagcctgacagcgctggctgaaagctatggcagaatgtaccaccacgccaatggagatttcgcaatatctgggcatgcattggatattgcacatatgtatacgctgcacccgaaatccccattgatactggttgatatggcaacacttgcgtcaatgttgcatttaacagcggatcaactaacaggtgttgattactcgctgacgcaagccattactggttacctggcaaattatccagggcgcaattttcagggtatctactatgcgagccggcattatctcacgggaatgtgtcttgctgtgttcgaaccagaggaaggggagttgtttgaaactctggcatccgaaccactcagtaaatataccgagcatcaatcactgcctgttggctggccctataaggacattacagcagaagaaatgcttgtgaagatactgcacttcgacgtgacgctttaa

SEQ ID NO: 148852 - DNA, 642 bp, Enterobacter cloacae
atgaatacacagttagttgaaagggaaagaaaaaaaccggcgtcctcatttaatcctaacgaaatcatagcgaaccgggtcgggcacattgtttcttcagtgtttgcagattttgatgataaatccctggcatctgaaatcctggtgctggaggatctggatctgctggtatatgtcgttggagcctatctgcaaaagaaaacgcggatgagcgaacgtgaaatggacatgttcaaagccaggatccagtcaacagtcaggttctatcagaagctggataaactgggcggtacgattaaggccaaagaggttagtgagttactgggagtaacccgccagaccgttaacaatcaggttaacaaaggcaggctcatcgcgttgcgtcgtggcggagactatctgttcccgagctttcagtttaaaggggctggaatgcttcctcacctggaagatatcctgcaatgcctgccacaggaaactgatgcgattacaagagtttctttcctgaccagccctgttcgcatagatgacaaaggtacagcaaaaacaccgcttgaaatcctgcaaaaggatccatcggatcaggaattgatgctcttacgccgtgaagcgaatctttttgctcgccaaatggcttcataa

SEQ ID NO: 148853 - DNA, 279 bp, Enterobacter cloacae
atgacgacactcaaatctttactggcggcaatcggagttgcgatcctgatggtgcttggtgcgtttggtgtgggccgtttgcgcgggcgcgaacaggctgaagaaaaagccgaccagcagcgcaccgaagataacgcagcggcaacggtcacagcagccgaacgccgggtagaagccacgaaagaggccagcaatgtacagcaaactgttaaccatatgcctggcgacgatgttgatcgcgagctgcgtgacacgtggaagcgtcccgatggtggctga

SEQ ID NO: 148854 - DNA, 492 bp, Enterobacter cloacae
atgagcaacatcaacaaacaggcgctgcgtgaaagcgcagaaagcactatcggcattctggaaaacattgctgggttcgaaccttcagatatcgacggcgacactgtagagcttcgctttgaaactaagggcggattcgataccggttgtgacgtgagcattgttgatcagtgccagaaggccgccgatgtagttcgggcgctgctggatgagctggaagccgcagagaagcgcatagatatcctccgccaggacaaggacaaggttatcgatatgagcacggagcgcgtaagcaaactgctggctcgcgctgaggacgcagagaagcgggtagctgaactgaaggcgcgcgaggtgaagctcccgcagcgctacagcatgcttcatcgaactgatttcgacgagtcgtatcaagcggaaatggtttataagcagcatcaagtgcttgaggcgctgcacgacgctggcatccgcatcaacggggaggactaa

SEQ ID NO: 148855 - DNA, 525 bp, Enterobacter cloacae
atgaaatggataaaaatagtatttgcaggccctttacttgtctctactacgactttttcggcagagtggatcgcctcttacgacaacgatgaaatgcgcggaacagcaacaaaatttctgcaaactgactccgacaactctgtggagtttgatttcccttacaatggcggatccacgatgactttagttcttcggtccccaaaaactgaattgaagggtgaccaaaaagcagaagatcttaagcctaatgaagcaatattattgataagcaagggtcaatttagttgcaactcttataatggttgcgagatttcagttaagttcgataatgacaaaattcagaagtataaaatgagtcctgctgagagtggtcgctcagatgtcattttctttgataagtccaacggctttatcaaaagcatacccaaccacaagaagctcattatcgaggctgatttctatcaggcagggccaaaacaatttaaattcaaccttgaaggttacacgaccccgaaacaaggataa

SEQ ID NO: 148856 - DNA, 159 bp, Enterobacter cloacae
atgacagtaacccacaacagtaagcagtacaccgccaaaaagctcaacgataacgagtggcaactgacgtcggtatcggcaccgcgcgacaagctgacgcttaaccgctggcagatgcatatcgctggcatcctggaacaggttgaggtgaaggtatga

SEQ ID NO: 148857 - DNA, 762 bp, Enterobacter cloacae; identical to SEQ ID NO: 147898

SEQ ID NO: 148858 - DNA, 222 bp, Enterobacter cloacae
atgacaccagatacccttgatgctgcaagcgagctaactcagcagcgaatagaaatggcggtagccgctcacagactcaaccactcagcagtatcagcaacgcactgtgaggaatgcggtgatcgcctcagtaacgagcgccggaaagcgtatccgggatgcacgatgtgtgtggattgccagggtgagatggaattgcggaataagcagagggggatgtga

SEQ ID NO: 148859 - DNA, 222 bp, Enterobacter cloacae
atgaaaaacagaaaagcccgtcggctggttggcgcccacatcaataacacttaccggatcagcaatagacgctggcaggtgtggggtagtaactggccttttgtctgggagcatgcgaagccatcacctcgacagaaaagaaaggctaaagaggttgcagcctacagagaggaattgaagcgcaatcaggagtcagccaatgttcagaatgatattgcctaa

SEQ ID NO: 148860 - DNA, 198 bp, Enterobacter cloacae
atgaggctgaacgaactcgttaccgctacagaacaggccagagcgaactaccgccggcatggtactcggacatccagaatgctctatgaattctggtatgtactgctgggaacggaggctttcgaccaacagacgctgacgctcaggtgtccgcttgcactggaagaaatgtaccgcctggcaatcgacgctccttag

SEQ ID NO: 148861 - DNA, 1251 bp, Enterobacter cloacae
gtgacaatggtcaattcacgccggccgtcgccgctgcagcgccgggtgctgattgtgctggccgccctcgagacgcgccatcccggaacgcccgtgcctacccgcctcattgaacgtctgctgaccgacggggggcatggtccggtatacgggccgaacctccgcgcctcctgccggcgcatggaagccgcgggctggctgcgtaccctgcgtgcgcaaaacatgcagctggccgtggagctgacggatgccggccgggcgctggccactcccatccttgcagaagaacaggccagccagctggccgaacagcgtgccacggaagtgcgggttctgcccctggtcccgcgcagccaggccggggaagataacgatcgcccggtggaacttgatggtcgctggcacctggcgtgccggggcgactacgttatccgcctcgatggtaccacctgcctgcagctgtggagcgcggccgggcaggtgacgcgcctggaaggcgatcccctgcaggtcgccgcctggctgcaggcctgccatgatgcggggattgcggtccgggtgcagatcaatgagagcaccacgccggaggcggggacaccggacggtaccgcgccggcagaccagacgtcctcctggttacgccagctggaaggcgcgctgcaggcgcaggggatcagcggtctgaatgaggagatcaggatggcaatgatcatgcccgtcggggcgctccgcgacctgccggcaccggcgcgcctgctgcacgtcctgcgcgaccgtccggaggcgttcccgctcacggctgccgggtatgaggaagacacgcaggccgcgctggctgacctgctggcccgcgcggggttcaccggtgaccagacgcaggagctgcagcggcaccgcatccgctgggctcagatgagtcaggaagacgctgaccgccgcgaactgaacagcctgctggatgagctggaacggcgacagctgtactgcaaccgcgaacagctgacggagattgtgttttcgccggtccgcagacccggcgagcgctggactgaccgtctgcattggctcctgatgacggacgcattcgggttctgcagtccgctgtcccgtgacgcgggcgcccgggcgctggcgatcctggccggctacacggggcaggaggtggcggaacatctggccacggtgattgtgtggaacgacgccggagcagtggccggtacgtcttcattccctcgtccgcatgaggaatag

SEQ ID NO: 148862 - DNA, 240 bp, Enterobacter cloacae
atgacgttttcgctcagctatgagcagttgacgaaaaaagcagaagaagaaatcaggaatatcaatcttgacctggacggcataggttacatcgaggcgctggccagggcctccgccgttctgagcttctggtacagtctggcgctgcacggctatccgggcacaacaatgaatgaacgtgtagatgccgaccggcagcggctgaaaaaccttatctacaggaaagagggctcagcgtga

SEQ ID NO: 148863 - DNA, 336 bp, Enterobacter cloacae
atggacgaagtggagctttttcacgagctgatggatagtggtcacaaattcgtctggtatctccgtgaaccaggcgtcagcaatccggatggtaattctcctgacgttcagctaattgtcgatctgaacggaaaagaactggcccgtcgcattgatatcccggaaacgccagaaaatggctggcgcatcgattcctggcatgcgagagattttgggggactgccgaaagatgctctgaaggtggatttacatctgctattaacccggcgtcttctcggagaaacaggttcgatgttctcgcggccctttttcctttccgctgagcaatgttcataa

SEQ ID NO: 148864 - DNA, 768 bp, Enterobacter cloacae
atgtcggatgtcataacggatacagaacaggttaaagcagttgtgcagggagttacggcgtggatgccggtgatttcaaccctcgccggtggggtactggctggcggtgttgccttactggtgagcagggtaaaccaccgatacgcgcgtgaacgtgaaggagatgcggcagcagaacgactgcgccatgagcagcagctgactgaggacaaacggcagaaagaacttctttacatcaccacggagcttgtctttcacctcgaacgttttgctgagcactgcgtaagagtctcctcggatactggctatgaagaccgtgacggtgttttccggttttcagtggtaccggaagacctcattcttagtgctatctctggcgattggcgggtcctgccacgtcagttaatgtaccgtatccgtgagcttcccgtgctgcagaacggtgctgacagagctgtcagttcagcggctgagcatgatgatccgcctgactattcagatacgttttatgaacgtcgctatcagtatgcctggctcggactcaaaacaatcattctttcccgtcgcctgcgaaacctcgcacaactacccgccactcgtctcgatgcaacgccctggtcggcacaacccacactgtggacgatctggcggcaggagcgcaaacgccgagcccatatatatgtcctgaaccagcgagcgatggccgcctttcagatcgcgaataaccagcatcatcacggccagcatgatgaacctgcagggccgtaa

SEQ ID NO: 148865 - DNA, 351 bp, Enterobacter cloacae
atggtgaatagtatgattttacaagattcgcaggaaaataaggcctctgatgacattattgccttacttaaactgtgccagcagctgcagtcagaaaaggatggccgggaacggtcggcgcccggaacatattcccgcgatgaggatgaatttgccgatcgcatccgttccgcatgcgggcacgccctgcagctgcgccggctgctgccgttagcgacgaccctcagcgccatcggcgccgagatggaacgccggggagatatcagtgtgctcccgggcgaagattacgcgcagaaagcaatggcacgacttacagagcaatacctgtccggcagggacaacaagcaatga

SEQ ID NO: 148866 - DNA, 1029 bp, Enterobacter cloacae
atggccagaaaaccgtttatgaaacgacttcaggcacaacaggaaatgaaaaaaaatgctgttgtttctgatatcgaacaggtcattgcaaacaaacaaccagacgagcagaaccatgatatatctgcgcatcagattatggcggatatagcccgcccagatatagaacctgaaggacagataatccgggtagatataaatctggtatatgctgaagaacaagtgcggcctgaagaagacttcgaggaagatgtcattgatggaatgtctgataccttcgaaactatagggatgcttacgccgcctcgttgttatcctcgagacagacgtggctaccagatatggctaggcgaaacgcgtgtgcgtacagctcgcaaacgtggtgatgcttatattgatatttacgttggcaagccaccacgggaaagaaaagaacgcattatcggtcagctcattgaaaacctgcagcagtctggtttgaaacccttagctacggcaaaatccttctatgaactcaagcatcagttcaatatgacgggtgagcagatagcaaaaacaatgggtaaacctacctcatttgttagtaaacaccttcgtcttattgatgcacccgaaaatattaccgcccttctccgggataaagtcacatccgatatcgatctggcgtacacgctcatccagttaaatgaaaagtctcccgaagaggctgagaagctcatcacagctgcacgggaatcaggcatttctcgcgcgcaagttaaagcggtgcttgatgaagtaaagaacaaaagcaaccaagagatttcgcatgcgaaatctaaggctaagaccgggagaccaaccaagcctctgaataacagatctggtggagaatcctggctggttgttgtcgatattgacggtcagcaaggagtaataatgactgaccgagcgccagatgaagaaggttatgtttgggtgaaactggaaattggtgagatttctgtagaggcttctgagctacgtgtaattgggatgcggtctctgtga

SEQ ID NO: 148867 - DNA, 1347 bp, Enterobacter cloacae
atggaactggtatggaaaaaaccgagagggaggtttgagcggaaactaaacatggccgagagggaggcatttttgcatgtctttagcaacggccgaagaccagctcagaccgatttgcatatagcaaataaaattctagaagaaatggacagacgtgagctatggattaaatgtgactgtgccgaacctgatccagtcgctgacggtccttacaactgtgaagtcaacgcagccaacttacgccacgtaagtaagagcaagcagcatgatgaactctgcccgcttttccggctgaagaaagagaaagatgctgacaacactgttaacgagggaaaaaccagtcctcttaaccctgtgggtgacaatgactggctccctgacagaaaaaaggaaaaccagatcgttaatgttgacggaccagttgtgccacgtaaacgacgtcgtaaaacgcttaaaccaattccagctctgggacgaaaactgctgacgctgattcaggccgcgggactgaatcagctcgaactcatacctgaatttaagaggccgggggcagggggggcgatcagcaggataaaaatggtgcttgaagaacacaccacaaggaacggaactcccctgagcaagttcttcaactgctcaccctggcttagcctcaatcaaatcgatgacatgctcaagcaactggaagacacgcaggaaaaagataaagaaccatgcgtctatatagttgggatagccagtgatgtcagcatggaggaggtaacgtttacgataaagaaaaatacctatatccaccgccctgaagcacgagttcgcatcaatggtgagaatacttacaatgcaggaagccgggccccgtactgggcaatactggaataccgccggggaagagatgggctcgttttctgtcacaaaggatatgcgcatgccgcatttagcatggacaatccggtaccggttgatagtaacaaagagcgcgacacacttaatgtcatactgagtgcatctgattttgcaggccgccagggtaatcatcccgacgcgataagtttcagcaaacctctgttcacgatgaaaagcgtcaggaacggagaagaagaggaaattcatccagattttatactgaatgtgctgccggccggaaaaacaaaagttacgactttcatcattgaaacaatgggctatgagtccgaagaatatcttgaacgaaaacgccaaatgcacagctggatggaacaggaaggtgttcttttaaccgatcctccaggatggccgggaccttctgaaaagaccttcaacagctatcttcttaaacatatatttggggcaggaaaaacgcgcgagtaa

SEQ ID NO: 148868 - DNA, 888 bp, Enterobacter cloacae
atggaggcacaagcggttatcttaaatgcaatatatgctcctcatggaaaacaggtcaacttggtagaccggccgaattgtgggaaacaggtcaacttcccggacagcacggactgtgggaaacaggtcaacttccggacagcacggaatgtgggaaacaggtcaacttcccggacagcacggaatgtgggaaacaggtcaacttcccggacagcacggaatgtgggaaacaggtcaacaacccggacagcccggactgtgggaaacaggtcaacttcccggacaacccggagtgtgggaaacaggtcaacctcccggacaacccggagtgtgggaaacaggtcaacttcccggacaacccggagtgtgggaaacaggtcaacttccggacaacccggagtgtgggaaacaggtcaacttcccggacaacccggaatgtgggaaacaggtcaactttccggacatcccagactatgggaaaagggtcaactttccggacagcacggattgtgggaaacaggtcaactttccggaaagcccggactatgggaaaagggtcaactttccggacagcacggattgtgggaaacaggtcaactttccggaaagcccggactatgggaaaagggtcaactttccggacagcacggattgtgggaaacaggtcaactttccggaaagcccggactatgggaaaagggtcaactttccggacagcacggattgtgggaaacaggtcaactttccggaaagcccggactatgggaaaagggtcaactttccggacagcacggattgtgggaaacaggtcaactttccggaaagcccggactatgggaaagcggtcaacttccggacaccccggagtgtgggaaacaggtcaactag

SEQ ID NO: 148869 - DNA, 240 bp, Enterobacter cloacae
atgaatatgaacattaacctgaaggaaaaccgtatgcagcttgaagaactgactggtgatgagcgcacgctggtcgttgtggctctgcaggcgctttatcgacagcgtgtaactgcaaagaactcgaccttaacggtctgttccctgacgggaaaggaggctcctctggaagatatttttggagtgcgtgaagtagaggaggcgctgcgccgtattggtgcggctccagaatatcgttaa

SEQ ID NO: 148870 - DNA, 498 bp, Enterobacter cloacae
atgacgatagagtatgttgaaggagtcaattatctttccattgacgatatcgtttacatcaacaggtctctgatcgagactcagacgccaaatgaaccaataggcgtgctgaatccgaacaacctcagttcttcacagtccagaccaagtaccattcgatattatgagcagacagacgatatgtttcgtctgtctgctgttctaattgaaagcctgatccagaatcatccattcgcaaatgcaaacaaacgcacagccatgatggctggttacgtattcctgttgctgaatggatatgagcttacagcacccagtgatgaggtcgtaaccatcgcagagggtttggctcgtaaggattattcagtggatgacctagaaaactggttatgccactggtctcgagagtacgattccagaacgttatgtgctacaggcggaaattcgcttcaggctctcgtggcgacttcacactacatccgaatcatatcgaataactga

SEQ ID NO: 148871 - DNA, 180 bp, Enterobacter cloacae
atgggtcacgcattaaaaaaggcagatcgcttgtacattccgcctcgtgacaaatccacggtggcgaaacctcgtgcagcgatcagcgaagcatgttcacacactggtcaagttaaaaacgcctttgagtttgggtttgctcgttatgagaaggcgatggaagaactgtcaaaggtctga

SEQ ID NO: 148872 - DNA, 414 bp, Enterobacter cloacae
atgaagaaacttattttggttatgggtatcatcgctttggttgggtgtgctaccaagccaatttcaactgagcaggctaagccagcgccagggaaacaaattcttgataacactctcttcacgaaaaaggctggcaccggggaggttgtgattaaacgtgactctggttatgtggggagtgcttgtttgacgagggtttatgtcgatgggcgtgaagttgccgatcttgaccctgaacaaaaaatcacaatctaccccaccttgggggatcacatcttcagcgcgtggccaaaaggaatgtgtggtgggggaatgagtgaacaggcaggtaaagtaatcgaaggtaaggtattaacttacaggataggttacggctctggttcagaatttgggatttacccaaccgcattttaa

SEQ ID NO: 148873 - DNA, 297 bp, Enterobacter cloacae
atggataatcaaaaaacagcatcgttacctgagcagcaggtaagcactggctgggagatcaaaaaagctggtatcgccatcgccagcagcgcaaatgcaaccaaactccgtctctcagacgaaatgcgtgaagcggtggtggatgccgtgcgtaacagcgatttttttgaatcccttcggacagaactgaacggtcaggcagcatctttagccatcctgcaacaagctatacacaccgctgtaaacgatgctatctgcaatgcgatgaagcctggtggcatgctgtacggccgctaa

SEQ ID NO: 148874 - DNA, 588 bp, Enterobacter cloacae
gtggctgaagagattaagtttgtggtggtcggccatcactctcgcacaggagatgcgcaacgtcttgctgcgctgttggatgctcatctgcttattgacgacggtaaccacggcgcgaactggaatcaccgacgcgcgcttgaatgggctgctgagcaaccttgccgggtagttgtaattgaggatgacgcgctgcctgtggatttgttctacacaccagtatcgaactggttgaaacgcttccctgattccttgattagtttttatctgggcactggtcgcccacctcagtatcaaatacagatagccgaacggctgatagttgctgataagactcaggctgactacatcacactgccgcggctgatacacggcgtttgttatagcgtaccttctcagcatattgaacgagttctttctcgatgggacagcagcaagcccgccgattacgctgtgggtgatgcctggggcggttcagtggtctatccgtgttactcgctggtggatcatgctgatggtgagcctgttgagcgtcaccctgattcagcgcaacgaacagaacgccgtcgagcgtggcgaatcgcctga

SEQ ID NO: 148875 - DNA, 234 bp, Enterobacter cloacae
atgtctgacaatatcatgcaagaaatcatggaaaatttgatttataaggttgatgcattgaattcaatcgttgttcaaatgcaaaacgtattgactcctgaacagcttaataaattccaaaccaatacaattgaaacatggaaattggttgaagaaaaaacacctcaagaagcaatagaaacggtacttaaaaccaagaaatttgcatttaagtattctgggataaaagaataa

SEQ ID NO: 148876 - DNA, 822 bp, Enterobacter cloacae
atgaaaaaaactttaagcctaaaagatgcaatgcgtagccttcacgttatcgaaaccgatgaaggaatcgaactacaaagcgcggctggcacggcaaaatatgatgcgtggggcgcacgccgtgaggtgaatggtatcccagagtactttccctcctctgtcacggtaaataagcgtccgcaagcgctagtggatgataaaggaccatctgtacctgatgactcatgcgcaccattggtacgcacaatgaagcttcgtgttgagctggacacatcaggcgcacaacaggctgttgacgaactggatgacaaaatccgtaacagcgatgcattcaaagtcctgaaagatggctggactttcgaaaagaacggggtgctgattattaataacggccaggtgttcattaacgatgcgaagattggcggtggcgtattgtctacgaactataacgtaaagttgaacgacgccgataaaggcaagccgcacgaagctggcatgaccctcggtattgaaggtgaccagagcaaagtagtgtttgaggctgatcgctttaaggtgcgtgacgccgttcaatcaatcatcggaaactccgttgtatcagccacgaagacgaagattgagcttggtgatgagatgaagcaggccgtcattgatgccgtgcgtgaaagcgatttgttcgcatccctccgggcaagtattaatgcgcaggaagcttcagtagctggcctgcaacaggcgatgcacgatgcggttaacgatgccctccgcaatgcgctgaagcccggcggcttgctctggagtgctcggacgcgtggattctga

SEQ ID NO: 148877 - DNA, 168 bp, Enterobacter cloacae; identical to SEQ ID NO: 147941

SEQ ID NO: 148878 - DNA, 486 bp, Enterobacter cloacae
atgagcaatctttttacggcctcgagggacttcgaggagaaattgaaagcgcagcagcagagtaccggcgagatgctgaaagccgcattcagcgagcacgagcagtctgtcagagcggaactgagcgcaagcgcgaggagaatcagcgacgccatcagcgcccacgagcagagtatgagcgaggcgatggagaaaaaccggcggagcgtgttgctgacgagtgggcggacatggctcaccatcctgatggtgtcagcgctgctgatcgccacgagcgggagcattctgtggtggcaggggcagcagataaccgaaaactacctgactattcgcgatcagaagcgcacgcaggccatgctgtccgagaggaacaatggcgtgcagctgacgacctgcggggacgagaggcggccctgcgtccgggtgaaccgggcagcgggtccgttcggcgaggattcgagctggatgatcctggaggggaaatag

SEQ ID NO: 148879 - DNA, 216 bp, Enterobacter cloacae
atgacggaactggaaaagcagttgctgagcgcattagagcagctacagcaggactactcgcaaaggctggacgaatgggagagcgccttcgtggaatggcggagcatgtgtgggcttatgcaacgggagaacgcgatgctgaacgagcgcgtgtcggacttgagcaggcaggtgcagagtttgagcgagcagctgcgccgcttgtccgggaactga

SEQ ID NO: 148880 - DNA, 420 bp, Enterobacter cloacae
atgcagccaaaaaatgttttaccgcttgtgctctttatcccgctgtttctggcggcgtgtactgccgcaccacagacaagatccggaaaaccgggaaaatcagaaacaacacaggtcgttaacgacgtgcctggggatttaaaagcaggtccgaacgaaaatatcgccagctacgcaacgaaaataaaacgctccatcgaggaaaaaatatacagacctgaatcatataagggacaggaatgtactcttcggatcttactcgcgcgcgatggcttagtcatgagtgcaaccgcagagaacggaaaccaggagctttgtaacgccgcactaatagccgttaaacaagcgaatattcctccagccccggatgaaaaaacctggcagtcattcagaaatgcctcgctggatttctcatactga

SEQ ID NO: 148881 - DNA, 420 bp, Enterobacter cloacae
atgccctcatcagtacgcgttttacaacttgtccttttcattccgttatttgtggccggctgctcaggtaaccagaccagcgtcgaaaaaaatgcccgccatatggcgtaccagatagaacaggcgcactttgatcccaacacaaaaccgctaacagctgacaacacacgcctgatggccgggttcctgagtcagttctacgagatagggaagcaggatcgtgaagccggttttacttccgcccaggcacagcaacgggtggacagtctcagtacgggcaatggtcctttttctcccggagcgcagaaaacaaagattattaaccgggactatgattctgaccagcctgaaaaacgcagcgagattctgaaacagggcgctatcacgacttactgggacggctataacggtcgcccgtaa

SEQ ID NO: 148882 - DNA, 690 bp, Enterobacter cloacae
atgagcagagaacgaatagtacaaaacgcatattgtgactatgattcatacaaaaaagattttagcatcttttctgattcaacattagctcacttaaagacaattgacatattcgaaatgtactggagtactctcatcttcaaaaactggaaagatggtgttaatcatattggaattaatgaactagacgaaatatttgatgaattgcaccaagacgttaactcatcttattatttggcatcaatgggattatatcgaacagctaatatgcatttgcgtagcatgattgaattatcgctgcaattactatatttctatgaacatccagttgaattaaaaaaatggagggctggtgattttgtaattaaacatgaaaaattaaaagattatattaaagactatccaaacttcactcaccaaccattgaagacacaaattgacaccttagtggagcaaatatcaaaagagtggaagtgttattcaaaacatattcatgcagaatccctaatatatttccaaacacagaaacaagcaacccctgcaagtaattttaatgttgctaactttggagtttggaaatctggatttacaaaaatagtgttaaaaataaataaattatttatgctatttttcgcagaaaattacaaactattcccatcccataccaaagagcttttagctatggtgtga

SEQ ID NO: 148883 - DNA, 462 bp, Enterobacter cloacae
atggataataatttagagaaattagaatctgttttaaaaaacattagaaaatatgaaaagctagggctggatacatcctatctcaaactttttattaagaactacaagttttttcttgatttgaacaacataaagcccgattactcagatagtcagagatttaaaatactagaagaaatactcaataatcgacagctattcccaaaaatctcagacattatatatttttccaactttaatcttggcgttgagtttaaatcacaaaatgcttcacgtgaagttactattaatagaattataaagagggcagaaaaagatgaagctttcagaaacattctgaaatcaaagttaagtaatttgatttcaatgggacattacaaagagcaaaagttaacttcaacctctaaatcaattaactacaatgatttggaagaatgggcaaaaatgcttaaggatatataa

SEQ ID NO: 148884 - DNA, 801 bp, Enterobacter cloacae
atgaaaggtggagttggtaaaacaacatctgtagtagagttcgcgactattttagttaaggaccatgggaaaagagttttaattatagatatagatcctcaaacaaatgctacattttcctttatcaaatatgatatatggcagaaccaaatagaaaataataccattgcagatgtcttaggtatgaataaacatctttcgagtagagatactgaatataatatcaacgatgccgtaataaaaaatgtttcaggaattcaagggttagatctcatatcttcacatttaggattgacgtttctagatttggatcttagtgctaaaccaggtagggaaatgattctatcccgtcagatttcgcgtttagaaggtgagtatgattatatattaatcgattgccctcccaatttaactctagcacctcaaaatgccttggtagcatctaattatattattaccccaataataccagacttctactcattccttggtctaccactacttaaaaacagagtggaccgtttgaaaagagaactaaatattgatgtttcatttttaggatgcttattcacgcgagtagaaagctcagtcaatcttcatagtgcatatatgcctaaaataagaaaggtatgcgaggaatacggtgtatacgattttagaactattatccctaagaatattaaactaagcgaagccagtagtgcaagttcaccagcaaggattatgtttcctgatgtagctggtgtaatagcatacaagacggcagttaatgagatgctaaaacagttggagaatgtttaa

SEQ ID NO: 148885 - DNA, 471 bp, Enterobacter cloacae
  misc_feature (60)..(69): n is a, c, g, or t
atgaaaaaaatcttactaatggcgggggctgtgttggttctggcgggatgtggtgaaaannnnnnnnnngacgtcgcattccctgtccagctctccaaaccgcgatttgatgaaacagggactggaacagggtctgtaatcctcgacggcctcgtagaacagggattaatggcctttgtcaaaggctgggataacaatacgcttgggataacagatgaaggtaaacaagccaaaatctgggatgccaaggaaggtgtttgtattggtcgccgggttgttgatgaggtgaaggaatggactgagccgggaaacggtaatcagaaagttgttcgcgtctcctacacatggaaattaactgatattccatcgtgggtggacaaaagcgcattctctggtgtgaaagggatgaacggacctgctgatggtgccatgaatcttgttaaaaccagcaatggctggaaagcgatctaa

SEQ ID NO: 148886 - DNA, 285 bp, Enterobacter cloacae
atgatgccacccgaagaagtggaacaggttagtcgtttcaaatccctgacgccggaacagcggcagctcctgctcagcgccaccaaagcgccggggaaatataccgaaggcgtagtactttcgccaagagtggaagcgctgttccgggtggtctcacctgccctgtggttggcgctggggatgacggaaaaacatgaaaaggcagagcgaatgcggattatgcgggagtttgggtgtagtgagctggaggcggcgatgagaattgcagagaagcgtctgttatag

SEQ ID NO: 148887 - DNA, 561 bp, Enterobacter cloacae
gtgtactatccaaactccataagttggccagtgattcgcgaaggagggcttcgacgcctcaggcttggagaaataaatttagcgagctcgctctttgggtatagtatttactatcataaagtatggattcaccttgaaagttatctgccttttaatcttcaaaaccccggccaggcaatgagtcctgatggagaaatgtggttcaggtctgaaaaatatgaacatgacttttctatgcctgttagccacccagtgactgatgcccaacatctttttatgcatgaaatgatgcatgtctggcagcatcaacgtggtatgtgggtgcgtatgcgtggtgctttctcctgggctgctgattatacgtacagtcttgataagactaacttactggagtacggactagagcaacaagcttcgattgtcagtgattactggttattaaaaagctatggtttttggggtaacagtcatctctttgattatagaaactatgatcctgctgaaccagtaacgatattgattaaaaagtatgaacgtattttagaggggtttcccggttga

SEQ ID NO: 148888 - DNA, 357 bp, Enterobacter cloacae
ttgagatatatatcactgttgctgtctgccattttactgacggggtgtccgggtaaaggaaaagaaggcgctgcgtctggggaaagaaaatctatctacgtttatgatggtctggtatgctttacagtcgataaaaaagatatccttagtcgttatgtactggcatcaaacggcaaagattattctgagttattaaagggagactttttagcattatcatatccgaacacatgttttaacgtgaacttaactaaaggtactgtctatggggcacattatacgttaaataaaaagaatttttattatacttttataatcgataaccaaggcaacatactcgacttagggagaaagtag

SEQ ID NO: 148889 - DNA, 492 bp, Enterobacter cloacae
atgtcattacccgcatacctgtttctttatgatgaaaacggaatgcagttaaaaggagaatgtctcgcgttaggtcgagagggtgcggttgaagtcatgagcagcagctacggcattagccagccagtcgatcctcataccggtagaatggggggtaccagacaacacgaaccttttatcatacacaaacagctggataaactttcacccctgttcgcagtgtatgtttgcgacgggagacgtctgcaaaaagcggtcattcgttactatgagacaaacgatgcagggattgaacgtgaagtttatcggatatccatggagagtgttgtcatcatgtcagtgaatgccaatcacacatatatacctggttcaaatcatcataacatggtcgagaccctgaagttacgcttcaacagtattgaatggcactacctggatggcatgattaagtatggtgatgcgtggtcaaaaccagcattacaaaaaccgtag

SEQ ID NO: 148890 - DNA, 291 bp, Enterobacter cloacae
atggaacaatccttctgcaagcggggaggccagcagagagagcacgctgcgcgcgcccgcggattcgccaaacagggtcacgttagcggggtcgccaccaaatgcggcgatattgtcccttacccattcgagggcggcgatctgatccagcagggcaaaattatgcaccacgcgatcttcctcgccttccagcgcgggatgggcaaaaaagccaagatgaccgagacggtagttgatcgtcaccacaactacgccgcgcgtggccagcgctttgccgttatagggcggtaa

SEQ ID NO: 148891 - DNA, 339 bp, Enterobacter cloacae; identical to SEQ ID NO: 144243

SEQ ID NO: 148892 - DNA, 1662 bp, Enterobacter cloacae
ttgaccgtctggaatgattacgcaaacgccattaaatccggtgaaattccggcctgtaagcgcgtaaaacaggccgttgaaaggtacttttcagacctgaatgacccccgttatgagttcgatacggcgaccgtggagcggtttattgccttctcccggctctgtccacacgtcaaaggcccgttgcggggtcagcctatcgagctggagccttggcagcagttcgcctttgctaacctgctgggctttaaggtcagggagtcaggccgccgcaagtacagcagcgcctttattgaggtgccgcgcaagaatgccaaatccaccgtagccgccatgctggctaactggtttctggtgatggaaaagggccagcaggatatctacacggcggcggtgagccgggatcaggcccgaatcgtgttcgacgatgcccgccagatgtgcctgttgtccaggccgctgaaaaagcgcgtcaatatccaggcgcataaggtcattttcccgaagagcaacagcctgttaaagccgctggcggcgaaagcggccaccattgaagggactaaccccagcctggcgattgtcgatgagtaccaccttcaccctgataacggcgtttattccgcgcttgagctgggtatgggcgcacgtccggaggcgattttgttcgccatcacgaccgccgggagtaacgttgtctctgcctgtaaacagcattatgactactgctgccagattctggccggggaagagagcaacgattcgctgtttgtcctgatctacgagctggacgacgaaagcgaggttgagcagcctgaaatgtggatcaaagctaaccctaaccttcatgtgtcagttgacgcggcgaaactggaatccaccatccagaaagcgcggggcataccgtcgcagtgggtggaaatgctgaccaagcgtttcaatatctggtgtcagggctccacaccgtggatgggtgccggtgcatgggatgcctgtgcgctcgactataccgaagacgatctggccggaatggagtgctacgccggatttgacctgtcctctaccagtgatattaccagcgtaagctacgcgttcccgttcgacagggagatcagactccttacccgtcattatctgcctgaagcgcagctgcttaacgtcgccaacaaaaaccgcgccatataccgccagtgggtaaaagcgggatggatacgcaccacgcccggcgactgcatcgactatgaccgcatccgtgacgatattctgcgcgatgctgaaaccttcaatatccggctggtgggcttcgatacgtggaacgccacacatctgcgcacccagctacagggggcgggcctcgatgtggagccgttcccgcaaacctatctcaaattcagtccggtagcgaaatcctttgaggtgttcgttaaccgcagagtggtgcgccatcgcggcgatccggttctggcctgggcgattggtaacgtggtgatggagtctgatgctaacgccaacattaagcccaacaagaagaaatcctccaacaagatagaccctgcggtatccgcgctgatggcgttcggtaccttccaggctgagcacgaggattttgctttcgatatgagcgacagccacaaacaacggctggcgacatttaacggtatctga

SEQ ID NO: 148893 - DNA, 1050 bp, Enterobacter cloacae
atggataattctctcagacgtttgtcacctttattgaaaagtgccgtaggaacgccaggtaaagcaggaaactttcagcgcgacgtgattatcgtgcaatacctgtttaatctcattaagcctatcatccagtatgacatcccagaagatgggattatttccccgacattgatcagaaccatcagccagtttcagtccattcatttgcgtttccagcatcccgatggggttattgagccagaagggaagactttccgtggattagttgctgctgcgatgaaatatccccttgcgtctcaacaatcgtctttcacgtcttcattttttaggcaaccttctgccaatgaaaatagcgtccgtcagctggttaacgattatctgagaaaagagcgttacaacgtagcagatgaaacccttgagcgaagcaagctcatggcacctggtattgatggggctgtatcgctgacggaacaggactttactgaagcctgggaaaatcttaatcgtcgggtagaactgaatatcatcaaagctttttctattgtggagtcgggcggacgatctgggtttaatgctttaaatctaccgattattgcgtatgaagggcatattttccgtaaatacaccaaaaggaaatacgatcaaacccacccttttttgtcttataaatatgtaaagaaagcgggtccggaatggcaaaaaaacaatatcgaccagctttctgcatggaataccctggcgaaggcttacgcacttgatgccgaagctgcgataaaatcgtgttcatgggggatgttccagattatggggtttaattacgaatcgtgcggttataaagatctcggcacatttttaaaagatatgaagtcaaatgccggtaagcaattaaatgcttttttacatttgtgcaataagaacagctcactactgtcggcaatggtaaataaggacttttataatatggcattcaactataacggaagcgatttcggtgattatgacgttaaaattcgcagaacgtatgaaagcctggagaaggggcggagatga

SEQ ID NO: 148894 - DNA, 609 bp, Enterobacter cloacae
atgaaaattaaaatgatgcgcatagtttgcggtttttcagtcttaatggcggcgttttcttcgtatgccacgacgctacagtctggcgtatatgaaggtttgttactcgccgtctcaccgacgggcaatatcaccgggtattactctgaatcggctgaagacagcataaaacgtacctgcaatttctttctgacaggccatgtttcagcgcaacagccagacaccatcacttcgtggtcttcatctgtgctcgcgggccatattgccgcgaataccgcgggtgtcacattagccattcctgatgggcaaaaccatgctgggtgtatgaatgtgctgatgcctgaaattgcgacaggtctggaactggagaggacgcggcagacacagtggcaaacgctgatgaaggtaagcagcccgcgggcttatctgagctccacgcctgatgccgcgacccggcgtaaagcctggatcgttaaaggagacgtagtaggggtaatacaaacccaggctggctgggcagaggtagagtttgtcgcccgtagcggaaaaacgacgcacggctgggtgaatagcaatgacgttcagccgttaacgcctcctgcatcctga

SEQ ID NO: 148895 - DNA, 1038 bp, Enterobacter cloacae
atggtgcttcacaatgacagtgttaacaataatcacggcgtttaccaccacggattcgatacgctaagattaattctttcaatggcaattttattcctgcattttaattggaaaaatcttcctcagggatatttgtctgcggatatgttttttattctttctggttttttgatttctgtttcagcaagtcgcaaaacatcacaaccaagaataattggaatatttaagaaactataccctcaatatttcatttcaattgtgatatttattattatccaatatggatatgcttactacccattaaatgatttgacttatgcatttgcaatgtttcaatcaatggggttcaataagactttgctaaacacgccaacttggtttgtatgtgtttttgtttgggtttccacggttttatgcatcatgaaaaccgcattaaatagaagccaacttctatttatactccctgtgatgtcttttacctcatacatgatcatacattctaacacaccgagcatgggtcttaactattcttacgaaatgctgtgcttcggtgtccctgtatctgtttggcgtggaataggaggaatctcacttggaatgttagttggtctatgtggaacggtcttgcgggatgttggtaaaacgaaagcaacattgattgagatccttcttgcagcatatatgatttatatactccgtttttcacctattggttccaattacgattatatttttttggctatcagctctgcatttatctttatgtgctatgtgaaagcaggatcattgtctattttgctttcaaaattcggtgaaaaaaacgcatggtcatacaatgcctcaattggaattttcctttatcaaatgccgataatcacattattaaggcaacacatgtcaacagaccatatttttggttctcaagctattccatgggtcattgcgatatcattattatcatgtttgatttactacaccgttgacatttcccttaaatcaatatcaaaagtaatgatgaaggaaactggcccacagtag

SEQ ID NO: 148896 - DNA, 756 bp, Enterobacter cloacae
atgttaaatattgttgttccaatggctggtcgcggaagtcgttttgccaaagaaggttatgtggatccaaagccactgattaagttaaaagacaagcgaatgattcaggttgtaatcaataatttaactccttctattcctcatcgttttatatttatatgccagcggcaacatgttatcgattatagtttggaccggtatttaaaagagtgggcaccgaattcagaagtaatttgtattgatggaattactgaaggcgcagcatgtaccgtaatgtgtgctgaggaattaatcaataacgatgaacctcttatgattgcaaactcggatcaatggattgatattgatattaatgattatctaaattacatgaagcatgaggatttagacgggcttatcatgacaatgaaagccgatgaccctaaatggtcttatgcggaaatgaatgaaaataaccatgttactcgagttgttgaaaaagaagttgtatccgatgaagcgactgtagggatttataattataaaaaaggcgctgatttttgtagaagtgtcaaaagaatgattgctttagatcaacgctctaatggtgaattttatgttgcacctgcttatacactcatgtatgagaatgaaggcgcaaaaattggaatttataatattggggaagaagcaaacgggatgtatggtttgggtatccctgctgatcttgaattgttcctttcccttgatgtatcaagaaaagcgttggatttctaa

SEQ ID NO: 148897 - DNA, 867 bp, Enterobacter cloacae
atgaaaggtattgtacttgctggtggttccggaacgcgtctctatcctataactcagggtgtatcaaaacagttgttgcctgtctatgataaaccgatgatttattatcctatttctgtactgatgttggcgggtatccgcgatatattaatcattacaactccagatgatatcgatgcgtttaagcgtttattaggcgatggcagtcaatttggcataaatctcagctttgcagttcaaccttcccctgatggcctggcgcaggcattcatcattggtgaagaatttattaatggcgaaccatgtgcgctcgtgttaggtgataatgtcttttttggccaaagctttagtaaaaaacttgaagctgcattccaattaacctctggagcgatggtctttggttatcaagttcaagatcctgaacggtttggtgtagttgaatttgatagtgaattcaaagcgttatctattgaagagaaaccagccaaacctaaatctaattgggctgtaacgggtctatatttctacgataaaaatgttgtcgaaatggcaaaacagattaaaccctcggtgcggggtgagcttgagattacaacattaaatcagatgtatcttgagcgtggaggattgcaagtcgagttgttaggtcgcggttttgcatggctagatacaggaactcatgacagtctgatagaagcatctcaattcattcatacaattgaaaagcgccagggtttgaaagtcgcttgtcttgaagaaatagctttccgtaaaggctggatgaataaagaacaactatcggcacaagcgaaaaaattctcaaaaaatgactatggccgctacttacagatgctgattagtgagtaa

SEQ ID NO: 148898 - DNA, 1230 bp, Enterobacter cloacae
atgcaacgtacaccgcaatttaaaaaatttctcaaaactgcaagaaaacacaggaaggaaaatttttgggatgtttgttatgacatatcagccccaacctttacaaactcaattataagtgattatttcggcatgcgctcaacgcagcatacggtttccgaacagaatatatcaattgaaaaggaagatattaaaactaataagactacacctgataaaaatcttctagtgaataaagtagatttcgacaaatgtgatttctcaggaaataatggcggcaaaaaaataacattcctagattgcaaattccatgaatgctatttttcatttagtgagttcaacgacacctctttcaaaaattgtaagtttgagtcatgttcattttcgcaatctaaatttttcagatgcgtcttcgactccagatgcattttctatagaatctctttgagtggcggtacgacttcatttgaaaacactgaaattaatgctactaaattctttaaggatgtatataaaccatatattgaaaaaaaagaattatatgcgaaaaaaaataagaaagaacatatcgaggaatacttactttcaaagagcatagtgaaattatcgcgaaaaatcctagcatcgaatcaatcttacgcaaatgatgaattgtactacgactcagttaaaaatctatatctacaaaagttaaatgagaagcaaaaatataatacaaattcacttatggagtcgatagaaaatattcaaagcaagaaggaatactctaaatcaagaaaaaacaaagagacagagtatataaccaaagagtttttaaaagtaatggttttttacctaaaaaacttagcactgcctttagaaaaaaagattactcaaatattcggatttataaatggatggggtggaagtctacagcgcatgttttttatagggttatgcatactttttgtttattcaataatttattctataatggatttaggatatgttacttataaatctagtgacggtattactgaaaagattcatgttgaaggatactactacattatgtcttctataattaaaagctttgatattactttccttgctgggtatactaagcacatatctaatactgatggactatttaaacaatttaccatattaagcaacatgcttatgggccttttttggtatgctgtagcgattccgtcactgattaacaaaataagtattaatagactatga

SEQ ID NO: 148899 - DNA, 696 bp, Enterobacter cloacae
atgaaaaatattattgataacatttctttagattgtttagtggttattggatctcatgctagaggggatgacgatcgccattcagacgtggacttgcttgggattgtagagaatagcccccccgaaatgatcaatgttaaaaaaattaatcttgcaatatattctgagcatgacatgtctcagatgatgcaatcaggaaatctatttgcattgcacattgtaaatgaaggaatacctttaacaaatgaattgttatttaaaaagctttgcacttgtttcacttataaggattcttacgcacgagaaaaaaaagttgcttacttaatggggtctatgattttagggcatcgcgaatctatcacaaactgggcagttgtgaataaaagaattgcctggtgcgtaagaacttatattctttctttgatggctgaaaaaagaaccccaatgttttcaaaaaatgaaattgctttttttggctctaacgcacacaatgaattatcttacgcagatcttttagagttgattaatgcaaaacaaattagtggttattcagaaaatatctttaacacttttatccgctttatgaattcgattatatattgccaaccctctgtagcggaaaccaatataatttttaatgaagaaagtatattgcaacatactttcgataggatgcaatcaaaccattatcgttaa

SEQ ID NO: 148900 - DNA, 501 bp, Enterobacter cloacae
atggaaaataacataaatgagattcttatcgaattaaaaggaatgatggataaatgggagtatccagtagaagcccctatcaaagattcatttcttgaaaccataaaaattagagagtctagcaatactctacatccgatgttacagactctaggtaatgaaattgacttgttatttacaaatcaacctgattatgtaagttttttaaagtttatggatggatttgaatataacggattaatcttattcagcctttctatacctgaaccattagttagaaacttatttgttatgaacgatttttatagagataatgatgattatatcaatcctgatcttgctcaaagattagtgatcggagaagatagtatttcattatttacttatgatgccaaatctaatttatttgaaattagggataatgttggtacagaaaatgtttttggttcatttgataacttcactgatttcttaaaagagatccttgatactgtcgcatag

SEQ ID NO: 148901 - DNA, 195 bp, Enterobacter cloacae
atgcagtcgccacagctcttggaaacgcagtctctggatatggtggcgatagtgagttttcagcgggttccatcggtgttgggggaggaaatgcgaatggtgttgacgcacaagacggcgctggaggttctggcgcaaatggagtttccaacccgaccggcggtttcagcggtggccttggtggtgatggggtaa

SEQ ID NO: 148902 - DNA, 408 bp, Enterobacter cloacae
atgactgtttcacgatatgcacttgtgaaaaataacgttgtggaaaatattgttgcatgggatggagaaggcgatttatttagtgaattccttacggttgcgcttgcagaagaaacgccgtgcagcgtcgggtggaattatgacggaaaagaattcacgcctccaccagaaccagaaaaaacacacgcggagctggtcattgaagctgaagcagaaaaacaatcccgccttgattatgccgcaagcaaaatcgtcgtctggcaaacgaagttgctcatgggccgcaaattgaccactgacgaaacggcatcacttaatgcctggatggactatattgacgcggtaactgtgatagatacagaaaccgcgtcagatgctattagctggccacctctcccggaggtgtag

SEQ ID NO: 148903 - DNA, 408 bp, Enterobacter cloacae
atgaataattattattactccccgtcaatgcgcggattttatcaatcgcagattcataaagaataccctgccgatgccgttgaaattgatgaaagcgaatatttccgactcattcaggcacagcaaaacggaatggagataacaccaggcgctgatggcagtcccgtacttaccgagccagtgattgattatgtcgcacaggcacagcaagtaaaaaactcgcttcgcctgactgctgatgcagaaatttcatggcgccaggacgctgctgatgcagggatagccacggcggaagaaaccgccgcgcttgcggagtggaaaaaatatcgggtactgttgatgcgcgttgatacttcaaaagctcccgatattgtatggcctacacctccgggagaggtggccagctaa

SEQ ID NO: 148904 - DNA, 726 bp, Enterobacter cloacae
atggcaataaataacttcaaaccatttgcgacagcagcgaatgctaacgtgatgtcacaggctgactgggaagcgctaccggcgcttttgtccggctttattagtgggccagcaaaatcagcgcaggtgaacaaagctattcgacaggccagttttatcgcggcagcgctggcgcaatataccgccaacaaaagcgggctggatgtgcttgatgacggggatgtggcaggatttatcgcgaagatgtccactgctttcggtaaggactttcaggggcttgatgccacactgacggcacttgccggcctcgctacaggggcaaataagcttccgtatttcaccgggacagacactgcagcacagacggatcttacttcagtcgggcgtgacattatcggtaaaagtacgattgccgacattctcacatacctcggttttgtaggatcgttaacttcacctggttatgcggttattccgctagggacgaaaaagctggtgattcagtggggatcggtaactgtaccgactgccgggtcagcctctgccacttatcaactggcgctcaacgcgggtctggcacagttctgtacgccggttgatgtttcgtcaataaataactaccgtgtgggtgtggccacttcaacaaatacgagtatcaccctggcatcaaccaacacgcaaagtgttacgggtgttatgtggctatcaattgggacgattaactga

SEQ ID NO: 148905 - DNA, 453 bp, Enterobacter cloacae
atggaatgcaatattaatggcgtggaataccgcgccgcaaaactcaacgtgtttgatcagctcaaggttacacgcaaactactgccgctcctcgcagggatgatggctgacttcgggagcattcgctccctgctgccagcagacggtaaggttgactccaaaaaatttgatgagcttaagccggtatttgaaacgctgctgccgcgtatcgctgacgaactggcctcgatgaaagaggaagacactaacgcgataattcatccttgcctggcggttgtggcccgaaaaaacgggacggtctggacgcctgttttcaacagcggtgaattgatgtttgatgacattaatctcctgatcatgctgcagctggtggcgcgggtggtcgccgattcgctgggaaattttttgcccgtgagccttaccaacgcgacgccggaccagactcagggttaa

SEQ ID NO: 148906 - DNA, 441 bp, Enterobacter cloacae
atgggtgcttactcttttcttgatatttcggcttctctttccgggccgacaggttcattagatcttggggctggttctgccaactccgaagaggggatcacggtcacgatgaccgaggcaaagaacacgatgactatcggttctgacggtgaagtgatgcacagcctccacggcggcaatagtggcgttattacagtcaccctgcttaaaacatcccctctgaacaaaaaactttccatcatgtacaacgcgcagcgcatgtcgtcagcgctgtggggaaataacgtgatcgtcgtgcgtaacagggtgtccggtgatatcggtacggcgcgctcctgcgctttccagaaacagcctgactggaataacccgaaggtagccggaacggtcgcctgggtatttgattgcggcaagattgacgaagttctcggggagttctaa

SEQ ID NO: 148907 - DNA, 1152 bp, Enterobacter cloacae
atggcgaaaggcttgcctttaaatcgcgtcaccaacgtaaccgtgacgctttcagccagagccgcacagggccgaaatttcggttcgatgctgattctgggtaattctactgttattcctatcacagagcgtctgcgcctgtattccgatccggcagatatcggtgatgatttcggcgtcgacagtgaggaatacaaagcagctgtagtctggttctcccagtcaccgcgtccgacgcaactgtatgttggtcgctgggttgatagcctaacctcggctgagtctggccctacagaaacactgctgcaggcggttaacgcattgctggattacaactcctggtacggtctgcatctggctgttcctgtggctgactatccggatgatgctgacctgatttctgtttcggcggcgatcgagtctgcgaccgtttcgcgaatcctggctattacttcgagcgaagcagatattctgagctcggcggttgaaaccgatctggctaccaaactgaaggctgcgaaatacagccgggcctatatccagtattcatctaccagtccctatgctgcattgtctgcgtttgggcgcgcgtttacggtcaacttcaccggcagcaataccactatcaccctgaagttcaagcaactgcctggcatcacctacgaaactatcggcacatcacaggcgaatgctctggaagcgaagaactgtaacgtttacgtgtactacgagaacgatacagccatcctcgaacaaggtgtgatgtgtaacggcgatttcttcgatgagcgtcacgggctcgactggctgcagaacgcggtacagacagccgactacaacacgctttacaccagtaccacgaagatcccacagacagatgctggtacaacgacccgaatcgccaacatcgaaaaagtgctggatgtggccgacaaaaacggtctgtttgcaccaggtatctggaccggcggaccgatggggcaacttggcaccggcgacaccctgaccaaagggtattacacctgggcggatactgtggacaaccagctgcagaccgatcgtgaagcgcgtaaaggcgtaccgattcaggtggccgcgaaactggccggggccgttcattacggcgatgtagcaattaccgtggttcgttaa

SEQ ID NO: 148908 - DNA, 549 bp, Enterobacter cloacae
ttgagtaacgacagcaccacgcgcggttacctgacgcctgtcggggataacccccagtatgacgaggcgctggagcgtgaaatcagccggtggattcgtggcgtttctggcttgccggccgcgcttgttttcccccgatggactgacccgcagccgcagatccccaacaacggggtgacgtggtgcggctttggagttacctcgatacctctcccggttaatcctgcgagtgttcagattgacgaaaacacttcagagcaatgggaatgggagcgagttaccgtcatttgttgtttctacggtcctcagggggccagcagggcttcaacattccgggcagggctctttattgaacaaaacaatgcggagcttaatcgtgcagggctatcccttagcgaaattgggaatatttataacctccccgaattgattaacaaccagtgggtgaggcgctacgacatcaccatcacgctgaatcgcaaaacaattcgtacctacaacattaaatccatcgtcgacggtaatgtcgcgatctcaaccggagattga

SEQ ID NO: 148909 - DNA, 3357 bp, Enterobacter cloacae
atgagtgcctcagcaattgaaaatattaaagagtctattttaaaagacgaattagttgtcgttataggtactggttgcagtatcgcgttgaccgacagctcaaataaaattctttcgtggaaaggattaatagaaagtggttttgattatgcaacggtaaagggtaaaatatcaaatgaacaaaaaggattttggagtaatcaattagcatctaatgatattgatgatctgcttagtgctgctgaattcgttgggagaaaattagattctccatccggtgatctgtattctaggtggctatcagagtcatttgataaaataaaacctactaataaaaatatgatggaagtagtaaggaatatttctaattctggcgtattaatttgcacgttgaattatgattctcttttggaaaaaacgactggattatcgacagtattactttcagaaactcgtaaagctaccgcatggctcagaggtgaagaaaaaggtattctacatttgcatggccattgggagcagccaaattcatgtgttctaggtataagagattacgagaaaactattgataacgagttacgtgatttgttccagagaacattaggtgctttcaaacgtttgttatttataggttgtggggatacattttcagatcctaatttttcagcacttagtgattggttgcgaactcagttgagttctaattctttacagcactatgcattggtagatgaaaaacaaatattaatgcgtcacgcagatccaaaatggcaaggttttgttgagccagtaagttatggtgctattcacactgagttacctgtttttttaaatagtttatttatacaagaatcacgcaaaagaaaaacaaagaaacaaccgatagaaaaaaataatagaaatcaaaaaaacataaaacttttatctgtatataaagaattcttggttaaagactgtggccagatgacgattgaaggtgttcgtgctgatatggatacagcacagagaagattcgatttagaacggttatttgtacctttagaacttttaccctgcccacctgatatttctcttgatgacccagaaagagaaaaaaaattaaacaactggctagaaaaaaataaagaagttaaacaatttggtgatgttttctcaaaaacgaaaggtattgctcttttagccttacctggcggagggaaaagtctattactaaaacggttagctgtcgcctatgcaagccctgatagacgttcaagtagcgacgataatttaccagatattgatttaatgcctgtgttaattagatgccgcgagtggagggattatatcacacttcctattgcaacaatgttgagaaaactacccgatataagtggccagtctgtacttgaaggggttggtactgcgttaatttcgcaatttagtaaaggtaatgtacttcttttagttgatggtttggacgaaattcatgatgatggcgaacgtaccatttttgctgaaaatctaagaaattttatagatcaatacccgaaaactaaacttgtaataaccagtcgcgaagctgggtttagtttggtagctccatttttagcttcttactgtgaacaatggagagtggcacctcttaatcctcagacaataaaaatactttgtaattactggcatcaattgatggtagggcagtctcctgaagccatatctgatgcagaaaggttaggagaagtgcttgtttctaatcaatcattgaaaagattagcagaaaatccgcttctattgacaatgttattagttgttaagcatggtgcgggccgattgccacctgatagagtgagtttatatagtagagctgtagaggtattattagatacttggaatattaaaggtcatgaggcacttaatacaaaagaggctattcctcaattgtcttatgtagccttcgaattaatgaaggctggcaaacaaacagcgactgaaacagaattactaaatttattagagcaagcaagagaaaatgttcctcaaattaaaaggtatgcaaaggatactccttatgagttcttaaagcgagtcgagttaaggtccagtttgcttcttgaagcggggcatcaggttgagaatggaagagcggttcctttctatcagttccgtcatttaacttttcaagaatatttaacagcccttgccattgttgacggaaattataatggttatgattctaaatccccgatgaaaccattaaattcttatcttgattcagaagaatggaaggaaattgttccaatgagtgccgtccttgcaggaaagcagggtgatattattttgagagtgcttgttcagaaaggaaaggcgcttaaaagaaaagttgatttaggtcataacttcaaagagaaagcaaaatggatatcttttccccgactattaccaaatgtaattggaaggttggttcaaagcctaatagaagaggcacaagctgaaccagagacacttactgaggcactaaatcttgtagcctatttttcaaggggatgcgaagctgctttagattggcgagcactatgtagtgggccatattctgatgagttaataaaacaagcatggattttgtatgaaccaatgaatttaccttttgaaacatggataagaaacagttatgccagttttgcggtttatcgtaaacaatctagctattggtttagtgatgatggatataacgaaatttctgagttacttagtagttcttcagatgagaaaaaatgtttgggattaatgatttgcgcaggtattaattgggcaatgtctttgccttccaatttagttaatgagattatatcgaaagtgtttcctagagttgaacaattagtacttgataaaaacaaggcaatctccaatgttgccttatgggtatggggattgagatgtaattcttcagatttcaattacactccacctcttaatatccttgatgagattttgaaaggattgttatctgcttgtggaaaaattccttttgatatttattcatttagcatgggagcctgcttcggattaaaacgggattactggagcccagttttaaatcaagaagaaatagacctattgcgaagttgttatgatggtttaatagaaaattcatatgaaaagcatagaatgggaggtgcaatagttgtagttgcatttcattcaaaaagtattttaactgatgagcagatagtgtcgtatattactgaagtacgtaatgggcctaaaggtataagtgaatataatcttgaaaaattgaataaaacgatttcgcaaattaaccctcaagctttgggttttttgatttcacaggaggagggtaatgacatcacatcctga

SEQ ID NO: 148910 - DNA, 249 bp, Enterobacter cloacae
atgcaggtgcatgaccggcctcagggcacgccagtgctggcgctggcgggggattcagtgtcggtaaaacgcatgcaaaaccatgcgccttatgcatgcatggctttaatacgtaaaatggcgggattttcggggatttttaagcggactgttgcacagccagttctgcgcggcggcgggtgtaattcaggttctgtgcaggcgttactttttcacgattatcatcccgcgaagccgcgtcaggcctga

SEQ ID NO: 148911 - DNA, 903 bp, Enterobacter cloacae
atgtcacaggtttctgaaaacaaagttgttgctgcaccggttccgatgacgccgatgcaggagttctggcactacttcaagcgcaacaaaggcgcggtggtggggctggtgtatgtcgctatcatgatcctgattgcggtgtttgcgaacgtcctcgcgccgtataacccggcggatcagttccgcgatgcgctgctcgccccgcctgcctggcaggatggcggtagcctggcgcacctgctggggaccgatgatgtgggccgcgatgtgctgtcgcgtctgatgtacggtgcgcgcctgtcgctgctggtcggctgcctggtggtggtgttatccctgattatggggatcgtactgggtctggttgccggctacttcggcggtatcgttgataacatcatcatgcgtatcgtcgacatcatgctggcgctgccaagcctgctgctggccctggtgctggtggcgatcttcggtccgtcgatcggtaacgccgccctggcgctgacgttcgtggcgcttcctcactacgtgcgtttaacccgtgcggcggtgctggtggaagtgaaccgcgattacgtcaccgcctctcgcgtggcgggtgccggtgcgatgcgccagatgttcgtcaatatcttcccgaactgccttgcgccgctgatcgttcaggcgtcgctcggtttctctaacgccattcttgatatggccgctcttggcttcctgggcatgggtgcgcagccgccaacaccggagtggggcaccatgctctccgacgtgttgcagttcgcacaaagcgcctggtgggttgtcaccttcccgggtctggcaatcctgctgacggtgctggcatttaacctgatgggtgatggcctgcgtgatgcgcttgatcccaaactgaagcagtaa

SEQ ID NO: 148912 - DNA, 603 bp, Enterobacter cloacae
gtggctgagttcgcaccggaaagagatgttgttgagaataactcgctgagtgatgttgctgattatctggcaacgggtaaaaagccggaggacagatacaaggatgcgcagcagcaactgaaaaacgcggttgacgagtttaaggcgaagaactgcgccggactcagtgcagcggtctgtggtgcgaaaatggacgcccaccgtgatgaactgctggcaggttttgcggaaacaggctgcgactttatccctctttacggggatatcaagagctttaaggaagcggacagtgcgctgggctatctggcggccgttatcggtatcatgccagggctgggtgatgaagctggggctttactaaaaggtatagataaggcactcaaagcgggcgatcttgaaactgcgtctaaactaatcaataaagccagtgatgaaatttctggatatcttcctggtccagggaaaatatccgtactaatttctggtgttagcgctagtgccaagttctcagtaactaatgcacaggttgggaaaaacttggtaaacatgttgaagattttggtgggaatgcatcaaatgcggccgatcgagaacgtgtcttaa

SEQ ID NO: 148913 - DNA, 378 bp, Enterobacter cloacae
atgaataggttgcttctttcatggtcgatatcacaaaaaggtggcacgaagaagcctgattgctgggaagatattgttaacttattagccaaagttcatttatttagtggttgtgtaaccgtcgacagattagactgcgaaggtaatttaatctcagaaatacaagtaagaatggaaaaaggtttctatctggttacgtttttgaacgaagatgatgaggttatgtcaattaccgatttaacacaaccagatgaaaaagtgttaattttcggagattactggccagcaagtcagcttacaaaaaattatggtcttgttgtcagggtctttagggagttcttcgatactggcaatgtatcaaaggaacttcttaattaa

SEQ ID NO: 148914 - DNA, 906 bp, Enterobacter cloacae
gtgtctgaaaaaactgagcttgagccggcgaaacagacacttaaaaacagtactgatccggcagagcgcgagaaagcacagcagaaatatgacgcattacttgagaaagatatcgccagtgataaggaagttattgatgcgtgtggtaatggtaacgcgggaagctcagcgtgtgctggtgcaagactaaaagccattgcctcaaaagaggggtatgaagatggcccttataactcgaaatatagccaacagcacgctgatgcgtatgggcagatagtcaatctctttgatatcactagcgttgatgcacagaatcagcagcaggtgaaagataccatgattaactatttcttggtcaccaaaggggtggatcgtcagaccgcagaaagctacaccgaaacgaagcagggtctggagatcattgcgacttcggtaacaccaattttgggttctgctgcggcaaaacaattaagtaaagttgttgatgccaatctaaaagtcgtagccaagggaaatgtggatggagtgaagttttctgacaccaaccaaggtataagacgttcacagttagctgatttcaataaaccgacgcttatcaatgatgttgtgcaggccaagatagacaagcggccggataaaaaccttcccaatgggaatatgggaacagctcatgcagaggtaggtgtaattcagcaagcttatgaaaaaggaatgactaacggcaaggatatgtttatgtcggtaagtggggagaaagttttctcatattgtctaagcgatataaaaattatggctgaaagatcagggcttaagtcgttaacattatttgacgaaactactggtaggaccttatattggcagtcaggaacaaagggcttccgcgtaaaaggagctaatgatgaatag

SEQ ID NO: 148915 - DNA, 366 bp, Enterobacter cloacae
atgattgatatcagtaatttagataaatttaaagatgcctatttggagctgttaaagcatgaggcaggggaagaactcgatgaggatgatctttatttggctgaagatttttcaatagttcaaagttttcaaaaggatatgaaaaatcttaacttaacaatcgagctgttttttgctgcaaaagaaaataaagatgaattagcaatgcaggcagcattgttacggatatcaacttttttatcagggatatctggaatgtttgaacaaacgagagaagatattgatcgttatgtcaaaattccccatgtagccaatttcccagagaattataaaataccagagcagtataattattctattaagtaa

SEQ ID NO: 148916 - DNA, 228 bp, Enterobacter cloacae
atggaaaataagattggtttttatcaggaagtggaaatatctcctgactgcaaagaaacaaataagaaatacgcaggtaaaaaaggcggggttatggggataagtgaagaagatggaatactttatgggtactcaataaagctttatgacgaggaatatcttttgtcctttgataaagatgaagttatcccaacagggaaacagtttacgcaagatgatttttattaa

SEQ ID NO: 148917 - DNA, 495 bp, Enterobacter cloacae
atgaagcaagatgtattttattgtaaatcatggtttagagcaaaaaataaaccaattgatgtatggctagaaaagaaagcatataaaaaacatatgactggtgagtcttacaccgcactcattggctcagaatctacgccatcatgttttattgaagtaatgaaaaataaaggatgggttggggtaagttttttaaatgaaaacttgcaagagtatttgctatacaattttaaaattcttgatgataatcgtttgtttttatcaatggctgtttatcgtgaatttgctgaacacgatggcgaaggtgcaggtatattaaatgtgtcgcatggcactacatatatctttaatgaagatggtagtgctgtggtaagagaagaacagtttaatccctataaactggacgaaagtcaaacaacggtcgatgtagccggaaattatgagcagttccccgaatttggagagtatgactctttgattcgaaaagaacgctaa

SEQ ID NO: 148918 - DNA, 3498 bp, Enterobacter cloacae
gtgaatctggcggcggaagagaccacgcagggcgatagctataagtcaggcaagaaaaccgtcatcaacgagtccgtacgccagcagggaaccgagatcgccagcggggcgaatacccagatcctcgcggggcgcgatgtcaccgccgaagccgcgcaggtaacggcgaagggcgatatcggcgtggcggcaggccgcgacgtcactctcaataccgcaaccgaaagcgattatcactacaaagagcagaccaaaaccaaaaaagggttcctgagcaagaaaaccacccacaccatcgaggagaacagcgcgacgcgtgaatccggctcattgctgagtggcgataacgtgcaggtcgttgcgggcaataacctgctggtgaacggatccgccgtggcgggcgacggcgacgtgaagcttaaggcgggcaacaacgtcgatatcgtggcggcgacgaacagcgacacctcctggcgctttaaggaagagaaaaaatccggcctgatgggctcgggcgggattggcttcaccatcggcagcagcaaaagcacgcacgatctccgtgagaaaggcactacccagagtcagagcttcagtacggtgggctcgacgggggggagcgttgatattgccgccggtaatcagctgcatgtcggcggcgcggacctggtggctggcaaaaatatggcgctcaccggagacagcgtgacgatcgagccgggccacgacaggctcaccagcgatcaaaccttcaagcagaaaagcagtggcctgacgattgccctctccggcgcagtgggtgacgcggtgaacactgcggccagcacggcaatggcggtgaaagaccagagcgatggccgtctcgccgcacttcaggcgaccaaagcggcactgtcgggtgttcaggccgtgcaggccaaccgtctcgctgaagcggctaacggcagcgatcccaccaacaatggcgcgttcggcgtgatggcctccattggcggacagtcctctaaatccacctcacactcggagcaggacaaaacgaccggcagcacgctgaatgccgggggtaacctcgccatcacggcgacaggtcagggcaacgctgccaacagcggtgatattaccgtggcgggcagtcagctgaaggctggcaaggatctgacgctcaatgcggctcaggatatcaacctgacgagtgcagccgacaccaacaaactgacgggcagtaactccagcaagggtggctcaatcgggatcggtattaccgccggtccgaatggcgcgggcatcaccgtctctgccagcgtaaacgccgccagaggcagcgaaaaaggcaatggaacctcctggaacgaaacgacgctggatgccggacagaacgtcaacctgactagcggccgcgatacggtgcttaaaggcgcgcaggtcaacggcgataaggtcacggcggatgtcgggcgcgacctgaccctcagcagcctgcaggatagcgacaaatacaacagcaaacagcagagtatgaatgcgggtgcaagctacacctggggagcgggcagcggtagcggcagctttagcatcagccgcgacaagatgaagagcaactacgactcggtccaggagcagaacgggatcttcgctggcaaaggcggctttgatattaacgttggcaaccatacgcagctggacggtgcggtgattgccagccgtgctgatgcagacaaaaaccgtcttgagaccggtacgctgggctttacggacatcaacaataaggcggagtataaggttgaacatcagggtgtcggcttcagcagcggcgccggggttgcgggtaatctggttagcaacatggccagcacaatgctggcaggaatgggcggcagcggccatgctgaagggaccacgcaatcagcggtagccgacggtgctatcattgttcgcgaccaggctaaccagaagcaggacgtcagcacgctcagccgtgacactgaccatgccaacggcagcatcgacccgatctttaacaaagagaaagagcagaaacgcctgcaaaccgcgcaaatgattggcgagatcggcaatcaggttgcggatattgcgcgcaccaacggcaagattgcggccacggaagcggccaacgagaagatgaaaaccgcgggcagcgatgcgcgtaacgccgccatcagccagctgaaaaaagacggtaaagaggttaccgatcaggcgattcatgaccagatgtaccagaccttctataacgaagcgtttaaccagtctggcatgggaacggggcagagcacccagcgcgccatcacggcagcaacggcggccattcaggcgctggcaggtggtgatattaaagctgcgattgcgggcggtgccgcgccgtatatcgccaatgccatcgcgaatgccatcccggagaaggatcttaagggacgcgtgctggcccatgcggttgtcaacgccgcacttgcagccgcttccggcagagatgcggcgtccgctgcagccggtgcggcggtgggtgagctggctggtaagattgcggttgacggttttggcaaacaggtcagcgaactgagcgaggaagaaaaacagacggtatctgcgctggcgacactggcttctggtctggctggcgggcttgtcggagacagcagcacgaatgcggtagcggcggctcaggcgggcaagacgacggttgagaataacctgatgggtggtggaacagaggacgggcaggtaaaagcggcacaggagcatgcgaaaaatatcatgtcctgcagcactgcccctggtagtgcctcttgccagaaaggactggcgatgcaggatgcgttgatggtagcgctgcctgccgggcttggtggcggtttactggctgcagctacccctgaactggccgcagcagcacaggcggtactggcaggatgtcaatcggcagcgatactttgcctgaatcaggcggggatcctgactgctgaagttgcaaccccaggcggggtgggtgctgcggggatccttaccgtcggtaagaatgcagcagagattgcagcagcaaaagctgaggttacggcggcgagttctgcgaagcctggctggttgcagaatgttcaggccggtaataagtttaacgcagaacagtctaaaaattatccgtataatgaactgtatgtaaacaaacccaacggaaacggctattatcgtgttgattcatataacccggcaacaggtgagatagtgtcacgtaagttcacgcagttctctgatatcactgaatcaacagcgactaattacatccgggaggctgtgaataaataccctgcaggtgcaaccattgctaaagttccatcaagtggttcattgggcggtgatgcgttgcgtgggactaatattttagaagttcctcctcaggtaaaacccattccacaatcggttttgaatgcagcagataaggctggggtggtaatacgtgatacaaatgggaaggtttatcaatga

SEQ ID NO: 148919 - DNA, 288 bp, Enterobacter cloacae
ttgtttatcctccttattgctattaccctacatgccgaagaacatgattatggcccacctgtctctgtatgcctgaacaaacataccattccctatatcaacacgatgattccagctgaaaatattgttaatgacgcttatctgacatgccagggtgtcgttgatgaatggaatcgtgagagagaatccttgcccaaagaaatggtcatcaagcagaataaggagttgcgtgatatgtatatcaggatgattgagatgcgtcggaaagcgagtgcacacaaaaaatga

SEQ ID NO: 148920 - DNA, 645 bp, Enterobacter cloacae
atgaaactagcaatttatggcgcaggtggccttggcagagaagtgctcgaactcgcacaagagataaacgctacggaatcgcgctgggatgctttgtgtttggtcgatgataatccccaatttgatcaattaaacagttatcccattgttcccctaaacgctctcatacccgacgaatgtgaaatagttattgctgttggcgaaccttcactgcgccgcaccctcggacagagggcctttgagggcgggtttcggctggccacgcttgtccatcccagtgcgcgcctgagccgatcctgtaccctcggagaaggatgcgttattagctatggtgcattcatctcttgcgacaccgtcattagtcgcaatgtgcatcttcagcctaatgccagtttgggacatgattgccatatagggcaggactcaattatctcttcttatgccaatcttgctggtaaatgcaggatcggcgaacgcgtctttattggtatgaacgccgttatccgtgaagccacagccattggtgatgacactattatcagtatgggggccgccgtttttaacgatatcgcacccacaatgattgtgatgggtaatccagcgcgggcgattcgtccgaatatagataataaagtatttaagtag

SEQ ID NO: 148921 - DNA, 237 bp, Enterobacter cloacae
atgtcaaacctggaaacttacaaccgcatcttcactgaaacctttgaagtttcagaagatattttgtctggctataaatatcaggatacaccatcctgggactcagttggtcatatgaccatgattgcgtcacttgaagatgcatttgacatcatgatggacacggatgacattattgaattcgcatcctgggaaaaaggcaaagagatcctgaaaaaatacgatgtagaaatttag

SEQ ID NO: 148922 - DNA, 744 bp, Enterobacter cloacae
atgatgcttcatgaaaaaacggctgtgatcacaggatgcttacaaggtatcggtaaggctacgctggaaacgttcgcccgttcgggtgcgacagtatttgcttgctgccaggttcccgaaccagcctttaatgatttcatcacagaaattagcgagaaataccaagcggaaataattccactgtatttcgacctgcaggataatgatgcaataaaacatgccgcaatgacgattcagaagactaaaaaaaagattgatattttggtcaatgtggctggtgctaattttgatgccaattttcagatggtaacgctcgaacaattgcaaaaaacatttactatcaatttcttctcgcaaatcgctttcacgcaatatatcgcacgtatcatgcttcgccagaaaaagggcagcattatcaatatttccagtatttctgcccttgacggaaacccgggtcaacttgcctatgccagcgcaaaagcagcgtggattgcagccacgaaaacactatctgctgaactcggcccacagggcgtgcgtgttaacgctatcgcaccaggcgttattcgtacagcaatgacagccgcgctctcagaagaagttatggcacgacaaatggcgcgttgccaattaaaacgcccgggtttgcctgaagaagtggcgaatacgttgctgtggttggcgtccgatgcctccagttataccaccgggcaggttatccgcatcgatggcggaatgggttga

SEQ ID NO: 148923 - DNA, 744 bp, Enterobacter cloacae
atgttgatgcaaggtaaaaccgttttaattactggctgccgccgtggcatgggtctctctatggtcgaggtatttgctgccaatggtgcaaacatttacgcccatgcgcgggaagccgatgatgcgttcatagagaaaatggctgtcatagccgaccgccatcaggttgcgatctggcccgtcagtttcgatatgacagattatggcgcaatgaaactggccataaaaaacatcatgtccgacaagcgtccgctggatgcggtgatcaataacgccggcatcacgttaaatggtttgtttcagatgaccagtgaagcgcagcttcgtgagcagttcgaggtgaacttcttttccgtttatcttttcaaccagtacatcgtcagaatcatggttcgcaatcagcgcggcagcattgttaatattgcctcgactgcaggagaagatgggaacccgggaaaatctgcctacggcgcatcaaaagcagcgctcattgcgatgacaaaatccatcgcggcggagttgggtgaaaaaggtattcgcgccaactgtatcgcacccggcattacggatacggatatgctgctgacgatgcccgctcacgtcgtaaaagaagcaaaaaatagtgccgatctgcgacgcgcaggtatcccggcagaaattgcagaggcggcactgttcctcgcaagcgatctctcttcctacattaccggccaaacgattcgtattgatggcggtttgaaatga

SEQ ID NO: 148924 - DNA, 828 bp, Enterobacter cloacae
atgatacacacgcactcagaaacagaaaacgcctctcgtcgtattagaaaacaaattgtgcgcgtggctcatcacgccccaagcgatggtgttcatatctcgcctgctctttcgatggtggatatcctcagcgttctttacgggaatgtaatgcgttatgaggcaaacgacattaccagctcacatcgcgatgtttttattctgagtaaaggtcatgcagcgttggggctttatgccactctgtgtgagtttggcatcatgacccctgagcagcttaacactttcgagttgaatggctctgtcctgcaagtgcatcccactaagcatcctgaatacggcatcgatttctctggaggtagtctagctcagggactttcctttgctacagggctggcattgggacgccgtcttaagggcgaaacgtggcatacttatgcgttagtgggggatggagaatgcaatgaaggtgccatttgggaatgtgcgttcatggccgcacatcataaagtggataacctgacgctgattgtcgatcgtaatggtttacagtctgatggacacactgaagatgtcatgcgcatggatctcgaagccctctggcgtgcttgccactgggaaaccattgtctgtgacggacacgatgtgggggcgctggttaacgcttttgcacagccgcacaacggcaaacccaaagttattatcgccaataccatcaagggtaagggcgtgtccttcatggagaataacaaagagtttcatcgcaatcgcatttctgcacaacagctcaacgatgcgctagtcgaacttaatggggaacatcatgcttga

SEQ ID NO: 148925 - DNA, 963 bp, Enterobacter cloacae
atgcttgagtttaaacccgccaccatccgttcatggtcaatgctcggctcacgcggtacctttggcatggcgctgttggaactggcacgcgaacacgaaaatatcgtggcgctttccggcgatctgtgtaagtcctccggtcttgaccgctttagtaccacctggcctgaacgcttttttaacgccggaattgccgagcagaatatggtcggtgtggctgcgggtcttgcggccagcggctttatcccctttgtcacttcgttccccaacttcctgaccctgcgtgcagccgaacaggtacgtttaaacctgggctatatgcaggaaaacgttaagctggtcggtctggcttcaggattagcaacaggcatgtttggcgcaactcatcacggcattgaagaactggcgatgctgcgatccgtttctaacatcactattttctcccctgcggactgtacgaccacggtgaaaatgacccatgccgcctttgaacataaaggaccggtctacctgaggttaacgggtgggatgcgtgcgccaatcgtctataaagaggacttcgaactggtgccaggcaaagccaatacgttgcgcgagggtgtggatattgccatcatcgccaccggcagcatggtccacacttcgctcaccgcagccgggcatctcgcggaccggggcgtgcaggctacggtgattgacatgcacacaatcaaacctctggatgtggcgacacttcaacagcatctggataaaaaactgctcgtaacggtagaagagcacagcgtgacgggtggtttgggaagtgcagttgcagaatttcttgccggggaagagtgtcggccgaaactgatcatcgttggtattcctcagggttatccacacgcaggagactattcttggatgcttgagcaaagtgggctcactgcagcacaactgacagcccagatattaggtgcattataa

SEQ ID NO: 148926 - DNA, 1380 bp, Enterobacter cloacae
atggcgttctggcatactgataaggtttcacctgaccatctcgctctagtggacgatcgaggacagactcttcgctggggtgaactcacagaccgcgttcagaagctggctgaaactattccgcctcgtacattggtctttattttttgcaaaaatcagtgtgacaccataattggttatctggcttgccttaagcaaaatgcagttgcactgatgcttgatagcgagcttaacgacgcaatggttaagtcactcatagacacctatcatccctcgtatttatggcgcgaagagcacggtactttccgcctgcatgctaccggtcttacaccattccagttgcatgatgatcttgccctattgatgactacctcaggatccactggaagtagcaaactggtgcgattaagtcaacgcaacctggaaagtaatgccacaagcattgctaattatcttgctatcgactctaaagagcgcgggctggccagcctgccgctgaattacgtttatgggttatcaatcgtcaatagccatctgaaagctggcgcgacgttgcttctgacaagcgcaagtgtcatgcagcgtgagttctggacatttgtgcgtgatgaacgtgccacctcgcttgctggagtgccctacacctgggaaatgctcaagaaattgcgttttatgcgcatggatcttcctgatatgcgaacgctgacccaggctggcggaaaattggctcctgcgctggtcaaagagttcactgattatgccgatcaacacggaaaacgttttgtggtgatgtatggcgcagctgaagcaacatctcgcatggcctggcttgccccagaactggcgcaacgcaaaagtagcaccattggtactcccatccccggcggcgaatttatattgcttgacgaaaacggtgacattatcactacccccgatgttgacggagagttggtctataagggtgagaatgtggcgcttggctacgcagagcgtggttgcgatctggcattaggagatacattccaaggtattctgcacaccggcgatattgcccgcgtagataccgacgggttttactctatcgttggccgtaaaaagcgtttccttaaaatttttggcaaccgcctcggcatggatgagatggaaacgctactgaaaacagcattcccggatcttaactgcgcatgcgatgggcgcgatgatttagtctgtattttcattacagatgccgcttatgaaagcgcagtaaaacactatgcagcggctaaaagccagctccatcattccgcgtttcgcgttatcacactggatgagatacccaaaaacgccgcgggtaagacgatttatcctaagctgaaagattatgtcccttccgtttga

SEQ ID NO: 148927 - DNA, 1086 bp, Enterobacter cloacae
atgtcccttccgtttgaagcaatattagcgcaggcgccctactcgcttgcacgagaagaaaagcacgcgctccaactggccaggctgcgcgagcttaccgcgcaccattatgcgcattgcgaaccttatcgtcgtatgctggatgcacaatcctttgaccccgctacgcttagcgatgtaacctcattgccttttcttccggtttctctgtttaagacactgaaattacaaagcgtaccggatagtgacattgtaaagacaatgacctcatccggcacaaccggacagcaagtctcgcgaatttatctggacaaggtaactgcatcctaccagcaaaaaacgctggtaaaaattgtcagtcaatttactggctctggtcgtttgcccatgctgattattgactctcctgaagtgttaaaagatcggcagcaattctctgcccgcggcgccgggattttaggcttttcgttatttggtagcgatcgtgcctgggcattagacgagagcatgacgctgaatttgccagtaattgaagcctttttagagaagcatcaaggtaagcggatcctgctgttcggtttcacctttatggtctggcagcatttctatcaggaattaaaaacaagctctcatcagattgatctcagtaatgccctgttaattcacggcggcggctggaagaagctgcaaagtgaagcggtgacacccgaggtctttgctgaaagtttaaatgaactttttgccctaccggcggtacatgattattatggcatggtcgaacagaccggctgtatttacatgcaatgtgagcatggacatctgcacacgtcgattttctcggatgtcattgtccgcgatccgcacgatttttccgttctccccaacggccattcaggcattatccaggtaatatccctgttacccgaatcctatcccggacacgctttgctaaccgaagatgaaggcgtcattctgggtgaagatgactgtgattgcggacgaaaaggcaaatacatgcgtattttaggacggttgaagaaagccgaattacgggggtgtagcgatacgtatgcagcacaatcttag

SEQ ID NO: 148928 - DNA, 1248 bp, Enterobacter cloacae
atgcagcacaatcttagcggtctggactttattctgggggatgaaacactcctgcacagtatgcctgagcaaaaagcgctaccactttttgccccggatattatcgagtttctggacactttttcccgcctcacgttagccgataatgaagcgaaaaactggccagatgtgatcggcctgggtttctggtgtcgcccctcatctatcgctcgtatgcagtctgaaaaccgttcagttgctcaccgctatggacgtggagtggcatttcatattgctccgggcaatgtagctgtgaattttgcctattcgcttattgttgggctactaaccggtaactccaatattgtccgtttacccggacgcgttcacccccagacggcgatagtggtacggttatttaatagtgcgctccaaagccacccaatgatgcggccaagaattattcttgtgcgttatgatcgacaacggcacatcaatgatgcgctatcggcaatatgcgacacacgcattatctggggtggcgacaagaccatagctgatttacgtcaatcttcactttccccccgggctctggacattgccttcgccgaccgttactccatcgcggtgattaacgcagatgcttatctggcgcatcctgaaaaggaaaaacttgcgcgggcattttacaatgacacgctcttaaacgatcagaatgcatgttcttctccgtctcttatcgtctggttgggtgaaaatcaaccggaggggcgagccttgttctggcaaaattttgaggcgcttgccgctgctcgttatacgcctgagcccatctctgcagtgaataaactgacgcaattgtacttgcttagtgctcgttttgctggcgtgagaaaagtgtccggggcacaaaatatcgtcgtgcgcgtggaactctctgccctcgaaaaagagacactcgactggcgcggcaatggtggttttttcatggagtacgtggcgcggtcgcttgatgaaatcagtccggtttgtcactcacgttgccagacaatggccacctttggcgtctcgtctgatgagctgaataattggcttgcttcaggtctcagaggggtagaccgtattgtctcccttggccagacgcttgatttttctctgcaatgggacggatatgatttggtcgccatgttgacgcgtgttattgctcgtccctcctcttttcctcaccttgcgcataatgctggagaaaatgttgaaagctatacttga

SEQ ID NO: 148929 - DNA, 1128 bp, Enterobacter cloacae
ttgaaagctatacttgatatgctcagtgaaacccgcaatcacttcatcgatacgctggcgcggatgcagacaaacggtcaccccatcgtgctttgtggtgcaggttatgtctcgcaaatcacctgggattttatgcagcgtcagggaatgtccgttgattatgttgcgataagtgaagcgtggcttaaacccggggatgaattcaatggcaaacgcattgtcagtttagagtccctcacggctcaggaatcgcaatataactacattatcgctatgcagtttatcgatgagccattacgcgtagagcttgaacgtaatgccggcgtgatcctcttttatgatcccacctttgtgggaattaatgcgggtgaacactttactacggcgtggtgtgaaacccaccaggacaagcttaatgaattttatgcaaaccttaccgacgaggcgtcgaaaaccacgttaattgcgtatctgaaccagcggataagcgcgcgcgcaatctactaccaaagtgtctttcacccggaacattacttcccacatgagttgatacgcttcggtgctgaagagatctttatcgatggcggggcgtataatggcgatagtatcgccgcttttgtaaatgcccttgagcagcaaaatgttgcccctgcggctaaaattttcgcatttgaaccggacaaaacgacgttcgcgttactggaacaaaatacggctaatttgccccagtgcgtttgcatcaatgcgggaatatggaatacaaacaccacgctgcgttttaatgccggccaagccctgtcttctgccataactgatgcacctgacgccgatgaaatttcgcttaaaagtattgataacgtcgttgctggcgagaaagttacttttataaagatggatattgaaggctcagaacttgaggcattaaaaggtgcgcaggcgacgatagaaaaacattatccgatactggcaattagtctttaccataagccagtcgatctcatcaccattccacaatttattcaccagatacagcctggctatcatttttatctgcgtgctcatcatcccaggctggcatgtgaattagtgctttacgccattcctccacacagattacccacccattaa

SEQ ID NO: 148930 - DNA, 1086 bp, Enterobacter cloacae
atgccatatcttcaaaaaatctggcagaaccgaattctgactaacggcggtgaatttcatcaggaactggaagaagccctggcacgctatctgggtgtcaaatacgtatgcctttttgcaaatggtacgcttgcattgctgaccgcgcttcaggcgctgcgtgtaacgggggaagtgatcactacgccgtattcattcgtggcgacatcgcacacgctcttatggaatggtttaacccctgtatttgtcgatattgacccgcacacatttaatatcgatcctgaacgcattgaagaattaatcacgcctcaaaccacagcaattatgccagtccattgctatggtatcccttgcaatgtagataagattcagcagattgctgatatttatggtttaaaagttatctacgatgcggcccatgcttttggcgttcgccagagcgggaccagtatactcaaccatggcgatctgtcggtattaagctttcatgcgaccaaagtgtttaacacctttgagggcggggctataatttgtcacgacagccgtaccaagcaacgtattgattatctgaaaaactttggtttcgccggtgaaacgcgtgttgtcgctccgggtattaatgccaaaatgaacgagatggaagcggcatttggtctgcttcagttgcaatatattgataatgcactacttgaaagggcatcgatttcaaagcgttacagtgaagcgctgaaggatattcccggcgtaacgttctttgatgcggcagaccgatttgaatggaatcactcctattatccgattcttattgacagtagttttccgctgagtcgggatgcgctctacgaggcgttgaaaacagagaatgtctactgccgacgttacttctatccgctcattagctcgtttgcgatgtacagtcacctgccttcagccgcgtccgataaattgcctgtcgccagtcgacttgccgagcagatactttgcctacccatttatcctgacctgcaaatagaggagcaaatgcgagttatcgatatcctgcgacgctacgccacgattcctttaataaatcatcaggttgcataa

SEQ ID NO: 148931 - DNA, 825 bp, Enterobacter cloacae
atgacgatcacatgcctcatctgtaacagcgaaatgaagttctatttcgaaaaacccaagtatcatgcaccttcagcggaaaaattcacgcaaaaactgatgccagtacaatattaccaatgtcctgaatgcggtttttttagttcaaaaacccatcaggaactttcccttgaggaatgggaaaaattcaatactgattttcaccattacaatgaaaatggcgggcgcgaaacgctgggcttcaatcagcctccttatgctgaacaggcgctgatgattgagttgttggcgcgcaataatattatcgacgacagccgaattcttgattacgcggcaggctacggtacgcttagccatctcatccagaagtatttcaagcgcaacaccttttgctacgataaatatgtccagaacccggactttacctacatagacgatcccgatgaaaaaagctggtcgttagtcgtcaactccgccatgtttgagcacgtgataacacgtaacgatctggataacgtcaaccgtttggtcgatgatgctggcagtttgtttattcataccgtcgttgttgagaaagtacctgaagatccaaactggttttatatcgacgtcccggtgcacacatgtgtgcataccaataaaagtatgagcattttgatggaacagtggggatatcgatcttccgtctatagccctaagagcaaatcgtgggttttcctgcgacaaccttacaaggaagtgaagcccataattgaacgcatcaaccaagagcttcaaacgacctggcttttcggtaaagatggatttctcgattactggaaatag

SEQ ID NO: 148932 - DNA, 3321 bp, Enterobacter cloacae
gtgaccattcatgccgctgcggtgcttaatcacctgaccacgccactgcctgcctttgcccgtgtaatggagattggctgtggttcagcgacgcgtctgattatgcatgcctgggcgtatcccgagagtatcgctctgggtatcgatattgatgaagaggcgatcgtgaaggggcagaagtttgctgccgaactgggatgtcataacgttgaactgtttgctgcaggattaggggatttgctcgccgcggatcctggcgagttagattacatcattattcatcagacctttgcttttcttggaaaaagcgaacgggaagcgttgctgacatggtgtcaggcgcatttatctgccaacggcgttatcgccattaagtggtcggtactgcctggtagcataccgcgcataacgttgggtgaagcgttgcgtctccatcttgatcgcgcagaagagggcagcgatctgctggcgtcagcccgcgccatgctgagctttatgttgctcacgctggaagagggggcgctgaaaaatgaagcccttctcgctgaagaaatggacgataatacactgattctggcctacttaagcccttctgacggggcgtgtaccctcggacattttaacgtacaggctgaacaaattgggctgcactacctgggggaagtgctgccacaattggaactcggaaactactttaatccgacaatcgaacagcttctgggggccgtcagcaatggcgcaagccgaaccatgtcgcagcagtatcttgactatgccgttcaacgagacgaacgctttacgttgttctgtcacgcaaatctcacctctcctccggttaaccctgatcttgaacagctcaaaaatctgcattgggcaggaagctttgtgccggtagagctggattctgcaaaagcgcctaacgcatttagaaataataacggccagattattcgtagtgataatgccattattatcagaattatggagctgctggggaatgcctggcctatgtctttaagttttgaacagctcgtgctcaattgccgcgcacccgaaactgataaggattacaacgagacggtgtgggaggcgttaaagacgctgtttatgacctgtgcagaaggtcttttctggagtggctctgctggggcatacaacacagcacaaaacgatgaattagctctggtaggtttactaccttcggaatgtcctgaacaaaatttaagcatgatgaatctctggggagagtgggttgcattgacccccgccgagtggaattatctgcgttatgatatgggtaatgccagtcaaacgagttgggaacattactcctcattaaaaataaaaggcttgttgacaggatctcccgaggcctggataaagcagctgcaggtatttctacgtgctggcatgctcgacgtactaaaatcacagctttctctgttgttattattgagtgtcgatcgagaacagggtggtatatttctgaaaggtaatgccgaacccgaattagccgacccggacgtggacgacatctacgagcgcgcaaatagccttatccaaaaaggccgttctgaagaggctcgcgagtatactcgtggattaatgaaaaaaaatccagacaatattcacgtccttcgctgcttttcaaaaacttgcgtgctgacctccgcctgggatgacgcgctggaatcgctttgtaaactgatgggctattatttctcgagtcttgatatttattatgatcttgccactgtgttgcagcgtaaacgcgaattctatggctcgcgacagattattcgtactttgctacgtttgaataaaaaaaatatcgattactggcttagccttgcttcgctacatcatgcctatggtgatatggccttagctgaaaaatgctgcagagaaattatgcgttttcagcatccgggggcaagttctcttggactcaccggcattgtacttagtgataaccataaaatggctgaagcgcgctattttatggaaaaagccgttgagctgagtaattacaatttcggttacttcagtaacttactgtttgtcatgagccatgatgctacggtatcccctgaagaattgctgagaaaacatcttgagtttggttatcgggttgaagaatgggcgaaagggtgcgggtttaaacccgtattaaaaaatactaaagagccagacagaaagctcaaaatagggttcgtttcaggagatttacgccaacatcccgtagctaattttttactgccgacctggaacgcactggatcgtgaaaaatttgatctagtggcatatagtactcttttcatgaatgaagacagtgtttatcggcattttcgtgataccgcgacgttatggcgtcaggttgatgccctcagtgatatagaactggccaatgtcattgccgaagatgaaattgatatactcttcgatttatccgggcatacggcgtataatcgtctaccggcatttgcgctgcgcccagctccaatccaattaacctggataggttatcctggaacgactggcatcagtcaaatggactatattttattgccgacgaccctgattaagtcacaggttctcagagagcagctatctgaaaagatcatgtttgtcgagacgcgtaagcactttgagccacatcctcaaagcccggaaataaatgaactgcctgcgctacgtaatgggtatatcacctttggtagtttcaaccgggctaaaaagattaatgaccatgtgcttggcgtatgggctaaaatcatgctggccaatcctgaatcaaaactgctgatggggtttatgacggatgcggatatgattgctgcaatgacaaagcgcatgcagaaactaggagtttcccaggataaactgattttcagaggcttagttgaactggatgactatctcgcttatcatcatgaaatcgatattttactggatactttcccttataccggtgggacaacgactcatcatggtgcatggatgggagtgccgacccttactctgagtgggccaacaatcccttgcctacagggtgtggatattatggggggctatcaacttgaacagtttattgctgttgatgaacaggattacatcaataaagccgttgcctggtgtgacaatattgctgagcttgcaatcattcgccagggaatgcgtgccagaatcccgagagaaaatgattcaggtaataaaattgctgtcaatttagaaaaagcgcttagggaagcatggcatatatattgtcgtggagaaccaccccacgagttgattattacaagtcagacctttaacggatga

SEQ ID NO: 148933 - DNA, 1584 bp, Enterobacter cloacae
ttgatcattgaatatgcagtggaaaaagaaacaaaacagatcatgcatattgatgatgtgcctaatggagctaagtgtaattgcatatgtaagtcatgtaatgatgaattgattgctcgcaatggtggaaaattaaaaaaacatcatttcgcccatagaaatcttatcgagaatcgtgcttgccgaatgacgcagttgcatttagcaatgcaacattattttcttagcttagatgtattaacaatacctcaaataacatttgcgtataagaatcacacgctaaaaacaccactaataaaaaccaaaatactagccgcaaccttagaacacagaatcggaaactatgtgtcagatgtctgccttaacacagatactggattatacatcgtcgagatctgcgtaacacacaaatgcgagcctgaaaaggtacgttactttaaaaataacaaaataaatgcagtagagttagtgttcgaatactcagaagatatcgagatagaagaatggcatcaacgtattaaaaacaataaagttcccaatgaatggttttattacttcgagtgtattaaagcgattgaatgtcatgagctagctgtcgaaaaggaaataaatgaaaaacgttcaagaagattaaaaaacacactaaattcaatccacaaaacaatgaaaaataagaccatcttcctgccaagtattcatgagagtataacttatgaagaatctaatgaggtttttactgaaagcttctgcctgtacacaaagaagaatcgttccgttgataaactatcggttatacaaaaaaacgatgattatcttatcctacgtggagacaccttgcataaagggaaagaatttcatatatggataatatatttactaaatgaatttgatttgaatctaatggacgattttgatggaagtgtaattataagattctatcctatagatagtaacaatcctcaatggcgctggttgaaatatccatcacttgaaaaagaaaaaacacgagtacggtctcagttcattaaaaactgtaaagaaaatatacatataaaatccctaacaatttatatgagcaatagattaaaaaatcgctcatatgagtatttaaacatgaccgatgaactattcaatagagactacagcacatggaataaatggcttataagccataagttatttactccgaacatacagaggaagtggccgaaattacctataatgcttaaagaaatgaaagaatcacccagcctttggatgttccagagatggtcgatcttagtaattagcattatgattaatataatagataacatttcaattggaagcagcattacagtttataacatatttaatgaaatgagtgacatcctacctctcgatcctgaatttatatctttagaagcagaagcaattgccaataagaaaaccattcaactatctcatcgccatcttatctttagaaggaatataattcttgaggttctacaaccattaatcgaaagaagtattttgactgtaaaaggtgataatgtaattaaggaaacaccattgcaacaattgtttctacaaagcatagtttaa

SEQ ID NO: 148934 - DNA, 906 bp, Enterobacter cloacae
atgtgtacgttttcaggagcgtggttcctctttagctatgcacgcacccacggtatgaagtttattgatctgatacaatcaaatttactcatcagtacaggggcattatctttctttataatactctttattgttggatgttttttaatatcattcaatttatctccagcgattgcccgatgcctttattatgatatattagttcgagagaagataaaaggggctaaaagaagaaaattaatatacttattatactttacatcatgtggagtagcgtctttattcgctttttaccatttttacttcggagtttcattagttgttatagttgcattgactcttcattttttagcgattaaaaaaccctttcattataaaaaaatagccatcacattaaagttgattttatatactgcattattattagcaataagcattgctatgtttggattcctttccattacactgaattttgatatagaaacaaattcttcttttaatagttttattcaagctctttcaatatttgttattatcgttacattggcgattattggattagcggacatacatcaacgtaatcgagatctaaagaataggatatggtgttacgtttttttctccttgcttattgttttttatattgcaacagcattttcaacaggtgtatcagaaaaaatagcgaatatgatcgggttaggttacgttaatcaatgttatcatgaaaaagatctggttaaatactccatacctgaaaggttagttataacacagaaagacaaaagcaagataaaactattcattattgctgatgtaaacggaaagatatacatatctaaagataaaaatcatcgtgcagagtttatgttcattgccaaagaactaagtgaagtaagttgtgattag

SEQ ID NO: 148935 - DNA, 1068 bp, Enterobacter cloacae
atgattaatatcctaattccaatgagtggagagaatctttatgaaacctccagtgatttcatctacccaaaaattttaactgaagttgcaaataaaactctcttggaatattcgcaattaatatttgataatctgcgagacgaaaaaaatcttatttacattgctccagaagataaacttaacactcttggtttgaaatcaatcattcaaactattacagatggtaaaggtaaaattgttgccctccaagggcaaaccaagggtgctgtctgtagttgtcttatggcgatcgatgatctctcacttgatgacgaattgattatttcttctgcggatcattatattgacgataatttgcaaaggatcgttaatgattttagggccatggacgctgacgctggggttcttacctttgaatctgtgcatcccaaatggtcgtttgtaacactaaatgagcatggtgcagttgttcaggccgcagagaaaaaagcgattagcagaacagctgtagctgggctgtattattttaaaaaggcgcgtgattttgtcgaggctgcgatgaatctcattagaaaggatggcgatataaatggtaatttctatttgtcttcctgccttaatgagctcgttttgttgggtaaggttatcaaatgtcgcccgctacaagatgctatctatcataacttttatgatgcccacgcagttaaatcttttgagcttgctcagacatccctttctaatagcgttaagcaactcacgaattcctacattgaagcatttaactcgaaagatatagaagaatgtctttttcttttttcagacgatgcagttcttgttgagcccaacaaaacatttactgggaaagatgaaataaaggaattgcttaacgatatttttgtgaacaattctaaactccaattccgtgccgataatattattgctgatgatagtaaatctgcaatcaagtttacacttgagcttactaacgagactgttcatggcgttgatttcattgaatggaatagtgcgggtaaaatccataaactgactgcttttttaaatgattaa

SEQ ID NO: 148936 - DNA, 645 bp, Enterobacter cloacae
atggataataaaattaaagccgtaatcttcgatatggacggagttcttatcgaagctaaagactggcattacgaagctctaaatcgcgctttgggactcttcggtctggagataaccaagcatgaacatcttacaacctatgatggtctacctactaaagataagttagtcatgttgtctcgtgataaaggtttgtcaaatgcgctgcatacctttattaatgaaatgaagcaacagtatactatggatatggttcataaattttgtaaacctatgttccatcatgaattcgccctatcaatgcttaaacaagatgggtacaaattagctgtagcatctaattcaatacggaattccgtagaggtgatgcttgataaagctaaactattagcttatttggagttttttatttctaatcaggatgtgaaaaaaggtaagccggatcctgagatgtatactcttgctatttcaaagttgggattaagaccttctgaatgcttgattgttgaagataatgagaatgggataaaagcagctaaagcaagtggtgctcacgttcttgaagttgaaactgtatacgatgtaaattatcaaaacatcaaacaacgtattaaaaaaattgaaaacgatgagggtggaaaatga

SEQ ID NO: 148937 - DNA, 732 bp, Enterobacter cloacae
atgattgagtttgattcggtaagtaagcagtatgaaatcaaccatcgacgggccaaaagcttacgcgatgttttttcatttaacaaaaagccagatgcaaatgcagaaatatttaaagcggttgatgatgtcagctttagtattgatagcggtaaatcagtaggtgtcttgggacgaaatggtgcgggaaaatcaacgcttttaaaattattaacgcgtatcatttccccgacatcaggcaaaataactgtagatggctccatttcttgtctgctggaagttggcgctggttttcaccatgaactcagtggctacgaaaatatttttctatgtggctcaatcttgggaatgagtcgtaaacaagtcaaatctaaaatagaatctattattgatttttctgaggtcgagaaatttattgacgaacctgttaagtattattcatcaggtatgtatatgcgcttagcttttgcgataggtgctcatcttgactcggatattctagtgatcgacgaagctttggctgttggtgactctcgttttcaaaataaatgtttaaataaaatcgacgagattagaaaaagtggaaagactatattttttgttagtcatagcattgaacaagtaaaaaaagtgtgtgataccagtattgttatggatcatgggaaattattgttccagggcaatactgatgaagctgaaagaatttacaatagtcttactaatggtgcgtga

SEQ ID NO: 148938 - DNA, 819 bp, Enterobacter cloacae
atgaagggatttgtttcaacgccttccagtacaacgcgctttagtgaagtttttgaatcacgtaatttaattgcagaacttattcggcgagattttaatgtccgctataagcaaacagggcttggaatattatgggcaataattaatccaggcgtcaatattcttctttatctctttgtatttggtttgttagttaggttaccaaccccagaatataatgctccttatgctgcggtgttaatctcagcgattttattttggaatttattttctactagcatgctcacagcaagtgatgcgctgattaataacatgcatcttgttactaaagtttatttcccaaggttatctttatgtatagcaagtgtatttgttgcattgattgatttcttgatagcttttatcgtgtttgtcccgttagcattattgtatcatgtggacataagtctaattagattgcttttattaatcccatgtataattataactctgatgcttggatgtggttttggctgtgcaatggctatattgaaattgaagtatagagatattagacatatacttcctctaataacccaggttattttctttgcgtcacctattgtatatactctatccattgttccagaacaatataaaatattctattcttttaaccccatcactgggatcgtaatgatgtctcgctgggctatcttaggcggagcacccattgacttgacaatgcttacttatagcctaattagtgcatttgtcgttatgtgtttaggtgtcatttattttgttaaaaatgatcgatctgtggcggattacgaatga

SEQ ID NO: 148939 - DNA, 882 bp, Enterobacter cloacae
atgagtcataataaaaaggaatatgctaaatttttccgtcgccccattttttcatccctagcaaaaggtaaggatgtttcggatttatttggggattttgattcttactgctatgaaacactgttttcaaacaatgataataatgaatatgagatttcactaagggatttatttacatcattatatgattctttgcgtctgaattatagaaatgaatatgtttataagacagcacttgtcaataaaataatattcggtaagcacagcccaaaaacaagttcgtcgtccatagaattaccaattaaaaactctatagtggatgttgcggtgtttaatggtacgtctacagcttacgagattaagacagagtatgattcaccaaaaaggttgattactcaagcccctgattatttggatgtttttgataaggtgtatatagttacacatccagagtatgcaagtaaatattgtgctttaaatctccctagagtgggagttatggttttgaataaaaaagatcaattgagcgtcataaaggaggcagattcaaatattgattatattaaaagtgacagcttattttcagttcttagaaaggaagagttcttagctataatagaagattacacttcaactaaaataaatatgcctaacggattggtttatgaatattgtaaagagatattcatgcagatgccattaaacatagcaaataaatactttatctctgctatgaaaaaaagatgtaacgacaaagtttttttggattatatttattctcttccagcatgtttacgtgttttaggttatgcaacaccattatcaagaaagcaaaaagaattcatcatgagtttgatggatgtaaaaattaaaatttgttga

SEQ ID NO: 148940 - DNA, 951 bp, Enterobacter cloacae
atgtatagcccatatttgtatgcgagaagtacagagttattatgccttagggacctcgttgcgaagggagttagcccaaatggtctgctaccgattttagaaccaattaacgtcaatacgagaaatttattaacatgtttaaatgtttggaattctgacataattgttatccttaatccttatcaggaagatttttcttcacacaataacgtcttaactttaaatcaaaatttatcaagtgcattaacaaataaaaataatatcatctctggatatcttattcagcccaatacaacgattaatgatattaataattggttgaatgctaacttaaatagacgagttgcacttctatatgataatccatcattatccaactctgatattcagttgttggcgacaaatcagttgattggttatcatgttgttttaaataataaaatgctacctaatcagtgcgctcttcttcctttgtcgaagttaattattattagcgataactttagaaagttagcaaaaaatgctgattataatgggccggaacttttcacacacgcacatcaattcgtgggacaaaattacttaggatttggcgattatacaattactggtcaggtactagatcttggaggtggtcaaccttctgctgttgccgcacatttggtgtacaagaatttacaagcgaatacagtttggattcgtcattttgtatcaagcaacacgcaacgaggaagttcaaatgttactgcaaaatttttagatgtttcagatcaaattacaaattttgttccccaacatccaactcagtttggcagcaatattggtcttaactattattattacaatagtcaaccagctgtaaggcatttccctgggttgccaaaaaacaaacagtatcaaattactcaccatatttgtttcatgctggatttaatagcaggccgtatttaa

SEQ ID NO: 148941 - DNA, 306 bp, Enterobacter cloacae
atgtttttggtcggcacgagaggatttgaacctccgacccccgacaccccatgtcactgcgataaatccgctgtaacccttgtaaatactggtgctgagatacattcgactgtatatgcaaacagtgcattttttgcaaaatccgcactatacacatcaatgggttacagctggtttttccccatacttcttcacacaacctacgtctcaatcaacacgagactgaagattcgtaaacgaatcgacatgaaagaaatcaacaaaattctgttgattttctgtctggagcctgttaacttaatatga

SEQ ID NO: 148942 - DNA, 2259 bp, Enterobacter cloacae
atgacgagtcagaccacgccagccgacaataaaacgtccacctgcctgaagcttcgctctacgggcgtcacagcgtactgcacctttggacctgcactctattttcatcctgacagtgaaactctgatttccgttgatgcccgtgataacgatgctattgaacgagagcatggacgactggaaaagctgctggctacccgtatagatgctcagttacgtattgatgacctgacaaagcagataaccgctctcgactggtatcatgttgccgagcggaaccgcctcgaatcacagctaaaacaggaatatcaacagctcgacagtgctatcggagcattgcgaaacgagcttcaggatttgacgccggccagtcagctcccaaaggccacactgctggacgataacgccaaaaaaagcgctatcggcattatggagatgattgaaatacggggaggtggataccgtggtggccgttacacctatgtccgctccgataaaatccgcagtcactggcgccgctatcgcctgaatgatggcgaaaaacagccagcgacaaagagttttattacaaccgtcagtcataccggcgaagatggcgtcactcgcacgcggcaggaaatcgatacagagaagctgaaatcacagctggcaaaagtaaaaccttccatgaccctctgggagcagaagctgattgatgatcatgtggatgttctcacagactgggccagagaactgaatgacagcctgaaaaaacacagcgaatcggaaagcggcaacatcgtttttggcggtcaggctcagctgatgcgctggacttacggcgcaggcctcaaaggcaccctgaacccttttgaatacgacatccgcaccggtaaggtaaaaccaaccgccacggccagcgggaaactgagcgcctacgccagtctggcattggccgaagccaaaagcaccgcaaaagtgtactggcctgaccatgcaggaacccgtatctgctaccccctggagccgacacgcatccccggcggcggcatggggctgctcggcgttctgcgctttgatttcgagctcgccctgtccggcagtataggagccagtctgggtattgaagctggcatcagcttttccggggacgtggtgaaaggccttcccgtcaaagccacaccaacaggcacgcccggacagtggcgcaatgttgacatttcgaaaaccgccgaagaagtaaagcctggcgcagaactaagcctgtttgccggtgcggaagccggggccaatcttgccgggaaaatggtctggctcaatccggaccaggctggtaagggtagcgaaaaatttacctccctggcaaaagtggcggtaggtgtaacagggcaagcaggctggggggtcagtggttgcatggaactcagttggaaagatggaaaagtccgtattcgcgtcaagggtggcgtctgttccggcctcggcgcaaaaggctctgtcactctggaggtggacggtaaagccatcatgtctgattttatgccctgcctagcctatatgctacgcaatgccgactacatccgcctgatggacgttatgaaagaagatgattatggtgctttttgtgccatccctctgctggctggcatgtacaacctgaaccgggccattgatgcaggtgacgaaataattggttcactgaaagcaggatggcgagacaaagaagcccgcgtagcgctgatggagaaaatactcaccgatgctgactatctgaagtacgccccgccagaaagcaagggtgcggctatcgccgccctgatagagaaaaacgtctgggatgaggttgccagcccggccagccaccggggggaggcctgcgaggccagcaccacctttgccagccgcaagcgcgcgattctcgccgtgctgcgctgggtgcagtcaaagcgcgagtacgagaacatcatgcagcatctgtacagaaaaataggcgaaaaaggcgactggaaggtcaacgaggcccgcgttatagcgtttctggctgagggtgagcaaccacgcgagtatggatacgatgccagtttcattccaggcacacagaaggtcatcatcacccccagccattatgctgaaaacctgcacgccatttacacccatttgcctgatgcccccgccgtttcaccgggtcacccgaacgaattcatgctccctctcactcctgtgtcgccgtcattcctgcacagctgcaccacctacataaccacccagcacggacgataa

SEQ ID NO: 148943 - DNA, 867 bp, Enterobacter cloacae
atgaccggacaggccctttcacgcttaaccctgacagcactggtgctggtcgccatcaccggctgtcgggatgagcaaaaaattaaagccgaccaggatgcactggttcgtacctcactggaaaatctgataacagtgaagggcggtgagtttcagatgggggattttggccgcctgattgatgaacatcttcctttcaatccagaccaggacactccccttcattccgtcacactgtcagactttcgtatcggaaaataccgtgttacctggggcgaatttaaccgctggctgtcgatacaaggcagggggaaaactgagtactatcaacaaacgatggatgataaagacccggactttcagtctgataaaatcctgtttggcgataattaccctgccagtgttagctggcaggacgcccgcgattactgccagtggttgggtaaaaacactcatcgtaatatggatctccccactgaagcgcagtgggagtacgcagcccgcagtagggggcggttatttattttcgctaacgccgataacaaaaattacgtctggaacgacaaaaaccgtaactatgcgtcatccagcaaaaaaaaacctgtcggtagttttcctgctaatccgcttggtctctacgacatgatggggaacggagcggactgggtaaaagactggtatgcggcagattactaccttcattcgccagaaaaagatccacaaggtccagagtcaggaaagaaaaagtcagtgcgaggcagcacaggatcaggacatactctaagtattgaacgcagcagcctcaagcctgatagcgaatggggttcagagttccgctgtgtagagaacagcccgctcagtaattga

SEQ ID NO: 148944 - DNA, 249 bp, Enterobacter cloacae
atggctaccggtagctttaatcccgacagagccacccatcatgaattggctatcacatacgttgacgcctttcgggcaattatctttggcaaagcccaggtcataacctacatagggaataagctgatagataccgccgacgccaacatcgaatggaaactgcagggtattggcgattcagccgccgctatcaaccagcaggctatcgtccttgaagccgcgtacggtgaattcatcgcccagcgttaa

SEQ ID NO: 148945 - DNA, 1548 bp, Enterobacter cloacae
atgaatatgctccgtaatttcacgatccgtttcgtcatgctggcgattctcgggatcttttgtttaatgtgggcgggtgttgggctgtacagcacctggtctctgtctcgcgtttcagatggcaacgaggtggaccgccagctggtcaagcagatgacggtgctcagccagggcaacgatcagtatttccgctttgtgacacgtctgagccgcgcaatggaagtcaaagccgcaggcggcacgccggatctggcctctgcccagcaggcgctggataacatgggcaagaagctggccgagatgaaggcgatctccccaggcccaatggatccccaggtctcttcccgggtgatcggtgcctggcaggcgctgctcgaacagggcgtgacgccgcaaatgcagcaggcgaaactgggcgcgctggacggctatcgtcagcaggccaataacgtcacgccaacgctgagccgcgcgttcggcgcggcggctgaagagttcaacaatgctgccgcgaagtcgctcgacagcacccgcgtggtggtggacggcctgaccagcatgacccgtacggtgattatcgtcgccacgatcgtcggtctgctgatcctgctcttcaccgaccgttacctggtcgcgatgctggtcaaaccgctggaccgcattcgccagcagttccgccagattgctcagggcgatctcagccagcccattgaaccgttcggccgcaactgcgtgggacagctggtgccgctgctgagcgccatgcaggacagcctgcgcgaggcggtcagcacgatccgctccggcagtgaaaatatctggcgcggggcgacggagatttccagcggtaacaacgatctctcctcccgtaccgaagagcaggcggcggcgctggaagagacggcagccagcatggaacagctgaccgctacggtgaaactgaacgcggagagcgcccgccaggcaagccagctggccgatgtggcctcaaccaccgccagccgcggcggttcgctggtggaagaggtggtaagcaccatgagcggtatttcggaaagctcgaagaaaattgctgaaatcaccaacgtcattaacagcattgccttccagaccaatattctggcacttaacgcggcggttgaagcagcacgcgcgggcgaacaggggcgcggcttcgccgtcgtcgcgggcgaagtccgcaacctggcaagccgcagcgccaacgcggcgaaagagattgaggggctgattaccgattccgtttcccgcgtcgagcagggtgcaaagctggtaagcgacacgggtacgaccatggatgcgattttgcgggacgtgacggaagtgacgaccattatgaagcaaatcgcctctgcctctgaggagcagagtaagggcatttcgcaggtcggtatcgccattacccagatggacggcgtcacccagcaaaacgcctcgctggtggaggaggtttccgcggcggcttcggcgctggagcgtcagaccgaagatcttcagcgctcggtgcagaagttccgcctgacggcataa

SEQ ID NO: 148946 - DNA, 1533 bp, Enterobacter cloacae
atgacaaagcatttagaactaccttttaattggtctgataaagttgaagacttaccacctgatactctcgaacgtagtgaatatgctcgattcttaacatcttttttagtagataaaggaacagatggtaattatgttttaaacttagacgcacaatggggggcaggcaaaacatggtttatacgtaggtggatgcatgaaatatccaatacctatccgacagtttatattgatgcatggaaaaatgatcactctggggatccttttctgacagttgtttcagagattaaatcatcgctaacaactaaaacagaactctctattttagaaaacaatgtaattaaaggcacatggcgattgatgaaatcaattgcgccagaagtaaccaagtgttttattaaaaacaaacttggaattgatactgaggatcttgatctcgactctgaggctgatcttggttcaaaaatagtagatgaattactaaaatctcatgagcaagcaaactcttcagccgaaaatttcaaaaaatcaatacatgaatggctcgaagcagtaatagatacgaatgaaggtaaatatgcatacccactttttattttcattgatgaactggatcgctgtcgaccgaactatgccatcgatatgcttgaaactataaagcatctctttgacataaataatgttgttttcgtcattgcaactgataaagaacaattgtctcactcaatttgttctgtttatggctccggatttgatgccactagatatcttgatcgattttttatacgttctgtcaccttaaaaaagagaagtttatttgatttcatagataaaagaataagcaactctgttacttttaacaaaacaatactcactaaagaaataattatacatgatcaacaaactgataaagttcttttagtgaaggaaattttaaccactattgcagatggtttttcaatggatttaaggacagtaaacttgtggtttgaaagacttgaatccatatatagccacacaaataaaaacattgagattatatcattaagttttatgctagctatctatacatgtcataacacatactataaggatatgttgtctggaatagacatattctccaacaacagtaaaaaaaccatattttccatattcaaaccccaaacaaacttcactactaaaacatcaactaaagacatattattaaacacaacatcttttacattttctgcttaccccatacatgactatgtattttctgaaaaaataaacccaatatacttaatttcaataattatgagtaaatttggaataagccataaccataaacaaaagaaagataaaatacttaatgatattttacactccccaaataattacgatgcaattgaaaagcaaacatattattttgatgggaaacaatacaaaataaaccaagcaactgatatttatatagacaaattttttgaggaaaatccaatatcattaaaggattaccatgatttatgcgagttagcgatgttaatagaatag

SEQ ID NO: 148947 - DNA, 465 bp, Enterobacter cloacae
atggctactgttccaacccttaatttttcaaatcatcacgacgaatttatctatcagctaatctctcatccgcttccctctaatgcagatctttttgatgttgcagatttcagcgccgcgtttgcgagcgtgcttgtcgaaacggacgatgccgcagaacgcaatgccatatgtggacgcttactaaatgcgcttatccatatggaaagtctttgcgaaaatgatctgccagtgcatttaatcgacaagctttctgcggaagaaatacccgtctccactatgcctgaatgctggcaggagactgacattcccgtttcttacgccgttgctcttacacaatcgttgctaactaataatctgcctgaggcagtagcgaaagcgttaactgggcttttgcatgatctcgtctacttgttggctgattttgtgaaggaaccctatattcagcgacagaaaatgctctga

SEQ ID NO: 148948 - DNA, 129 bp, Enterobacter cloacae
atgaatggtcttttccatatagatcagttaatgaagttgatagaaatacagcactatatcccagccttccgcaagaaacaaaccttcattatgttggtattacaagagctgagaaatgctgcgtattaa

SEQ ID NO: 148949 - DNA, 1656 bp, Enterobacter cloacae
atgagcattatgatacagccaacaaagaaccgtttcggcgtttaccttgtccgtaaggccgtccccaaacacctgcaaggcatcctcaataaacgtgagatcaagttcacccttgataccaaagacgtgagggaggccagagaacgtgcacccgcaaaaatcattcagatcgacatgatgctcaggctggcagaaaagcagcttgaagcagaagaatccttaactgatgccgatatcgagatgatctctggtgtatgggcttcacgtaccatgcagaatgacgagctaatccgggagcgatacctcgttgaagatgttctagatggtaaaacaggaatgttccactcgccggagaacgacatcattcacgattggctggaagaccgcgaacgcaagccccgctacaagtcagaaacatggcaggcagaacgtgacgaatccatcagcaaactaatggctgtagagctggatgaagctctggaatacacgcctgtcgttctcaccccaatctggcgaatccgtctggcatggcgactagctgaacggcgtagcgatatcacgaatgcttaccttctgaaccttcacccccggctttacgccagaagcaaaggtctggacgccctccccgcagaaagacccgaaactctcaccttcgcgggcctgttcgaacgctataaagatcacgttatgcgtcatgaaccactgcgtgcagaaagtcggattatcgcctacacaacatcggcaaatcgcttcattgagtttattgggcagaaggccgtagaggacatcaccgttactgacctcgccgacttccgtaacctgctcgaaaagctcccatcccgtccttctaaggcgatacggttactgccactgcacaagcaggtggacgctgaaggtgaaaaaatcagccctatccgtgtcgaaaatatacttaaagagctgtcatcggtcttccgcgtcgcggtagaggacggcaagctaacagagaacccgctaggcaagctgaagaaacgtaaggtcgtcgctggcccaacagtcgttaggtctttcagtcgcgatgaaatcagccgtatcttctctctgcccgtattccacggtgaagaaacgccgtatggggctatggcatactggataccgataattctctactactgcggtgcccgcgttgaggaaatcgcccagctccgtaagggtgacatcgtggaggtggacagtacaccctgcttcaggctgacaatgggtgaaggccagtcgatcaagatgggtaacacacgccagttcccgatacacagccacctgatcgagctgggcttccttgatttcgtgcagtccagcaccaatcagctctttgccgataagtccgaagtgaaccggaaatactcttacaactatggccgctggtggggcaaatacattcgtgagcacagcctgacacgggaaggcatcaagcctacccacagcttccgccatacgctcgttaccctgttccgcgatttggacgtccgtgaagaaattcaggacagcattctcgggcataatgagaactcccccgacagagcaaaggccagccacggctacggagagaagtccgtggaggcccagcgtcgtgccattgaacaaatccccagactggagctaaagcggctggaaaactga

SEQ ID NO: 148950 - DNA, 936 bp, Enterobacter cloacae
atgttaaaatttcatgactcagactggcggatcgttgatggggccccccagatttccgttgctttcttgcggaaaatgacgcctcaggcagccagatttactcaatgggtacaacggacacatgccaaattgctcagggctcccgaaaatgtcctgtcgtactgcacatccggcctgattaacggtgacattcccgacaaaaacggctggctttacgctggtgatgcccttgccctgctgacttacagcattcactccagccagaacaggcttctcattgatgccattgagcaaagatctggtctgatactcccagtgagacccggtgaaagccgtcttgaggggcaattttccgtcagattacgcgatttgatagttgaattaagggaccagccgcatttcgtccactatgagcttgtacagcaaaagcaaattgaccgttaccgggtggatttcttcctcaccgagcagtggtacaccgatatggcaaaaggggaaactgctaaacgccatttcatcattgaatttgacgaggaagctcacagaacgacacgttatcagctcaatgataagcgacgggatcggtggttacggaaaaatcggcccgatataaagctaatcagggtcagacatgcagagcaggaaacatggctggaagcggtccgccagctaaagcggttcgtcagtctggaggattgctatgcccattgcctgcgaaaggcctgtatcagcctttctgaatccacgctaaagataagcagcgagtcagcccggaaagcctatgatgcagcccataacgagtgcagtttcctgctaaaaagcccacggcagcccctcagtgagatgggtaaactgctggacaggctgacaatcccctttgataaacgcagggacaagtacttcccacgtgcaaaattgaggtcataccgtatataa

SEQ ID NO: 148951 - DNA, 666 bp, Enterobacter cloacae
atgaaatggatacttatggtagtcagttttgtgactcttccgaccttggcggcataccagccgacagatgaggaggcacagatgctacaagccaatcgtgtaggattggaaagaaatatgaaaaatgccctcccacttcaggccaaaacggatatctgcataggttacattaagaattccggggtactcaaaaaccaagcaggttacgttcccgaagtcgtaagcgtccttgaatactgggggagggtaaaacattatgtcgatcagtctgttgattatgctggaaacaggtatccacggctttactactatgaccagaaactgtatgaaaagtatggcccatatccaaaagataatgctgataccgataagttgttcaatgatgctcttagcaacaactatctaaacgcaaaaggttatattgcagcaacacaacagtattcagaggatcttcgtaagaaagacttgcacaagatttgcctggagtcagttacgaaaaaaatgagggggcagctttcaccagcaacggcaagtatggataaattgttctatccgggcataacatcggatgatacgggtgaaaaattcaatgagtatcgagcccagttttatgggcacctgcaatttactcagctactcaacaaaattgaagcatcctactattga

SEQ ID NO: 148952 - DNA, 2226 bp, Enterobacter cloacae
atggggaatacagcaaccgttcatggcagtggcaaaacagggatgcaggcaaagggcattaaagccagccatatatcaggtacccgcctttattttcatgctgacagtgaaacatttctggctgttgatggtgatgaattggaacaggaaagtaatgtcctgaatagcctgttaggccaccaggttgatacgcagatgcgtattgatgatttaactttgcagtgcaccagactaaactgggggcaaattagtgaacgtactgccctgcaaacccaaatacaacaggaagcccagcgacttgatgatctgaataaacaattgaaagttaaattgacaacgctttcagcaacagaggaacctccgaagaccacactccttgataatagcagcaaaagtgctgttggcctgatggagttaatcgaagtccggggtggcatgaaaggtgttcgttacatttatgcccgttcagatcaaattgacagcaaatggcgacgttatccgcttgaagatagcgataaaaagtctggtggtaagagctttgttatatctgagtcatatattgacaatgagggaaatacaaggacaagagaaaagatcgattacgataagctgaaaacgcagataagcaaagtaaaacccaaaatgctgaaggctgagcaggatttattagaacagcacacaggtgttcttggacaatgggcgagggatatgaatgacagcctcaaacattccccctatcagggagagcgattgggttttgatgctcagtctcagcttatgcgctggacttatggagcaggtctgacggaagaattaaatccgtttgaagtagattttcgtaatcaaggtataaaggtaaaaaaagaagctgtcaccagcggaaaagcaagtgcatatgcaagtctcgctctcgctgagtctaaaagcaaattaaccctgtcacttccagacatacatggtattacgatgacttatcccctgaagcctgaaatgggtgggggaatgggaagtctgggggtattacgttttgattttgaactgactttggcgggcagtgttggtgcaagcttaggcgttgagttgggtgtatcggtgaaaagcaactgggcgaaaggcgtcccggggccttcaggtgatggaactgctcctgctcccggacaacgtaaaattgatatcagccaggtggtgaaagagccggaagcaacaggggaattaaccgtctttgccggggcccaggcatcagcaaacctttcaggtgcaatcaaatggtgcaacccggagaaaaacaaagaatatacctatcttgcgaaagtatctttgggagcaactgcccaaatcggagctggctggagtggcacgttcagatttagttatgaaaatggaaaagtacaggttctggcacgtggcgggatgtgctggggcggaggagggaaaggaagtgttgcttttgatatcgatggaatagcgataattaccgattttcttccttgcttaacatatatgctacgcaatgctgactacattaaactgtctagtactgtgatccgtgatggggatttttatgcgttctgtgcacttccattattatcctcaatgtatggggttaatcttttggtggatagcgcgtggagtcaaacagacaaacttctcgataatcttcgagatagttgggaaataaaagaacaaagagtgaggcttatgcaggagattatcgacactcagggagagtgtttgaaattctcccctcctgaaagcaaaggcgcagcaattgcttctttaatagaacatggtttttgggatgaattcgctagccctgcctcgaatgcacaaactgattgtgagggattagttatgtttagcgccagaaaacgtgccgttttattgtgtcttcgctgggttcaatctaaacgtgagtacgaaaatgtaatgcagcacctctctaaaaattttgtagctgttggttcatggcaaggaaaccaacaaagtgttgcggattttcttgctctgggggaacagccgcgagtttacggctctaaaaacagcgtgcctaatgcatccgaaataaagatattacccagccattatgctaaaaatcttatggatatttggtccagtttaccaagtacagaggaagttaatgggactgaattgcataaattaaaagaagtttctccagtgctaatgcaaagttgtactcgtgtagttgtgggggggcaggagttgtga

SEQ ID NO: 148953 - DNA, 2493 bp, Enterobacter cloacae
atggaaaacatatttaaaatgacagagggcatccttaatcgctataaactggatattccttcctgcccttatccattggatgtggaacgttttgatggtttagaacaaatgagtgctctctatcattacaccattcgttttaccagttcacatccggatcttacggctgaaatgatgttaagtaaaaccgctacgctgagcatgggggtggggaaactattagattctgttgtcggtaaaattgttcatggtgtggtgacaaatttccgacgcttggccggttcacgcgatcaggttacgtatgaaattattctggaaccttttatatccttactggataagcagtttcgtactcaccgtttcttcgtcaacaaatcagtgccggaagtggtagagcaaattcttggcgagcatggtttgaaggggtgggaatatgaattcaagcttaaacaaacctacccaaaacgtgaacagataaatcagtaccaggaaagtgacctcgcgtttatcgagcgtctgctggctgaggtggggattttttacttcttcaccctgcaaccggatacccagactgaagtggtgcactttgcggataagcagagcgcctggacattcggtaaaaaactgccacttaatagcccttcgggcaccaatgacaatgccgttgactcggtgtgggatatccacgtctggcacaacgtggtggaacgttcggtcaccgccagcgactataaccatcgcgaagcgcagaatattctgacgtccgtcccggcagacatgacccagggcgacggtgacggtatcacttatggtgatgtgtatcactatcgtccgcgtcacctcgagcggggtgacaaaattacccctgcaaccgaaaccggtaacttctgggctcgtctggagcatgaacgttttttgtccgcccagactacagtgaccggcagcagtacggaccataccctgggcccggcgcaggttcttaccattaccgaaaccgctatctcgccgacactaccccgtgaaacggagaatggtgttgttattatccgcactggctactacggcagccgtaagaatgccttgaaagtgacatgggtagcgatgccgtactacgagaaccgatgctggcgtccagccgcgaaaaagcgtccggtggtcagcggcaccctgatggcgcgtgtgaccagtgccaaagataacgacatctacgcctggcaggatgcatccggcatgtaccgggtgaagtttgatgccgaccgtgatgataaaaagcagggcatggaaagcatgccagtgcgctttgccaagccttatggtggggacaaatacggattccacttcccattgatccagggtactgaagtcgccattgccttccatgaaggcgatccggatcggccgtatattgcccatgccatgcacgactcccgtcatgtggaccacgtcaccgagaagaacagtacccgcaacgtgatacgcacggctggcctgaacaaactgcggatggaggataagcgcggcgaggagcacgttaagctcagtacagagtacgggggcaagacgcagctcaatttagggcacaatgtagacgcttccagggatcttcgtggtgagggggcagaactgcgcaccgaccggcatgtttccattcgtggtggtgccggggtgttcattaccgccgataaacagccgtttgccggcgataagatgctgtcgatgcgggaagcgatatctcaactggaaaatgcattgagtattgccagaagtctttctgatgctgctgaaacggcagaggcattgccagcagatattcagagccaggttaagctgacggagtccctgaaagagctggcccggccaggtatggtactgaatgcgccggaaggggtgagtatcaccagcccgcaggcagttcgtatggcatcggggagagcaagcgtcgggattatatcccagcagaatacggacatcagtgcgctgaagcgctttacggtggcggcgggtgaagccgtgagcatgctggcccgaaaggccgggatgaaactctttgcggctaagggcaaagtggaaatccaggcgcaggatgatgcgctggaggccattgccaaaaaggacgtcacggtgaccagtacggaaggacggattgagatcactgcggcgaaagatatagtgctgaaaaacctggatggctcatttatccagataacgggtaagaacatcatacttggctgtgaaggtaatgtgctgtggaaatgtgctaatgcgcagaaaatgggaaccgcaaactataccacttctgtaccggaatttcccggtggatacagtgaatattttgttgcgcatgacgaaaaaacaggacagcttgctccgaatacgcgctatcgcattacgaccagtaaaggcgatgttttttccggcataacggattcagacgggaatactgccgaaatattcacggctttatctgacaagatcaaagtagaacttggataa

SEQ ID NO: 148954 - DNA, 228 bp, Enterobacter cloacae
atgaatataaaagattttatacttatcattgtttcacggatcgtagccagtatcgggatgacgctaggaactgtaagtatgatttactctttctactgtttctttttttcagccaatccttaccgctttattctaggtggggcaggtatagtagcctttctcataggttatggactttataaattcgccttgaaatacatttatgatgaatgggagcattatagatag

SEQ ID NO: 148955 - DNA, 642 bp, Enterobacter cloacae
atggacagcgcaaaagagattgccagagatatgcttgaggccattcatatcgatgggtctgggtttatcggtgctgtggcgaaaggtgttatttccttacccgtcagccttgcctatcttggctatgattttatagatacggaacaccgcagagagaatcaggatgataaatttcggttagcagcactggttaaaaaagtaacttttaacgatgaggttatttataaggttattaaaccatttatagatgattttgtttctcatgtagacatgcataaaatttcccatttttcaagagatatatctggaagtgttataggtaaaatgatgttctcgcagtttacgggggttaacctcggaagggcgattatatctcaaggagttggtgcctttttttctggttctgttgctggtggtgtattgggagttggtgctgaagcatcaagatctatttatacatcacgatacttgcgtgaaagaaaccccataatgtatgagaaattaaacagtatgggtgattttgatcttttttattatcttgttgaggacattgttaggccttatgagacggcttgtgaaattgcaaagataaatcctgaagagtttaataatgtctgcgaatacttctttggaggtttatga

SEQ ID NO: 148956 - DNA, 2637 bp, Enterobacter cloacae
atggaaaatccagccatcctgttacgtcgtctgaacccttactgtgcccgagcgatggaaggcgcagcttcgctctgtcagacccgtgcccatgccgaaattctgccggagcactggctgctgaagctgctggagcagggggaaggtgacctgacggtgttggcgcgtcgctatgaatgggatatggatggcatttggcaggatttacttggctggctcgacagacaacctcgctccgtgcgccatcggccccagctctctgatgacattcagactctgatgcagcaagcctggctacttgcctcactcaatggcgaagagcacattcgcagcatccatctgctgatggccctggtggaaaaaccaaaactggcacgttgtgacggcctttggccgttgttaacgcttgctcagagccagctggagcgcctgcgaccgttgctggatgcgcaatcggatgaacgtccggaaatgcagcgcgaagccgagctgacacagaaccacggtggtgaggtggagtttgtcgggcgtccggctggtgcggaaatgaaagagggggaactgagccctgcgctgcagaacacgctggataaattcaccctcgatgtcaccgccaaagcgaaggaagggaagatcgatccggtgtttggccgtgacacagaaatccgtcagatggtggatatcctctctcgtcgccgcaaaaacaatccgattctggtcggcgagccgggcgtagggaaaaccgcactggttgaaggtctggcattgcgtattgccgagggtaatgtgcctgaatcactgaaaacggtcactctgcgtacccttgacctgggcctgctgcaggccggtgcaggcgtgaaaggcgagttcgaacagcggctgaaaaacgtcatcgatgcggtgcagcaatccccgtccccggtcctgctatttattgatgaagcgcataccatcatcggcgcgggcaaccaggcgggaggcgccgatgcagcgaacctgctaaaaccggcgctggcgcgtggcgaactgcgtacgattgcggccacaacctggagcgagtacaagcagtacttcgaacgcgacgcggccctggagcgtcgtttccagatggtaaaagtcgatgagcctgacgatgacaccgcctgcctgatgctccgtggtttgaaatcccgttacgccgagcaccatcacgtgcatattaccgacgatgcggtgcgcgctgctgttacgctttcccgccgctacctcacgggccgccagttgccggataaggcggttgatctgctcgacaccgccgcagcgcgcgtccgcatgagcctcgacacggtgccggaacagctgacctgcattcgctcgcagattacctctcttgaaatggagaagcaggcgctgctggaagatattgctgtcggcaatcagagccatggtgaacgcctgaccgtcattgagcaggaagagaacgctcttatcgttgctctcgacgagcttgaaacacagtacgggcaggaactgaaactcaccgaacaactgctggaaagccgccaggacatctcccgtcaaagcgagacgcgcgcgctgcagcaggaactgaacggcatgctgcagcacagcaacccgctgctctctctggatgttgacgtacgcaccgttgccaacgtgattgctgactggacaggcgttccgctgtcatcgctgatgaaagatgagcagaccgaactgctgaccctggaaaatgaaatgggtaaacgtgtggtcgggcaggatgcggcgctcgaggctatcgcccagcgtctgcgtgcggcaaaaacggggctcacctccgagaatggcccgcagggcgtctttctgctggtgggaccgagcggggtggggaaaactgaaaccgcgcttgcgctggccgatgtcatgtacggtggcgagaagtcactcattacgattaacctctccgaataccaggagccgcatacggtttcccagctgaagggttcccctccgggttacgttggttatggccagggagggatactgaccgaagccgtgcgcaagcgcccgtatagtgtggttttgctcgatgaagtcgaaaaagcccaccgcgacgtgatgaacctgttctatcaggtctttgaccgcggctttatgcgcgacggcgaagggcgtgaaatcgacttccgtaacaccgttattctgatgacctctaaccttggcagtgaccacctgatgcagctgctggatgagaaacctgaagccagcgaaggcgatcttcacgagctgctgcgtccgatactgcgcgatcacttccagccggcgctgctggcccgcttccagaccgtgatttatcgtcctctggcggaagcggccatgcgtaccatcgtggaaatgaagctgttactggttagcaagcgcctgcatcgacactacggcctgaccacgcacattaatgagagcctgtgtgacgccctgactgccgcctgcctgctgccggacaccggcgcacgcaacgtcgacagcctgctgaaccagcaaatcctgccggtgctgagccagcagctgctcacgcgcatggccgcgaagcagaagccacacagcctgacgctgggcggggatgacgaagaagggattgtgctggcgtttgattaa

SEQ ID NO: 148957 - DNA, 1338 bp, Enterobacter cloacae
atgaaaatttaccgcccactttgggaggatggggccgctctggccccgcaacagttccagcagcaggtccgctggaatgagcacgttgccaacattgtcgcccggatgggtatttctcatccctggggcgtggttgctgcagagtttgatgatgcggcacttgcgctctcgcgcctgaatgccattcgtctcgtcgtacgtttccaggatggcacaattgttgatacggatctggcggataatattccgccggtctgtgatttgtccgtcgcaaagggctttgaagctgttgaggtggttgccgcactgccgctgctgagtgccagtggtggcaacctcgataacgggcaggacagtgagcgcccacgtcgctggaaagccgaacgtgtagtggtgcaggaactggctggtcatgaaaacggggaactcgccattctgcgtaatgcggtaaccctgcgtctgtccagccaggaaaacacggcatacctaacctgtccggtgacccgtctggtacgtaatgctcaggggcagtggggccgggatcctgctttcattcccccaatgctttccgtttctgcaagtccatcgctgaccacagaactgggggacctactggttcgtctgcaggtccgccgccgtcgcctgatgggaatgcgccgtgaaagcaatgagcggatggcagactttgctgtcgcggatgtctccctgttctggctgctgaatgccctgaacagcgccgagccggtgctgattgaactgcttcagacgcctgagcgccacccggaattgttgtatcgcgaactgacacgtctggccggcagcctgctgactttctcacttgagcacgacgccagcgatattcctgcttaccagcacgatgcaccggaacgagtattcccacctctgctggcactgctggacaaactactggaagcgagcctgccgtcgcgggtaatcagtatccacctggagcatcaggaccagatctggaaaggtgccctgcacgacgcgcgtctgcgcgaaggggcggacttctatctctcagtacgctcctccatgccgaaccatgagctccagacaaaattcccgcagttgtgtaaagcgggcagctttgatgatgtttcggatgtggtgaatgtagcgctgagtgggatgcttattaagcctttgacgcatgttccggccgctatcccgctgcgccttgagaaccagtatttctcgctggatttgagcagtgaggcggctcgcgcgatgcttgaaatgggctgttgcaccttctataccccgcgctcgctggggaatgttgatctcgaactctttgcggtgctgcgtacatga

SEQ ID NO: 148958 - DNA, 393 bp, Enterobacter cloacae
atggacgataaagagcagtttacgaatcttgtggcaaagcatgcctccggactcaccgaagagcagctggccgggtacgatgcctgttccctggatggtgaatgcgtcacgccttcatacgaggttttccgggggtatcgtacccgccacacactggatgaatttctggagatggccatatcgctgaatgccatccacccggatgaatatttaacggatatgctgctgaagcctcatgaggtgatcggcgctctggccgatgaaggcgaccagctgaacaacgccaccccggtttatttctttccggataccggcgtctatgcagcggccgttagtgaaacccgggtgctcgatgcctggctttgctggccatgctacccggcgaactggtaa

SEQ ID NO: 148959 - DNA, 1131 bp, Enterobacter cloacae
atgggaaaacgctctgaaattaaattcataagaccttgcctctccatatatgaaaataataaggtattgaccccagcttatactttgcagtgtttgacgcagaaaaaagtggttcagataaacttagataattgctctttacaaagaatggaggaattatcatcgacatcaactctggaggatgtaaaacgagttggtctattgccgttagtaaatttattacaatcaggaaatgtatgtttaactgcaattggtgttaatgaaatgcctgatatatgggttgagaaatcaatggcggcctatcagaacttttgccaccgattctggcctggtcatattgacgatcccgaggcgactttcagggaatacaccccagactctgaaaaaaagaaaattaattttcaggaactttccgttgaagcaaggacagtatatggccttcattatatatctatgcttcaaattcaaaatataaaattaaactattctcatctcacgcctgaaaaaagattcgaagtatatctttatagcatgataagcttcattgacatgattagtgcgtatgatttagaaatagcaaaatatgctttttgggatcttgactcaaacaccattaatcagctgccagagagtatacatacgcgtcgaaaatatataaaagagaatttttataagaacggaagtaatcttgataaatgtcgatggtatgcatttgatgcagcgatggatttacactggcttacgggagctaatttttcagaagatataggatctttcatcactgtaaatggtgtaaagtttgagaccgaacattgggtcgggacaaacgataaaaaattacattatatctcacagaatattcatcatgtttattatgaaggttcaacaatgaaggcgttgagtgtctgtagagaagatgagttgatcgcatttcaatactggaaaattgtcgataacatttcagcgtccgtgctattattccgaaaaaatttaaaaaaagaatcaaatcagaaaattactaaaatgattgatttggctgttcagcaaatcgaaaatgacatacaattttttttcttaaagaaggaacagctaaaatcccagcatcaaatagatatttccagttcactttaa

SEQ ID NO: 148960 - DNA, 2598 bp, Enterobacter cloacae
ttgcaaaatcaggaatttattgccggccttaaagcaaaattcgccgaacatcgcatcgttttctggcacgatcccgataagcgtttcctcgaagagctgggtaatctcaaactggagaacctcacgctgctcgacatgaccgatcagtcgcagctggcggttaaaaagcgcattgaaattgatgagcctgaacagcagtttttgctgtggttcccccacgacgtgcctccaaaagagttcgactggctgctggatattcgtctttatagtacggagttccatgccgatttcgccgccatcacgctgaatacgttaggcattccgcagcttggcctacgcgagcacatacaacgccggaaggcatttttcagtactaaacgtctttctgccctaaagggactggtcactgagcaggaaaacgaagcttctcttgataagaagatggttgcggtcatcgctggcgtaaaaaccgcaaaaacggaagagattctgttcagcctgattacccaatacgttaatcagaaaaaagatgactacagcgacctggaaaacacgctggcaatgctgaaacgccacgacctggaaggcgttctgtgggacactctgaatcaggaaatgggctaccaggccgaacagccttctctggagaacctaatcctcaagctgttctgtaccgatctctccgcgcaggctgatccgcagaaacgcgaatggctggaaaaaaacgtgctgaccacgccgtcaggcagagcatccgcgctggcctttatggtcacctggcgtgccgaccgtcgctacaaagaagcctatgattactgcgcacaacagatgcaagatgcgctgcgaccagaagaccagtaccgtctcagctcgccatatgatctgcacgagtgcgaaaccacgctgagcattgaacagaccatcattcatgcgctggtgacgcagcttctggaagagagcaccacgcttgatcgtgaagcctttaagaagcttctgtctgaacgccagagcaaatactggtgccagacgcgtcaggaatactacgctatttatgatgcgcttcgtcaggctgagcggctgctgaatctgcgtaatcgtcatattgatggtttccactatcaggacagcgcaacgttctggaaagcgtactgcgaagagctgttccgctttgaccaggcctaccgcctgtttaacgagtacgcgctgttggttcacagcaaaggcgcaatgatcctgaaaagcctggatgactatatcgaagcgctgtattccaactggtatctggcagaattaagccggagctggaataaggttctggaagccgaaaaccgtatgcaggagtggcgtattgcgggcgttccacgacagcagaacttctacaatgaggtggttaagccgcagtttaacaatccacaaatcaagcgcgtattcgtgattatctccgacgcgctgcgttatgaagtggcagaagagctgggcaaccagatcaataccgagaaacgctttactgcagaactgcgttcccagttgggcgtgttacccagctatacccagctgggaatggcggcattgctgccacatgacgagatatgctaccaaccgggtagtggtgacatcgtttatgcggacgggttatccacctcaggtacgcctaaccgcgataccatccttaagaaatataaagggatggcagtaaaatcggacgatctgctgaaatggaaaaatcagcaaggacgggatcttattcgcgattacgaagtcgtttatatctggcataacaccattgatgccatgggcgacagcgcatctacggaggagaagaccttcgaagcgtgtcgcaacgcggtggttgaactgaaagacctggtgacacgggtgataaaccgtctccacggtacacgtattatcgtaacagcggaccacggcttcctgttccagcagcagcccctttccggccaagataaaaccacgctgcagatcaagccagacaatacgattaaaaatcacaaacgctttattatcggtcatcagcttcctgccgatgatttttgctggaaaggaaaagtggcggatacctcaggcgtcagcgataacagcgagttcctgattccgaaagggatccagcgtttccatttctcgggcggcgcgcgatttgtgcatggtggtgccatgctacaggaagtctgcgttcccgtattacaggtgaaagcgctgcagaaaacggctgccgagaagcaacctcagcgtcgtccagtagacatcgtgaattaccatccgctgatcaaactcgtcaataacattgataaagtcagcctactgcaaacccatccggtaggtgagttatacgaaccgcgtactctgaacatcttcatagtcgacaacgccaataatgtggtatccggtaaagagcgaatctgctttgacagcgataacaacacaatggaaaaacgcgtgcgtgacgttacgctgaagctgatcggcgcgaatttcaatcgccgtaatgagtactggctgatactggaagatgcacaaacggaaacgggttaccagaagtaccctgtgattatcgatctggcatttcaggatgatttcttttaa

SEQ ID NO: 148961 - DNA, 3582 bp, Enterobacter cloacae
atgaataccaataacatcaaaaaatacgctccacaggcccgtaaccagttccgcgatgcggtgatccaaaagctgaccacgctggggatttccgctgataaaaaaggcaatctgcaaattgcggatgccgagctcgtcggcgaaaccgtgcgctatggtcagttcgactaccccaaatccaccctcacccgccgagatcgtctggtaaaacgcgcccgcgagcagggctttgacgtgctggttgagcactgtgcctacacctggttcaaccgcttatgcgccattcgttatatggaaatccacagttatcttgaccacggcttccgtatgctctcgcacccggataacccaaacagctttgaagtgctggaccacgtgccggaagtcgcggaagctttgctgccagagaaaaaggcgcagctggtcgagatgaagctttccggcaaccaggacgaagccatctaccgtgaattgctgctggcccagtgccacgccctgcaccgcgcgatgcctttcctgtttgaagcagtcgacgatgaagctgaactgctgctgccggataacctgacccgcaccgactccattctacgcggtctggtggacggtattccggaagaagactggcaagaagttgaggttatcggctggctatatcagttctatatatctgagaaaaaagatgcggttatcggcaaagtagtaaagagcgaagatattcctgctgccacccagctgtttaccccaaactggattgtgcagtatctggtacagaactccgtcggccgccagtggttgcagacctatccggattcgccgctgaaaagcaaaatggactactacatcgagcctgcggagcaaacgccggaagtgcaggcgcagctggcggcgattacgccttccagtattgaaccggaaagcatcaaggtactcgacccggcctgcggctccggacatattttgattgaagcctataatgtgctgaaaaatatctacgaagagcgcggttatcgcgcccgcgatattccgcaattgattctggaacataatatttttggtctcgatatcgacgaccgcgctgcccaactttccggttttgcattattaatgatggcccgtcaggatgaccgacggatattcacccgcgacgtgcgcctgaatattgtctccctgcaggatagtctgcatctggatattgctaagctgtggcaacagctgaacttccaccagcagagccagaccggcagcatgggagatatgtttgcggaaaataccgcattagctcatgccgatagcgcggaataccagctgctgttgcgcacgctgaagcgctttgtaaatgccaaaacgctgggctcgctgattcaggtgccacaggaagaagaagcggaactgaaggcgtttctcaatgcgctgtatcgactggaacaggaaggagatttccagcagaaggcagcggcgaaagcgtttattccgtatattcagcaggcgtggatcctggtgcagcagtatgatgcggtagtggcgaatccgccgtatatgggcagtaaaggaatgaatggtgagctgaaagagtttgccaaaaataatttcccggatagtaaagctgatttattttcgatgtttatgcagcatgctttttctttgcttaaagaaaatgggtttaatgcacaaataaatatgcaagtctggatgtatttatcaacattcaaaaaattaagaaaacatatccttataaatcatactataattaacatgctgcacttaggcgcacgagcttttgaacagatatctggtgaaatagttcaaacaactgcttttgtaattagcaaaactaattattatgattacaaaccaaaatttataaaattaacctcactgaatgcgtccagtaaagctgttgcactttacaataatgaattccattataatatatacacccaaaaagattttttctctattccttcaaatcctatttgctattggatatcccctgacattttattaggctttaaaaaatgggcggctatatctgattatgcttgttgcttgagcggattgatcacaaaaggaacagatgaattcattcgatttaagcatgaggtaaatgtgaataaaatcaatgaatttttaacaaactcacgcgaacccatcggtaataaaaaatgggtacctttaattcatcaaataagtaatatggctttcctaggagagagtgattccctagttgattataaagacaatggttcacattactccaagccaggcaatggttcgctaagaaataaagaaagttattttcaagaatgtatttcttgggctgacgtgagctcagggaactactctttcgcaaagtttccaaaaggttatatccctaattccacatcgcatttcatgatattaaaaaataacaaagatagcaattttttattagggtttctgaattcaaattatgcaagatatatttttaatataataaacccatctattcaccttaatcctggagaagtggcatctttacctatacctcagaatgcgcaggcacaagactggagccatatagataaaattttaatcctcaaaaaagaaatttctctatttgatgagcgctcaatttttttcaatgcacataagttgctttgcaagaaactaaaaatgaaagattcttttaaatttaatgaagaagagttaacaaaaaaagaaaaagaaataaatgacctaacaatattaaacgaagaaaaagtttgcaatattgtaggaatagcctactcaaaacctaaagcgattgtgaatagtatattgcttaaagagctcattatacgttacataagtgtgaacatcggctgcatgatgggtcgctactccctcgatcgcgaaggcctagtctacgcccatgaaggcaacaaaggatttgccgaacttgtcgctgaaggcgcatacaaaaccttccctgcggacaatgacggtatcctgccgctgatggatgacgagtggtttgacgacgacgtcacctctcgcgtcaaagagtttgtccgcaccgtctggagcgaagaacacctgcaggaaaacctagactttatcgctgaaagcctctgtttatacgcgctcaagccgaaaaaaggagaatctgcgctggataccatccgtcgctatctttccacccagttctggaaagatcatatgaagatgtataaaaagcggccgatctactggctgttcagctccggtaaagagaaagcgtttgagtgtctggtctatctgcatcgctacaacgacgcgacgctggcgagaatgcgtaccgaatacgtggtgccgctgctggcgcgctaccaggccaatatcgatcgtttgaacgaacaggtcgatggtgcctccggcggcgaagccacccgtttgaagcgcgatcgcgacaatctgagcaagaaattcaacgaactgcgcagcttcgacgatcgcttacgccactatgctgatatgagaatcagtattgatctcgacgacggcgttaaggttaactacggtaagtttggcgatctgctggcggatgtgaaagccattaccggcaatgcgcctgaggtgatttaa

SEQ ID NO: 148962 - DNA, 1806 bp, Enterobacter cloacae
atgcttaacgatctggtggtaaaaattcttacccccaaagatccgacctatacgttctataacagcgatgccgcctgccgtccttatacttcggaaggtgatggctgtattttgattcgcctcccagaggaggggcgcacctggaccgacattgatttagtcgttcagaccgaaaaattcctcaaggacaacgccggacaacgcccggaacaggccagcctgctttcagaaaaagcccgcgagaacagcgttcgcgaaaaaatgctgcgcgtccagctagagtcgcttattgccgaagcagacgtctgggcgattggcgagcgtttaccgaagaaatcttcgacgccgtccagcatcgtggatgaagcctgccgctatgtgattgaaaatacgtttgccaagctaaaaatgctgaagccgttcaacggcgatatcgcacgtgaaatccatgcgctgcttacagtagagaatgatacagagctggatctaggcgagctggaggaatctaatcctgaggcgatgcgggaagtggaaacctgggtcagtatgaacatcgagtacaataaaccggtctatttacgcgatgtcctgaaccactttgctcgtcgaccttatggatggccagaagaagaagtgaagctgttggttgctcgcctggcacgtaaaggcaaattcagctttagccagcagaataacaatatcgagcgtaagcaggtgtgggaactgttcaataacagtcgtcgccacagcgagctgcgtctgcacaaaattcgtcgtcacgacgaatcacaaattcgcaaagccgcacaacttatggcggatattgcccaacagccgtttagcgaacgtgaagaacccgcactggtcgaacatatccgtcaggtcttcgacgactggaagcaggagctgaatgtcttcagagcaaaagcggaaggtggaaacaatccaggcaaaaatgagattgagtcaggtctgcgcctgctgaattccattttgaatgaaaaagaagattttgccctgattgagaaggtcaccagccaggccaatgaactgctggatttcagtgaagatcgtgaagatttggtcgatttctaccgcaagcagtttgccacctggcaaaaactgggtgctgcactgaatggcagttttaaatccaaccgcagcgcgctggaaaaagacgccgtggcggtaaaagcgctgggtgaactggaaagtatctggcagatgccggagccttacaagcatctcaatcgcatcacgccgctgattgaacaggttcagaacgttaaccatcagttagttgaacagcaccgccagcgcgccctggaacgaattgacgcccgcatcgaagagagtcgtcaacgtttgcaggaagcgcatgccacatcggagctgcaaaacagcgttctgctgccgatgcaaaaagccagaaagcgcgctgaggtcagccattcgattccggaaattctggcggaacagcaagagacgaaagcgctacaaacggatgcagagaagaagattaaccagtggatcgacgagctgcgtaaaaagcaggaagccccgctacgagcagcgaatgaaaccacacgcgctgcagaatcacaacagacctatgttgtggcagaaaaacccgttatccaaccggtaccgaaaaaaacgcatctggtcaatgtcgccagcgagatgcgcaaagccaccggtggtgaagtgctggaaaccgccgagcaggtggaaaaagcgcttgatacgcttcgcgctgtgctgctggcagccattgaggcaggtgaccggattcgtcttcagtaa

SEQ ID NO: 148963 - DNA, 1752 bp, Enterobacter cloacae
atgaaattcttacagaatatcccgccttacctgttttttactggcaagggaggtgtaggaaaaacttccatttcctgcgcgacggctattcgccttgccgaacagggtaagcgggttttgcttgtcagtaccgacccagcctccaatgtcggtcaggtattcgatcaggctatcggtaacacgattcgccctgtgacagcagttcatggactttccgcactggagattgatccgcaggacgccgcccagcaataccgcgccagaatcgttgaccctattaaaggtcttttgcctgatgacgttgttaacagcatcagtgaacagctttcaggagcctgtaccactgagattgcggcgtttgatgagttcaccggcttattgacagacgcttctctgctgacccgcttcgatcacatcatttttgatactgccccaacgggccacactattcgccttcttcagcttcccggagcctggagcagcttcatcgaaagtaacccggatggtgcttcctgtcttggcccaatggccgggctggaaaagcaacgcgagcaatatgctcatgcagttgaggcattatccgatcctgaacgtactcgcctggtgctggtcgcgcgattgcaaaaatccacattgcaggaagttgcccgcactcatgaagaactgtcagccattggccttaaaaatcagtatctcgtcattaatcgtgtgctgcctaaagccgaagctgaacatgacgccctggccgctgcgatatggcaacgagagcaggaggcgctggcaaatcttccttccgggttatctgagttgccgacagataccctattactacagccagtcaatatggttggtgtttcagcattgaagggactgctggatacccgttctgagacattaccactcccggtaacgaacatcctgtacacgcctgaaaacttatcactctctgtcctggtcgatgatatcgctcgcagtgaacacggcctgattatgctgatgggaaaaggtggtgtagggaaaaccacgatggctgcggctatagccgtcaggctggcagacatgggatttgacgtgcatcttacgacctctgatcctgctgcgcacctgagtacaacgctgaacggcagcctcaaaaacctgcaggtcagccgcatcaaccctcacgatgaaaccgaacgctatcgccagcatgttcttgagacgaagggaagagatctggacgaagcagggaaacggctactggaagaggatttacgctctccctgtactgaagaaatagccgtgtttcaggccttttccagggtgattcgtgaagcgggtaaacggtttgtggtcatggatactgcccctacgggacatacgctgttgctgctggatgcgaccggggcttaccaccgagagattgccaaaaaaatggggagtaaaggtcattttactaccccaatgatgcagcttcaggatccggatagaaccaaagttctgctggttacgcttcctgaaaccacaccggtgctggaagcggcaaacctgcaggctgaccttgaaagagcggggattcatccgtggggctggattatcaataacagcctttccattgcggatacgcgttctccgttgctttgccagcgtgctcgtcaggaacagcctcagattgaggctgttaagaatcagtacgctaaccgtatagcgcttgttccggtgctgacgtcagagccagctggtattgaaaagctcagagagttgatgagttaa

SEQ ID NO: 148964 - DNA, 708 bp, Enterobacter cloacae
atgggagattttgggtctctcattggagaaaaactaccgtttagtcctgataatgataacaagccgcttcactgggttgatttaactgatttaaaaatgacaaaaaatagaataacttggggggagtttaatttatggctatctatgactaacaaaaacaccaataaatattataagaaaatttcagatagaaaagttgaaagtaaatacgacgaacgtatgcttaagtacattggtgatgattaccctgcggttgctaactggaaagatgcttttgatttttgtcaatgggttggcgacgttacagggaaaaaaatcgccttacctactgaggcacaatgggaatatgctgcacgtagtcgtggtaaatttagacaatttgctaacactgataatgtctatgacctaagtgttcccgattcaaaacttaattttactcacgactattctccagttggttctttcccaccgaatccattggggctttatgacatgatggggaatgggcacgattgggtcaatgactggtatgctgaggattattaccaatattctcctgaaaaagatccccaggggccagctaatggaacggaaaaagtggtcagaggctacttaggttcaatgtttggtttgtatgatatcacgcgaggaagtaataaaccggaaacagaagggcccggttatggatttcgttgtgtagaaaattga

SEQ ID NO: 148965 - DNA, 396 bp, Enterobacter cloacae
atgagtcaatgcaagcaaattatcattacctttatatcaggtgtcgttctcattggatgtgataatgcgaaaggtaatgcaagtagcgagaagcaattcgctgatgagattgttaactctatgatttccgttaaagggggacgtttccaaatgggagattttggccctcttgttggtgaaaaaatgccatttagccctgagcagaataataagccattacactgggttgagttgtctgactttaaaataacaaaatataaagtaacctggggaaattttaacaaatggattgactttactggaaaaaataaaaatcagtattatctatgggccacaaaaaaagtacaagtgagcggtttagaaaatcaacaggagatcattatcctgcctcagtaa

SEQ ID NO: 148966 - DNA, 135 bp, Enterobacter cloacae
atgcagctcgtagcggaggtcagtttgttcagtttgcaaatagtgacaatcaatataaccctgacgatccagacgatgaacttaacttcactcatgacatggctcctgtcggttcgtatcctcccaatcccttag

SEQ ID NO: 148967 - DNA, 216 bp, Enterobacter cloacae
atgatggggaatggaaatgaatgggtgaatgactggtatgctgaaaattattataaaaactcacctgaaaaaaatccgcaaggaccatataaaggtgacaaaaaagtgattcgaggttatttaggctccatgtttggattgtatgatattacacgagggaaaagcgagcctgattatgaaggtcctggtgatggttttcgctgtgtagagaattaa

SEQ ID NO: 148968 - DNA, 267 bp, Enterobacter cloacae
atgttcaaaggatttgtattactcggagataaaacaacacatggtggcgaagttatttctgcctcttcgaccatgatcgtgaatggaaaaaaagtagcacttgttggcgacgaaattaattgtcctgtcgaagggcatggtatcaatgccattatcgaaggatcacctgaatggatatctgatggcaaacaagttgttgtcgatggctgcgaatgtgaatgcggctgccatgttatctccagtgcgccggactgttcagtaggataa

SEQ ID NO: 148969 - DNA, 1158 bp, Enterobacter cloacae
atgagctgggaacgtcagaaagccactatcaccgcagcgccggaagagccttcaaccatgttgtggttgatggcctgtctcgttgcaataatcaccggagtgctcctttttgttctccatgccaatcagtttctgggaacactgcaaaaatttaatctctggatcgtagcgggaagcccactctttctctggttagtgatgatttgcttacgaagctggctgtataaccatgcgatggacaaacatcagtttgagttcgatgaagcggaatatgcgcagcaacaatggactgactgggcaggacgctatctggcggttctgtacagcagggtgatcctgcccgctgaactgacgcccgcgcgctttatacagtctcctgctgatcttgaacagagcaatgcgcttgtcaggcgtatcgcgctcccctcgggagaaaatgtgttttcggcccttcttggtggccttgatgaatcactcatacaactctgtgctgatttgccatttgggggaacactgctcactgatgctgcggatcccgaagagcatttgcagaaggctttttctgccgcctggatccaacatttcggcctcacgctctcagcacctttcctgacgatcctgaatacccgctccttttcgtcggttgaagagcggctcaaaacgccgacgctggatgtcgagttgttgttggtccatcagacgcaggggggcgacgtttacagtgatgcgctgtcagccctgttactgacctctgacgatgtggccaccaaataccgcttcgatcatcacgcccgtctgctacggcccatgtcgatcgagccgacagaagatctgagcctggcctttgatacctttttatccactcagtcgcagactatcaaaatagacgtgcttctcggggacggtaccgcgtggggcaaggtattttccacgctactgggcagcgctaaaaactacgaaggccactggaaacctcaacagtgtcactggctggaagagtacgcaggacgcagcggccccttctcgccgtggattatggctgctgttgccagtgatactgtgatactgacggggaactgcctgatgctttctgatgataaaaaacagcgatttatgaatatcgtcacaacaggagagcaggcgaatggcaaaagatag

SEQ ID NO: 148970 - DNA, 1596 bp, Enterobacter cloacae
atgagcacgctcaacgctttactccgcgcctgccagactgagcaggaaccactccttgcggccagccgtgagcgggttaggctctgggatagctggctgcagccgctgtccggttcatcacctcagggtgacgacccgggttatgacgatgactttcagcagatgcgcgaggaggtcaacaaactctcaggtgcggataccgaacttatctgccagcttgcagagaagcttctgaccacgaccgccaaagatatccgcgtggccacctactactgctgggcaaagctacacagcgaaggtgagcaggggctcgctgaaggtcttgaactgctgtgcggcctgctggagcgatttggtacacaactgcatccacagcgtgcgcgcagccgtaaggcggcactggaatggctggcgggatcgcgaatgactgactctctttccctgtaccccgaagtggtcaggaacgatgcgatacgtaccaccggggcactgctgttgatagagcaactgacggaaaatgagccggatgaaatccgaccggaactcaatacactgtatggtgctcttgaaagccgcttgcagaaagcgggtggtgtggatgcggttgtgccgcagaacgccagtgcctgcgaaacccctgcgactgctagccactacgatgccccggtcatcggacgtatcacctccggtcaggatttgctggcacaggcccgcacgctcgccgaatatctgcgcgaacagccggacgggtggctgtccgcacaccatctgatgaagagcctgcgtcacgatactctgcgggcaattccggccccggatgcgcagggccgtacccgcatcgaaccgccaagagcagaccagcgcgcgttacttaaacgcctctatctgcagcagaactgggtagagatgcttgaaacggcagatagcactttttctcgcggtgctaatcatctttggctggatttgcagtggtacatccaccaggccctgacgaaatcaggtcaggacactctggctggcattattgccgctgacctgaaagggctgctgacccgcctgtccggtctggaaacgctcgcgttcagtgacggaacgccatttgcggatgaagtcacgctgaactggatccagcaaagcgtgatggacacaactggcgggtggggcaatgacaccccatccacaccgatgtctgctggcaatgatgacattctggcgctggagccagaagccgtggtgctggcggacagtgaaggcccggatgccgcgctggcctggctacagaagcgcccaagtgtgactagcgatcgtcaaaagtggctattgcgtctgctaatgggccgcattgctgagcagtacggtaaaaatgagctggcgatgcatctgtttgctgaactgggtgatcgcgccagagacgtgactctcagcaactgggagcctgagctgctgttcgaggtacaggcccgtcatctgaaacttctgcgcctgaaagccggtcgcagtgaggcggataaggcccgcctgacaccgttaatggaccagttacttgccgggctaattgctattgatcctgcccgcgcggcagtcctgtgtggttaa

SEQ ID NO: 148971 - DNA, 735 bp, Enterobacter cloacae
atgaaaataactaaatctgcagcatgtactctcatggtgctattactctcagggtgtactgcgattttgtggggtggaaataaaatctcaggtagtcataagatgaatgttataaaaatgcaggataatgtcaccgctatttttcagtatgaaaatatttccgcttctgttgttcaggataagactaatatacctctgactgttccttcgaaaggtattgcatttttaggtgagaaaaatgtctatattctaacgaggggggctgacgagttactatctttaaacaaattaacagacaaaatcccactgattacaggtaacgaagaaaatacgctcaaacttcaattggttcgtccagtaaaaggagatgctgtggttcgctttgaggattcgttacgtatctgggttaataaaagtgcaggtgagctttcagaaaacgatataggtgtcattaagcacttaggcttcaagcgtgggaaagagggatactggaaagacgtcactattgagggcaaggttcttccaaggaaaagtctcaattatacatttaccaatacagagtcactggggcgaaagtatagcgttgaattttacgcgactggcaatgaaaccgatttttatccgaagaatcttgctactaacattgtgctcacacctgtggcattggctgcagatatcgtatttttccctgtctccctcacgtttctacgcttaatcatcggacagcaacactag

SEQ ID NO: 148972 - DNA, 1095 bp, Enterobacter cloacae
gtggaaagagaatcacagtccgcgtctgccaggctgatagcgcagctgggcgaccggctgccgtacatgaatttttaccgtttctgtcagctactggagcagagccagccggataaaccggtcaccggcagtacctggcaggtgcgacatgagccggtacgcttccgaccccattcggggatggggttcccggcctctgaaatcaaaggggcagagctaccggaacatccgcaccttccacccacgatccgtaccacctttatggggctctacggcgtggagtctccgctgccgacgcattatatcgatgacatcgctcagcgacgggaagggtacgaagctaacgcggacttccttgatatcttcaaccaccggctgattgctcagtactaccgtatctggcgtaaatattcgtatccggcaacgtttgaagaaggcggtaaggacaaaacttcacagtatctgctggggttggccgggcttgggattgacggctgtacagacagcatagcggcgcctgcttcacgctttctggcgctgctgccggtgatgttgttgccaggacgtactgcggaaggcatggcttcactggtgcgtcttctggcacccaatacgcaggcaaaaatctggcaccacgacaggcgtcggataccgctgaagaaatttttgaaaatgagcgttagccagcctgccacactgacgcatcgcccggtgatgggcagttatgccaccgatgtgaacagccaggtactgatgcgtctgaccaccacagaccctgtggaggtgcagagttggttgcccggcggggagctttacacggatctgatggcgctattgcacgtctatcttggctctcgcctggatgtccgcctgctgctgtgtgtcgaccgtaggctgctgccggacgcgacaatcagcactcaacccaaagcgggtgcagtgcaactaggccgcactgccgtgatgcgaccgctgaatgcggctaagaccacatcacacccaaaaacaataaccatcaatcttgggcgctacgagcgcgtacaggaaaatattcaccacagggagactgatgaagatggcgattaccgctggtaa

SEQ ID NO: 148973 - DNA, 246 bp, Enterobacter cloacae
atggggtttatatctcaggaatccgctgcatataaaaaaattaggcttttaagaatgtctgatgttatttcattaaccggcctgccgaaatcgactatttatttaaagatcaaaaataaagaatttcctaatcaggttcctattggtacgaggtctgttgcatgggtagaagcagaaatcaatgattggatagaggaaaacattcaaaacagaaaagaaaaatgccaatgggaaaatgtgaaatga

SEQ ID NO: 148974 - DNA, 486 bp, Enterobacter cloacae
atgcagctggatttattcagacagaaaggcggcatgggtctctctgagcgggaagccgtcgaggtggcccgcctgcgctggcacgctttccgccgtgcgttcgtgggccctccctgccctgagttcatccgatgcgcccgccctgcttgccgcgtcatatctgccgccccgcccgttatctttacccctgagcctgagattgagccggagctggaaacattgccggagccatcactggagccggagggcgaggaatacgacgattttgatatgccggacgccactccgctggatacatcgcaaattctggcctctgcacgctaccagatggaggcggagcgcctgcaacgtctgggctgctatcgtcgcgcctgcactcgctaccggaaagccctcacactggctcagcccggcaaacgagccgacaaactgcgagcgatggttaacaggtgcgcacggctggcgggtaagtgtgttcgggaataa

SEQ ID NO: 148975 - DNA, 840 bp, Enterobacter cloacae
gtgagtgacttcaccccaaaagagttaaaagagaatctggctgagcggctcagctacgctctggaacggctggcatttaagccgaaatgcggcagatacccagacggggcagatcatgacgtagtgagcgaacaaaggcgcgttgttgagttcctttccagcaaactggggccttttgttcagggctatcctgaatggcatccgcttaacgcttatgggtataacgagcagggccgatctggtggttgtcatacgcaaagcacgccgaaattttcatggatggatcatacgcattacatggtgaatggctttatcacctgcccttatgatcacggtttagacgagcttatgcaggagcttaacgcggctaaatatctgctggggagcactccgcccccggcattagaaaggctgggaaagtcgcttttggggtggatgtctcaggttgtttcccttactgagtttcgcgctgagccgctcacttatgagttattggtggaggagttcggctatgacggcgatcctgaggcacttttgcagctttacgcgccacatgctcatcccatcctcgtttgggtgcagtggaatagtgaagatttcgaccttttggagaatgatttcaggccaattccgcagcatcatgcactccctctcatgatgtcccggacgctggctgatatggttcacgcatcatgcgctgaggattgggagagtatgcaatatttactcgttggctatccgcatagcgatcacctgtcgccattcatcgagcgcagcaccatggcgcaggtgcgtaaaacgttcgagcagcttatgcagtacgttgaacaaaacaattaa

SEQ ID NO: 148976 - DNA, 462 bp, Enterobacter cloacae
atggctaagaataactatggcattaatggctcacctaacagccatatagcccacccggcagggcttccatgtttcggctctttaccggagtttgtttcaagaggggatgtaataccagccggggatatatttctgcgcgtggggaatcatagaggccctaatagcggctttggcgtgcgtcatatctgggcagagcatgaaaaggaactggtgcggctcggctatcataccgtgaatgatgtggcgcgctttgtgtgtgatgtgattcagccgggtgcaggcgtttattgtgaatttaatcatccaggcgggaagcacaggccaaaggttttacgctcagcgcttgggatcgtcattctggagccaaaagaggctgactggtctcaaagcggatggatttacagcgtagtaacggcgtatgagacacaccggacacaaggcacgttgttaggcaggctataa

SEQ ID NO: 148977 - DNA, 492 bp, Enterobacter cloacae
atgccccagctgagcatccgactacctgacgaccttgtgcagctgctcgacgaacgagccagcgccgaacacctgacacgcacggacatcaccgcagcagcgctgcgggcctaccttggcgttttgccagcacctgccgcaggtgacaagctcgaccgggtgatcgagctactggagacaatcgcaggcgcaccacggcgcaagacagctgcaccgcaacgtcagacagtgcctgacaggccagaagtgcaacgcacgacaacgcaaccagcggcactacaacgcaccacaagcgatccacgctttcaggccgtggatagcgaggccgacgcgctgatcgtgtcactgacgcaacagcgggccagtctggaggatattgtgggggcgcttaatgctgccgggtatcgaaccgcgaccgggggagagtggacacgtagccgcttgcgggactatcggcacaagctgcgggatattggactgctcaatggctaa

SEQ ID NO: 148978 - DNA, 1299 bp, Enterobacter cloacae
atgaatacgcaagataatgtaatgccaatcgaggaagccaaggcgctgaaagaagcgagcgacgctatcggtaaagtgattgccgacctcgaaaaaaacgattcagggctggataagggccgcatccgtaactccacgcgcaacctcgcccgcattattgaaaatgcccgcctgttactgggcttttccgcacattatgacgagttcctgctagaaaccgtcctgctgagcgataagggccgcagaccgctggatgccgacgccgtgaccgatgtcatgcgtatgcttaccgatcatgagttccggccttacgctaagcccaaaagcagcatgtattccatcattcaggagccagaccgcgagcgcctgaaacacgtcattaaagccgttgcgcggctcaatgccattgactcgctgcgggactggttttgctcgctgcctgaatgggatggcgtggagcgtgtggatcggtttttcggtcattatgtcccgtgcaacgataaccccgtgtatatggcggcggtgagccgttatttcctcacctcgctggcaggtcgcgccgtgtgccccggattaaaggcggatgccattccggtgctatatggcccgcagggcacgcgtaaatccaccatgctggaggcaatcgcgccagattttaactggtacgccaacactgaaatcgacggggaaaacaaagaggttgtgcgccagcgtatcggcaaaatgatcgtggagtatgccgaaatggataaaatgcggccttccgatgtgcagaaaatccgccgtgatttggcgctgcgcaaggatgaaaaccgccgcatgaaacaagactattacgatcaggttccgcgccgctggatgggctgcggcaccgtaaactcccagaaatttcttgtcgatgaaaccggaaaccgccgctttttccccctgacagtgaccgataaatgcctgattgataaatttacctccgaccgtgagcaggtgtttgcggaggcgttgaatatcttcaatgctgagggcaacgtgcccagctggctgacggctgaggagctcgcaaaagccgctcatgaggactatatcgaccacgatccatggcacggcaccattgaaatgctgctgcaaagccaccccagccagatctccaatcgcctcctcaatgaggctgtggggctggatgtaggccggagagacaaaaaatcggctcaccgcatccgggcaatcatgactatgttgggatggtcggaggccaaaaacatcgggccaaacaaggagcgaggattccggcgtaacctcccataa

SEQ ID NO: 148979 - DNA, 456 bp, Enterobacter cloacae
atgcgaccaccatccccccgcgccattcaagcccgcgccctacgcgccgaagggctcaccatgcagcagattgccgaaaagatgggatgcaatcgcggcaccgtctccaaatggctggcaaaggacaccatcaaagcccaaagcaacgagctcgacaggctgatcagcgacgcgcaggccaaatatgacagcctgccacccagcgaggccgaacggctccgggatctgcgcgactctctccgggagcagcagcaggtcatcatcaagcgccagatcaagctactggagagcgtgcagggcgaggctatgacagcactccgcagcaaagacctgcccaccgttcgcgcagcggcaagcctgatctccgccctcacccgcgcctttgctcatgaaggagcggtgtatggaatcatcgatcccgcagaggccatgcggcaggcgctgaaagacgattag

SEQ ID NO: 148980 - DNA, 564 bp, Enterobacter cloacae
atgatttttggctatgtacgcgtatcaacctcagagcagaaccttggcgggcaaatagacgccatcctgcaacgctatcccgatgcacggatcctgagtgatgagggagtgagcggcatcacgcccgtaatggagcgccccggattctccgccctgatgaaggtagccgggagcggtgacgtgatcgtggtggcggctatagaccgtataggacgtaatgccgtaagcacgctggaagtggtggaagacctgaaagcgaagggcatcaccctgatcagcctccgggaaggattcgacgcaacaaccccagcgggcaagctcatgctcaccatgctggcggggatcgcggaaatggagcgcacctcgatgctggaacgtcagcgggccgggattgattcagcgaagaaagcaggcaagcaccttggcaggccgataaaggtcacgccggaggtacgcaaaaagattctggagaagcgggggatcggcatacctgctgcacgtatcgccagagatttgaacattagccgggccagtgtgttccgcgtgttcaaagaggagagttaa

SEQ ID NO: 148981 - DNA, 582 bp, Enterobacter cloacae
atgactattaaagccgtacttgcgcagctggctgcacttagcgccagcacgctgactaaaagccacccgctcagccagcaatcgctggacactgccctgaaaagctgcggtgagctgggctacggttctaaaactcaggcgcttctcaaggatatgcacgccgcaggtgtcgcggcaggtgtgccggatgaggagctggacagccacattaaaggcgctatgcgcaacctcgcaacaaagcagccaatgactaagagcaccgcaggcgatgcgctggagcaggccatgagcggtgcccccgtgcagtccgtgccggatatgacgatcacccgcaacttgtcggttgagcaaatccatctggcccggcagcagcagattgccgatcagcagctgctgcgcgagtgtgaaagcgccggagtggccaccgcgcagatcgtgcagttggataacgctctgacctccacccgtggcttgcctgatgccgcccgcgcccccggtatcgctgccgttcgtcagcagctgacgcagccgccgctatcacctgcggcgcgtggtatcgactggggcgatgagtggaagtaa

SEQ ID NO: 148982 - DNA, 2736 bp, Enterobacter cloacae
atggcgattaaaatcccggtctccgcgcagtttgacgcggcagacctcaagcaacagattcaaatggtgaacgaccagatccgcatcctcgcgtctcaggtcggtcaggccaacaaccagaagtttgagccgattaacgtcaagtcaaaagaggacttggacgccttcatcaagcagatgcagaagctgctgaaagtccagaccgagctcagaacgaccatgggcaagacgggccaaggagcgtctaacccgctcatggctgactggaaaaagatgtatggcgatcaggctgagcgcatcaaaaagatgcaggccatgctcaactttctgggcgtggagtttgacgacctgccagcaccgaaagtaccaaagacacccacgccaaaagtgcccccagtgcccgctatcactccgccgcctcctgctggccctaacgctggctcagccttcgccaacgccctgcgcggcagcacagcgatccccggcgctcaccttttctcaggtatgagcgcaggcgcaggcggtggcgtcactgctctgatgggcgggcttgccgggggcctgatcggcttcggtatctccaaagtcgtgggagccatcgcggacaaaatcagcgccgcgcaggataacgccgtgggctatgaccgcctttatcgtgcgcagggtggcaccgtgggcttttccatggttcgcgcctcgatgcagggctatgcgaacaccaacggcctgagcaatcagggggccattgaaacagccagcgcctacctgagcaacgcagcaggccggggaggggtaggggccgggcttgatgccacaagtggcctcgcccgccagtatggcctcaactacgcggcaacagctggggcgtttggctcaatggttggcgcgtctggcgtatcaactgacaccctccgccgccttggcatccagatcggggaagggatcgcccgctccaggcagtttgcagcggcaggggaaatgctttccgccgtggcagacttcggcgcagcacaggcccgccagacgtttaacacgcctaacatgccaggctataccgctgcactctccgggctgatggcaacaggagcgccgggggcagatttgcagggtagcgtcgcgctgctgaccaacgcaaaccgggcgattatggcgggcggtaacttcggcaacgcctcgcaggccctgagcgcacgcatggcgatgcgtatgggcatcaacaacccgatgatgctccagacgctgcttgagggcggggctttcggcaccgcctcctcccagttaggcgcgggctcacagtatggaaacaccttcggaaacgggccagaaggcgacacgacaaaccttgagcgcatccgggcggagatccgccgtgaatacgggaacgataaggggatgcagattcaggcgctgaaaaattatttcggcacctcgacaagtggggcgatcatgctcaacaacctgaccccctcccagattaacggggctaactcccgcctgaaacgtctgggcctcgaccgggcagacatggctccgggtgctgccggagcgcttggcgttattgagggaggcacaggtgcgcaggtggaggcactgggcaataacctgctcaacagcaaaccactgaccgcaggcgagcgcgagaccctcaccaaagccatggcaggcaacaatacagagcagctgcgcgacgcgctgacaaaactcaccgtgaagtacggcagcagcgagacagaaggcagcaaaaccactgacagcgtaaaccgactcaacaacacgctggagaattacgccaacaacgctatcccggccctcaacatgatgcgcatggcactggtgaaggccagcggcggcagtgagagcgatttacgggccaattattacgccaccgaaaaagccagccgacgcaacggcatcgacgccaaatatgccagcagttatgcagaggtacgcggtagagagaaggcgctgatcgacaagtacggcagtgctgcccgcatccctgctgacgaatacgccccgattaatgcccggcttaaagcgctcaatacgcaggtgcttaatgagaaaagcgccgcagacatcgacgtttataagaccacttacggcgacaaaaacagcagcctgatgcgccagtcttctctatcctctccggcagcggcatcaatcggcagcggagccaacgggacaggcagcagtgccgcagggaactgggacggcaacaacgtaggcaacgtgaaagacacgcaaggcaactggctgcgcttccctacccagcaggcaggcgtcgcagcgtcggcggggcagctgctgcgctatagcaccggggcattcaaaggcggacgcaagcgcaccctgcgcgagattatcagcacctatgccagcggcgatccagaagtgccgcgctatatccagcaggcgagcaaatggacaggcttcgaccccgatcaggagctcgacctgcgcgatcaggacacgctaaagagggttacagcagctgttttgcgcaaagagaacccgaataacaccagactgccagtgagcaccgtcgaggcgggaattaacgacgccctgcgcaataacttcaactacagcagcgaccggggccagctcaacgtcaacggcgggcggatggagatcgtggtgaaagaccagcgcggcaacgtcctgcaaactcagcagcagccagttactgccagttttcagcagtcgagaagctgggcaaatcggaatcggtag

SEQ ID NO: 148983 - DNA, 267 bp, Enterobacter cloacae
atgttctgcagcgccgtgaccattccacgatgcaaagactgggtaatgacgagcgcgaccacggcggcaaagagaatgcagccggtcagtacggcaaacgacgtccagatgaaatggctgatcaaactgtcgcgtgcggtaaggcggatttcgccgatcgttaagccgttatgcatgatgggctgcgcaaccggtacggggaaaagccagcggctgaccagcgcgcccagcgtgtcgttgttatcctccgggttccaggaccagtag

SEQ ID NO: 148984 - DNA, 525 bp, Enterobacter cloacae
atgcaaaataaaaaggcaggtgctgcgggtattgtttgttcagttgctgcgatcatcgcgatagtgctcggtaacgggcatgttcgaaccaatgagcgtggccttgagctcatcggtaatgcagaatcatgtcgtcgagatccttatgtttgcccggctggcgtgctcaccgatggcatgggaaacacccacggcgttaaacccggcacatttaaaaacgaccagcagatcgcggcggaatgggaaaaaaatattctcgatgctgaatcttgcgttaaccggtacgccaatggcaaaaatctcagcgacgataccttttctgcagtaacgtcaattaccttcaacgtcggatgcccaacgatgaagcagtcgacaatgtttgcattatttcgcgatcagaaatcggcgtggccatcagcctgtaatcagttccctcgctgggtgtatgcagggaagactattcttcctggccttgttaaacggcgcgacgcagagaaacagctctgcttggatggtctgaaatga

SEQ ID NO: 148985 - DNA, 513 bp, Enterobacter cloacae
atgccgagcgtgcccccctgcattttgccgtcgctggtgacggaggccgccgtgacgttcagcgccccgccggacagcagggtgccgccagactgctggctgaccgcgccggtctggctgagggtcaggccattcacgccgctgatggcgccgctgttgctgagcgtgccgccggtcagcgtcaggtttttcgccgcccactggccctggctcgccagcgtcgcggcctgcagcgttgccgcccccagcgcggcgatcctgctgcctgcggttccggtgagcgtgtcggccagcgtcatctgcagcgcgtcggcgctctgcaccgcgccgctgttggtgagcgaccgggcgttaagcaggatgttctgtgcctgccagctgccggcgttggtcactgccccggacgcaatcgtcagcgcgccctgggtaagaagcttgccgcctgcgccgttgatcagctcctgctgcggcgcggccatcgccatgcgcgccatcagccgctgctgcccctga

SEQ ID NO: 148986 - DNA, 726 bp, Enterobacter cloacae
gtgccgccggtcgtggccgtcagcgttccctggctgagcagagacccgccgtgcgtccagtcgctggcgcggatgtccgcgccgttcccctgcagcgtgccctgcgttgtcagctggcctgcatccagcgtcagcatgccgccggagagggtgcgcgaggtcgcgcccgtggtcagcgtggtgccggtgagcgccaggccgttcgttccctgcatcagcccgccattgttcatatcgtgggcggtgagggacagcgtaccgcccgtgatgcgccccgggttcgccagggtgtccgcggtgaaggcggtcgtgccgccgctctgcagcagcccggtattcgttaacgccccgctgagcgtgccgctgagtcccgtctgcccgttcaccgtgccgctattggtgagggtggtgccggtcatgcccagcgtcgcgccctgcagcgtaccggcgttggtcagctgtacgcccgtcagcgtgaagccgccgccggagagccatttaccgttcagctcgttgataaagcggtcggcggtggcgttaaccgcgttgctgccctgcatcaggccgctgttgcgcagctcagtaccgcctgctgtcagcgttttgcccgccaccgtgccgctgctggtcagcgtcgtcgcattaagcacggcatcgtcggtggcaacgatgttccccgtgttggtcagggcattgctcaggcccaaatccaggctctgcgcctga

SEQ ID NO: 148987 - DNA, 567 bp, Enterobacter cloacae
gtgttgccctgcagcagcccggcgttgttcagggtggtgtggtgcagggcgagcgcgccgccggagagcagcatgcccgcctgctggttgctgagctgtgccccggtcgccgtcagggagtgtgtcccctgcagcgtgccgccgttggtcaccgacgcgctgttaaactgcgcgtcggtaccggccatcagcccgctgttcgtcaggctggcggtggtcagcgtcaggccgtcccgggcaattacccgcccgtcggcatcgttgctggcctgtcgggtcaggttcagcagcagcgcggtggcgctgagctcgccgctgttggccagtgtgtcgccgccgagcgtcagcgttccgctgctgcgcagcgcgccacggttagtgaggtctgccacgccgagcgtcagcgccgagtccccctcgacggtgccctggttttgcaggctgtccgccgtgatgtggaggtcgctggccgcaatattgcccgcgttagcaaacgcagtgccgttcagggtgagccggtcgtccgccagcagacgtccggtatcggtgttggtcaggctgaggtag

SEQ ID NO: 148988 - DNA, 678 bp, Enterobacter cloacae
atggctgccgctgagggccactcccgcgccgttcgcggtaatcgatccgctggccaggctgttcgtgaccgtcagtttcccgcccgcgtccagctgaatatcgccctggcgcgcggtgaggttgccgaggttcacccccacgcccgtctcgctggagaccaggcggatacggttggcatacatcccgccgagcgcgccggtatccacggccaccacgggcgcggcaccctcaccggcaatcggcctgacgctgccgtctgcgcccacgcggttcgctcctgccgtcaccgtcaggtcgttcgcatgaatcgcggcgttcacttccgttgcgcgcgcaatgatcgacagcgcgtcgctcttgctggcatccagcccctggccttcaactgtgatggcgcctttcgtcacctccagcgcctgcaggttaccgctggcgtcgaactgcggtttccccgtggtcagggtgacgttcggggtgttgataaatccgcacccgttacaggtaatgccgtacgggttggccaccataacgtttgctgctttaccggcgacttccgtgtagccctgcagctgcgagcggctggcgcccgtgacttcgttgataatgcctttcgcttcccgcccggcctgcaggttggggttgttctggataagcccgcccagctgggtccgggttaa

SEQ ID NO: 148989 - DNA, 609 bp, Enterobacter cloacae
atgacggtgaagaacgacaaggcatggattggagacctgttaggcgggccgctgatgagcagggaaagtcgaatcatcgctgaacttatgcttaccgcacccgatgaacagacctggcaagagcagatcgtcggtcataacattctgcaagcctcctcggccaatacagcgaaacgctatgccacaacgataaaactacgcctgaatacgcttgataaagccgcgtggtcacttattgcggaagggagcgagcgcgagcgtcagcaattgctatttgtcgctctggtactccattcaccggttgttaaagacttcctggctgaagtggtaaacgatctgcgccgacaatttaaagaaaagctccctatagatagctgggatgagttcgtgaccagccatcttcgtcagcagcccgtactcactagttactcagattcatccatcaaaaaaatgggtaacaacctgattaaagcactggctgaggcgggttatctggatacgccacgccgacgtaatctccagtcagtctttcttttaccagaaacccaggcaaccttgcagcgcctcgggcagcaggaattgggtcctattttggaggggcaacggtga

SEQ ID NO: 148990 - DNA, 603 bp, Enterobacter cloacae
gtgatcgatcccgtgcttgaataccgcctgtcacaggttcaaagccgcattagagaagagcgctttctcaaaaacaacggctccggtaatgagattggtttttggatatttgattatcctgctgagaatgagctacaggtgcgtgaacacctgaagtatcttttccgtaatctggaaaaggaccacaagttcacgcacctcaacatctttcagatcattatcggcatgctcaccgaacgtgggctatttgagcgcgtctgtcagcaggaagtgaaagtcggtaccgaagcgctgaaaaaacaactcgttggcttattgaatcagaaaaaaatcgcggattacatagcaaaaaaagtcgatcttcagaatcaagaatttgtcatcctgacaggcatggggaatgcctggccgctggttcgtggccatgagctgatgagcgccttgcaggacgtaatgggttttacccctctgttgatgttttatccgggaacctatagcggacacgatctctcccccctggcgggtattgattcccgaaattattatcgcgccttcaggctggtgcccgaaagcgggcctgcggcgacattgaatcctcgttaa

SEQ ID NO: 148991 - DNA, 327 bp, Enterobacter cloacae
atgttagatgaattcaaaaaatgcatcgaatcctgctatctctgtgcagttgcctgcgatcattgtgcggcttcatgtctcgaagaagagaacctggagatgatgcgtgagtgcataaaactggatatgcagtgcgcaaatatctgccgtcttgcagcgcagttcatggcgctcaatagcgagtctgcccgcgagctctgccgggtttgcgctgatgtgtgtcagcagtgtggcgatgagtgtgcaaaacatgaacatgagcattgccagaattgctccagagcttgtcatcactgcgccgaacaatgccgaaggatggccgcctga

SEQ ID NO: 148992 - DNA, 1356 bp, Enterobacter cloacae
atggcgaaacttgatccagaaaaactgttcaaatggatgaattcgacaaacaatctaatcttgatcaatcgagtactcggcagcccggagttttaccgtaattacgaactgtgggaacagttcacactctggtctcaaccgagtttcaaaaatgatggttcatgggatggtgccatattgcttcccagcttgctcaggcatggaagtgcgaaaatcctccacatagccaatggcgaagaatatcatccgtcagtgctagagcagcacgtcaagtcactgctagccagttttgttgatactgtctctaaaagaaccgatttcgaggggctttttaagcggtggggcacatggctcactcggcaacaccttaacttccctgataataattcggataaaaaacgacctctaagcagccaagacatattatgggcattagccgaaaaactccctcttccctattcaccagccgtttccggacaattgaatttttcttgggagccatgggtttaccaatccatgctggcactactacattcgaactaccccgacaagtttccgataccggatgtcagtgctttcatcaaagaatggaacttgacacctaccgagtgggacgcttccaaaggtaagtcgcttcgaagccatgttagccaatatcatgccactcagcccaacaactatgcttgccgagtgcttggatactctgtcgcattgagcgataacttcaccagccactggttgagcatgtggaactctagtgttgcgctgagagaaatcctcgaattccgtcccatttataaaatttctaaggaatggcaaccttctgatgcttcgggactgatgcgcatattggttgacgtaggcttgggaattctggactgtactaccaacgcgcaggaaacgctcaatcccgaaatacttaagcaatccgccgcgctatttcaagcgctgtgggaggctacaactgagatgttgagtattgacttctatggtgacgacttctggccaatcatgcagcaacacctagtcattcgtcgactacggtggacagtcgaagcaaagatcgcgaatgaaggtcattacagcacgtggcttgatcaagccgcttacccaacgtcacgggaaacattggttttagtctccagtaatccttgttcactcataagccttcttcccctgcttgtgcaaaaccagattcccaagcaagacttgaaggacttgttaaatcaagccgaaattgacttggagtctcttgcatcgagtgcagtcagataccgggatggtcctgagagtaaattcaagatacatcctcatcacgtcaacttgatcgaagagttagcttgggtcaacaaatga

SEQ ID NO: 148993 - DNA, 186 bp, Enterobacter cloacae; identical to SEQ ID NO: 27261

SEQ ID NO: 148994 - DNA, 996 bp, Enterobacter cloacae; identical to SEQ ID NO: 27262

SEQ ID NO: 148995 - DNA, 237 bp, Enterobacter cloacae
atgaacagactgacaaacctgacacctgcagagaaaaaatttcttgatgatgctattgccgcagctgagagagcgtcaggcaaaaagctaaatcagccgaaccggcatatcgtcctgaacagagcgcgtgcgcagattgagtcgcagcgttacgccgaccgccagcgtgcattacgtgaggatgagcggcagcagtccgagtttgcctggtcacgtccgcgcgcgccgcgccgctga

SEQ ID NO: 148996 - DNA, 513 bp, Enterobacter cloacae
atgacatacaccactcaaatctcggctcaagatgtctcgattgttatccaaggggcgattttcgatacaaaaaaacataaagttgatgctcaatttattgaatacttagaaaaagttatttcgatatttataggttgcgaatttattgtttcgacgtgggaatttcctcgcgaaatatacttcggtctttgcgataaatatccacaagtaaattttgttctgaatgctgatgttgggccaataataaaaatagtagatgatgtgccgattgtcaccaatgttaataggatgattttttcgacaataagtggactcagggaagttaatcgcaaatatgctattaaattgagaacagattctttcttatacaatgattcgatactccaatcgctttattatgttatgaataaacgcgaatttttcggattagacttggaaaagagaaatgagcgatatcggatctttgatcatcatgtaattaactgtaatctatttgcccgcaatccgcggtaa

SEQ ID NO: 148997 - DNA, 939 bp, Enterobacter cloacae
atgcattcaaataagatatatataattgggtggtcaggctttattggtcggcaatatattcattatcttgataaaacgggctttaagggtgaggtttttcttaactcacgtgccgacgatgagcaaaaatacacttcttctacagataacatcacaataaaatatgttaattatgaggagatgattactgggcttaattgttcaaggtcaactgtattataccttgcaaatatgtactcaccgggtgagtcgaatatttaccctttgaatagtgtcaaagaaaacattattccatttatcacttttttagaggatatcaagaataatgcaagcaatatcaggttcatatttgcttcttcaggagcgactatatatggcgatagtcaagaaggggaatgttgcagcgagaaccacttattagctccgaaaaccatttatgcagctaacaaaatagcgcaagagaactatctcaacgtttatcatgttaattatggtcttgattatcggatagccagaattgcaaacccttatggcccggggcagatattgaaaggtggtcaaggattaataccagcaatacttcgttcgtcattaaataatgaaagccttcctgtgagtggtgatggaaatggtacaagagattatatatatatagatgatctttgttcactttttttcagtctaagtagctatagcggagcttgtagaacatttaatgcgggctctggtaaagagtatagtataatggaaatcataagttgctttaacgcagtgcatgaccgaccaataaaataccatcatgttaaaaccgaatcttcagttgtaagccgtattgtccttgatatcagtcgtgctaaaaatgagctgggatggagccctaaaacttccctatctgatgggattcgtgcctttatcaactggtcgattcaagtgatgtag

SEQ ID NO: 148998 - DNA, 153 bp, Enterobacter cloacae
atggtgcgcatcacacaccctctcactaacaacgaaatcctcaaaactaaaccccgagaaaaagacttcactctgcatgatgggacggtctgttcttactcgtcaaaacatctggaaaaaagctatggcgcttccgaaaccgacgtccggtaa

SEQ ID NO: 148999 - DNA, 273 bp, Enterobacter cloacae
atgctgccgtccaggctctccagcgcgaccgttttgccgctgatggtggagctgatgttattgatatcgccgatggcgctcaggttcaggtcgccgcccgctttcatcaggccgttgttgaggttgctgatgctgttctggctgtcgagcgtcaggctgtttttcgccagcagcgagctgccgctgttggtgatgtcgccgcccttcagggtgacgttgttgcccgcgattacgctgccgttattgacggtgacgtccttcggcgacaggtag

SEQ ID NO: 149000 - DNA, 285 bp, Enterobacter cloacae
atgacgctgacttctttgatgctttttaaaaccctctccgatgaaactaggctgggcatcgtgttgctgcttagagagatgggggagctgtgcgtatgcgatctatgtacggcgctggaacagcctcagcccaagatttcacgccatctggcaatgctccgggaaagtggtctattgctggatcgtaaacagggcaagtgggttcactaccgcttatccccgcatattccttcctgggccgctctgaatcgccacgcgtttaacagacacctcagagtcatttaa

SEQ ID NO: 149001 - DNA, 795 bp, Enterobacter cloacae
atgttttgccctatgtgtcgaaaagaagtggaaaaattagaggacagtcacttcttaccaaaacaaatttatcgccgtgcgcgcaatatggtcgcagaaggcaaaaatttgaacatgacagacaaggacggtaatacctatatcctgtcaaaagaagttaaaagctatttgttatgcaaagattgcgaaggcaagctatcgaggtatggtgaaaacagctacgcccgcatgtgcttgccgccactaaaccgcgcggatgtttctaaattcttcaaaatagccaaagggaaggtcatcccattttggaatagcgccagtttagaccccaaaatagcacctaacgtttccatcggatctgggttcttgcaaggcatagatgctgatagcatttactatctggcgatcagtatcttatggcgtgctaccttcgatgtttggaacggttgcataccaattaaaataaatgaagaagctaaagaagagttgagagcctacttgctcgatcctgagaataatgatctgagctataaggttgaaatcgcgccttcgttttggtttccacgatacggaaccttcttcccagttgagacgaaaagacctaacttttattttttttctatatttgagttcgacttctatatagaccttacagctaaagttagaaagctatctgacaatgtgcctttgcatgttttggccgatccctatcgttgcaagtacgcctatgaagcattgaagaggacaatcgtgaaagcaaaaccaagaggcaaggtagacaagactatctcatggtag

SEQ ID NO: 149002 - DNA, 579 bp, Enterobacter cloacae
atggaactctataacttcacactgacattatcaggcgttcagatggagaccgaaggtctcgcagacgctttgtacaccaacggttgcgatgacgcgctcatctgctactacggcagctcagtgtatgtagaatttgacagagaagctgaatctttagatcaggcaatcaaatcggcaatcgataatattgaaacagcaggtattggcgcagtggtggaatcggtagattcagcactggtaggtttgagtgatatcgctcaactctccggcttaacccgccaggctatcactctgcttaaagacggcttacgtggcaaaggcgatttcccttgccctgtacagcgcatcagcggtcagtctccactctgggattggtcggaagtcgctaaatggttgaacgactgcggtcgtctcgacagcaaagacgcaaaagcacgggaagaactggtgcgtaacgcgcacacattgaataagtggaatcttgccctgcgtatcagatcgtttggcgacattcaggaggtggagtcaattacccactcactgcttcgcccgcataatcgcgaagaaatttgcgcataa

SEQ ID NO: 149003 - DNA, 237 bp, Enterobacter cloacae
atgagtaagaagcaccctaataaagaagtacgtgacgcactccgttacgcagaagaaaaaggctggatcgttgaagaagcgacagggcaccccttctgtaccatcaaatgcggaattgccgaacatggacgtactcacgccatgagcgtaaacagcacaccaaaagacccggagacgcacgcaaagcagatccgcagaatggtcgaccgctgtaacccgaagtcaacaaaggactga

SEQ ID NO: 149004 - DNA, 1245 bp, Enterobacter cloacae
atgaatactaaacttttagcctatttaaacaatgagttacatggagtgtggatagatagtgaaaatcgcaatatccacataatacttaaatcaagcattcctatgattaaatccgtctggtcaggagcacctatccatcttttggtaggtttatctactaaaaaaaatatactagtgatcgggatgttgattgaagacaatgtcgataatccatttttactggcctatccaccaagagaggaagatgaaatcaaagggctggatttgttattgtcaggtaattatgatggaattcaattaacattttttgactcgcatacaatgcgtgttatggatctaaaaataaaagtttcggaaaatttatcggataagtatttaaataaatttcgtgctaatccctattctctcaactcaggatttagggaaggcaatgaagcaatggatgaattctgcaacaatgctttgactggtaacgagaaaatattcagtctgccactaagtgtaatcgataaaaaatcttaccttgcaagtgttcatgaaccaaacgataccgaattaacatatgaatttagcgccagcaaaaacggctctgagggatatgagcaggaagttcttataaatcatgctttgcggcaaattttttcacctgatgaagtgtttttttctcccgatgttattgagggtaataaaaaaagagaactagttgatattcttgttgtagaaaatgaccacgtattatctatacagtctaaagcatcatcattgattgaaatgggattaaaatctcatgagaagctttgtagcatgtataagaaaaaagcattacaaggtatcgatcaggttaaaggcgttatcccaattctaaataatgatgtggttattaatcatgacgggatggaacatttaataaagagaagaaggggtgtttatcatttggtgataatctcagatcttgttttagagaaagaagatgctgaaaagatttatgacgaaattagcaaccttaaagagtcaaaaggggcgagagttttagttatgagtcttgatggtcttgtaaattttataaaactatcaagattaaataaaagaatgttttgggaaatgctggagactaaatacaagttcagcataaaaaaccgtacaattttaattagagacatcgactctagccaagagaataatctaccattacttgccactgatcaatacctatcacttcttcgaggtaagggaaaattaaaataa

SEQ ID NO: 149005 - DNA, 192 bp, Enterobacter cloacae
atgacgacggttgaagacttgataaatgatgtgttggtgaatttagggaagacgccagacgagctgctaatagcaacggttttcgatagtctgccagacgatgtatgcagattggcgaaagagtggggatggtgtgatacagaagtgcgtgaaagggtgtacgctgtggcgtggaaaataatcaataattag

SEQ ID NO: 149006 - DNA, 1200 bp, Enterobacter cloacae
atgacagacacagcatattcaaaagctctgcaaaaagaggtagatccggagcaatatgtagcattgttgggtttagatgacagcaccgtacatgcctttgctcgtgaagatgtcgtctgtcctatatgtgaaactggtggcggttcctatgtaagagcatctgtaagcggcgcttatcgcaaaaaggcccatttcaggtttgcgggagatgacgatatcagcgcacatcacccatcttgtgatttttatggcgatcggctttctaatgaggtcagtcaacatcttgtatcgttcactacggaacgcactaaaatcactcatgtgatcagaaagatggtgtgcgcaggcattcaagaaaacatcttcacgcaagaggcaatgcgcaatatgaggcaatggttctttgctaaacgttgcgagtcagctttcgaaattgtcttgagtgaagagcaaatcgattggctggcctatatcgttgagctgcctgtttatccatatgcgtggcccagagatgaaattatacctttccatccaatgcaggctatcgtgcctggtttcgattggggtaaggctattgcgagagaaacggtaagattgcatcaaaagacgttgaagcgactggaagaactaaaccttcacaggaagcacattgtagaactgcaaagttatgtctcaaaaaccaaacatgccacccttttagaccctgagctattgaaagaagagtatgcaaagacccttcaactaaactctttcattatcaataactacatagaatttcagaataagtcggttaaagacagagcaagtggagaggaaaagttgctcgcattttcagccttgctgttgttcgttgccgactgggatatcgatgaggcaattgcgaagttttctgtcattgccaatgttcggcacgtagaggatttgcttgccggcaacttcatgggcttgaacccttattttaagttttcaattgctaatacggccaaagcactacaggacaactggccgattgattatcgggaactggaagaatggcaggtcgaacagtctatgagagaggcgtatgtagagcacagtttgaagttagcgacgccgctgcctcagttaaagccggatttatacgtgacgaagcatttagaatttgagagaagagaggctgagtcagagcgctggatagctagtgttctctctaatagttag

SEQ ID NO: 149007 - DNA, 306 bp, Enterobacter cloacae; identical to SEQ ID NO: 116826

SEQ ID NO: 149008 - DNA, 855 bp, Enterobacter cloacae; identical to SEQ ID NO: 116825

SEQ ID NO: 149009 - DNA, 711 bp, Enterobacter cloacae; identical to SEQ ID NO: 116824

SEQ ID NO: 149010 - DNA, 561 bp, Enterobacter cloacae; identical to SEQ ID NO: 116823

SEQ ID NO: 149011 - DNA, 339 bp, Enterobacter cloacae; identical to SEQ ID NO: 116822

SEQ ID NO: 149012 - DNA, 327 bp, Enterobacter cloacae; identical to SEQ ID NO: 116821

SEQ ID NO: 149013 - DNA, 1215 bp, Enterobacter cloacae; identical to SEQ ID NO: 116820

SEQ ID NO: 149014 - DNA, 1020 bp, Enterobacter cloacae
atgaaaagcgtagtgatccaacagccggatgtgctggtgattgaagagcgtcctctcccgttgccgggcgcaggcgacgtccgcgtcaaaattaagctcgccggtatttgcggttcagacagccatatctatcgcgggcataacccgtttgcgaaatacccgcgggtaatcggtcacgagttctttggcgaaatagacgcggttggcgaaggcgtggagggcacccgactgggccagcgcgtttcggttgatccggtgatcagctgcgggcactgctacccgtgttccgttggaaaaccgaacgtttgtacttcgctggtggtgctgggcgtccaccgtgacggcggcttcagcgaatacgccgtggtgccggcgaaaaatgcctggcgcattccggatgcgatccctgaccaccacgcggtgatggttgagccattcaccattgccgccaacgtgacggggcaggcgaaacccaccgaacaggatgtggcgctgatttacggcgcaggcccgatggggctggtcaccgtgcaggcgctgaagggcgtttacaaggtgaagcaggtcatcgtggtggatcgcattgatgagcggctggagatggcgcaacgcagcggcgcagactgggtcttcaacaacggcgagcattctttacaggccgcgctggatgaaaaaggcatcaagccgacgttaatcatcgatgctgcctgtcatccgtccattttacaagaagcgattacgctggcgtctccggcggcgcgcatcgtgctgatgggcttctccagcgacccgagccagattgtacagcaggggatcaccggcaaagagctgtcgatcttctcttcgcgcctgaatgccaacaaattcccggtggtcattgactggctggaaaaagggctgatcgaccctgaaaaactggtcacccatacatttgactatcaccacgttacagacgccatcgaactgtttgaaaaagaccagcggcagtgctgcaaagtcttgctcacgttcgaccaataa

SEQ ID NO: 149015 - DNA, 1407 bp, Enterobacter cloacae
atgagttttattaacgataactttatgattggcaatgcgagaggtgttgaactttatcgtaacgtcgcgaaagcgctgccaattattgattatcactgtcacctggacgcgaaagatatcttcgagaataaaaatctcgataatattaccgaactctggctggctggcgatcattataaatggcgcgccatgcgcgccaacggtattgacgaaaaatacattacgggcgatgccccggcggaggataaatttgcggcatgggctgaaacggtcgaagcgagctatggaaatccgctctatcactggactcatttagaacttcaccactattttaactgtgacgaaccgctgggcaggcataactggcgtgaaataatggagcgctgtaatctgctattgcagcagcctgattttacgccgagggaactcattaaacgctccagggtagaagttatttgtacgacagatgctccgcttgatgatttacgctaccatcaattattgcgtgatgacgcgacgttcaacgttaaggtattaccgacctttcgtccggacgatgtttttgcgcaaaacgcggaacagtttgccgactttatcgatcgattaggtgagacgacaggatctaaaatccagacattcagcgattttgttaagggaatgagccagcgtattgcctggttccacgaaatcgggtgccgaatttccgatcacggacccgtggagatccattttcagtcagcagatgaaagtcaggttgaatccgtgtttgcccgaaagcgccggggtgaaaatctggacgcccgtaataatgcgattcttgacagtgccatttttattatgctggcgcataattacaggcagcataactgggcaatgcagatacacttcggtgcgattcgcaataataattcccgcatgtaccgttctttgggtagtaatactggttttgactcgctgaccgatcagtcgaatcttgcggccaatctcaaccaactcctggatgcaatggcgcaggctgaagctttgcccaaaaccattctatataacctcaacgccagctataacgatattgtcgcgacgactatcgctaattttcagactgcggaattgggcgttaaatcgccgatacagtttggctccggatggtggtttaacgacactcaacgcggaatggaaaaccagctacatagccttgcggatcaggggctattaatgaattttgtcggtatgttaaccgattcccgtagtctggtttcgtatactcgccacgattatttccgtcgtattttgtgcaatatcattggtggctgggtggagcgtggtgaagttccggataataacaccatcctaacgaagatggttaaaaatatttgccatgataatgctgaaaactatttcagattctaa

SEQ ID NO: 149016 - DNA, 1539 bp, Enterobacter cloacae; identical to SEQ ID NO: 116816

SEQ ID NO: 149017 - DNA, 204 bp, Enterobacter cloacae; identical to SEQ ID NO: 116814

SEQ ID NO: 149018 - DNA, 432 bp, Enterobacter cloacae
atgtataagaaaattttgatgcctgttgacgtgtttgaaatggatttgagcgataaagcggtacgccacgcggtcaacctcgcgaaggcggaaggcgcgacgatcaccctggtcaacattctccctaacagcagccgttcgttactgcgggggttcaatgccgatattaagaagttcgaagagtatatgaccgccgagtctgataagaagatgaaggcgctgaaacggctctttgatatgtccccggacaatattgactgtgaagttcgcttcggcaacgtacgcgatgaaatcatcaagctcagcaaagaggggaaatatgatgtcattgttatcggatcaaaaaatccgagcattacaacccatctgctgggttcaaatgctgaaactattctgcgctacgccactattccggtattagtggtccgctaa

SEQ ID NO: 149019 - DNA, 687 bp, Enterobacter cloacae; identical to SEQ ID NO: 116812

SEQ ID NO: 149020 - DNA, 747 bp, Enterobacter cloacae; identical to SEQ ID NO: 116811

SEQ ID NO: 149021 - DNA, 2034 bp, Enterobacter cloacae
atgtcggtcaacaatcctttttttgaaattagcctgttgccttatcaggcgccacgttttgatgcgattaacgacagccattatcgtccggcatttgatgaagcaatgcgcctgaagcgtgcagacattgacgcgattatcgcgcagcgcgccgcgccggacttcgacaataccgtgctggcgctggaaaagagcggggccatgctgtcgcgcgtgagcagcgtgttcttcgccatgacgtccgcacacaccaacgatgatcttcaggcactggacgagcagttctccaccgaactggccgggctggcgaacgatatctggctaaacgatacgcttttcgcccgcgtggaagccgtctggcaggatcgcgaggcgctggatgccgaatcccgacgactgacggaggagatgtatcagcactttgttcttgctggcgcgcgtctgaatgccgatgaaaaagccgagctgaaagccctgaataccgaagccgccaccctgaccagccagttcaaccagcgcctgctggcggcgaacaaggcgggagggctggtggtggacaatgttcaccagcttgacgggctcagtgcggaggaggtggctgccgcggctcacgctgccgcagaaaaagggctgacggatcgctggctgatcccgcttttgaataccacgcaacagcccgcgctggcggcgctgtcgttgcgcgagacccgtaaaaagttgttcagcgcgggctgggaacgcactcagaaaggcgacgaaaacgatacgcgcgagctgatccgtcggcttaccgcgttgcgggcaagacaggcgcagctgctcggctttgacaactatgcgagctggagcattgccgatcagatggcgaaaacgccggaagccgcgctcgaattcatgcgcgggatagttcctgcggcacgcggcagggccgcgctggagcaggcggatattcagaaggtcatcgacgacgagcagggtggttttacggtacaggcctgggactgggcgttttatgccgaacgcgtgcgctcagcgaaatacgcgctggatgagtcgcagatcaaaccctatttcgcactcaataccgtgctggaagatggcgtattctggaccgccacgcagctgttcggtatccgctttgtcgagcgttttgatattccggtttaccacccggatgttcgcgtgtgggagattttcgaccacacgggtgaaggcatggcgctgttctacggcgactttttcgcgcgtgattccaaagcgggcggcgcgtggatggggaattttgttgagcagtcttatgagtttgccgcgcgtccggtgatttataacgtctgcaactatcaaaaaccggcgaacgggcagaccgcgctgatctcctgggatgatgtgattaccctgttccacgagtttggccataccctgcatggcctgtttgccagccagcgctatgccacgctttcaggcaccaacacgccacgtgatttcgttgaatttccttcgcaaatcaatgaacactgggccagccatccgcaggtgtttgcgcactttgctcgtcactatcaaaccggcgaactgatgccggatgcgctgcgggaaaaaatgctcaatgcgacccagtttaataagggttatgacatgacggagctattgagcgccgcgctgctggatatgaactggcacggcattcaggagcccgttgaagacgtggaagcctttgaagccgccgcgttgaaaaaagaggggttggatcttccagccgtaccgccgcgctatcgcagcagctatttcgcccatatcttcggcggcggctacgcggcagggtattacgcctatctctggacgcagatgctggcggacgatggatatcagtggtttgtcgagcagggcggtttgacgcgcgaaaacggacagaaattccgcgaggcgattttgtcccgcggcaacagcactgatttagctgaactttaccggaactggcgcgggcacgatccgaagattgaaccgatgctggagaatcgcggattgagtgcgtaa

SEQ ID NO: 149022 - DNA, 177 bp, Enterobacter cloacae
atgaacacattccattggctaaaaggaaagacatggggcttaagcattcttaccgcggcgttaaccctgagcgcaacggcgtcagcagccctcccagattcggctgaactcaagcagcgcgaactcgcggacggtctgtatgagatggtttactccccaacggcaaacgcgttgtag

SEQ ID NO: 149023 - DNA, 2169 bp, Enterobacter cloacae; identical to SEQ ID NO: 116808

SEQ ID NO: 149024 - DNA, 915 bp, Enterobacter cloacae; identical to SEQ ID NO: 116807

SEQ ID NO: 149025 - DNA, 747 bp, Enterobacter cloacae; identical to SEQ ID NO: 116806

SEQ ID NO: 149026 - DNA, 240 bp, Enterobacter cloacae; identical to SEQ ID NO: 116805

SEQ ID NO: 149027 - DNA, 1266 bp, Enterobacter cloacae
atgatgaataaagccacaactctctcagctaatattacaacacgctctaactggcactggcaggataatatctggacgctgggcctttatggtacagccgtcggagcgggaacactgttccttcccgtggaaatcggcacccgtggtccggttatttttctggttatgctcctgctggggctgccgttatccctgatcccccatttactcctttgtcgtgtgtatatgcgtgaagagaagactgaaaacggcacgttgccgatcttcggctctttcttcagcggaaggggtgaaaagctgatcaccctgttctattgtgtgaccttcttcccggtaaccctggtttacggggtggcgctgattaatgcgctgagtaatttactggtggagcatctgcatattaccgccatcagccgtgggccattgtcgtttatcgtggttgctgcgctgtatgtggtgcttagcaagggccgggacagagtcgtggccattatgagcgcgctggcgctgccgttcgcggcatctgtactgctgatcgccgtatcacttatcccgggatggcatctgtctaacctgaccgatacggccgctgaaatgaacgccacgccgctgccggtaacgctgaaaaatatctggctgacgctgccgcttattaccttctcgttttgctgtgcgcctatggtctccccgctgagctcttactaccgggagaggaaagcggagggtgagaaaaaggcactgttcgtgatccgtatcgcctacttagctatcttcgccagtatcctctttttcgtgctgagctgcgtgctggggatcccccatgacaactttgtgcgagcgaaggcggaaaacctgaatgtgctgtcggtgatgaaaggaaacggtgatttcagcctgatttaccacattgccccgctcatcgctatcatcggtatgacgaaatccttcctcggcgtaggtctgtcggtcgcacaaacgtttggtcagctggctgccagcgtatccggcaaaaaggccaacgccagcaagcggctggcctctctggcgctgttcctgctgacctatggcattgtttatgccaatccggatgtgctcagcctgattgaaatgttctgcggaccactgatcgcggtgatcctgttccttatcccggcgtacctcatatacacccgcccctcgctggcagagcttcgcggcgtgacggtgtttttggttgttctgggcgggctggcaacgctgtctgcattgctctggacaatgctttag

SEQ ID NO: 149028 - DNA, 366 bp, Enterobacter cloacae; identical to SEQ ID NO: 116803

SEQ ID NO: 149029 - DNA, 2097 bp, Enterobacter cloacae
gtgcacaacgataagcattatcccttcataaaagtcagcatgacggcgctggcgctgctggtcgctccgctcgcgctacaggcgcaggataaggccgctgaagcctcgcaggggacacaggaatcactgaacattgatgcggccgatcagcaggcgcccggaaccacaaaaaccaccgacgatgcctcaaccggcagcggtgatggaaagagagtcgcctcggccagccagccagcgacgccgctggtgcccggcaccgccacctgggacagcttccacggccagcttaacgcgcagaaatacagtcccctgacccaaattacggcggataacgtcgggaaattaacgaaagtctgggagttccataccggcgacgtctcggatggtaaaggcgatacgccagctaccgtctggtccgcaacgcccattttcgccaacgatacgctctatatcggcacgccattcgatcgcctgattgcgctggatccggggacgggtaaagagaagtggcactatgacaccaaatcgtcgcgcaaggcgctgacccagccggtgctgaaaaaccgcggcgtttcctactggcaggccaaaaatccggtgacgggtgaggcatgccagaagatggtctatatgggcaccgttgacggcaagctttttgcgctggacgccgattcaggcaaaccgtgcagcggctttgcggacaacggcgtgctggatctgaaccagtggaacaccgttaacgcgaagtatccgctctctgtcctgcaaccgccaaccgttgtcggcaaccatctgctggtgggctgggccgggaaagactgggcctatgccgaagcccctccgggcaccgtcttttcagtcaacgcccagaccggtaagcttgagtggacctttgaggcgatcccggcagagatccgcaagcgtaccggtaccgccaacgtctggacgcacatgtccgccgatgaggccaacgggctggtctatctcccggtctcatcgccgtctcccaactattggggcggcaaccgcgtggacgctattccgcttggcacctcgaccaccgccctggacatcaacaccggtaaagtggtctggtcccgtcagtgggtacaccacgacgtctgggattacgatatcaactccgccccgacgctgatggacatcaccgtagacggcaagcagatcccggcgctggtgcaggccaccaagcagggtttcctgtttgtggttaaccgcctgacgggggaggacgtatggccaatcgaagaacgtccggttccgcagggtgatgggtcggttcagggtgaagttctctcgcccacgcagccattcccgaccaaacccgcgccgctgctcgaccagtcgaaaaaaccggaaatctggaagctggcggatatcgtcggtggcggccagtgctcccgcctgtgggataacctgacctatgaaggaatgtataccccgccgaccaccaaaggcgaaggcacgctcacctatcccgatagcgccggcggcgtccagtggggcggggtggcgttcgatccgcaaaaacagatcgccatcgtcaacacctcgcatatcgtccagtacgtgaagctgtacagccgtgaggattacgataatgcagacaaagactccggcaacgaaagcggctttgccccacaggaaggcgccccgtacggtatgcgtctgctggtggcgagcaactggcttggcatgccgtgctggcaaccgccgtttggtgaaatcgtggcgctggacatgcacacgggcgatgtgaaatggcgtcgtccggttggctcctcccagcagtatggcttcttcatgccggaaagctggggttcgcctaccattggtggtccggcagtgacggcgggcggcgtgatcttcatcggtgcttcaatggatgccaaagtgcgtgcctactcggtagagagcggtgaagagctgtggtccgatcaggccgaagctccggcggtagcgaacccgtccgtctatgaatataaaggtcgccagtatgtggccttcgtggcaggcgggaatacgatcctgaaggatcaggtgggcgatcaggtggtggtctacgccttgccggaataa

SEQ ID NO: 149030 - DNA, 591 bp, Enterobacter cloacae; identical to SEQ ID NO: 116801

SEQ ID NO: 149031 - DNA, 279 bp, Enterobacter cloacae; identical to SEQ ID NO: 116800

SEQ ID NO: 149032 - DNA, 174 bp, Enterobacter cloacae; identical to SEQ ID NO: 116799

SEQ ID NO: 149033 - DNA, 990 bp, Enterobacter cloacae; identical to SEQ ID NO: 116798

SEQ ID NO: 149034 - DNA, 2640 bp, Enterobacter cloacae
atgaagggtaaatacaaagccgcaatcgcgctattactgctgctatttcttgtgccgctgacgctgctgatgacgctcgcccagtgggtacccacgcttgccgggatctggcttcccgttggaacgcgcatcgcatttgaaaaaagcccacggctcacgcgccacgccctgatcatccccgatctccgctatctggtagaagaatgtgaaattgcccgcgtggaaaacgtgaccctgtcacatcccagccgctgggatctggatattggcgcacttacacttaactctgtctgcctgagcaaattaccgcaatcggcgccctcaacggtggcgccgaaaacgctggcgcagtggcaggccatcctgcccaacacctggctgaccatccaccgctttaccctttctccctggcagcagtgggagggtgagctgcaagcctcactcacgccagcccgccaggacatcacctataacggcaagcaggtgagcattaaggggcagttgcgcggccagaccctctccatcagccagttcgatgtgcaactgccggatcagccgcagcccgtgaagctggttggtgaatttaccctgccgctggtgccggacggcgtgccggtgaaagggcatacggtcgcgacctttaacgtgccacagttatcctcgctggtcgatgccgatctggactgggaggacaatcagggccagctggtggtcatggcgcgggacaaccccgagccgctgctcgatttaccgtggcagatcaccgctcagcagctgaccatcagcgacggacgctggaactggttagcctccggcgtgccaatgagcggacgcgtcgggctgaaagtggataactggcagcaggggctggagaaagccaccttcacggggcggctcaacgtgctgacccagggggatgcgggtaagggcaacgcggtgctgaatatcggtcccggctcgctcagtatggataacagcgctatgccgctgcacctgagcggggaagccaagcaaaacgatctgatcctgtatgccaggctcccggcgatgctgaccggcagcctttacgatccgcagcttacgtttgaacccggcgctttattgcgctcgcgcgggcgcatcatcgactcgctggatatcgatgagatccgctggccgctggcgggcgtgaagctcacgcagaagggcgtggacggccgcctgcaagccattctgcgggcgcatgaaaacgagatgggcgattttgagctgcatctggacggccaggctaacgactttttaccggacaacggtttgtggcagtggcgctactggggtaaagggaatttcacgccaatgaacgcgcgctgggatgtccggggaaccggggagtggcgcgacaacgttatcgaactgaccgatctttccacggggttcgacaaattgcagtacggtacgatgctggtcagcaagccgcgcctggtgctggatcacccggtgcgctggtcgcgggacccggataaccccacctttagcggcgcgctcgcgcttaacgccgggcaaacaagcttttcaggcggaagcgtgctgccgccgtccgttttgaccttcagtgttgacgggacagacccgacggtgttccagtttaaagggaacctgcatgcggacgacatcggcccggtccaggtgaatggacgctgggacggcgaacgccttcgcggtcaggcctggtggccaaaacagtctcttacggtgtttcagccgctgatcccgccagactggaaaatgaccctgcgcggcggcgaaatgtacgcgcaggtggctttctccgcggcccccgatcaggggtttgaggccggggggcacggggtgctgaaagcgggcagcgcgtggatgccggataacgagatcaacggcgtggattttgttcttccgttccgcttaagccagggtacctggtcgctgggcacgcgcgggccggtaacgttacgaatcgacgaggtgaaaaacctggtcacagcccgaaatatcaccgcggatctccagggcgattatccctggaccgaagcgaacccgctcctgctcaccaacgtgaaggtggaagcgctcggcgggaaaatcaccatgcagcagttgagaatgccgcagcacgatccggctttactgcgcgtggataatatatcctccagcgaactcataagcgcggtgaatccgaagcagtttgccatgtccggcccggtgagcggcgcgctgccgttctggctggacaatgaaaaatggatcattaaagatggctggctgaccaacccggggccgatgacgctgcgcatcgaccaggacacggcggatgccattgtgaaagacaatatggttgcaggggcggcgatcaactggctccgctatatggaaatttcgcagtcgtggacaaaactcaatgtggataatctgggtgtgttaaccatgcaggcggccattaaaggcaccagccgcgtcgaaggtaaaagcagtttcgtaaatctgaattacacccatgaagagaacatttttaccctctggcgcagcctgcgctttggggacaatctgcaaacatggtttgatcaacatgcggcgataccccttctccgcggttcgacaggcaaggaaagtgaggaacaacaatga

SEQ ID NO: 149035 - DNA, 192 bp, Enterobacter cloacae; identical to SEQ ID NO: 116796

SEQ ID NO: 149036 - DNA, 318 bp, Enterobacter cloacae; identical to SEQ ID NO: 116795

SEQ ID NO: 149037 - DNA, 909 bp, Enterobacter cloacae; identical to SEQ ID NO: 116794

SEQ ID NO: 149038 - DNA, 1500 bp, Enterobacter cloacae; identical to SEQ ID NO: 116793

SEQ ID NO: 149039 - DNA, 1107 bp, Enterobacter cloacae
atggaaaaaagacatccagccacacccgaacccgcgatatggcctacccgtaaatcaatggttgttcacgggctggccgtgaacctgccgtggctcgcctttgtgaatgccagctttgcccttatggtcctgctgcgcaattcgctgttcggccatatcgatgccctcctgcacatcagcccccctctgcggcagatgattgacgcctccatgctgggcgtggtgatcctttccgtagcgctggtgatcatggcctggcgccacatccgcggcgtcagcgccgttttgtttatgtgcagcctgctgtggtcgataagttgttactggtttatcaacgtgttacagcttcctcatccctggcctatattcgttaccctgctgatggccggtatgaccgcgctctattttcacccggttgcactgctctgcttcaccgttccgctatgggtaagcctgcccgttgccagcatgctgctgaatcaggaaattaattatcgctttgccgggctgtgggtggtgttcacgttcattctcgtgtgcgggcgctatatcctgttgagctggtttgaagaggcgtggcgtcgcaaccagcagaatcagcgtttaatttcacggctggatgcgctggcccatcaggatccgctgacgaaaacggccaaccgccgggcgatggagctggtgctggaaaatgccgtagagcaaggcaaacgcttcgcggtgctgatgctggatgtcgattacttcaaactgtataacgacacctacggtcaccaggccggagatgcgtgtctcgcgcgggtggcagaggtgctgaacacctcggtgcgcacgccagaggatgtggtttcgcgctacggtggcgaggagtttgtggtgatcctctttgactgcgaagaaagcgttgctgagaaagtcgccgcgcggatccaggctggcctgcgcaacgcagccattccgcacagcgcgtcgaaggttagtgaatgtgtgacggcgagtatgggcattgcaggctataccgcagggctggccggcccggaaatcatcgcccgcgccgatgcggcgctgtacagggcgaaggaggccgggcggaatcggtggtcgctgtaa

SEQ ID NO: 149040 - DNA, 1974 bp, Enterobacter cloacae
atgagaatcaatgagatcgtcaggagtctcgcgctggcgggatgttttatttctgccagttccgcctgggccgcagaagcacctaaggatgccaccgcagcaacgcaacaggccaacaacgcactcttcaaccagcttcctttctccgataacaccgattttaccaacgcccacaaagggtttattgccccgctgcctcaggacattatcaaaggtgagcaaggcaacaccgtctgggatccgcagcagtacgcttttatcaaagaaggcgataaggcgcccgactcggttaacccgagcttatggcgtcagtcccagctgattaacatcagcggtctgtttgaagtgaccgaaggcgtctaccagatccgtaacctcgacctgtcaaacatgaccattattgaaggtaaagaaggcattaccgtggtcgacccgctggtgtcggcggaaacggccaaagtcgggatggatctttactataaaaatcgcggtaataagcctgtggtcgccgttatttacacccacagccacgttgaccactatggcggcgtgcgcggcgtggtggatgaagcagatgtgaagtccggtaaggtgaaaatctacgcgcccgccggatttatggaggccgccgtcgcggagaatatcatggcgggtaacgtcatgagccgccgcgccagctatatgtacggcaacctgctgaagccggatgcgaagggccaggtcggcgcgggtctcggcaccaccacctccgccgggacggtgaccctgatcgccccgaccaatatcatcgagaaagatggtcagaaagaggtgatcgacggcctgacctatgattttatgctcgcgccgggatcggaagcgccttctgagatgctctggtatatcgaagagaaaaagctgatcgagtcagcggaagatgtcacccataccctgcacaacacctactccctgcgcggcgcgaaaattcgtgagccgttgccatggtcgaaatacatcaaccaggcgattgtacgctggggtgataaagccgaaatcattatggcgcagcaccactggccgacatggggcaacgacaacgtggttaacctgctgaaaagccagcgcgacctgtatcgctacatcaacgaccagaccctgcgcatggcgaacgaagggctgacccgtgacgagattgccgccaacttcaaactgccaaactccctggccaatacctgggcaaaccgtggctattacggttctgtcagccatgacgttaaagcgacctacgtgctctatttaggctggtttgacggcaacccggctaccctcgacgaactgccgcctgaacaggctgcgaagaagtttgtggaatacatgggaggggccgatgccatcatgcagaaagccaaagctgactatcagcagggcaactaccgctgggtggcgcaggtgaccagcaaaattgtcttcgccgatccgcagaacgctacggcacgtaatctggaagccgacgcgctggagcagttaggttaccaggcggaagcgggcacctggcgtaacttctacctgaccggcgcccaggagctgcgtaacggcgtggtgaaaggaccgaccccgaacaccgccagcccggataccgtgcgcgcgatgacgccagaaatgttctttgactatctggcggtgcacattaacggtgaaaaagcggcggatgcaaaatcggtgtttaacatcgacctcggcagcgacggcggtaaatacaagctggagctggaaaatggcgtgctgaaccacacggcgaacgccgaagcgaaagacgctgacgcgaccgtgaccctcaaccgcgatacgctgaataaaatcatcctgaaagaagtgacgcttaaacaggcgcaggataacggcgatatcaaagtgaccggcgatgccgcaaaacttgatgccatgctcggttacatggataaatttgaattctggtttaacattgtgaccccgtaa

SEQ ID NO: 149041 - DNA, 2274 bp, Enterobacter cloacae; identical to SEQ ID NO: 116790

SEQ ID NO: 149042 - DNA, 396 bp, Enterobacter cloacae; identical to SEQ ID NO: 116789

SEQ ID NO: 149043 - DNA, 483 bp, Enterobacter cloacae
atggcaattcctgtttaccttttcttaactgacgatggtgggtcaaaaattacaggctcggtggatgttcgttaccgtgagggaagcattgaagtcactggctttacacacaatcttcgcctcccaaccgatccattgaccgggaaaattaccagtaaacgtaaccatgccccagtcgtatttcaaaaagaaatcgattcctcctccccttacctgatgaaagccgttgcgactggccaaacccttaaaacggctgagttcaggtggtatcgcattaatgacgccggacaggaagtagaatattacaatatgcgtctcgataatattcgcgtcgtttccgtcacgccattgatgcatgacattaaagacccgatgaaagaaaaacataatcatcttgaagtcgtggagctacgctatgataaaatatcatggacatattgcgatggtaatatacagtttgcagactgttgggctgagcgttaa

SEQ ID NO: 149044 - DNA, 2040 bp, Enterobacter cloacae; identical to SEQ ID NO: 116787

SEQ ID NO: 149045 - DNA, 984 bp, Enterobacter cloacae; identical to SEQ ID NO: 116786

SEQ ID NO: 149046 - DNA, 288 bp, Enterobacter cloacae; identical to SEQ ID NO: 116785

SEQ ID NO: 149047 - DNA, 747 bp, Enterobacter cloacae
atgaacaacgtatctgcttatgccctgcgtctgggcgacaacggtctggtgctctcacagcgtctgggcgcctggtgcggccacgcgccggagctggaaattgacctggcgctcgccaatatcggccttgatctgctcgggcaggcgcgcaatttcctgacctacgccgctgaacgggagggtaagggcgatgaagacaccctggcctatggccgcgatgagcgtcagttccgcaatttactgctggtggaacagccaaacggcagcttcgccgacaccattgcccgtcagtatctgatggatgcgtggaacgtggcgctctacgagcggctgatccacagcagcgacagtcagcttgccgccatcgcggcaaaagccattaaggaggcgcgctatcacctgcgctttagccgcggctggctggtgcggctgggggacggaacagaaacctctgcacaaaaaatgcagcaggcggtggatagcctgtggcgctttacggctgaactgttcgacgccgacgacgtcgagctggcgctaattgatgacggcgtggcggttgatccgcgcgacctgcgggacccgtgggagcgcgaagtgtttgctggcctggcggaagccaccctccgcgtgcccgaagaggtggcgtatcgcacgggcggcaagaaggggctacatactgaacacctcgggccgatgctggcagagatgcagtatctccagcgcgtttaccccggccagcagtggtaa

SEQ ID NO: 149048 - DNA, 498 bp, Enterobacter cloacae; identical to SEQ ID NO: 116783

SEQ ID NO: 149049 - DNA, 1071 bp, Enterobacter cloacae
atgacaacgtttcattcattaacagtggcaaaagtagaacccgaaacccgcgacgcggtgaccattaccttcgcggtgccgcaggcgttacaggaggcgtaccgcttccgtcccggtcagcatctgaccctgaaagccagtcctggcggggatgaactgcgccgctgctactccatctgccggagcaccgcgtgcggtgagatcagcgtggcggtcaaagccatcgagggcggacgtttttcccgctatgcccgggacgagatcaaaccgggcatggcgctggaggtaatggtgccccaggggcattttggctaccagccgcaggccgaacgcgaaggccactatctggcgattgccgccgggtccgggatcaccccgatgctggcgattttgtccgctacgctggccactgaagcccacagccacttcaccctgatttacggcaaccgcagcagccagagcatgatgttccgccgggcgctggcggacctgaaagataaatacccgcagcgtttgcagctgatcgccatcttcagccaggagacgctcgacagcgatctgctccatggccgcattgacggggaaaagctccaggcgctggcaaaaacgctggtgaatttccgtcagtacgatgaagccttcatctgcggcccgtcggcgatgatggatgaggccgaagcggcgctgcaagcgctgggtatgccggaaacagcgatccatcttgagcgctttaacacgccgggtaccgccgttaaacggacagccagcgtgcaggccgacgggcagaaggtcaccgtccgtcaggacgggcgcgacagggagatcaccctgacggcggacgacgagagcattcttgacgcggccctgcgtcagggggcggatctgccttacgcctgcaagggcggcgtatgcgccacctgcaaatgcaaagtgctgcgcggaaaagtcgatatggcgaccaactacagcctggagccggacgagctggccgcaggctatgtgctgagctgtcaggcgctgccgttaaccgccgatgttatcgtcgattttgatgcgaaggggatggcatga

SEQ ID NO: 149050 - DNA, 768 bp, Enterobacter cloacae
atgagcgaactgattgtcacccgtcatggccgcgtgttgcagctgacgcttaaccgtccggcggcgcgcaacgcgctcaacaatgcgctgctcctgcaaatcgcggagcagcttgaggccgccgccgcggatgctgagatcgccgtctgcgtggtgtacggcaacgaacgctgctttgccgccggggccgatctcaacgaaatggcggagaaagacctgcccgccaccctgaacgatatccgtccgcagctgtgggcgcggatcaacgccttcaccaaaccgctgattgccgccgtgaacggcttcgcgctgggggcaggctgtgagctggcgctgctctgcgatgtggtgattgccggtgataacgcccgttttggcctgccggaaatcaccctcgggatcatgccgggcgcagggggcacccagcggctgatccgcagcgtgggcaaatcgttggccagcaaaatggtgctgacgggcgaaagcatcacggcggttcaggcgcacagcgccgggctggccagcgacgtctacccggcctcgctgacgctggagtacgccctgaagcaggcggcgctgatggcgcgccactcgccgctggcgctacaggcggcgaagcaggcgcttcgccagtcgcaggaagtcccgcttcaggccgggctggcgcaggagcgtcagctgtttgcgctgctcgcggccaccgacgatcgccgggaaggtatcaacgcctttttacaaaaacgcaccccagactttaaaggacgctaa

SEQ ID NO: 149051 - DNA, 786 bp, Enterobacter cloacae
gtggaatctattctgagccatgttgagcagggcgtaatgaccattacgctgaaccgcccggagcgcctgaacagctttaacgacgtcatgcaccagcagctttccgaatgcctgaagcaggccgagcgcgatgacgccatccgctgcctgctgatcaccggggcaggacgcggtttctgcgccgggcaggatcttaacgaccgtaacgtcgacccgaacggccccgcgcccgatctgggcatgtccgttgagactttttacaacccgctggtgcgccgcctggcaaaactgccgaagccggtgatttgcgcggttaacggcgtggcggcgggggcgggtgccacgctggccctcggctgtgacatggtgattgcggcccgttcagccagctttgtgatggccttcagcaagctcgggctggtaccggactgcggcggaacctggctgctgccgcgcgtgaccggacgcgcccgcgccatggggctggcattgctgggcgataagctcagcgccgagcaggcacaggcctggggaatgatctggcaggtggtggacgacgaccagctctccgccaccgcacagcagatggcgctgcattttgcctcgcagccgacctttggcctgggcttgatcaagcaggcgattaacgccgccgaaaccaataccctcgacgcccagcttgatctggagcgcgactatcaacgtctggccggacgcagcgacgactaccgggaaggcgtcagcgcgttcctggcaaaacgcgcgccgaactttacggggaaataa

SEQ ID NO: 149052 - DNA, 1425 bp, Enterobacter cloacae
atggtgaatatccatacggtcgccgtcattggcagcggcaccatgggcgccgggattgccgaagtggcagccagccacggtcatccggttctggtgtacgacattgatgcagcggcgatttcccgcgccatcgacggcattcgtcagcggctctcctctcgcgttgcgcgcggaaaactctctgccgacgccggggaacagatcctcgcccgcctgacgccggtgacgactatcagtgctctggcgaaagccgatctggtgatcgaggcggcctccgagcggcttgaggtaaaaaaagcgctgtttacccagctggcagagatctgcccgccgcagacgctgcttgccagcaatacctcgtccatttccgttaccgcgattgcagcggagataaaccaccctgaacgcgtcgccgggctgcacttcttcaatcctgccccggtgatgaagctggtggaagtggtcagcgggctggcgacctctcccgaagtggccgatgcactgtgcgagctggcgctgagctggggaaagcagccggtacgctgccagtccacgccggggtttatcgtcaaccgcgtggcgcgcccgttctactcggaagcctggcgcgcgctggaagagcaggtggcaacgcccgaggtgatcgacgccgccctgcgagacggcggaggcttcccgatggggccgcttgagctgacggacatgataggtcaggacgtcaactttgccgtgacctgctccgtgtttaacgccttctggcaggagcgtcgttttctgccgtcgctggtgcagcaggagctggtgctggcggggcgtctgggtaagaaaagcgggcagggcgtttaccgctggctggaggagaaacccgccgtcagctggctcgccccggtcagcgacagcttcagcccgatgcgcgcacagcgaagaagtgacggtgtcacggaaattgacgatctgttgctgatcgaaacgcagggtgaaaccgcgcaatcgctggcgctgcgccacggctgcccggtggtggtggtcgaccgcatcgagcgggatgtggccgtgatagccaccgcaccgggcaacccgcacgccgccacgcagaaagccatttactggttgcagcaccaggagaaacgggtggtacagattgccgattaccccggcctgctggtctggcgcacggtagcgatgattgccaacgaagcgctggacgccctgcaaaaaggggtcgccagcgagcaagacatcgataccgccatgcgcttaggggttaactatccctgcgggcccatcgcctggggcgaacgccttggctggcagcgtctgttaacgctgctggaaaacctgcaacgtcactacggcgaggaacgctatcgcccctgttcactgctgcgccagcgtgcgcttctggagagtagctatgagtcataa

SEQ ID NO: 149053 - DNA, 423 bp, Enterobacter cloacae; identical to SEQ ID NO: 116778

SEQ ID NO: 149054 - DNA, 1317 bp, Enterobacter cloacae
atgataaatacaacaaagcttgatccgatcgaaaccgcgtccattgatgaattgcaggcgttgcagaccgcgcgcctgaagtggacgctgcaccacgcctacaacaacgttccgatgtacaaacgcaagtttgatgccgcgggcgttcaccctgacgatttcaccgagctggcggacctgcaaaaattcccgtgcaccaccaagcaggatctgcgcgacaactacccgtttgatacctttgcggtgccgatggagcaagttgtgcgcatccacgcttcgtcgggcaccaccggaaagccgaccgtggtggggtatacccagaatgatatcgacaactgggccaatatcgtcgcccgttccctgcgcgccgccgggggcagcgcgaaggataaaattcacgtcgcctacggttacgggctcttcaccggcgggctgggggcgcactacggtgccgagcgtctgggagcgacggtgatcccgatgtccggcggccagacggagaagcaggcgcagctgatccgcgatttccagccggatatgatcatggtgacgccgtcttactgcctgaacctcattgaagagctggagcgtcagatgggcggcgatgccagcgcctgttccctgcgcgtcggcgtgtttggcgccgagccgtggacgcaggcgatgcgccgcgaaattgaaaaacggctgggcattaccgcgctggatatctatggtctctccgaggtgatggggccgggcgtggcgatggagtgtcttgaaaccgccgacggcccgaccatctgggaagatcacttcttcccggagatcgtcaacccgaatgacggcacgccgctggccgacggcgagcagggcgagctgctgttcaccacgctgaccaaagaggcgctgccggtgatccgctaccgcacccgcgacctgacgcgcctgctgccgggcaccgcacgcaccatgcgccggatggatcgcatcagcgggcgcagcgacgacatgctcatcattcgcggggttaacgtcttcccgtcacagctggaagaggagatcgttaagttcgaacacctttcgccgcactatcagctggaggtgaaccgccgcgggcatcttgattcactttcggtgaaggtcgagctgaaacagagcagcttaacgctgacccatgaacagcgctgtcaggtctgccatcagctgcgtcatcggattaaatcgatggtggggatctcgaccgacgtgatgatcgtgaactgcggcagtataccgcgctccgagggtaaagccagccgggtgtttgatttgcgtaaagtggcagccaacggttga

SEQ ID NO: 149055 - DNA, 927 bp, Enterobacter cloacae; identical to SEQ ID NO: 116774

SEQ ID NO: 149056 - DNA, 606 bp, Enterobacter cloacae; identical to SEQ ID NO: 116773

SEQ ID NO: 149057 - DNA, 267 bp, Enterobacter cloacae
atgtccattttcaccatcgacctgcacaatgaacgcaggcaggtcaccagctaccagaccatcaaaccgatgctgtaccgctatctctatcggcaggagacccacacgggagagaatgagggcctggcgctgtttatcattaagcgcactaacctgtcacgcacgcatgtctttcgcgtgctggcagatctcaaagccgggggctatatcaccatgaagcgcggaaagctggtgtcgattgaccggcccctgccggaagcgtattaa

SEQ ID NO: 149058 - DNA, 345 bp, Enterobacter cloacae
gtgaattttcaggatatccatacctattatcagcaactcaatattgggcaattctttccgcacatgctttgtaaaggcgaggccttaaccgttgccgcaaataaaaaattcaccgtcgagcctggctatatctatttttgcactgaagggtcgctgacaatattaatgcctgatgatggcctaaatattggcaatactatcgagtatatgccgatagggttaatggaaaggtattgtccactggcgaagtatgaatatcgcagcagtgcgaaggtgaagctggtgagaatagcctgggccgacttcgaccagctatttttcggaggcgggtgtgagcgcatgtag

SEQ ID NO: 149059 - DNA, 1977 bp, Enterobacter cloacae; identical to SEQ ID NO: 116771

SEQ ID NO: 149060 - DNA, 753 bp, Enterobacter cloacae; identical to SEQ ID NO: 116770

SEQ ID NO: 149061 - DNA, 198 bp, Enterobacter cloacae; identical to SEQ ID NO: 116769

SEQ ID NO: 149062 - DNA, 435 bp, Enterobacter cloacae; identical to SEQ ID NO: 116768

SEQ ID NO: 149063 - DNA, 720 bp, Enterobacter cloacae; identical to SEQ ID NO: 116767

SEQ ID NO: 149064 - DNA, 1260 bp, Enterobacter cloacae; identical to SEQ ID NO: 116766

SEQ ID NO: 149065 - DNA, 723 bp, Enterobacter cloacae; identical to SEQ ID NO: 116765

SEQ ID NO: 149066 - DNA, 1221 bp, Enterobacter cloacae
atgaccaatcccgtctttgcgcttgaacccgatatcccgcgcaacgtccgcgtcgcgcgatggttgctcttccgcctgctgaatggcctgcacggtggctcgctgacgctgcgtgaaggtgcgcagacgttccagttcggcgacgcttccgccgcgcttcacgctgaggtgcaggtacttgctccgggcgtctactggcgcattttaaccgggggcagcctcgccgcggcacaggcgtggatggatggcgactgggagacgccccacctgacgccgctgctggagctgattgcgcgcaatagccaaatcctcggaaagctggaaaaagggtttcgcctgctcgggaaaccggtggagcggctgcggcactggatgcggcgcaactcccgcgcgcaggcgcgggaaaatattgccgcccattacgatctgggcaacgccttttacgcccatttccttgatgaacatctcctgtactccagcgcgctgtttagcggggacgagcaggatctgaccgcggctcagcaggcgaaaatggcgaggctgtgtgaccagctggcgctcacggcaaacgatcatctgctggagattggcaccggctggggggcgatggcggaatatgccgcccgtcattacggctgccgggtgaccatcaccacgctgtcgcaggagcagtaccactgggccaccgcgcgcatcgcccgggcagggttgcaggatcgtgttgaggtgctgctctgcgactaccgcgatctgtccggggtctacgacaagctggtgtcggttgagatgattgaggccgtcggtcaacgctacctgccaacatttttccgcacctgccaggcgcgtctgcgtccaggcgggcggatggcgattcaggccatcaccattcaggatcaacgctatcgcgactacagcaaaagcgtcgattttattcagcgctacatcttccccggcggctttttgcccagcatcaccgccatgaatgaactcatgacccgccataccgattttgtggtgcgtaacctcttcgatatggggccggactacgcccgcacgctggcgcactggcgtcagcggttcgttcacgcctggcaggagattgaaaagctcgggtttgatgaccgtttccgccggatgtggctgtactacctcggctactgtgaagccgggtttaatgcccgcaccatcagcgtggtgcagctgactgcggaacgcgtatga

SEQ ID NO: 149067 - DNA, 534 bp, Enterobacter cloacae; identical to SEQ ID NO: 116763

SEQ ID NO: 149068 - DNA, 459 bp, Enterobacter cloacae; identical to SEQ ID NO: 116762

SEQ ID NO: 149069 - DNA, 435 bp, Enterobacter cloacae; identical to SEQ ID NO: 116761

SEQ ID NO: 149070 - DNA, 933 bp, Enterobacter cloacae; identical to SEQ ID NO: 116760

SEQ ID NO: 149071 - DNA, 1029 bp, Enterobacter cloacae; identical to SEQ ID NO: 116759

SEQ ID NO: 149072 - DNA, 975 bp, Enterobacter cloacae; identical to SEQ ID NO: 116758

SEQ ID NO: 149073 - DNA, 540 bp, Enterobacter cloacae
atgacaaaactcaccctacaagagcagatgctgaaagcgggcttagtcagcagtaaaaagatggcgaaggtccagcgcacggcgaaaaaatcccgcgtccaggctcgcgaggcgagagaggctgttgaagagaacaagaaagcccagctggagcgtgataaacagctgagcgaacagcaaaaacaggcggtgctggcaaaagagttcagggcgcaggtgaagcagctgattgagatgaaccgcatcaccgtggcgaagggcaacattacctttaactttaccgacggcaaccttatcaaaaaaatcgaggtcgataagcagacgcaaacccagctgatcaacggccgtctggcgattgcccgactggtgattaacgcgaatggcgactgtgattacgcgattatcccggcggtagtggcggataaaattgcccagcgcgatgcggacagcattgtgctaaacagcgccctgagtcaggaagagcaggacgaagacgatccgtacgcagacttcaaaatccctgacgatttaatgtggtaa

SEQ ID NO: 149074 - DNA, 687 bp, Enterobacter cloacae; identical to SEQ ID NO: 116756

SEQ ID NO: 149075 - DNA, 606 bp, Enterobacter cloacae; identical to SEQ ID NO: 116755

SEQ ID NO: 149076 - DNA, 3903 bp, Enterobacter cloacae
atgacagaacaccaaaaattgaccttcccgatgctgatgcaaaagcttgattcgctgatgctgcgcgataaacagcggtttgcgcgccgtctgcacggcgttaagaaggttaaaaatcctgatgcacaacaggccatttaccaggagatggccaacgagattgaacaggcggcagggaaagttgtgctgcgtgaagccgcacgtccggagattacctatccggaaaatctgcccgtcagccagaagaaacaggacattcttgaggccgtacgcgaccaccaggtggtgatcgtcgcgggggaaaccggttcaggtaaaaccactcagctgccgaaaatctgcatggagctgggccgcggggtgaaagggctgatcggtcacacccagccgcgtcgtctggcggcgcgcaccgtggcgaaccgtattgcggaagagctgcaaacggagccgggcggctgcatcggctacaaggtgcgattcagcgaccacgtcagcgataacaccatggttaagctgatgaccgacggtatcctgctggcggaaatccagcaggatcgtctgctgatgcagtacgacaccatcatcatcgatgaagcgcacgagcgcagcctgaacatcgacttcctgctcggctacctgaaagagctgctgccccggcgtccggatctgaaaatcatcatcacctccgcgaccatcgacccggagcgcttctcaaaacatttcaacaatgcgccgattattgaggtgtcaggacgcacgtatccggtggaagtgcgctatcgcccgattgtggaagaggcggacgataccgagcgcgaccagcttcaggccatctttgatgccgtcgacgagctgggcaacgagagttctggcgacattctgatcttcatgagcggcgagcgcgagatccgcgataccgccgatgcgctcagcaagcgcgatctgcgccatactgagatcctgccgctgtacgcgcgcctgtcgaacagcgagcagaaccgcgtgttccagccgcacagcgggcgccgcatcgtgctggcgaccaacgtggccgaaacttcgctgaccgtaccgggcattaaatacgtgatcgacccgggtacggcgcgcatcagccgctacagctaccgcaccaaagttcagcgcctgccgattgagccggtttcgcaggcgtcggctaatcagcgtaagggccgctgcggccgcgtgtcggaagggatctgtattcgtctctattcggaagacgatttcctgtcgcgcccggagtttaccgatccggagatcctgcggaccaacctggcatccgttatcctgcaaatgaccgcgctggggctgggcgatatcgccgccttcccgtttgtggaagcgccggataagcgcaatattcaggacggggtgcggctgctggaagagctgggggccatcaccaccgacgaacaggcgacggcctacaagctaacgccattgggccgccagcttagccagttgccggtcgacccgcgtctggcgcgcatggtgctggaggcgcaaaaacacggctgcgtgcgcgaggcgatgatcattacctcggcgctctccattcaggatccgcgcgagcgtccgatggacaagcagcaggcgtcggacgaaaaacaccgtcgcttccacgataaagagtccgatttcctcgcctttgtgaacctgtggaactaccttggcgagcagcaaaaagcgctctcctcgaaccagttccgccgtcagtgccgggtggatttcctcaattatctgcgcgtacgcgagtggcaggatatctacacccagctgcgccaggtggtgaaagagctgggtataccggtgaacagtgaaccggcggagtaccgcgaaatccatatcgccctgttgaccggcctgctgtctcatatcgggatgaaggatgcggataagcaggaatataccggcgcacgcaacgcgcgtttctccatcttcccgggctccggtttgtttaagaagccgccgaagtggaccatggtcgccgagctggtggaaaccagccgtctgtgggggcgtatcgccgcgcgtatcgatccggagtgggttgagccggtggcgcagcacctgctgaaacgctcatacagcgagccgcactgggagcgtgggcagggcgcggtgatggcgacggaaaaagtcaccgtctacggcctgccggtggtggccgcgcgtaaggttaactacagccagatcgatccggcgttgagtcgcgagctgtttatccgccacgcgctggtggaaggcgactggcagacgcgtcatgcgttcttccgcgaaaacctgaagctgcgcaccgaggtggaagagcttgagcacaagtcccgccgtcgcgacattctggtggacgacgagacgctgtttgagttttacgatcagcgcatcagtcacgatgtgatctcggcgcgccatttcgacagctggtggaagaaagccagcaaagaggccccggacctgctcaacttcgaaaagagcatgctgatcaaagagggcgcggagtcggtcagcaagctcgattatccgaacttctggcataagggcaacctcaagctgcgtctgacctatcagtttgagccgggcgcggatgccgatggtgtgacggtgcacattccgctgccgctgttaaaccaggtggaagagagcgggtttgagtggcagatccccggcctgcgccgcgagctggtcattgcgttaatcaaatccctgcctaaaccggttcggcgtaactttgtgccggcgccgaactacgccgaagcgtttttaggccgcgtcacaccgctggagctgccgctgctggacgccctggagcgtgagttccgccgcatgaccggaaccaccatcgaccgcgacgactggaactgggatcaggtgcccgatcacctgaaaatcacattccgcgtggtggacgataaaaacaaaaagctgctcgaaggccgttctctgacggagctgaaagaggcgctgaaaggtaaagtccaggagacgctctctgcggtggccgatgacggcattgagcagagcgggctgcacatctggagctttggtcagctcccggaaagctacgagcagaagcgcgggaactacaaggtgaaagcctggcccgcgctggtggatgagcgcgacagcgtggcgattaagctctttgacaatccgcaggagcaacagcagatgatgtggcgcgggctgcgtcgactgcttctgcttaacatcccgtcgccgattaagtatctgcacgagaagctgccgaacaaagccaagctgggactctactttaacccgtacggtaaggtgctggacctgatcgacgactgcatctcctgcggtgtggataagctgatccacgaggccggcggtccggtctggacggaagagggctttgctcagcttcatgaaaaggtgcgcgcggagctgaacgacaccgtggtggagattgccaaacaggttgagcagatccttaccgccgtgttcaatatcaacaagcgcctgaaggggcgggtggatatgaccatggccctggggctgtcggacgtcaaggcgcagatggcggggctggtgtatcgcggctttgtcaccggcaatggctttaagcgtctgggcgatacgctgcgttatttgcaggcgatagagaagcgtctggagaaaatggcggtcgatccgcatcgcgatcgtgcgcagatgctgaaagtcgaaaacgtgcagcaggcgtggcagcagtggctcaacaaactgccgccggcgcgtcgcgatgacgacgacgtgcgggagatccgctggatgatcgaggagctgcgcgtcagcttcttcgctcagcagctgggaacgccgtatcccatttcggataagcgtatcttgcaggcgatggagcagatttccggctaa

SEQ ID NO: 149077 - DNA, 1380 bp, Enterobacter cloacae
atgacccttcgcccgatagccggcctgctgataatggctttcctggcgggatgccagtcggtagacgttgagcccgccaaatcgtccctgcacataccggcccagtggcgcgcgacgtcggggccagccagcccgacagagcagctctggtggcgaaattttcacgacagcaatctgaatcgctatgtggatcaggcgctgaagaataacagcgacgtgctgattgcccgcgagcggattaacgagtaccaggcccgggtgtacgccgccgatggcagcctgttcccgtcgcttgacgcgggcgtgaccgggacgcgcgcgcgctcgcagtccgccgccacggggcttccggtatacggtacgttgtacaaaggcagcctgaccgccagctacgacgtggatatctggggcgtaaaccgcagcacctcccgtgccgctgaagcgtcgctggaggcacaaaaggcggcggctgcggcggctgatcttaccgtcgcatcctcggtggcctccgggtacgtcaccctgctgtcgctggacgaacagcttcgcgttacccggtccacgctgaagtcgcgtgaagaggcgttcaacctcgccaagcgacagtttgagacgggatacagctctcgccttgagctgatgcaatcggattctgagctgcgcgccacccgcgcccaggttccactgcttcagcaccagattgcacagcaggaaaatgcgcttagcctgctgctgggcagcaacccgggtgacgttgcgcgcggtgaaagctttgatgccctgacgccgctgaaactgccctcccagctgccgtcgacgctactgaaccgacgcccggatatcgtccaggctgaacgtcagctgattgcggcggacgcgacgctggcggcatcgcgcgccagcctgctgccgtcgatcaacctcacggccacgggatcggtgcaggatcgcacgctgtcgggattgctggataacccgctacagctctggagcgtgggcggcagtattcttgcgccgctgctgaaccgtcaggcgctgaatgcgcaggtagatatctctcagtcccagcggaatcaggcgctgtatagctacgaaaaaaccgtgcgtaacgcgtttgctgaggtgaatgacagccttgatgccatcacccgctatcaggaacagcttaccgagctgctggcacagcagacggtcgcgcaggagacgctgaggattgcgcaaaaccgctaccgcaacggatactcttcttatctggatgagctcgatgcgcagcgcacgctgttctcggtgcagaccagcgtggtacaggtgaaaaacaacctgctgctggcgcaaattgatttgtataaagcgctgggcggcggctggagcagtgcctga

SEQ ID NO: 149078 - DNA, 1083 bp, Enterobacter cloacae; identical to SEQ ID NO: 116752

SEQ ID NO: 149079 - DNA, 1653 bp, Enterobacter cloacae; identical to SEQ ID NO: 116751

SEQ ID NO: 149080 - DNA, 795 bp, Enterobacter cloacae; identical to SEQ ID NO: 116750

SEQ ID NO: 149081 - DNA, 1440 bp, Enterobacter cloacae; identical to SEQ ID NO: 116749

SEQ ID NO: 149082 - DNA, 603 bp, Enterobacter cloacae; identical to SEQ ID NO: 116748

SEQ ID NO: 149083 - DNA, 1068 bp, Enterobacter cloacae
atgaataaagtgaagacaatgaatattgcgctgatcgggtatggttttgtaggtaagacgttccatgccccgctgatccagtccgtcgaaggcctgaagctggcggtggtctcatcccgggatgaagagaaagtgaaacgcgacctgccggacgtcctcgttgtcgccacgccggaagaggccattcagcacccggatatcgacctggtggttatcgcctcccctaacgcgacccatgcgccgctggccaccctggcgctcaatgccggcaagcatgtggtagtggataagccgtttacgctggatatgcaggaagcgcgagatctgattgcgcttgcgcaagaaaaacagcgcctgctctcggtcttccataaccgccgctgggatagcgattttctcggcattaagcaggtgattgagcaaggccgtatcggtaaggtgaaacattttgagtcgcatatcgatcgtttccgtccggaggttcgcgtgcgctggagagagcaaaacgtgcccggcagcggcctgtggttcgacttaggcccgcatatgattgaccagacgctacagctttttggtctgccgcagtcggtacagggcaacatcgccaccctgcgtgacggcgcggagattaacgactgggcgcacgtggtgctgaattatccggaacacaaagtggtcctccattgcagcatgctggtggcgggtggcgttgcccgctttaccgtccacggcgataaggccagcgtggtgaaagcacacatcgatcagcaggaagcccagctgctggcaggcgtcgttccgggtagcgaaagctggggtgaagacagcgacgctatggtgctgtttaatgcccagggtgaagccagcgctatccctgcgccaaaaggcgaccagcggcagtactatataaacgtgcgcgatgccctgaacggcaagattgacaacccggtccatccggtggaagccctggcggtgatggcggtgctggaagcggcggtaaaatcttcggaaacgggttcaactctggaacttgacttaacggcgcaggagcgcgcgcaactgcaataa

SEQ ID NO: 149084 - DNA, 744 bp, Enterobacter cloacae
atgcataaaaccgccagacagaaatatgtgcttgatatcattactgagcaaggccaggccagcattaccgagctggcagagcgattgcaggtttcggcggacaccatccgtcgcgatctgaccgacctggaaaaacagggactggcacaaaaaaaccatggcggcgccatcgcgctgaatctctcgacgatgacccgagtaagcaggaatagcttgctccctgaaattaagcagcggctgggtaaacaggttgcgcaatgcgtgcctgcgggctcgacgctttttctggacgccggaagcacactgctggccgttgcatctttccttcaggggccgctgaccatcatcaccccttctcttgatatcgcccagcaggttagcgatcgggaagatattgacctgatcctgctcggtggaaagtgggatcagaaacaacgcctgtttgccggaagcgccaccctttccctgctctctcgctaccgggcggatattgccatccttggcgcatgcgccatccatgccgaactcggattgagcgccagtcaggaggcggatgccgaagtgaagcgtgccatgctggccgcaagccaggcgcactgggtagtcgccgaccatctaaaactcaaccagtgcgaaccgtatctggtgtcagggttatccgagattcatcaactgtttttagatcgtccctgggcagagctcggggaccatagcgccttgcaggttaccgttggcgcgcattaa

SEQ ID NO: 149085 - DNA, 384 bp, Enterobacter cloacae
atgctggcgcttcgcttcccgccaggtttttcctacgatcctgtcatgggtttcgactatggcatcagcaatcgccgcttcccactccacaacacagacggcaaggatcgcccagcggcggtccgaagtgatgtcacgcaaaccgtcggtgaagtagcgttcaccctgccgacgcagccgggcaatgcgatgggcaggtatgctggccaaagcactatgattgatattcagggtacgcagaaattcgagcctgtcgagcaaacggttagcagcagccgagttgttaccaacctcgaagttgcgaagccagatgaaacgactgatattgccggcgagcatttcactcagaagtttgtccaggtgatcgcgaacatccgctgttaa

SEQ ID NO: 149086 - DNA, 441 bp, Enterobacter cloacae
atgagcagcaatggcttatggggactcaacgtcctgcaaaccgccaaccataaaatgcaccatacttttattgaagctgtctgtctgggcacactctgcaatttaatggtctgtcttgccgtctggatgagttattcgggtcattcgttaaccgacaaaatcgtcgcgatgctgttacccatcggcatgtttgtcgccagcggttttgaacacagtatcgcaaatatgtttcttattcccctgggtattatgattcgtgactatgcaccagatgaattctggtatataacacaaacgactgcgaataattttccgagtctaacggtgagcaatcttgttaccgataacctgatacctgtggctattggtaatatcatcggcggcagcgtactggtcagtattacctactggataatatatttgtgcgagcagcatcactga

SEQ ID NO: 149087 - DNA, 396 bp, Enterobacter cloacae; identical to SEQ ID NO: 81376

SEQ ID NO: 149088 - DNA, 279 bp, Enterobacter cloacae; identical to SEQ ID NO: 81377

SEQ ID NO: 149089 - DNA, 513 bp, Enterobacter cloacae; identical to SEQ ID NO: 81378

SEQ ID NO: 149090 - DNA, 1065 bp, Enterobacter cloacae; identical to SEQ ID NO: 81379

SEQ ID NO: 149091 - DNA, 423 bp, Enterobacter cloacae; identical to SEQ ID NO: 81380

SEQ ID NO: 149092 - DNA, 228 bp, Enterobacter cloacae; identical to SEQ ID NO: 81383

SEQ ID NO: 149093 - DNA, 234 bp, Enterobacter cloacae; identical to SEQ ID NO: 81384

SEQ ID NO: 149094 - DNA, 447 bp, Enterobacter cloacae; identical to SEQ ID NO: 81018

SEQ ID NO: 149095 - DNA, 189 bp, Enterobacter cloacae
atggaactcttcttcagaagcctgaagaatgagtgggtgccagcgactggctatataagcttcagcgatactgcccatgcgataacttactatattgttgggtattacagcgaactcaggccacacgaatataacggcgcgttaccaccaaacgaatcggaaaaacgatactggaaaaactcaaagtag

SEQ ID NO: 149096 - DNA, 1305 bp, Enterobacter cloacae
gtggtgaacccccgaacacggctgtccctaattgagtacggtacacccgttgacctgagccgtgcgattgctgaagcgattggggtggatcgcacaaaggccaacagccttttattggaggctgggaaccgggctgcgtcgagcttgaggcttagctacaaccctatcagtgtggatgccaagggcacacgtgccatcgattttgcgggcctcattcgcctggcaccttcactggaactggaagttgctcccaagtttttgggactcgacgacacagatgcagcgtggcgcgaagatttctttttcctctccacgctttcacgtcatgggcgtctcttggcttccgaacgcttatcggcatcaggtggtaccccaagggatttgtctacgctggtagctcgttccatcacgagcatgtacgaggcccgtaaacgtcggccactgcgcagctatcgtagtgtgcgtgaagcagacttcttcatcgatggggatcctgatccggtggatctcatctttccttcacctgatggctttgagcaagagctcattcgctttgatcgcaagaacggttggaacggggatatcgtggcagcggccagggagttactccctgaagtaagtgacccttcagccgcaagttcgctggtgcgtttgattgaagacctttcgcctcagaacgttgctgctaaccgtcgaaaccccattcctgcacggcaccgagcgtggaaaccactgcatgagctgtctatcgatgtgctcggaggcctggggcttaactacaagcagggacaggcccatgcacctggttacttagtgaatacctggcgcgtgtgggaagatctgttaacggtggccgcacgattgggctttggtcgcagtgccgtagtgtcccaacagggctatcccttaggcactaaaatcaggatgattaccggtgctgtgagcaagctttcagtgtacccagactgtgtaattgagctcgatggaacaaggcccaggatgctgctggatgccaagtacaagggccacgtggagaagggacagcttcgcatcagtgaagctgacatctacgaagccctagccttctccaaggctactggatgcaacctagtggcactagcctatcctgcacaaccaagcgatgccccgcagcccgtagggacgtgcactgtctttgaaaaggctgtggtggatgccgtgcaaatcgtgggcattcagattgagagccgcctgatttctagggcgggagctctcagattatttgccacaaacatggctgctggggttacagcagcctttgtgtga

SEQ ID NO: 149097 - DNA, 1140 bp, Enterobacter cloacae
atggtaagtaaaaactgcaaacaggtgttaaagctactcgcacgttcgcgcaacgtgctggtgtctggtgcacctggcacgggcaagtccaagctcttggccgaagttgctttggcctttgaaacagcctttggtcttgctcctgcaggtggcccaccgcagctcaatcccatgggcggcatccctattccccctgctgctggggttgttaaagacattcctgcacccaccaagatggaccgcaaagtctttcggacggtcttccaccaaaactccaagtaccgcgatttcttatcgggcatcacgcctgcggtcaacaagacagcaggagacccagacttcaccatcgtgaaggggactctgtaccgtgccagtgagcatgcgaagggtgccaatggggctgcactgttgatcattgatgagatcaaccgaggtcctgcggtgcaggtgttcggtggtgccattgtggccattgagtccgataaacgcttggcctctgatggggccaaacttgctgaaacgcagttctttgaaatgctcgatcccgtctctggtgatgtgatcgaatacgcactgccccatgacctctatatcttagctgcgatgaatcaggccgatgcgtctgtggagcccttggatgtcgcgttcttgcgtcgttgggaacctatgcgcctagagcccgatgaagcggctttgcggacgttttacggtttgggtgccaagggtgtcaatgcattgcctgatgtacctgccagcgtgaacgatgccttggaggcttcggtgagtgcctggattgctgtaaacgcgcaaattgctctgggccgtggtcccgagtttcagatcgggcatggtgtactgatgtcggatgtgaagccgcaaacattgggccttaatgaagctttgggaacgctgtgtgtagggtgggcgaaggtgcgggcacacgtggaagaggtattcttcggggacacacgaggaattgcagcggctcttaatgcgctcgatgggccagcctttaatccgttcaagctcaccgagacaacttttgcggatgatttacgctttcgttttgaagggcccacgaattttgctgagaacaatatctacgcggctctcagggcatttgccaatccgagggggtag

SEQ ID NO: 149098 - DNA, 573 bp, Enterobacter cloacae
atggctaatggagcgggacaggttgctcgaattctgtacaaggagattgttgagggagatcgaaggaaagctgatgcggagtctaatgactctgattctggagggggggcaagagactttcgatttccctacgaggcggtgttgccagctgttgagttgatatttcccaataaaattctccggggtggaaaggcagtacatcaaggtaccttcttttggaacgagccggactcaacacaggttgtatcaagagcagctgagtttatgtcacccacaaagtctcggccgagagagggatggatttctcaggtgccgaaattttcatgttttgattcggaccgaatgccatcagggggaattgggaatcgcgttttgttgcttctgattcagcttcatgaccagtcggtttggccgcacttcgcggaagaagcaactcttcgtgttaaaggcgtttgggatccttcagttgctcaagagctattgagttgtttggatgcacagcgggctgctaatcgagccgtaattggctatatcgacttcacgaacatgcgtaggttctgtaatggtaagtaa

SEQ ID NO: 149099 - DNA, 2229 bp, Enterobacter cloacae
atgagtgctcctcggcctgttgaatcagagtacctagccccagcagaagcggcactcactcaggctgtgggaggggactatagcctaaccagctttgagcttcggcttcaagttttggaggcagcgtcagcgcgttttggcgggtttgacctaacggcgtttcatgaggcttttggagtcaagagcaagcgcgcagcatcagagcttttggagcttgcggtacctgtagcaagtgccatcgagcgttcacctattcaccctgctttggcactgagtgtcttggcgcgtgaggtcttgcatgagcaggatcgaaaaagcacgggcgcctaccatacggattttcgcctggctacacgactggcgaagctcgcagcccccaagctcacacacaagagcaaggtgattgatcctgcctgcggcgcaggaattttgctagcagcgctgactcacgcagtgtgtggtatggatagagccaagacggcgcattggttggctcacggtgtgtgtgcagcggatctttctggcaactctttgcgtgcggcactgcttgcgcttgcttcgttcactgatgatgtatcgactcttaaggctatgcgtgcccgttggtactgtggcgatagcttgatggcagatcgcaaggtttggactgccatggtccctgaggggtttgatgcggtgatcggcaacccaccatgggaaaaggtcaagatctcacggcacgaattcttgaagtcctcaggcaccaagcgccactacggggcccaaattcatgggcttgatgaggatctgtttgcccagcagcgcgatgaggtagcgaactactctcgtcgcctgttggctcgctatcccgatttgggtaatggagagccagacctatacattgctttcacggacctcttttttgaactctgcaaaaagcagggtgtggtggttgcactaattccgggtgggctcattcgctcgcaaggtacccgcgccatgcggcagaaaatctttgatgcgagccaaagcgtgtccatgtcgatcatcgataaccgtgcacggttctttacgatcgacacacgctttaagttcctagccgtggctctcactaaggctggctctgaaaagagcaagcgtgagcccatcactctcatgcatgagcggggcacccctacgggattggagattacgggaactgccactattgggcgtgcagcacttgcgggtgttcggggcgatttgagcctgcccgaggttcgtaacgtgtctgagtggaagctcttctcaaagatcggagaagcaggtgtttcgtgggaagagcctggttatggctggaccccgaagttttgccgtgaagttgatatgaccaaggagcgtcctaagttcctggggcgtgccacgcctggcgctttgccactggtggaaggtcgaatggtgcaggcgcatcgctttggtgtaaaagggcacgtgtcaggcactggtcgccgtgcgttgtgggaggcttatgccatcggagactcacgccttgccccccagttttggattcgcccctccgacatgcccagtgctaaccagcaccgtgcggacgtgctgcgtgtgggcttttgcgacattgcgggtcagaccaatgagcgttcgctcatggcctcgttaattcctgctggggtggtctgtggcaataaggtacccacgatccttttccctgaggacccatcggaagaacggctgctggtgtgggtgtccatcgctaacagttttgcctttgactggatgcttcggcgtgtgctcactacgacggtgaattacttcctgctgcaaagcgtgcccatgccaaaactcgccaaagatggtttgccatggaagaggctggtgagtgctgcacgcgaattgcgcacacttgacagtgcgggggctactcgtgaaacctacgagcgcatggcgcagcttcgtggggagattgatgcggaagtggccgtggcctatgggctcgatttaaaggacatggagttagtgctccaagacttcccgcttttggatcggggccaagtgggcttgccaggtgaggccaagtccacaattacccgagataatgttttggctgcaatggcaaaacgcacaggaagtctgtctacagtttggtcgcaccgtgcgatgcaggcacgcgcgctgggggcgattgcttatgtgccctctgagctcgccctagggggcgaagaaatagaagaaggatccaaaattcatggctaa

SEQ ID NO: 149100 - DNA, 1095 bp, Enterobacter cloacae
atgacttttcgctatattggctccaaatctagactcatcgacaagatagcatcccacattgggccgcctagagagggcgcgttttttgtggatgctttttgtggaactggagctgtagctgaggctgctgcggagcatggttggaatgtgcggattaatgatagcttgcactcagctgttatctctgctggagcacgtcttatcagccatgatcaggtgaccttcaaaaaacttggtgggtactctggtgctgttagcaagctaaacgcagttaagccattgcatgattttatgtggcgcacttatagccccgcttcgatcgatacgtgtggaattgagcgtaggtacttcaccgaagaaaatgcagctcagatagacgctatgcgctgcttgattgctgagtggaaaggtgccggatatattgacgaaattgaggagaggctattgattgccgatctctttagtgcactgaaccgcgttgccaacattgcgggcacttttggctgcttcctctccaaatggacaagccaatctcaaaacaagattgccatgcgttgccgtgatctcaaagaaactggcgtgtgtgttgaggctaccgtgggtgatgtgttcgacgttccgaatgttgcacacgacctcgtgtatttggaccccccatacaccaagcgtcaatacgcgagctattaccacatccttgaaacggtggctcttggcgatgagcctgtggtggagggggttgcgggacttcgtccatggaaggccttggcttctgacttttgctacaagagccgtgctctcaaaacactctcgcgtctggtgcatggcttgaaggctcaaagggtactgctctcgtacagtagtgaagggcacatctgcatgcaggacatgaaggctgagctttctaagatcggctcgtccacaatgtaccctttgggcgccattggtcgataccggccaaacaaggcagccagtagctcggcgtccgatgtgaatgagtttttggtggtcgtgaaacggtccatggcacagcttccccaagcccagtcaaaaacagttaaagccatcaaacccgttctcgtgaggagctatgtatga

SEQ ID NO: 149101 - DNA, 150 bp, Enterobacter cloacae
atgaaggatgccgtctggtccgcgagtaaaaagtgctgcattgtacgtaaggttaagaatcgctgtcatagtgtatctattcagtatgtgtatatatacaataacgcaattgcacagacatatgcggggcgttttcatgcgattcactga

SEQ ID NO: 149102 - DNA, 129 bp, Enterobacter cloacae
atgaacaaaaacgtgatgtggaatcttccgtgttggaacctgccgcgcctgttgctggaaaaccagacggcgtacctgttgtggatgttcctgtcgatgttgatgtacctgccaatgatgatgcgatga

SEQ ID NO: 149103 - DNA, 1014 bp, Enterobacter cloacae
atggctaaaaacttcatgatttggatgtatgaaaattttattattcctctttatgatcgcgccagtgttttttttaaaccctcagatggtctttttattggctatctcgtttcggccctgataatagcagttcttttttacgcttactcatcgcgtagcgctaaccttctgtctgccctaaaagcggttattggtgctcatagttttagttccaggtcagtaaaagatgacctgaagctctttatctttgataagatatttttaggatttatctatagttttgttatcggcgctgcttttttatttcgcggggaagtgatccattttctttcatatattggaatgcctactcagaaatattctcctgggattttcctgagtataattcttacgttattatctttgttggtctttgattttgcggttttccttgaacactatctttcccataaagtattgtttttatgggaattccataaaatacatcacattgcggaagagctgaatcccctgactgcatatcgctctcacccggtaaatcaatgctgctttattctgatggtgagtttattctctggtacttactccggtattgtaggttacttttttgattcttcccatgcttacatattatttgcgggacagaatgtatttatgttcattcttctttttcttggactcaatcttcagcattcaagaatttttctgcgctaccctaaagttatcagaagcatatttattagccctgcatatcaccaattgcaccacagtagtgacaaaaaacactttgatataaactttggatttatttttgcattctgggataaaatattcaaaacccagctacaaccttcccacgaaaaaaacttagctttcggagttaatggtgaaaaatatgaaaattatgctggtataaaaaattcctacatcacgcctttcaaaaaggcttttttcagaattaagcgaaaaatgatgaaaaaaagcgttgtagggtcgagaacccagtctgactag

SEQ ID NO: 149104 - DNA, 429 bp, Enterobacter cloacae
gtggcgagtcgccttctcccgagcttgggcgtccgtcagcacgatattgcgcatctcgttggccgcgagcatcatatcgaacagcgcgacgccacgcgcaacagggacggccgaatcttctaccggcgcaatcttctcgccaccctgcgcgagcgggaagttgcgcgcgccggtgcggagatggccgagggcaaggcgctgccgttccgcgccgccaaggatggtgagagtgtcagcggcaagttcaccgggactgtccagctaacgagcggcaagttcgccatcgtggaaaagagccacgagttcacccttgtcccgtcgcgaggtcgcgggtatcatgcagggcggttcggtgtcgtggcagttagggcggcagcgggggttggggctataggagccaacgataccgcattgcaacgcaacaactaa

SEQ ID NO: 149105 - DNA, 1215 bp, Enterobacter cloacae
atgaccaccacacgccccgcgtgggcctatacgctgccggcagccttgctgcttatggctcccttcgacatcctcgcctcgctggcgatggatatttatcttccagtcgttccggcgatgccgggcgtcctgaacacgactccatccataatccaactcacgttgagcctctacatggtgatgctcggtgtgggccaagtgatctttgggccactctccgatcgcgtcgggcgacggccgatcctgcttgtaggcgcaacggctttcgttgctgcgtctctgggagcggcttgttcttcaactgcattagcctttgttgcgtttcgtctggttcaggctgttggagcatcggccatgctggtggccaccttcgcgaccgtgcgcgacgtatatgccaatcgtcccgaaggtgccgtcatctacggccttttcagttcgattctggcgttcgtgcctgcgctcggccctatagccggtgcgctgatcggcgagttttggggatggcaggcgatcttcatcacactggctgcactggcttcgctcgcactcttaaacgccagtttcaggtggcatgaaacccgaccgttggatcaggccagaacgcaacgatctgttttgccgatcttcgcgagtccggccttttgggtttacacggtcggatttagtgccggcatgggcacattcttcgttttcttctcgacagccccccgtgttctcataggccaagccggctattccgagatcggatttagcttggccttcgcgactgtcgcgctggtcatggtcacgacaacccgcttcgcaaagtccttcgttgccaaatggggtatcgcgggatgcgtagcgcgcgggatggcgttgctcgtttccggcgcgatcctgttggggatcggccaacttttcggatcgccgtcatttttcagcttcatcctgccgatgtgggttgtcgcggtcggcattgtcttcacggtgtccgttaccgccaacggcgcacttgcgcagttcgacgacatcgctggatcagcggttgcgttctacttctgcatccaaagcctgatagtcagtatcgtcgggacattggcggtgacgctgttaaacggcgatacagcgtggcccgtgatttgttacgccacggcaatggcagtgctggtgtcgttggggctggcgctccttcgatcccgtgatgctgccaccgagaagtcgccagtcgtctag

SEQ ID NO: 149106 - DNA, 627 bp, Enterobacter cloacae
atgaccaaactggacaagggcaccgtgatcgcggcggcgctagagctgttgaacgaggttggcatggacagcctgacgacgcggaagctcgctgaacgcctcaaggttcagcagcctgcgctttactggcatttccagaacaagcgagcgctgcttgatgcgctcgccgaggcgatgctggcggaacgccatacccgctcgctacccgaagagaatgaggactggcgggtgttcctgaaagagaatgccctgagcttcagaacggcgttgctctcttatcgggacggcgcgcgtatccatgccggcactcgaccgacagaaccgaattttggcaccgccgagacgcaaatacgctttctctgcgcggagggcttttgtccgaagcgcgccgtttgggcgctccgggcggtcagtcactatgtggtcggttccgttctcgagcagcaggcatctgatgccgatgagagagttccggacaggccagatgtgtccgagcaagcaccgtcgtccttcctgcacgatctgtttcacgagttggaaacagacggcatggatgctgcgttcaacttcggactcgacagcctcatcgctggtttcgagcggctgcgttcatctacaacagattag

SEQ ID NO: 149107 - DNA, 1176 bp, Enterobacter cloacae; identical to SEQ ID NO: 52403

SEQ ID NO: 149108 - DNA, 924 bp, Enterobacter cloacae; identical to SEQ ID NO: 52404

SEQ ID NO: 149109 - DNA, 1263 bp, Enterobacter cloacae
atgcgtcgaattgttataaccggcatgggtctggtgggccctcttggttccgggaccgaaacaagctggaaaaggctcttggaaggaaaatcaggaattaggagtttgcccgatgaaatctccagcgacctgccggtgaaaatcggaggactcgttcccagcctgattgaagattccgaagccggtttcgatcccgatgtgatcgttgacacaaaggatcaacgaaaaatggatcgcttcattctgttcgcactagcggccgcgatggaggctcttgaaacggcgggatggcatcctacgtgcgactacgaacgtgagcgcacggcgacaattattgcctctggtataggcggatttcctgcaattgctttagcagttcgtataacggatacacggggagcacggaggctatcaccctttaccgtgccatcgtttctggccaatctcgcggcaggacatgttaccatcaggcatggatttacaggtcctattggcacgcctgtaaccgcctgcgctgccagcgttcaagccatcggcgacgccgcgcggctgatacgctctaacgaggccgacatcgctctgtgcggcggggcagaagcatgcattgataaggttagtcttggggcatttgctgccgcgcgagcactatccaccggctacaatactaccccggaactggcgtcgaggccgttcgacaccgggcgcgatggtttcgtaatgtctgaaggggcgggtctgatcgtcatagaggaattagaacatgccctcgctcggggtgccaagcccatagcggaattggtgggatacggcacaagcgccgatgcacatcatatgactgccggtccagatgacggccgaggcgcggcccgtgcgatgggaattgcactccacagtgctgggttgaaaccaatcgatattcaacatttgaacgcacattccacctccacccccgtaggagatcgaggagaaattgccgcgatacaatccgtgttcggcaatcatgatgtggtcgtaagcgccacgaaatcggctacggggcacctacttggtgccgcaggcggtattgaggcaatcttcacggtgctcgctttgcgcgatcaaattgctcccccaacgagaaatttagaaacccccgatcctgttgccgctggtatcgacctcgttcgccaatctgcgcggcccattctcatggaacatgccatttccaacggattcggctttggcggtgttaatgcaagtgtcgctttccggcgatggcagtaa

SEQ ID NO: 149110 - DNA, 507 bp, Enterobacter cloacae
atgcaacgaacaagctttctatcatccgaatgtcccgcagcccgagcgctggaaagcgtcggtgactggtggagcatcctgatcctgcgggacgccttccaagggttgagcaaattcgatgaattcgagaagaatctcggtatttccacgaacattttggcgaggcgattgaaacatctcacagccgaagggttgtttgaaaggcaacgatacaatgatcatccgcctcgatttgaatacgtccttaccgacaaggggcgagatttctatccggtagcaatcgccctgttcgcatggggaaaccggaatcttgcgcccaatgaaatagccatgcgccttggcgacagggaaaccggtagggaacgaaacgccatcatagtcgatgcggatactggagaaaaaatcactcctgaaaacacggttcttctagcaggcccagcggcgacggaagaaacgatgcgcgtcataaaccgtgtgaagcgggtaaactcagaaaaagcggaataa

SEQ ID NO: 149111 - DNA, 1989 bp, Enterobacter cloacae
ttgcgcggaggccgaatcctttggggtcagatcgccgtagtcttcaccatcgtcttggtgatgacgtgggcggcgacgcaatgggtagcgtttcgtctcggcttccagccccagcttggcaatccgtggttcgagctggttggcctgccggtctattatccgccggccttcttttggtggtggttttcgttcgacgcctacgcgcccgcgatcttcgtcgagggcggcatcatcgccgtatcgggcggtttcctcgccatcgccgccgccatcctcatgtcgatcatccgggcacgggaggcgcgcaacgtcgccacctatggttcggcgcgatgggcagaggatagggaaatccgcaccgccggcctgctcggtcccgatggcgtcctgctcggccgatacaaccgggactacctgcgccatgatggcccggagcatgtcctatgcttcgccccgacgcgcagcggcaaaggtgtcgggctggtggtgccgacgctgctgacatggtccgcatccgccatcgtccacgacataaaaggcgaaaactggacgctgacagcgggcttccgcgcgaagcatggccgcgtgctgctgttcgatccaaccaacgccagatcgtcggcctacaacccgctgctggaggtccggcaaggggaatgggaagtccgcgacgtgcagaacatcgcggatattctggtcgatcccgaaggcagcttggacaaaaggaaccattgggaaaagaccagtcattcgctgctggtcggcgcgatcctgcatgtcctctatgcggagaaggacaagaccttggcgggcgttgccaacttcctgtccgatccgcgtcgcccggtcgaggcgaccttgcgcgccatgatggatacgccgcatctcggcgaggctggcgttcatcccgtcatcgcgtcgtcggcccgcgagctgctgaacaagagcgagaacgagcgcagcggcgtcctttccacagccatgtcatttctcggcctctaccgcgatcccgtggtggcgcaggtgacggcacgatgcgactggcgcattgccgatctggtcggcagccgccggcccgtcacgctctatctggtcgtgccgccgtccgacataaaccgcaccaagccgcttatccgcctgatcctcaaccagatcggcaggcggttgaccgaggaactgaccacctccggcaagcgccatcgcctgctgttgatgctggacgagtttccggcgctcggccggctcgacttctttgaatcggcgctcgccttcatggcggggtatggaatcaaaggcttcctgatcgcgcagagcctcaaccagatcgagcgcgcctatgggccgaacaacgccatcctcgacaactgccacgtccgcgtcagcttcgccacgaatgacgagcggacggccaagcgggtgagcgacgcgcttggcaccgcgaccgagttgcgcgattccaccaactacgccggccatcgccttgcaccgtggttaggtcacttgatggtttcacggcaggagacggctcggccgctgctcacgccgggcgagatcatgcagcttccgccaaccgacgaaatcgtcatggtcgcgggcacgccgccgatccgcgcaaccaaggcccgctatttcgaggatgcgcggtttcaggaacgcatcctgaccccgcccgatctggtcgccgctccgctggcgcccagcccatccgccgatgactggtccggccgcgtggtcgcggcgggaagccgttccgcaacggtcgccgcagatgcgaccgagggcgatccggccaacgccggcatccgccgcgagccggaattgcccgagcatgaggaaatcgtcaccccgccgccatcccccgaacaggagttcgacattctggacgacgagccggatgttgacgcggccaaggcccgcactatccgccagcgcatgaggatggtggcgcggcaggtggcgatgaaccccgatgatggaatcgagctttga

SEQ ID NO: 149112 - DNA, 474 bp, Enterobacter cloacae
atgaccacacgcacccgcctgaatctctatttcgacccagcgctcatcccgcagatcgaggcgatggcgctgcgccgctcggcggcgctgcgccgcaatgtctcgaaatccgccatcgtggaggcggcggtcatgtcctacctgtccggcgatgccgacgaccagcttgaagccgccatgtctcgccgcttggataaactcggccgccagatcgacacgctcgacctagatctcgccgtcctcggcgagacggtcgcgcagttcatccatttctggatgaccatcacgccgccgctttcaggagccgcgcaatctgctgcccgcgcgaaaggtgcggaacggtttgaaggattcatgcagaatctcggccggcgtctggcgacgggcgacaggttcttgaaggagattacgagagatgttgggcctgaagaaggtcttccggggttgaacaatcatccaacgcaggagcgctga

SEQ ID NO: 149113 - DNA, 771 bp, Enterobacter cloacae
atggtcatgccctatgttaaaaatgacgacgttctcgtgaggtatgagacgtttggtgatgaaacgaacctgcctcttgtcctgatctttggcatcagcatgacctgtgaggactggttagaacttggctacatctcaggattggctaaggaatttcatgtcgtatgtgtcgaacctcgcgggcacgggctaagcacatgccccacgaattcgtcctcttacgcattgcccaaaatggcttctgacattgaaacggtaatcaacaccctagatctagtaaatccattagtctggggatactcgctcggcgcaaaaatagcgctcgctgccgccgttcaaaatccagaggcttatcgaggattgattcttggggggttcgagcttcactctgaagtcgatttggcgacagatatggttgccgaaacattttccagtggagcacaagcttggcttgctgtttggatgcaaatgttcgatgtgccggacggcatggccacccgtcttgctcgcgtcaacaccaacgcacttcatgcattacgcaccgctgaagctgaatggccgcccttgggtgcggcttctgagtcgttcactgcgccagttttactttatgcaggcgaaaagtgcttttttcggaatgcaacagccgccgccgtcgcacatttcccatcagcacggtatctcgaacgccctgggcgaaatcactttgatctgatgcctgatagcgcgtggataaccggagaggtagttcagcaattcggaagctctagataa

SEQ ID NO: 149114 - DNA, 996 bp, Enterobacter cloacae
atgaccaccaaccaccacagacaggaagcgatccagcgcggcgcgcgcatgttgcgcaccgcgctcggccccgccattgcccggctgctcgaagacccggccgtggtcgaggtaatgttgaacccggacggtcgcctttgggtggaccggctgtccgaagggctttccgacacgggcgaacgcctgtccgccgccgatggcgaacgcatcgtgcggctggtcgcgcatcatgtcggcgcagaggttcatgcccgcagcccccgcgtctcggcagagctgcccgagagcggggaacggttcgagggccttttgccgcccgtggtcgccgcgccggccttcgccatccgtaaacctgccgtcgcggtgttcacgctcgacgactatgtggccgccggcatcatgtctgccgatcaggcggaaacgctgcgcgaagccgtcgcagcccgcgccaatatcttggtggcgggcggcacttccaccggcaagaccacgctcaccaatgcccttttggcggaggtcgccaagggcgcggatcgtgtcgtcatcatcgaagacacccgcgagctgcaatgtgccgcgcccaatctggtggcgctgcgcaccaaggatggcgtcgccagcctgtcggaccttgtgcggtcctcgctgcgcctgcgccccgaccgcatcccgattggggaggtgcgcggatcggaagccctcgacctgctcaaagcatggggcacgggccatcccggcgggatcggcaccattcacgccggcaccggcatcggcgcgcttcgtcgccttgaacagctcatccaagaggctgtcgtcacggtcccgcgtgcgctgatcgccgagactatcgaccttgttgccgtcctttccgggcgcggttccgcgcgccggctggccgagcttgcccgcgtcgaggggctggggccggacggcgactaccgcatcacgcatcccatcccttcggcaatccccaccagcacaggagaatcttcatga

SEQ ID NO: 149115 - DNA, 333 bp, Enterobacter cloacae
atgatccgcacccttacgcgcggctatcgcttcgccacgaccgccgcatctgcccttgccatcagcctcatgcttgccccggccgcccatgcgtccggttcgtcgatgccatgggaacagcccttgcagcaaatcctccagtccatcgaggggccggtcgccaagatcatcgccgtcatcatcatcatcgtgacgggcctgaccctcgcgttcggcgataccagcggcggcttccgtcgcctgatccagatcgttttcggcctgtccatcgcgttcgccgcatcgagcttcttcctgtctttcttctcgttcggcggcggggcgctcgtttga

SEQ ID NO: 149116 - DNA, 282 bp, Enterobacter cloacae
atggcgggcggcctcgaactgctcgacgcggtgccgggcttcacggtcccggtccaccgggcgctgaccgagcatattttgctcggcggcgcaccgcgctccatcgccatcatgaacggaacgctggccggagccgtgggcctcggtttgcgcctctggctggtcggcatcgccatttgggcaatcggccatttcgcagccgtatgggcggcgaagcgcgatccccaattcgtcgaggtcgggcgtaggcatctgcgcgtccccggccatctggcggtgtga

SEQ ID NO: 149117 - DNA, 2493 bp, Enterobacter cloacae
atgatgaacctttccgaatatcgccgcaccgccgcccggctcgccgactatttgccatgggccgcattgctcggctccggcgtcgtcttgaacaaggacggcagttttcagaggaccgcgaagtttcgcggtcccgatctggattccgccgtcgcggccgagctggtcgccgtcgccggccgcatcaataacgccgtgcgccgcctcggctccggctggagcatctttgttgaggcgcagcgcagcgaggccgcgacctatcccgacagcacctttcccgatgcggcatcggcgctggtcgatgccgagcgcaaagccgggttcgaggaagcaggcacgcatttcgtgtcgggctatttcctgaccttcctctggctgcccccggccgaggaagccgcccgcgccgaaacatggctctacgagggccgcgagaaaaccggcgtggacccgtgggagctgctgcgcggcttcatcgaccgcaccgaccgcgtgctggctttgctcgacggcttcatgcccgagtgccgttggatggatgatggcgcgacgctgacctatctccactccaccatctcgaccaaccggcatcgcgtgcgcgtgcccgaggtgcccatgcacctcgatgcgctgctcgccgaccagcccttgaccggcgggctggagccgcgccttgggaccaagcatctgcgcgtgctgaccatcgtgggattcccgaccgcgacgacgccgggcctgctcgacgaaatgaaccgcctgccgttcccctacaggtggagcacgcgcgcgatcctgctcgacaagaccgacgcgacgcggctgctgacccgcatccgccgccaatggtttgcgaagcgcaagagcatcgccgcgatcttgaaagaggtgatgaccaacgaggcgtccgcgctggtggacaccgacgcggccaacaaggcgctcgacgccgacatggccttgcaggaactcggcgcggacgtggcgggcatggcctatgtcacggccaccgtcaccgtatgggatgccgacccgcgcctagccgacgagaagctgcgcctggtcgagaagatcgttcaggggcgcgacttcaccgccatgcccgagagcgtcaacgcggttgacgcatggctcggcagcctgcccggacacgcctacgccaatgtccgccagccgcccatcagcacattgaatctcgcccacatgatcccgctgtcggcggtgtgggcggggccggaacgggacgagcatttcggtgcgccccctctgctctttggaaagaccgaaggctcaaccccgttccggttgtctttgcatgtcggcgacgtagggcacacccttgtcgtcggccccacgggcgcgggcaagagcgtgctgctcgcccttatggccttgcagttccggcgctacgccggatcgcaggtcttcgccttcgacttcggcggcagcatccgcgccgccgcgctcgccatgggcggcgactggcacgaccttggtggcgggctgacagaaggggccgaggcgtccgtctcgctccagccgctcgcccgcatccacgacacctatgaacgcgcatgggcggcggactggatcgccgccatcctcatgcgggaaggcatcgccatcacgcccgaggtcaaagagtatctttggacggcgctgacttcgctggcctcggccccggtcgaggaacgcaccatcaccggccttgcggtgctgctgcaatccaacgatctgaaacaggcgctccggccgttctgcgtcggcggtgcctatggccggctgctcgacgccgaagccgaacatctcggctcggcggatgtgcaggcgttcgagatcgagggccttgtcgggactggagcggccccggccgtgctgtcctacctgttccaccgcatcggcgaccggctcgacgggcggccgacgcttctcatcatagatgaaggctggcttgcgctggacgacgagggtttcgccggccagctccgcgaatggctgaaaacgctccgcaaaaagaacgccagcgtcatcttcgccacgcaaagcctgtccgacattgacggcagcaacatcgcgcccgcgatcatcgagagctgcccgacgcggcttctgctgccgaacgagcgcgccatcgagccgcagattaccgagatttaccggcgtttcgggttgaatgaccggcagatcgaaatcctcgcacgggccacgcccaagcgcgactactactgccagtcgaggcgcggcaatcgcctgttcgagcttggcctgtccgaaatcggcctcgcgctctgcgccgcatccgccaaatccgaccagacgctcattgcacagatcgtcgccgaacacggccgcgacggcttcctcgccgcatggctacgcgcgcgcggcgtcgagtgggcggccgagctgatccccaacctcaccaatcttgccgaccggccggaatccgccgcgccggcccggctcgatacccaccccacacaggagattcttccatga

SEQ ID NO: 149118 - DNA, 777 bp, Enterobacter cloacae
atgacctatcccaagtttgtcggggcttcggccctcgcgctggcgctcgcagtgcccgtcgcgctgtcgcccatgctggcaagcccggcccatgcgcaattcggtttcggccggatcgtctatgacccgagcaactacgcgcaaaacctgctcacggcagcgcgcacgctggagcagatcaacaaccagatcacaagcctccagaacgaggcgcagatgctcatcaatcaggcccgcaatctggcgagcctgccgtattcgtcgctccagcagctccagcagaacgtgagccggacgcagcagcttcttagccaagcgcagaacatcgcgttcgaggtcgggcagatcgaccaagcgtttcaacagcaatacggcaacgtctcgctttcgacgaccgacgcccagcttgtcgccgatgcgcgcagccggtgggagaacacggtcggcggcttgcaggacgcaatgcgcgtgcaggcgggtgcggtcggcaacatcgacagcaaccgcgccgagatggccgcgcttgtcggccagagccaaggcgcgaccggcgcgctgcaagccacgcaggccggcaaccagcttctcgcgctccagtcacagcagctttccgatctgatcgcggtcatctcggcgaacggccgcgccgacgcgctgaccgaagccgagcgcgcgaccgccgccgaacagggccgcatccagcgcgagcgtttcctgacgcccggcagcggctatcagccgggtaacgcgcagatgttcaacaacggcaacaactga

SEQ ID NO: 149119 - DNA, 267 bp, Enterobacter cloacae
atggacggcaagatgctggtccggctcggggccgtggtgttcgttgcgattgccttgacagtgaccgcaatcgacatgacgcggaaggacgagccttccgcgtcacggccggcatcggccctccagcccccggccgatcccctgcgcgaaaccctgcgccgttgccagcaactcggcgaggcggcggcgagcgacaccgactgcctcgccgcatgggctgaatcccgcgaccgcttcctcggccgtgaccgcagcgaggcgcgctga

SEQ ID NO: 149120 - DNA, 1356 bp, Enterobacter cloacae
atgggaaacacgggcgtcatcgacaatttcctcggcgtattcacgcgctacatcgacagcgggttcgggctgttgtctggcgaagtcgccttcatcgctaccaccctgatcgtcatcgacgtgacgcttgccgcgctcttttgggcatggggcgcagatgacgacatcatcgctcggctggtgaagaagacccttttcgtgggcgtcttcgcctacatcatcggcaattggaacaacctcgcccggatcgtcttcgagagcttcgccggcctcggtctcatggcgtcgggcaccggcttttctgtcaccggtctgacgcggccgggccgcgtagcgcagaccggcctcgacgccggccgcccgctgctcgactccatttccgacctgatgggctggatcgccttcttcgagaacttcatccagatcgcgtgcctgctgttcgcatgggcgctcgtggtgttggccttcttcatcctcgccatccagcttttcgtgaccctcatcgagttcaagctgaccacgcttgccggcttcgtcctcatccccttcggcctgttcggcaagaccgccttcatggccgagaaggtcttgggcaacgtggtgtcctccggcatcaaggttctggtgctcgccgtcatcatcggtatcggcagcaccttgttttcgcaattcacggccggtttcggcggggcgaccccgaccatcgacgacgccatggcgattgtgctggcagctctgtcgctgctcggcctcggcatcttcggccccggcatagcaaacggcatcgtttcgggcggcccgcagctcggcgcgggtgctgccgtgggaaccgggcttgcggtcgcaggtgcagccgtcgccgctggcggcggggccatgctcgccgccaaaggtggtgccgctgccctgtccggcggggccgcggccgtccgcggcggcgcggccaccgcgggcgcggcgaccgccgcctatagcgtcggatcgcttggccagtccggcgcggcaggcgtcgcctccggtctcggcggcgtcggccgcgcagcaggttcggccgccatctcacccctcaaacgcgccgccgcgcgggccagcgaatccgtcaaatccagcttctccgaaggttcgaaggccggattcggcgcaagcggcggcagctccaccatgggaacggtcggcgggagcgatgctgcgcccgcatcgccggcaccatccgccggtcctccggcctgggcgcagcgcatgcagcgttcgcaagccctcaaccacggcacgaccatggccgcccatgcggtgcgctccggcgacagccacggctccggttcctccatcaatctttccgaaagtgaccgctcatga

SEQ ID NO: 149121 - DNA, 690 bp, Enterobacter cloacae
atgagcatcttcaaacgaccagcaactcattacggcaagacgccggaacccgagacgccttatcagcgcgccgcgcaagtgtgggacgagcgtatcggctcggcccgcgtgcaggcgcggaactggcggctcatggccttcggctcgctgatcctctcggccggcttcgcctctgcgctggtctggcagtccgcgcgtgggaccgtggtgccttgggtcgtgcaggtggacaatctcggtcaggcgcagaccgtcgcgccagccaatgccgactatcgcccgaccgatccgcagattgctttccatctcggccgcttcatcgaacaggtccgcgcgatcccggccgacgcgatcatcgtccgccagaactggcttcgcgcctatgaatggaccacggatcgcggcgcggcggcattgaacgattacgcccgcgccaatgaccctttcaccaaggtcggccgccaacaggtcgccgtcgaggtgtccagcgtcatccgggcctcgcccaacagcttccgcgtcgcgtggacggaaaggcatttcgagaacggccagctttccaccacggaacgatggacggccatcctcactatcgtcatccagccgccgcgcgacgccgagcgcctgcgcgccaatccgctgggaatctacgtcaatgcaatttcgtggtcgcgggagatgagccaatga

SEQ ID NO: 149122 - DNA, 378 bp, Enterobacter cloacae
atggatactgtcccgacgattgttgcccggtatatcgacgcctacaacacgatgaatgttcaggcgatgctcgactgcctgtcgggcgacgttcggtttatcaacagatcgaacggagaagtgacgaacgagacgcatgggattgaggcatttcgcgcgttggcggaacagggtgttgaattgtttgcggaaagagaacagacaattctcgactgcatcgccattgaggaccgtgcagcggtgcgcatcggctatcgcgccaaggtcaaggccgacctgcccaacggctggaaggctgggcagaagatcgagatagcgggcacctcgttcttcatgatctccaagggaaagatcagcgaggtgattgatgcaagctga

SEQ ID NO: 149123 - DNA, 963 bp, Enterobacter cloacae
gtgacggtcgtggcaatcgctttgaccggctgcgccaccaatcggatgccgcaattcagctatgacgccagcgttccgccgctgccgaccgtgcaggcggcagcagtcgacaacacgccccggccgctgcatgtgcccccggcatggaccgtggcgcggggcggtacggctgccggcacgccgaccggccgcgtcgagaacgccaatgcagccgcccgcgtcgagccgcgccgcgaaggctactacaacgccatccagatatatccgtggtcggaaggcgcgctctatcaggtctatgccgcagtcgggcagatcacgacgatcgcgctggagccgggcgagagcctgaccggcgcggggccaatcgcggcgggcgacaccgcccgctggatcatcggcgacacggaatccggttcgggcgcgaaccgccgcgtccatatcctcgtgaagccgacgcgacccgacatcgccaccaaccttgtcgtcaccaccgaccggcgcacctacatgatcgagctgcgcgcccgggaatcgctctacatgcccgccgtcgcctgggcctatcccgcgacgcccggccagcgccgcaccgttccgacagccccgatcatccccgccgaggcggcgcggaactatcgctacgccttgcaggtgcagggcgatagcccgccatggcggcccgtctccgtcttcgacgatggccgccgcgtctatgtcgtcttcccggccgggatcgtgcagggcgagatgccgcccatcttcgtgcttggcgcgaacggcgagccgcagatcgtcaacagccgagtccaccagaacgtcctgatcgtggaccgcctgttcggcgcggccgagctgcgccttggctctggcagccgccagcaggtcgtcaggatcgtccgcaccaacccgacgcaggccgccgacgcgcagcccgccagcgcgaccggaggctccccgtcatga

SEQ ID NO: 149124 - DNA, 1137 bp, Enterobacter cloacae
atgaccgacaacaccatcaccgaaaccgcagcccccatgcggctgcgcgccgagccgccgcgcgtcacccgcctgtcccgcaagatgctggcgggcgtcggcgcggttgcgttgctcggcatcggcggcgcactcatctatgcgctccagacccgcgacggagggccggacggcggcgaactctactcgaccgagaaccggcccacggcggacggcctcgccggtctgccaagcgactatagcgggccggtgctcggccccgcgctgcccggagatttgggccgtccgatcctcgacgcgcagaaccgagggcagcccgtcgcaccgcctacgatggcgacgcccgccgtcgatcccgccgaggaacgccgccgcgccgaggaagaagccgcgcgcttaagcaatgtgttcttccagtccggcccgcgcacgggatcgccggcagggacggccatgcccagccttgccggtcttggcctcggcggacagcccgcgacgcaggaccggcacgcggctttcctcaatggacccgtggaccggcagactgtcgcgccggatcgtgtcgcgccgccggcatcgccctacatccttcaggccggggccgtgattccggccgcgctcatcaccggcatccgttcggacctgccgggccagatcacggctcaagtgaccgagaacgtctatgacagcccgaccgggtcgctgctgctgatcccgcagggaacgcgcatcatcggccaatacgatgacggcgtgaccttcggccagcgaagggtgctcttggtgtggaaccgcctgatcctgccgggcggccgttccatcgtccttgagcgtctgccgggtgcggacgcttccggttacgccgggcttgaggatggcgtggattaccactggtgggatctgatgaaggccgcagggctgtccacgctgctcgcagtcggcacggaactggcgaccagcgacgaggaccggcttatccgggccatccgcgacggggcgcaggataccgtcaatcaggcggggcagcagatcgtccagcgccagttgcaggtcgcaccgacgctgaccatccggcccggcttcccggtcaggatcatcgtcacccgcgaccttgtattcgaaccggcaggaggttga

SEQ ID NO: 149125 - DNA, 222 bp, Enterobacter cloacae
atgaccaagctgaaactcggcccgctgcccgacgacaagcccgtgaagatcaccgtggagctgcctgcgccacttcaccgcgatctggtcgcctatgccgaggtgctggcccgcgagagcggccagcccgccgccgatcccgtcaggctcatcgtgccgatgctggagcggttcatcgcaacggatcgcggcttcgccaaggcacggcgagccgccaactga

SEQ ID NO: 149126 - DNA, 318 bp, Enterobacter cloacae
atgtgcgcagagcgccgccgcgcccggagagggcgaccgcgacagtcgatccccgaaccacttcccgacgatcttttcgactacgccgacgatcctacgcccgacggccggacgcgagccggcaacatgccacttctcggcccggatgggcagaggatgcgtgtcaccgacgactggcccgaagacattcccgtcaccgaagccgagattgacgtgttcgagcgttggttcggcgatgtgttcgacgaactcttgaacccgagaaagccgaatgacagcttgcaatacctatcacaaactgataggaaaaagacgtga

SEQ ID NO: 149127 - DNA, 354 bp, Enterobacter cloacae
gtgagcgtggatcgtgatccaagcctcgacacgcttctggacctcgacggacagatgctctttgtcgatcccgagggcggccattgggtgaagttcgtcgtcacccgcgttccggcctcgccggaaaagccgcacggcctcgattattcgctcacgcttcacgagccttcgggcgaacggctggtcggcttcgacaatgcccatccggtcggccgaggcaggcgcggcgcgccgatggaccatcggcaccgctttcagaccgtgaagccttacgcctacgaggatgcggccacgctgctggccgacttctggcaggccgtggacgcggtattgaaggaacgaggtgccctatga

SEQ ID NO: 149128 - DNA, 399 bp, Enterobacter cloacae
atgaccacattgaaagtcgggattgccgactatgaagaaatgaaggcccgcaccatgcggatcgcgcgcggcgaggaaaaacctgcgcccagcgatccgaaggtgtggttcacctcgaccgaatcctttgccaaggtgctgtcggccggcaaccgcgaactgctgcgcatcatcgccgagaaagccccggcatcgctggaggaactggcggaaatcaccggccgggccggctccaatctgtcacgcaccctgaaaaccatggagaactacggtcttgtgcgactcgaaccggggcatgggcgtaagctcgcgcccaaggtggtgcatgaccgcgtggagctggcgttgcccctgatcgaccaccccaagatgaagaaagctatgggaggccgaccatga

SEQ ID NO: 149129 - DNA, 1647 bp, Enterobacter cloacae
atgaacattcacagcccaaccactaccgcccgcgccgcgctctacctgcgcgtttcgactgcccggcaggcggagcatgatatttccattcccgaccagaagcggcagggcgaagcctattgcgagcagcgcggctatcagctcgttgagacttatgtggaaccgggcgcaaccgccaccaacgacaagcgccccgaattccagcgcatgatcgaggcgggcacgtcgaagcccgcgcccttcgacattgtcgtggtgcatagcttctcgcgcttcttccgcgatcacttcgagatggagttctacgttcgcaagctggcgaagaacggcgtcaagctcgtgtccatcacgcaggaaatgggcgacgatcccatgcaccagatgatgcggcagatcatggcgctgttcgacgaataccagtccaaggagaacgccaagcacgtcctgcgcgccatgaacgagaatgcccggcagggtttctggaacggcgcacggccgcccatcggctatcgcatcgtcgcggccgagcagcgcggatcgaagatcaagaagaagctggagatcgacccgctgcacgccgacaccgtgcggctgatctatcgcctgttcctcgaaggagacggcacgtccggcgcgatgggcgtcaaggccatcgccacctatctcaacgagcgccgcttcttcacccgcgacggagggcgttggggattggcgcaaatccacgccatcctgacccgcaccacctatatcggcgagcacaggttcaacacccgctcgcacaaggatcgggagaagaagccggagagcgaggtcgccatcatggcggtgccgcccctaatcgagcgcgagacgttcgacgcggtgcaagcccgcctcaagtcccgcaatcccatggtgacgcctgcacgtgtctccagcggcccgacgctcctgaccggcatttgcttctgcgccaagtgcgggggagcgatgacgcttcgcaccggccaaggcagcacgggcgcgacataccgctactatacctgctcgaccaaggcccggcagggcaagaccggctgcaagggtcgcacgatccccatggacaagctggaccatacggtcgccgattatatcggggaccgcctgctcctgcccaagcggttggaaaccgtccttgccagcgtcatcgaccgccgacaggaacgcaccgagcgccgccgcgagcatcttgccgagcttcaaaggcgaatcacggaagccgaccagcggctcggccgtctctttgacgccatcgaagccggcatggtggacaaggacgacgccatggcaaaggaacgcatggtgagcctcaaggcattgcgggatcaagccgccgccgacgcggagcgcacgcagctcgcgctcgatagttcaggcaatcagggcgtcacccccgatatgctcaaggggtttgcccgcaaagcccgtgaacggatcaggctcaacgatggcggctaccgccgcgaccatctacgcgcgctggcgcagcgtgtcgaggttgccgacgacgaggttcgcatcatgggatcgaagtcggaactgctgcgaacgctggtcgccgcttcaagcgtagaaacggcggcgttcggcgttcatagttctgttctgaaatggcgcgccatttgctga

SEQ ID NO: 149130 - DNA, 213 bp, Enterobacter cloacae
ttgtttgacatccttggtgaaggtctgcgccgcgagcttcagcccctcgaccatcgtcaggtaggggaacaactggtcagccagttcctgtacggtcatgcggttacggatcgcgagcaccgccgtctggatcagctcgcccgcttccggggccactgcctgtaccccaatgagtcgtccgctaccttcctcggcttgtcctttcgaatttga

SEQ ID NO: 149131 - DNA, 639 bp, Enterobacter cloacae; identical to SEQ ID NO: 25154

SEQ ID NO: 149132 - DNA, 366 bp, Enterobacter cloacae; identical to SEQ ID NO: 25155

SEQ ID NO: 149133 - DNA, 237 bp, Enterobacter cloacae
atgaacagccccgagcgcatgccggccgagacgcacaaaccgttcaccggctacctgtggggcacgctggccgtgctgacttgcccctgccacctgtccatcctcgctgccgtgctggccggcacaaccgccggtgcattccttgtcgagtattgggtcatcacggcgctcggtttgaccggcctgtttcttctgtcactggcgcgggcgttgcgggcattcagggaaagatcatga

SEQ ID NO: 149134 - DNA, 204 bp, Enterobacter cloacae
atgaatgcaaatgatccgaccgccaccagttgctgcgtgtgctgcaaggaaattccgctcgatgccgccttcacaccggaaggcgcggagtacgtcgagcacttctgcgggctggagtgttatcaacgtttccaggcgcgggccagcactgcgaccgaaacgagcggcgaaccgaacgcttgcggttcgccgccgtcaaattga

SEQ ID NO: 149135 - DNA, 1182 bp, Enterobacter cloacae
atgtataagattgatcggcaaaacaatagcctcaagtcgctcatggaagtctcttttagcagtcttggttttcgcgaacgcgatcatttgcaagagtggctggcaaacaatcctcaagcgttgactaagaaagatgataaagaggacgaacttttaattattcagaaagagtttgctggttttgatgagactaacgaacgtctcgatctgctggctatcgacaaaaaaggcaacttggtcattatcgagaataaacttgatgattcagggcgtgacgtggtctggcaggcgctgaagtatgcgggttactgcgccaaccttcgtcaggaaagcgttgtcgaaatttttcagctttatcttacacaacatgaaccctcggaaatccgccctgcggcagaagttattgcagaatttatgggctgggaaagtttgaaagaaggtgtgctcaatcgaaaagggacacagcgcgttatcatggtagcggcgaatttccgcaaagaagttaccaatactgcactatggctaatgcagtttggcatccgagtgcaatgcttcaaagcgacgccgtacctctttgccgaggatgtttttgtcgatatacggcaggtcattccgactcctgaagcggaatcctacatgattggaatggcgcagaaagaggcagaagagcagtccacctcaagcagtagcgaactgcaacaacgacattatttacgccgtgagttctggtcgttagcactggaaaaattccgtaccagcacatgttcattatttaacaaccgagcacctacgacagaccattggctggcagcgggttcgggggttagtggcgtgccttttgaagtgatcttctcgcaaaaagatgctcgcattcagctcaatatttcacgttcagatgcggtagaaaatacatggctgtttgagcgtctgtcagagcgcaaaacgcatattgagtcgcagtttggtgggatgctcaattggcgactactgcctgagagaaaaagctgccaggttgtttgtgcaaaagcatttgacggcggaaacaaagaactttggcctgacatcattagctggatgattgatggtatgacccgtctggaaaaagcaattcgcccgagcttacaggagctggcggttgagctgaaaaagtcaggtctgatcaccgaaggtggggacgagtag

SEQ ID NO: 149136 - DNA, 1680 bp, Enterobacter cloacae; identical to SEQ ID NO: 10332

SEQ ID NO: 149137 - DNA, 861 bp, Enterobacter cloacae; identical to SEQ ID NO: 19455

SEQ ID NO: 149138 - DNA, 174 bp, Enterobacter cloacae
atggtttacgaaaatgaattgtggcacagttttcttctgcgttcacagataatgtataacttatccaattgcaggaacataatatctaagcatggtgaactaaggtacgatgcctttcctcggctcgaactgattgatatgtacaaattgcatagtttgcaggttatatactaa

SEQ ID NO: 149139 - DNA, 123 bp, Enterobacter cloacae
atggccagtcagatgatgatgtatttctttcccgtaaggccgctcagtctatattcttgcatatcaatcattcaggatgccggacaactcacgtttgcgaacagagagatcgttatttgttag

SEQ ID NO: 149140 - DNA, 276 bp, Enterobacter cloacae; identical to SEQ ID NO: 118716

SEQ ID NO: 149141 - DNA, 276 bp, Enterobacter cloacae; identical to SEQ ID NO: 118716

SEQ ID NO: 149142 - DNA, 1539 bp, Enterobacter cloacae
atgtactcatacgcagacaggattcgtgcagttgagctttacatcaagcttggcttacgtgttagagccacgattcgtcagttgggatacccaaccaagaacgcattgaaaggctggtatcagcactacctgaagcatcaggatttgccagcaagccaagtgccaagagcaccgaaatattcgctgcagcaaagacaggttgcggttgctcattacctcgcccacgatcgctgtattgctgccacgatgagggttttgggttacccgggtcgaggaacgttgactgcgtgggttcggcaagactgccccgaggccagccaatcgatactaggcaggtcttggccggttacaaagccggatgctttgatgtatgaaggcgtggtgcaactgtgtacccgccaatcaagcgcacaggagattgcggacaagttaggggtatgccgaggaaccttgtacaactggaaaaatcagttgcttggcccttgcgcccccgcctcgatgaaacacagtccaaagcgatcgccagtgttggatgcagcagcgctcaggtgccaagttgaatcattgcgccaggatgttcggcggctgaagatagagcgtgaacttctcaagcaggcccatgaaatcttaaaaaatggggctgacattgatctgcataggctggcaaacaaagataaggctgtgctggttgaagcgctgcacgggcagtatgaattgccagaactgctttgccatgttggccttgctagaagctcgtatttttaccatcgtgcccggctgaagctggctgacaaatacttggatgtacgccgaagcatcaccgatatcttcgacagcaactaccgttgctatggatatcgccgagtccaggcatccttgctcaaggagtgcacgggcatctcagagaaggtggttcgtcggctaatgaagcaggaggggttgatcgtggtcaagcccaaacgccgcagatataactcataccttggagagataggcgctgccccgcaaaacctcatcaatcgagacttccatgctgctgcgccgaatgagaagtggcttaccgacatcactgaattccagattccttccggcaaggtttacctgtcgccagtgattgattgctttgacgggctggtggtgagctggtccattgggactcatcccaacgccaatctcgtcaacacaatgctggatgcagccattgatgctgttcaaggcagtgagagccgccctatgattcattctgatcgtggagctcactaccgctggccgggctggctctcgcgggtgcacgatgcaaagttggttcgttcaatgtcccgcaaagggtgctcaccagacaacgcagcatgcgaaggcttctttggaaggctgaaaatggagttgttctatcccggcaactggcaatcaacgacgattgagcagttcattgaagccgtcgatacttacatccgttggtacaacgaaaagcgcatcaaggtatctctggggcgtttaagtcctgtggaatacaggcaaaaacttggcctaaccacataa

SEQ ID NO: 149143 - DNA, 570 bp, Enterobacter cloacae
gtgattgattccaccgggctgaaggtctttggtgaaggcgaatggaaagtcagaaagcacggcaaagagcgccgtcgtatctggcgaaagttgcatcttgctgttgacagcaacacacatgaagttgtctgtgcagacctgtcgctgaataacgtcacggactcagaagccttcccgggccttatccggcagactcacagaaaaatcagggcagccgcggcagacggggcttacgacacccggctctgtcacgatgaactgcggcgtaagaaaatcagcgcgcttatcccgccccgaaaaggtgcaggttactggcccggtgaatatgcagaccgtaaccgtgcagtggctaatcagcgaatgaccgggagtaatgcgcggtggaaatggacaacggaatataaccgtcgctcgatagcggaaacggcaatgtacagaatgaagcagttgttgggagattcactgacgctgcgtgactacgatggtcaggtagcggaagctatggccctggtacgagcgctgaacaaaatgacgaaagcaggtatgcctgaaagcgtgcgtattgcctga

SEQ ID NO: 149144 - DNA, 1227 bp, Enterobacter cloacae
atggaaatatacaaccaaaaacgcaagttagataaccaaaagcgtaaaaacaaccctcaactttattcaaagctaatacaagactttattgtatctggtttatctaaaaaacaagccactaagaaagctaaagcaattattttaagtgcaaccctagataaactcaataacgataaaaaacctccttcagtcagaacaaaaagaattgttaaatctaatactttacttaatgagggaaagattaaatctgatccctggcacatagcaaaagttaagcaagatgagatcaatttatctaaagtagaacaaagacggatcgacacggcattattaagacgtcctatttcatgtattgaatgcaaaattgactttaaatcatttggtggatttgtagatcatactaaagatgttcatcatgctagcgtaagtacacctaagctagttgtaaaaaatgaagcacctattgactctgttgatattgtcattgagttgcctgtattgccagctaacgagccaggagagcccgttgtttctattcctgttgccaaaacaccagaagcatttagtgataagtggatcaggttgtttgtagagaaaggttacagtgctgcaatggttgaagcgtttaaacgtgatgcaattaaagagaatatgacagcattacagatacatgattttcttagtgtctgtaagccttataaagcccctgtagaaacgcctgtacgtcctctagaaacgattattacctctgaatatactagcaccattacagaggccgtagaaacgcttgtagaagcacctatagcatctgttgctaatgattcctcctacgctgttaccctagatgattctatcgagcaagctttgtttgctgatcgcattgttcgtacccgcaccaatcagaacgattttaaagaacgtgtagccgctaactttggttatcgttgcgccattacgaatagcggagaagctttagaagccgctcatattgagccagtaggaacggggaataataacacttcgaatggggtgcttatgcttgcttgtttgcatcgtctttttgacgctggattgatggctatcaagcctgatgctcttacagtgcatttcaaagctaattgtacatactttgctaaaagtacgttggaaggtaaaaaaataaatgatcactcagtttctttgaacaaatcaggattgttagaacgctggcttagctttaatacttga

SEQ ID NO: 149145 - DNA, 279 bp, Enterobacter cloacae
atgagcggtaagcgttatcccgaagagtttaaaattgaagcagtcaaacaggttgttgatcgtggttattctgtttccagcgttgcaacacgtctcgatatcaccacccacagcctttacgcctggataaagaaatacggtccggattcttctactaataaagaacagtcagatgctcaggccgagatccgccgtctccagaaagagctgaagcgggttactgacgaacgggatatattaaaaaaagccgcggcgtacttcgcaaagctgtccgactga

SEQ ID NO: 149146 - DNA, 813 bp, Enterobacter cloacae
gtgctggatgttcatcccagtggtttttacgcctggtttaagcaaccgtattctcagcgccaccaggtagatctgagactgacgggacagatcaaacagttctggctggagtccggttgcgtttatggttatcgcaagatccatctggacttgcgggatagcgggcaacagtgcggagtgaacagagtctggcgactgatgaatcgtgccgggataaaggctcaggtcgggtaccggagcccgcgggcacgcaaaggcgaggccagtatcgtatcgcccaacaggctccagcgacagttcaatccggatgctccggataagcgttgggtaacggatataacctacatcaggacccacgaaggctggctgtatcttgccgtggttgttgatctgttctcacgcaaaattatcggctggtcaatgcaatcccggatgacaaaggacattgtcctgaacgcactgctgatggctgtatggcggcgtaatccccaaaaacaggtgctggttcactcggaccagggcagtcagtacacaagccatgagtggcagtcgtttctgaaatcacacggcctggaggggagtatgagccgtcgcggtaactgtcacgataatgcggttgcagaaagctttttccagttgctgaaacgcgaacggataaagaaaaagatctacggaacgcgggaagaagcccgcagcgatatttttgattacatcgaaatgttttataacagtaagcgtcggcatggttcaagcaatcagatgtcaccgacagaatatgaaaaccagtattatcaacggctcggaagtgtctag

SEQ ID NO: 149147 - DNA, 981 bp, Enterobacter cloacae
atgagccatcaactcaccttcgccgatagtgaattcagcactaagcgccgtcagacccgaaaagagattttcctctcccgcatggagcagattctgccatggcagaatatgaccgctgtcatcgagccgttttatcccaaggcgggcaatggccgacggccctatccgctggagaccatgctgcgtattcactgcatgcagcattggtacaacctgagcgacggtgccatggaagatgccctgtacgaaatcgcctccatgcgcctgtttgcccgattatccctggatagcgccctgccggatcgcaccaccatcatgaatttccgccacctgctcgagcagcatcaactggcccgtcaattgttcaagaccatcaatcgctggctggccgaagcaggcgtcatgatgacccaaggcactttggtggatgccaccatcattgaggcacccagctcgaccaagaacaaagagcagcaacgcgatccggagatgcatcagaccaagaaaggcaatcagtggcactttggcatgaaggcccacattggtgtcgatgccaagagtggcctgacccacagcctggtcaccaccgcggccaacgagcatgacctcaatcagctgggtaatctgctgcatggagaggagcaatttgtctcagccgatgccggctaccaaggagcgccacagcgcgaggagctggccgaggtggatgtggactggctgatcgccgagcgtcccggcagggtaaaaaccttgaagcagcatccgcgcaagaacaaaacggccatcaacatcgaatacatgaaagccagcatccgtgccagggtggagcacccgtttcgcatcatcaagcggcagttcggcttcgtgaaagccagatacaaggggctgctgaaaaacgataaccaactggcgatgttattcaccctggccaacctgtttcgggtggaccaaatgatacgtcagtgggagagatctcagtaa

SEQ ID NO: 149148 - DNA, 294 bp, Enterobacter cloacae
gtggcgcacgtattcggtgaacgcacgttggtcacgctggagcgtcttctgggcctgctgtcggcctttgaggtcgtggtatggatgacggatggctggccgctttatgaatcacgcctgaagggagaactgcacgttatcagcaagcgatatacgcagcgcattgagcggcataacctgaatctgaggcagcacctggcacggctgggcaggaagtcactgtctctcacaaaatcggtggagctgcatgacaaagtcatcgggcattatctgaacataaaacactatcaataa

SEQ ID NO: 149149 - DNA, 231 bp, Enterobacter cloacae
atgaacgttaacctggccgcccttcctcaggacgagatggacaaagtgaatgtcgatctcgccgccgcgggggtcgcattcaaagagcgttacaacatgcccgtcgtggctgaagtggtagagcgtgaacaacccgcgcatctgcgcgactggttccgcgaacgtcttattgcgcatcgcctcgcctccgttaatctctcgcgtctgccgtacgaacctaaagttaaataa

SEQ ID NO: 149150 - DNA, 126 bp, Enterobacter cloacae
atgaccagccgcctttacgaaggcggttttaacacccattacggcctcgctatgcgcaacgctatacacgatattctgatacccgctcagaacccccctgttttgccggacgagaaggtgagataa

SEQ ID NO: 149151 - DNA, 909 bp, Enterobacter cloacae
atgtccccctccgatatggatatggacctgatcctgacgctggatgcgttactcagggaccagaatatcacccatgcggccgcgcggctgggcatcagccagccagcaatgtctgcccgcctggcacgcctgcgcgtgttgtttggtgagccgctgtttgtcccttccccacacggacgtggggtgttaccgacgccgcgcgccgaagcgttaaggccgcaggtcgcgacggttttgcagggcatagcggcgatgcttgaacccaccacgttcaacgcgcagaacagcaaccgcacctttgttattgccctgcacgaaaacccggcgctaatgctgggggcagagttgcagaatcagattagcagtgcggcaccaggtatccgcctgcgttttgcgctcccggaaacccagctgctgtcagcgcagatggaaaatggcgatgtggatatttatatcggcgttaacgcgggggcgcacgatgcatgggtcagacgcaaactgtttgacgatgaatatgccacagcccagcggaaaggccatccgcgcggtacggggccggtggatctggaaagctattgtagtctttcacacctggtggtttcatccgagggcgacccgttcgcgggctttgtcgatcagcatctggcggggcttggccaccagcgtaacgtggtgatgtcgacgcaaagctatgcgatggcgcctgcgattgttgccggtaccgatttactctgcaccctacccaggcgcatgttgctacgctttacgcaaacgcttgatatttttccgccgccgctggatctcccgccgatcgtcatcggtatgtactggcacccgaaaaacagtcaggatccggctaatcgctggctacgtgaacagcttcttcaggccgccggacgtcaggtatga

SEQ ID NO: 149152 - DNA, 180 bp, Enterobacter cloacae
atgaagaaattcaaacttggcttagctaaagtgatcatctgctattctattctcaaagaggttgtgccgtttctgaacgatacaattactcttgttgagaagctgatgagttaccttagcatagccctcaactactttgaaccaaggctcgcattgactaatggtaaaatgggaacatag

SEQ ID NO: 149153 - DNA, 759 bp, Enterobacter cloacae
atggtaaaatgggaacatagatttgagttaaaaaaagataaatgggtgtatgttcctacaaaagaaatgcgcttatatggaacagagatacataaccatctcagagctaaatggattccgcctttatacttctaccacctaagggatggtggtcatgtggcctgtgcaaaaaaacatctgcataatcggtattttgctttaatcgatatcaagaatttctttgagtctactggtcaaagccgtcttactcgagaactgaaaacatacttgacctataacaatgcaagacaagtagcaaagctatccacagtcagaaatcctctgccagaaagaccaaaatatattattccttatggctacccccagtcaccaattctatcaacgttctgcttacataaatccttttgtggaaatctgttcaagcagttgcacgtgaatccagatatcgatatatccatatatatggatgacatcatcctttcagccaatgacctaagctcgtgcgagtcggcttatcgcctacttagcgaggggttagaaaggtctggctatcaaatgaacactttaaaatcacaattcccttctgaaaaaatccatgttttcaatttagagttaaaacacaattctttgagagtactgccttttaggttgattgagttcctgattgcgtacacaaagagtaaaaatcgtcacgaacggaagggaatcgcttcatacgtaggtagtgtcaatacggatcaagccaagctgttcaaatga

SEQ ID NO: 149154 - DNA, 270 bp, Enterobacter cloacae
atgaaattacatttattgttatttttcaatcagttacagatattcggtgctgacggacagcagaattggggcggccttgatcacgccgttaagcaactcaagcaaccgcgcataccttttgatcatttcgtgctcttcataaacaaatgtatcgtgcaacatattgaaaatgatcaatttctgatcaattatgatttcaacgaaacgaacaagaggagggataaagaatggaaggtatcgcagttgcgcttaaaagcgcggaggacgtga

SEQ ID NO: 149155 - DNA, 1038 bp, Enterobacter cloacae
atgtcttacaccgatctattttctgggaaaatgtatgatttcgcctctcccttcgagatcagcgttgcccccaataatgtcatctcgaatttaaatctatttaagattgaacatcaccagctaaaccgcattgcaattgataccagcattatctctgataatctgactgcaccggaacagccagcctacgcacaaagcgcctggggtacggcacgccgtccagagttcagcactcagctttatggtcttcgctacgtgaactctttaaactccgtaacctcgcgtgatctggaacagtaccgcagccgtcaaattccagatgtaggcgatcagattacgctggcactggctgatttctctgccgcccaatacagtcagattcaaaacagtatcgagcttgcactttgtgaagccctgttggagctgaaacaggacagcgactacaccgatcagggaaacttagatttccttgcaggtggtgctaaaacgcagttcacgcttgatgcaagcgacacagcgaatatctttgaacagctaacgcagattaaccgtattcagtcggtaactctgggtgaagggctggcaaaacaacgccgtggtatggtgattctggcagcaggaaaggccgcaagcgccctccgttaccattcaagcatttcgcagtttatgacctacaccctgagcgttaacaatcctgataacttctttaccaaagtgcagaccgataaccctgggcttgagtcctggcagttaaacggcgttaccgtgatcgatgttaccggaatcccttccattgcctcccgcattggcgctgatggtttcgtagcgatcccactgcttgataaaaatgctttcactctgcatagcggtgtgggtactcgccacgctacacagggcaagggtgctgatctggttcatcaatacgttgtggttgatcagcaatttggtttcccttctatctgttccgagtcttcattcctgccgttcatcccacaagtggtggcacagtcgattgtattcggtagcttgagcgcttaa

SEQ ID NO: 149156 - DNA, 201 bp, Enterobacter cloacae
atgaaattggaacttatcctaaagagtcgaggcttgcatttacaacttaatgatacgaatgccgagcaactactgaatttagcagccgtatcgagagcacttgatgtgagctattcaaatttaagacaactcattttcaaaggaatgagtgtatcagatgcgcttaattatcttgtgaacgaaaagaaaggcggtgaataa

SEQ ID NO: 149157 - DNA, 252 bp, Enterobacter cloacae
atggataacatcggcatgtctgatggtttttatcattttagtattgttttctgcgaaagaaaccgtcgtgggtggtgggatatcaattctgatcgcaatagtcatcgttacatttattcagccgccagtcctttcttacaaatcctggcggttctggagaaaattcagagactaatggttcgatgtgtcagtagcaagcaggtcaaatattactttggccttaagtccataacctactattttcattgttaa

SEQ ID NO: 149158 - DNA, 147 bp, Enterobacter cloacae
atgccacgcacagcagatatacacaccgccttcgttgcggccatacagctcaatcccaagggttatcgctatctgagcacagatgtcttcattgagaagttgcgggttttcaattggcacttcacccgatctgatgctaacacctag

SEQ ID NO: 149159 - DNA, 1266 bp, Enterobacter cloacae
atgaataatttaattaggaataactggtgcaagtttgctttattcatttttgcatttattttgatatggcttaggaggccagacatacttacaaacgcacaattttgggcagaggattcagttttttggtacaaggacgcatatgaaaacggatttattaattcactaacaacccctaggaatggatatttccagaccgtatctacatttatagtgggtttgaccaccttattaaatccagattatgcaccttttgttgccaatttctttggaataatattccgcgcgataattatatggtttttattcacagaaagatttaatttcctagggttaacaactagagctttcttatctgtttatttggtttgtatgcctggattaagtgaagtccatgccaatataaccaatgcacattggtacttatcattatatgtatcaatgatattagtagctcgaaaccccaatacaaaattatggaaggctcatgatatattcttcatcattttatctggactaagtggtccatttataatattcattctagcatctacgctcttcaaatttataaatgatttcaaagatcagattagcgtaaaatctttcataaaattttacctgcaacaaccatacatattaatgattatttgcgctttggttcagggcgtgtctataattcttacgttcaatggtactcgttcagcagccccactaggattcagttttgatgtaatttcatctatcatatcatcaaatatatttctatttacatttgccccatgggatattgcaagggctggttgggataatttactactatcatattttttagccgtgtcacttttggcttgcacgacctttgtctttgtaaaaggcacatggaaaatgaaggtatttgcaaccttaccattactaattataatattttcaatggcaaagccacagttgacagattctgcgcctcaattaccgacccttattaatggacaaggttcaagatatttcgtcaatatacatattgctatcttttctttaatctgtgtttacttgcttgagtgcgtaaaggggaaggtgacggttttatttttcaaattatacttgtcggttttgctattcgtgatggggtgcttgaattttgtaatcaccccactaccagacatgaactggaaggagggagctacattgattaacaatgcaaacacaggcgatgtgctttctattcaggttctaccacctgggctaacacttgagttaagaaagaaataa

SEQ ID NO: 149160 - DNA, 2058 bp, Enterobacter cloacae
atgacgacttataacaccggcaatccgctggggtctgctgctgcaaaagatttatacgataacgctgaaaactttgatcatctttctaacgatcaggacaatgagcagtggaaagaccgattcggtgttgagcgattaacatggcatggaatggagaagcgctatcaggaaaagttatcctccatgggctgggagttgatggattcctttcagtctggagaaagcataactcgagctgatcaggcacttcgctggatgttaccagatggagatggtgagtattatcgctgggatggcgtacttccaaaaaccgtacctgctaactcaacccctgatagctctggtggcgtttctccaggtgcatgggtcggtgttggtgatgcctcgttgcgcactgctctagctgctccaggcggtgttgatttagtaaatggggctgcgaaacagaccgatgtagacaagcttaacaagcgaactgacgtatatgcttacatcgaagatttcgccaaccttgtagttgctgatgactggtcagacgctatccaggctgcatttgatactggaaaagaagtaaaaggtatcaagggcaagcagtataaagtcactaaaataataaacactaaaggtcaaaggtatgttggagaactaaccctcaatctgcaaagaacaagcataccaaatgctgttgttacctcaacttatgctatgcctaataatgcatttttccgtggtatatacgtaggtacagcatacgacttttgcgaaatgttgagaataaaatccttgggatttaacaccgtcattcattactgctattttgataataatggcactgtcgacatagacggaactatgcctaagctactgaataactgcctatccgctggattgaatgtggttatcaacacgaatattgaatctagccatggacagggaacagtatcagagattgttgggaggtgtgacagtttttcaaactgcattggatatagcgtagttgacgaaccagccagtagaggaatcagcgttgccgaccaggaccaaatgatttcaaccttgagaggactaacgaacaagaagctattttcagtaaattacatgtgggtcaatacgccttgggaatataaattctcaagaaactatgatgtttttcttgtagatagttacagcatgtactatgcctcagggtctcttcaagaaagggttgataaagaccttggaaaaatgaggactgatttaggcggctgcatgatggtaacgggttctgcgcgtatcattcctgttgtgcaaactttctctcaattcgaaacaaatccggtggaaggtattcatgggtcatattgttttgatgttgatcagattgtagctgccgccaggatattcgggaaaacaggcaatggagatttcgcagcattctgctgggataatggattcacaaccacacttgcaaaagaagtaaagtaccaaggcttggtgaaagagcttgtaaatcacgccgataaaggtgagatattaagaactgaaccgatcctgtttggaggcgtaggaggcgtatctggtagggttcaatatcctttaggttgcctaaatgccatacagacctataaggaccccctaaatacgattgataattggcttggcggtggcgcagctcctgtaagattattgaccgggccttcagaaacccccttgagaacgacatcagcaggggtcgacatttctgggataggctttaataaaacatttagtagattggtcacaactaagagtttattgaagtttttcactggattcgctgtcttcgagaattacggtaatccattactaaagccagcctcttttgaagtatattcaacctcagatggagggtatacagaaaccctcagatatactacaggagttactgctggatctgcatttagattttcagggcgcatgaccaatgactatgatggcataggtgatggcgctgtattctcactttcaatagaccctagtgatgcagttgataattataggcgaattatatatggtttatttataagtacaaactggtag

SEQ ID NO: 149161 - DNA, 231 bp, Enterobacter cloacae
atgtatatctcccggagaaaactcgactatgtttattgttgtattctctccggctacaaatttattaataatttcgccatctttgccatacaaacagacctgcacctgtccctgcataacgataaacatctcccattgatgaggaagctcatgataatgcgggtcgacataactacccttaaccagggctataagcagtcgttgcaccttatcctggtgggagtcatgtaa

SEQ ID NO: 149162 - DNA, 2238 bp, Enterobacter cloacae
atgatttacatacaactatttgctctgcttgtacttgctatttcatcacatagatggatttatttaaagtcaattaccacaggcattatttttatattatttgctttttggtatatttcaaatatgtttactggctatggagtcaccgatgctgtttattaccaattatataacacagctcaaggtacatcgcttaatgatatgtacagtaaaatagaagtcggattaatattttgcattattgttttggcaattcttgcaagcagcgtttatattaagttcaaaaaaaagaatttgatacccataaaaaaaacaacattcatgtggttacttgtcttaatcagcataattccatcacagtttattacaaatatttattactcggctaaagacactttcttcaatgagggcaatgccgctgcagtaaaaaatgaatataaaaaaataaatgggcatcttgataaaaaatataattatgtgtttatttatgctgaaagtcttgaaaatacattccagaatcttgatggtacaaattttacgccaggtctgagcgcacttgcaaataaatacatgcaatttaccaatatacgtcagctattaacccgaggcatgggttggactatggcgggactagtaaatactcaatgcggtattccactcgtattagaacaaggtaattctggggcaagcttcactaactttctgggtaaagctgactgtgtcgctacatggcttggaactcagggctatcagaccgaatttattcgcggtagtcagaaagagtttgctggtggcgataaattcctcgagcaacatggttggcaatcacaacacgataaaaaatatttcgcggaacacgtccttgccacacctgatgatgtcagtggctggggaatacatgatgacttactgcttaagcacgcatgggatgaattttcacgtatgtcccagcagaaacaacctttccttttatcgctcttgacagtgaacactcattccccagaagggacatttttgaaagcttgtgaaaatcatgttcctaaaaatgatcagtatcctatacttgcttcagtggcatgctcagattatctattaactgattttataaatcgaatcacgcatagtccttggttcgagaacacaatcgtcgtgctggtatctgatcatctaatgatggcaaatagtgcatctcctctccttgaaaaggtgagccaggagaggcgaaatcgcttctttatcatcaaaaaagatatgaaacccactattaataatactgaaggcacattactcgacgtctggccaactgtcctcgatttatctggctcatcagttaaagagttagggtttggaaccagtttactcgacagtcaaacgggcaagtttctaaaaaattacgcacttggccgtactaaagatttccttgcctatgcgtcgcagctttggaactatccgtcactaaaggatggcattaaacaaactaaaaatggcatagctattggttcagaagagtatactttacctgtattttctgcaattgaagcgaatgggcaacttaaagcattatggtttgaagcatttgccatgaatgcacaaaggatcatccaaaaaaacaatgatttattctatgctaatctttgtagaaacataaatattaatgaagatggcatttgttcttatattatatccaggaactcaataaaacaatttcgagttaatgacttaggtgtagtaacagaaaaaattattaacaccaagcctatcttttatcagagcgatcttttaggcctttcttcagcaacctatacaacaacaagcggggctgtgataaatgaccgaaatgtaaacataggatatggttttaatatcatcaaactgagttcaactcatgaggataatacgtctgaaacagataccgtattaaacttttccacctgtgatacaaccaccatccccgatgctgaaattacagattttttacaacagcagagtaaaccggttattttcgtatccaatgactccgcagtgtgtggtgacccatcgccaattgttaaactttctaatattcttaactctcctgaactttcaacattgaagttccggcagcaagtctttggcatctacaaatccggacatagcgagttaatgaaaggtactccagatcttccatttgatatgttcattgatacaaaaaactataaattaattagtctttgtaatgcatttatggattgtcactag

SEQ ID NO: 149163 - DNA, 726 bp, Enterobacter cloacae
atgaagcgatgggttcactttaagctgctgcttattttattgccattgtacgcctgtgcggaaccactgagcgacaaatctctgtctctggaactttaccccgatacaatcatccagcgtttttataagcaatctctgaaggtgggtgtttacagacccgattatccgcctttcgatatcgttattaatggcgaataccttgatgggatcaatgccgacatactgcggacaatccgtaataattcggatatccatttctctgtcacccttttcgataacgctgtcgctgcttttgacgcgctggcagaagggtctattgatgcgatcacgaccactggcccggtaactgaaacgaaaaaatccaggtattcttatctcccggctatttcaacgaataaaatagttgaaatcgcacccgcggaaaataaactcgatacaaaagattacgagacgattgccaccgttgatcggtttatttctgatgagtttataaaagagcgctatcctgaagcaaaaataaaccgctacgattccgtactgaatgcgcttgcctctgtcgccctccataaaaacgatatctatgtgggtgatgcaataagtgctggttatttttataacaatagcgttttcaatactcttcacgtcagtcgccagcttaataccattaaccaggcagaaggaaaagtatacttcgcaatacgtaactctgatataaaaaccagataa

SEQ ID NO: 149164 - DNA, 534 bp, Enterobacter cloacae
atggatgctagttatgtaagatcaattgaaaatacaatgatgtgcttggccacattctcacggtctattaattctttctatgcgctgagcgataacttgcagtatttggactatgggactggaaacttagttccttatcagaacatctgcaacgcattgataagtgatgcggctataaactggtgcaaagtttttggttctaataatgagagtacccactggaaatatattattgatgatcatgaagattttcgtagtattctctttgatgaaattgggctaactaatgctgagtttacagtctactggaaaaagatgactgattttagaagtaatattattgcccatttcaattatgattttttcttagaaggagctactcctgaatttgatacggcaatagcagtggcttgctctgcacataaatatttgcgggaacatttacctgctggtgttaattatacagggccaactgatttgaaagtttacggtcaggatgttggcagggctgttttgaataagataatactgtga

SEQ ID NO: 149165 - DNA, 441 bp, Enterobacter cloacae
atgtctggtgttttatcaagtgcggcggcagcagttgggattattgataaagctgtaaatattgctaagaaactatcgaatgaaagtaatgaaattgatacggcgacacttaaattggaattggcaaatattatgagtgagctggcaaatgcgaaaatagaaatcataacaacgcaagcattgttgttccactcagagcaaaagaataaacagcttgaggaacaattggaagagaagcgaaaattcagttttattgatggtgtgtactggattgatggggactctacggcgttttgtccgaaatgttttgagaatgagcataaaaaaatacatatgcagtcccgtgaaagaatgtacgcgggtttggggacgacgatagaaaaacctaactggtattgccgcgtgtgtaaaagtacggtcgaccgcatagttaacagctaa

SEQ ID NO: 149166 - DNA, 816 bp, Enterobacter cloacae
atggaaagatatcgcccacatggtcgtaccgtaaccactttagaagcagatgtacttaaacttcgagcgctagaaatggtgttagtgcttttctatgtagaaaaccttaaaggttttattatcagttctgtgaaagttacaaaacgcctaagaaaaattattgataacacgcaatccacaacaaataacgtagagcaaattacttttaaaaaagcacatgccttactcatttcagagggtgtcataacacaagaagaaagctcacaactgagagaactgattgactaccgtaatactataggccatgagatccatagaataaccatagatattggtgcatactcaaatctggcggagtatgacctccctaacggacacaaaatagcaaaatataattactcggcagtccagcgcgtacaaaatcttagaaagaagatagaaagaaaaatgatggaaaagtcattttcctttgagttgtcttttaacacactggcatttgatgccgcagaacaagcataccttaaggagattaagcggttaaagaaaaaggttaatgctgggattgataagttgaatattacaatagaaactacaaataaaataatccgcaacattcctcctgaagttatggatacggtacaacccggccatccgaaaaacactaagagtaatggtacatttagtcaagaaggtgcgaaagcaatgttcatgctatatgatgcaaaagcaaccccattagcggttgcttacataatgaggataacctaccgtaccgctgctaaatggcacaagaaatggctgtcacaacataaataa

SEQ ID NO: 149167 - DNA, 576 bp, Enterobacter cloacae
atgaggacttttatctactgccgcgtttcaacacgcgagcaggatacgcagaatcaggtgctggctattgagcgtgccgggtacacggtgcctgagagcagggtaatcagcgaggacatttccggcagcgttcaggctatgcagcgccctaagtttcgagcgatggttgagcataagctggaagcgggagatcagcttgtcgtgctgaaactggacaggctggggcgcgacaacatcgacgtgcaacagaccatcgacatgctgttagaacgcggcgtgaaggtggtgtctcttgacctgccagcgcgtgatctgacttcatctgagggcaagctaatccgccagatgtttggagcctttgctgagttcgagcgaaaccgtatccgtgagaggacgcttgacgggctggagaaggcgaaagccaatggcgttaagctgggacgcaaggaagccaccgacaccactcaaaaggtgcaggagctgcggagtgaggggctgtctcaatcgaaggtagctaagcgtctcggcgttagcgtgagcaccgttaaacgccactggaacaagggcgagggatga

SEQ ID NO: 149168 - DNA, 1863 bp, Enterobacter cloacae
atgccaacgaatctacgccgcctgcttgcgcaggctgccgacgctgacccgctcaatactgcggatgcagatgtacagcaaatgatcgctgacgggattgttattcgacgttccaagatatgccccgtaaagcgtaaacccgttaaggcggcatacaacacaaagaccgaagagttttattacaatgctgatggctccgctatgaccctgcgggagtggcgagcgctgcacggtgttcaaccgaagaagcaaaaacagcgctctgacacggggttgcggcaagtcatccagccgggcgacgcaatccactgccgtcgcgctgagattgagcaatggcttaataagaagcccgttcgttatgttgaaccactgccgccagattttcccggcgttcgcgttgacgatgccgcattgaaaccgcgcgagcacgccgtgccggagtcaacaaccggacagaatgcttttctcaaagcctgccgcgagttcctgatttgcgacgatgccaccctgaaaagaatcaatcgtggcatgagcaaactggaaacaatgcgtcgtgctgacttcgcccggttgggtgacagcccggagtttcgccaattatggtgtggggaaccgaagccaacggaagataatttcaatacgaaaaaccttcactgtgatgcaggtggctcgacgctgccgccaactgtgccgccactgacaaccgcgccgtaccagttcaaagagctggttcgttgtgaccgctacgcgagcgccgctttgccgccgccacttgattcgcatagcggggacgaactgaaatggaggccggggcagactgctgttgccgaagccgtgtttcgtcatggtcgtgatgtgctggcggtgctgccaactggttacggtaagaccgcagcgtttacctatccgctgctttacgaatctcgcgctggcattggcctgacggtcatcgttgttcccacgaacacattaaagcgccaacttctcgcccagcttcacgacgttggtattcacgctgtggcctttggcgataagctgccacgccaccgcaatgcgcaacagttggcggggctggctgctggtgcattccgggtagctgtcgtttcacctgaacatcttgttccgtcgagtcaggttctcgcggcgctgatggcttatggcgttgatcgttttattatcgatgaggggcatacggttaaagactgggatttccgcccggcgtatgatctgatgcaatacacattgcagaatgcttttccctctgctcagcgctgcgtgtttacggctaccctgctgcgtgagaaagagcgtgagctgatggcctcgctcggctgccgtgacgattacataacatttcgcgctgacattgcccgcgagagtatccagcttattccagttcgccagtgcgtggagccgcactttgccgctgccggactggtcgaagcattgccggaggatgaaaagattctggtgctggtgaacgatctgaaaacgctgcgtgcgtatctgaaacatttcggtgacagagcaaggctgtaccattcaaagacacaatgcctgccccgtgaacagcgtcacgctaacgctgagtggttcgcctctacgccgggcgcgattctggtggcgaccaaagcttttggcctcggagctgatatccctgacgtgcgtaacgtaatcgtgacttatattcctgatgacctgcccgatatggtgcagatgattggccgtgctggacgcgacggacaacctgcccgcgcgtttctgctgtggtcatcactggcgctcggtgcagcatctgatgagctggcggcgttgtaccgccctgaaaactgcaattggggttacatctcccgcttcctctga

SEQ ID NO: 149169 - DNA, 432 bp, Enterobacter cloacae
atgcctgatgaaaccgtgctgcatcgcgcggggcgttctgacgccctgcttaatgcccaacttgcgtttgccttgaacggctattcctttgatggattggccgaacgtcatattcagacccttaatcgtgaagccatccttcgcgatgtatctacaccgctggagcgatattgcctgctcaatgactgtgagccttgggaatgtatcgctgcggtattgaaccgatttcgacgccgggaggatggctctcgtatttggccgacctaccgcatggctcgcgagatcttcaacgggactgttcaccctgccgacaagacgcgcgacgagatatttcaatccgtgcagcgtcgcctgtttttaccaaaaccagtacatgccgaagtcattcaacacctgcgtgcaatgggactaactggagacaaccaccaatga

SEQ ID NO: 149170 - DNA, 210 bp, Enterobacter cloacae; identical to SEQ ID NO: 84669

SEQ ID NO: 149171 - DNA, 177 bp, Enterobacter cloacae
atgacgcccgcacagttccggcgctggttttcctcactgcctgaaaaataccagcgcgtagcccgttccatgtacgacgacgcccgcaagacgggaacacacaccgcttccagcctgctactcattcgcacgctggtagagggccgaatcaaatttgatgagagatttccaaaatga

SEQ ID NO: 149172 - DNA, 582 bp, Enterobacter cloacae
atgacaaccaccagtaacgcaaccctgaccattaccgacatccagcacatcaaccgcttgtgcattgttgagcacatgaacaacgcgcagattgccgatgccactggtttcagtctggcagatatcgacgcagtaatccgtggcgtctatgtcgatgacttggccgaaaattggaaagacgatgctgatatcactctggcggagtacaacgccatccgcagccgctataagcccggcaagctgcaccgcgatacagagtttatgattgcccgcgatatgctgattcgccctgagactgtgctggctatcgcccattcccgctttagcaacgtccacacgcacccagtgccgaaagccgtcaaagcaaagccggggaaagcgaaagtagtgcgcaagttggtgcctactgatttagatgaaatccacaagttagagcgcttcggttggcctgctgcggagatggccgggaagctgggcgtccctgttgaagtcgtcgcgcatgtgcaacgctgtctgagaaatcgttggtcgtacccggatactctggagtctgttaactccaaattcagcgaggctgaatga

SEQ ID NO: 149173 - DNA, 429 bp, Enterobacter cloacae
atggttacacggacagaccagctattaagaaaagctatgcggggctatctggaacaccttggcaatatgccactggcggaacggattacaaacgctgctgcattcgaagatgtttatcgcttcctgttgaatggttccgggcggctggagttgcgccgcgctgatgtggccgctgtccgtgtcttcctgtggaattatcaataccgacgctgtgcggtgacaggtaagccgctgcgccttgcgtctgccgtgctggatcactgccaccgaaccgggcgcgtgcgtgctgtggtgcatcgctctgctaacgctgctgagggtggctattatgtagggcgggtgtgtggactctcacccggtagcatgaatttcatgctaccagcctaccgccgccactacaaggggctgggtattatttatccagcataa

SEQ ID NO: 149174 - DNA, 474 bp, Enterobacter cloacae
atgccgcttgcaattgagtttgattgctgtgaaaaactcgccaatgatggcgagtttcttcctttttatcaggagttctgtcgctataagcaactaagtgcagagcattcccgcccccgatattccatccaaaaactttttgcatctatttcgctgctctttggcagagatagggacaatgttgatgaagataagccgtatcatcagaaaagagaaggtttaacacatctacatgtgaggcaggaagacagtgtctgggaggatgacaatgggcatccactggtacaatggaaatgtaaaagtaacagctatttgatatattcgtattttgtattctcaggtacaaggcactactatattgttgattttattgatcatgatgcccatgcaaattgggacaatcaagaagcaatacaaatgtggatagatgaagctaaacaatatcgagaacgtataacagaagcggctgcatag

SEQ ID NO: 149175 - DNA, 1530 bp, Enterobacter cloacae
atgaatattgaggatgagttaactgttttatttaaagatcgtgcatcaggtccatttctttttttagggtcaggattttccagacgttatatgggacttgaagattgggagggtttgcttagccttttctgcgttacgggaaaatcatttcaatactttaaaagtagtgcaaatggagacattccatcttctgctcgacttattgcagaagattttcatgattattggtggtccaatgatgattataaagaaagcagattagaatacgaaaaaaacgtcattaataaaacatcacctctacgctatgaaattagtaagcatctaattaacaaaacagaagaaaaattaaaatctctagatcttgaggacgaaattgaacttttaaaagcatgtgatgttgatgggattatcacgacaaattgggacggattaattgagcatctatttgacggctatacgacatatattgggcaggaagaattactattctcaaacacttacaacattggtgaaatttataaaatacatggatgtagttcaaaacctgaaagcctagtattaactgatagtgattattctgattacaataataaaaatgcctatcttgcttcaaaattaataactatttttgtagagcaccctgtaatttttattggatattcaatcacggatgataatatacgttcgctgcttaagtctatctcattatgcataggaaccgataagctcgagaaattaagagataacttaattttcttggatcgaaatgagccaactagtggcccagtaattgaaacatcttatttgcatttcgataatgtccaggtacctgtaaaaataattaaaataagtgattattctcatgtatatcgtgctattcatagtttcgaaagaaaattacctgctcgagttttaagattttgtaaagaaagaatttatgaaattgtacagagtcaagatcctcagactaaaatggctgtaattgattatgatagagtcaaagacaaaaatgacattgaagtagttttaggcttaggagttataggtaaagttggagaaactggatatagatcattcacattaatggatatttttgaagatgctgtatacgataataaagacttctctcctgacaagattctaaatatcacagtaaaacaactaggaacaaagtgcttgcatattcctatatttaaatatcttaatcagatgggtatatcaacaatagacgagtataagaaatcagattttgatctagactcttttatatttaaagacttcccccggactttctgttccggtaacgaaagacttttcgaaaaatatcaacaccttagctttgaagaatttaaacaaacagccagcgaaaatgcctttcttactcttgctccctatcataataaagttgatatacgttcccttgaagaatatattattgaaaattatgaaaatttaatagtaagtaataaaaaatattttttcaggaaattaatttgctttttagattggcttaaatttaacatacactaa

SEQ ID NO: 149176 - DNA, 519 bp, Enterobacter cloacae
atgtttctccgtaaaacggtcatattccttatgagtaaaaacatggcgcacataaaacttttggctttcaaagaatatgagagccactactctgagattgttatttgcaatatcaataacataatgcttatcaagatacttgaagttatccagcgttgggaaaagttttctcagtgcagcgggcgtcgggcagtggctcttttcaataactcgtctctaaaaagagaagctcttctctgtgttgcgggaactggcttaccgcatccaaaattgccttcattgagattaaatgcatcctgcttgtctgccgcgtccgttgccattatggcaacgataacacctattgccaataagtcaacggaggatactattttcacttcgtcagaaaacaaaaaaccccgcctaagcgaggtttttatcagggttttgcggttggtcgccgcagaacacactgtgttacgtcaacgcaaaaagtatacgcgatcgaagacgaacgcgcaattccggcacggattttga

SEQ ID NO: 149177 - DNA, 528 bp, Enterobacter cloacae
atgcctaccgttatcacccacgctgccgtacctctgtgtctgggcttagggctcggaaccaaagtcatcccaccccgcctgctgtttgccgggatcgtcctcgccatgctgcctgacgctgacgtactggcgtttaaattcggtgtcgcctacgggaatattttcggccaccgcggtttcactcattcgctgctgtttgcctttgtagtgcccatactttgcgtgctggctgggcgtcgatggttccgggccagcctgtcgcgctgctggctgtttttaaccgtgtcgctgctgtcgcacagcctgctggattcgattaccaccggcgggaaaggcgtcggctggctgtggccctggacagatgagcgcttctttgcaccgtggcaggtgattaaggtcgcgccgtttgcactgtcgcgctataccacgccgtacgggcatcaggtgattatctcggaactgctgtgggtgtggctgccggggatggtgctgatgggagtgttatggtggagaaaacgtgcgcgctga

SEQ ID NO: 149178 - DNA, 420 bp, Enterobacter cloacae
ttgtttttcgcgggacgtacgaagaaattgccgagtggcttgatcgctgaaaaaagccgggtggcggctacgccttacccggcctacgcgtgctattacgatccgatgtacggctatcatttcgcgggacgtacgaagaaattgccgagtggcttgatcgctgaaaaaagccgggtggcggctacgccttacccggcctacgcgtgctattacgatccgatgtacggctatcatttcgcgggacgtacgaagaaattgccgagtggcttgatcgctgaaaaaagccgggtggcggctacgccttacccggcctacgcgtgctattacgatccgatgtacggctatcaactggagaaaaaggcggagaaaattgtgtatcgcgggacgtttgaagacattgccgaatggcttgatcgctga

SEQ ID NO: 149179 - DNA, 561 bp, Enterobacter cloacae
atgaaaacaatcgattttgaaatccgcacctccgaagtgagcgccagcaacaaaaagctggtgggctatgctgtgcgctggaacagtctctcagaaattatctgggacgagttccgcgagcagtttgcgccgggagcgtttaaagacagcctggcatccggtagcgatgtgcgggcgctgtacgagcataactatacccagctgctggggcgtaccaaatccggcacgctggtgctgtccgaagacgataccgggctgcgcttcgagctgaccccgccgaatacccagcttggcaacgatgtgctggagctggtggagcgcggggatatctctggcatgagcttcggttttcgtgcgctgaaagaggtgtgggatattgctcagtctccatacctgcgcactgttaccgctgccgaactgcgggagattaccgttacctctatgcctgcttatcctgagtctggcgtggaaatcgcgcaccgttcgcttttctcccaacatcctgaactgcgccgcgctggcgataaccgtcgccgctgggctgaattagcggggctttga

SEQ ID NO: 149180 - DNA, 177 bp, Enterobacter cloacae
atgattgccgctgtgattcgcgcctcgttgcgtaaccgcctgctggtgatcctggccgcgctgatgatggccagctggggctggtgggcggtgcagcgcgcgccgctggacgcgttgcccgatctgtctgatgtgcaggtcattatcaaagcgagttaccccgggaaagcgccgtag

SEQ ID NO: 149181 - DNA, 729 bp, Enterobacter cloacae
atgaaacaacacacactgagtctgtggctcggtggggtgttgttcggcctgttaacctccgccgcgcaggcggagccgtggacgctcgaacacaccctgaccgaagcccagcgctactcggcagaactctccgccagccgtaacgaagcgcaggcgctggatgcgatggcggattccgccacgcaattacctgatccaaaactgaaattcggtattgaaaacgtgccggtacagggcagcaacgatcggcggcttacgcgcgaagggatgaccatgcagaaggttggcatcatgcaaagctacgtcagctcggagaagcgggaacgtaaagcacagacttttcaggcgcaggcgcgaagcgtgctggcaaaatccgaggccgtacgtgccgcgcttcagcgtgataccgcccaggcctggctggatctggcgctggcacagcaggcgctgaaaacggccagaacgctggtccgtgaaacggaacgccagcggggcgtgcagaaggcgagcgtcggggcgggaggcgcaacgccggacagcgtactggccctgcaaatgatcctcagcgccatgcgcgacaaagagacgctggcgcagcgggatgtgcagctggcgcaaagccgtctgctggagctaacagggcacgctattacggcggttcgcggtccgctgccgcgctatcagcgccttcctgccgatgaaaaaacgttgcaggaggggattgcctga

SEQ ID NO: 149182 - DNA, 177 bp, Enterobacter cloacae
atgcgttcgttcgccagcccccttaacaccaacatagcgtatgccaagaaaataatctggcaatcctttattccgcaaacgtttgctgaagtcagagttaactatatgtcgtttgaccaaggcatcctgtctgagattgaatgcctcaacagaacggaatccagtgacgatcagtaa

SEQ ID NO: 149183 - DNA, 1551 bp, Enterobacter cloacae
atgggtattaaatctaaaatattgttccatcaaagttctgggatgtatgagcgggatctctcttcaaaaataaaatcattagttattcctaaaaggatttttttgaaatccagcaacgattttgatgatacgcatattcataatgagggagatagatgggttttttatttttctggaagtcggcgatatgttaagtttaatcttgatgaaatgtcaaatgcaatattaaaatatttttgcttcaaatatgcatcaactatgttcccaactttcttgccagtattgtcacatcagtgggctaaagcgttaagttactgccgggaaaaaggcggctttacattaattattttgcgcaagtatatagaggacgatattctcgatgccagagctttctattctatattatttggattgaagattctttgttgtgaagagttccctggatttactttggaagactatgaggatcttgagtttatacctagaccaaatgcgtttaactgggagatttatcaggacattgacaatattctcgaacctttggaaaaaagcatgataactaaaggtttatttgagatagcaactggattggccagaggtaaaacttatgatattaaagagttaaaacataccgcagtactggcgttaagttatgccactggagcgcgtcccgtgcagttggcaaagttatctgttcgagacttgagaattgatacatgtgatacacatactgggctaattagatatagcattctactaccttacgtcaaacagagacgccttacgaccgagcgtttgctgcttgctatacctccggaaattggtgcgttaatcaagcattatgtggacaaagctcagttattatcccatgacagaatgttcgaaatgggagtgtctgcccctgcttttgtctcccaatctataagccaagccattctaaacttcagtccccctgaatatcaaaccgccgttggtcgcggagaggccgctcccccgtcaatcacatctactgatctacgtcacaacgttggtcactcacttgcaatgcagggcgctagtgcagaggaaattgctcacattcttggccattcatctctggttgtagcaaagcactacatccgtgcgaccccagccttggcattgatccgcgctaaagcactcggttctaaccctgtgtggcaaaacatggtggctatgatgcttactgggaaacttgtcccttcaaaagaatgggaaggtcgacgcgtggttggtatggttggtgatcgattgcactatgagattggtggctgtgcgagaaccgatgatgaatgccccttctgtgaagtccgttgctgctatggttgcttatattaccgccctttccttgatggccatcaccagggcgtattgaatagcgtctctaaagaagtcgatgagctgatagcagtatcagatagtgttggtaatgctctcaatccactaatttctgtccacgagacgacgcaaatagaaatcaagtcagtgattgcccgttgtcatttgcataacgtcagaggttgtgggaaatga

SEQ ID NO: 149184 - DNA, 1317 bp, Enterobacter cloacae
atggatgtaaccctctgtttacccgcactttatccgttaaggtatgtagttgaccatctggagtatcgctcgccctcaactcaatcagcctccctccaggcaattaagtttttttatgatttttggttcatgaagcatagaactacattctgctatagcttttatttctccggacatgaccctgcaatcgctatacatgagatggctgacttttttcaatatttagaaaatggtcggatagtaaactccacaccacgatcactgccatttaaacattctagcagcgtgacaaatgccgccagagtacgtgcagtgattagattcataggctacctaatcgctacctatatatctccttactatcgaaatgaaacacctaaagaattgtctcgtcatgcatcccgcctgaatactcgtttgctgatatgtaaagaggaatttaaaactcttgaaagaagtaatcatcggtattatcgcgtcattccgggatttcgcagtatgactggtgatatggttgaaaacgtttatcgtatagtagtaccaaattcaaaacataaaaataactttctcaaccccttcccttctgggtttatccagtttcgtaattatttgattttgcggttaatgctcaactatgggctgcgtgtcgctgagctgttattattagagtgcacatcggttaaagctagtataaaaggtgataaatttagcttaatcattagcatgcctagcaacataactgatccaagaatacatgccccgtcattaaaaaatgattactcacatcgagttttggagcttgacaagcttgattatgaatttcttatgatttatatgggaaaaattagaaaatcctcgctgactcacaactttatatttgcatcgagccaaaaccctgataaaccgttgtcctataatgcagtgcatttaattttttctgagatagataaggttttttcacattactatcctgaatgtaagtctatagaacactttgatactataataaaattcacaccacatgtcacacggcatacttgggcttacttaactttaaaaaaaatttatcatttgcagaataaaaaaatcaataactctgatattgctttcgtaaaaaactcattttctatgggagtgatggacgaagcgaaagaggcgcttcgtttacttggcggttggagtataaaaagtaaaatgcctgacctttacgcaaaaaggtttatgtctgagcaagccaatgcagtaaatattaagagattactgcaacaagattctgaactcgattgcttaatgaaggggttgtttgatgggtattaa

SEQ ID NO: 149185 - DNA, 1266 bp, Enterobacter cloacae
atgcgctctgttattgttgcttttttatttgcctgttcattctgcgtttctgctgaaactgttaatttaaataattcatctgttcgctcatttgttcagtggtattcttcaaaaactggcaagcctgttattgttaatcctgatgttaaaggaaacgtaaccgtatttaatgctgatgttaatccaacaaatattgatgatttctttaagtctgttctgaatgctaacgggtttgtcatgctttctggcaatcctgcggtagtctctttgccgtctaaattaccttcacagatggtttcgggttccgatgattctgataaccagtcttatgatacttttccttctgagccatcttaccagccagtacctgtggcgcttacggtcagaaattttaagctgacaaaagttagatcgtccgatgttcagcaactggttaaaatttatcttgattctaatggcggtggtaatgtcgtggattatccaggcaataactcgctgattgtttctgcgcctgacgagctgctgccggttctgtccgattttatcaattctgtggatgttgcccgtgaccaagtattgattcagtcgctgatgtttgaaaccagcctatccgatggtgttgatttgtcgtttgctgcgggttctgcgtctggccataaggtggcggggggctttaatacttctgcgctcggcagtgcgctttccacggctggcggctcttttggtatttttgatggtaacgtactggctttgtctctgcgtgccgttcagagcaattcacgctctaaggtgatttcaacgccgcgcatccttactcagtccggtcagacgggttacatttctgtaggtaagaacgtgccgtttatcaccggaaaggtaacgggcgaatctgccggggtaaataatccgttccagactatcgaacgtcatgatgtgggtgtttctctcaaggtaacgcctgttgtcatgggtaacgggcaattagttctgactatcgacactcgcgccgattcaatcagcaatgatgaccaggcatccgatattattactaatcagcgccagattcagactactgttcagattaaggatggtcagacattgttgcttggtggtcttattgattcatcttccagtaatgctgaccgttcagtgccttttatcagtaaaattcctcttatcggctggcttttcacgagtaaggctgacagcaatgagcagcgcatcatgtatgttctcctgaccgcccatatcattcgcgcgctgtaa

SEQ ID NO: 149186 - DNA, 1095 bp, Enterobacter cloacae
atggcggttcatgtagtaacaggtaaattaggctcaggcaagacacttgttagtgtttccagaatacaggagagacttgctaagggttgtcctgttgccactaatcttgaccttaaattgcataatatgcctatggttgggcgttatgcgaaaaaaacgcgcgttattcgcgttcctgacaaaccttcattaaatgatttgctggctattggcattggaaacacatcttacgatgaatcccgtaatggcctccttgtacttgatgaatgtggtacttggtttaattcccgctcatggggtgataaagacagacaacctgttattgactggtttttacatgccagaaaattaggctgggatattatatttttgattcaggatatttcgataatggataagcaagctcgtttggcgcttgctgagcatgttgtttattgtcgccgttcagataaattaaacattccttttgttggctccattatgaatttggtttcaggggcacgattttctttaccaaaggtacactttggcattgtcaaatatggtgataatgttaattcaatcactgttgataaatggatatatacaggaaaatctctttattctgcttacaataccaaacaagcgttcacagataattatcctcatggcgcattttcgcttttgccaccatttatcacgcacggtcaattttctgttcacagaggatttaattattatatgcgcctcactaaaatttattttcgcaaatcgaaccgtcttatattaatgctttcttttttggcgctggggcttgggcttggtttctggctccagtctggaaagaatgttgatgaaatctcagctattaaatctgcttatgctgaacaggcgagggcggtaacgcctgattcgtccagtgacttaccccgactttctattaattctttttcacaacttggctttgacgtttccgttacgtttgttgatgctaaaggtatgaaatatcagtattttgatttgattaaagatggttattccgttgatattaaagatgcctgtcgtattgttattagaaaaggtcgttatttacagactgttacctgtcaggagtaa

SEQ ID NO: 149187 - DNA, 1215 bp, Enterobacter cloacae
atgaaacgcaaattattagcccttttatttattatttctccagcttctcatgctgctatatgggatagtttaagccaaagcactatggaggttgatgtttggtctgtaagaaacgagaccacacataaacaatatataaattctgatatgcttgcttctggttgttctcaagcaaaagaaaaggctaacgattttttcacgagaaccaaatcaatttttcaggatgtgtatccgccaaatgctgagtatagattagtccttgatgattcttgttcgtttagtttgccaccgggcgaaaaagatagctcttggagaatagagactacaattaatgcagatgttcaagtttcagttcctgatgaaacatcacccgaacctacaccagaagaagtttgtcagactaaacaacctgaagatggtgtatttaataatgttttttctgattctggcaatcgttatatcaattatgatggttgtgagtatgaagcaacaggggtaattgtttgtcaaagtgacggtactgtttgtgctgctacgtggaaaccaactgggcgtgttttagatggttcacataattcatcatcacctgccgatgataataatgataatggttcagaaaatggtgggtcagagggtggggatgatggttctggcggtggtaacaataattcaggggggagttctggcggctcttcattaagtaagcaggatatgattgacgcagttaactccggtgtatctggggcttcgtctaatgttgctgatgagataagaaagaaactctctgagcctgacacgagctttcaggataaagaacatgctgacgcgcaaaaatctaaatacctaagtgatataactgattcccttaacaatattacacgtggtgctggacgttatgcagatccatcccgtggtgattattatgggcaaggtgattctgctttagatagtgctacaagccttgcagaaagcaacctgggtatttctaaagattccaatgggatttgggatttatttttaaatgaaactaatgccttgccaaatggtgatggttgttctgattttattatgtttcccggagaaatttaccagatagatattcaatgcgataagttgcagtcaattaaagatgcactttcatgggtgttttactgcatgacattttggtatgtctttacttcattaacatccttgcttagaaaagggagtgaataa

SEQ ID NO: 149188 - DNA, 243 bp, Enterobacter cloacae
atgaaaattctgtctactgttaaatctaaagttgctctggcttcaactgcgctttttgtttctgcaagttcttttgcggctgacggcgctacaggcggtactgattatgcaggtcaggcaatggacgctttgttgactcaggcaaatgatctcattggtaaagtatggcctgttgttgttgctgtagttggcgcaggcctggctattcgtctttttaaaaagttctcttccaaagcagtttga

SEQ ID NO: 149189 - DNA, 318 bp, Enterobacter cloacae
atgtctcactacggattatttgttaaaggtaaaatgcttggttcgcgccagcgcaataagatgaatagtgatttagtttataatgaaattggcgtcggcatggaaaagcctgatggttttggcggcacgaaaacagaacaattaattattcgtgtttcttcttctctcgttaaggctggcgtaatgaatcaggctaatagccttattggtaaactggttcaggttcctgtctatgctaaagcatggtcttttgacggaaaggatggcattacatacaacctttctaatgatggtggtattagcgaaataaaggtttga

SEQ ID NO: 149190 - DNA, 1116 bp, Enterobacter cloacae
atgttctttgactggctgactattgaacaggatttcggctatcagcttccgattctcggtgatgtggcttatcagcgcatccaccttgaaacgggtgaaggtagctccctgtctcaaccagttttccagcacaaaggctctttctgtgacatggtttccgtttctgttcgtggttctgttttgaaggttaagggcaatccgtcaaggtggggaagggttgaaaatcttttcggacttcctactgttgatgcctgtgtttctgtctttaatacaattcttgaatctcttggcttgcctgtatttactcgctgtacaaagattttcttgtctcagacaaaagagaatgaaaaagcccgtttaatatctgatggcgctttaattcgtgagctgcacataacatctaatgtttctgttggtaaaggtaatgaagatagctacatttccgctctctctactcagccttacaggaacagtgtgccacgtcttcactcaaacggtaaatctgttgactggttatcaaaaaaaggcaacgtaaatttaatttatcctactgtttataacaaagctaacgagcttgaacttcactcattatcaaaaattaaaaataaattcggttcagattcaaaagaatataattatcttttaaatgttattaattattgcactgaaaacggcatagtccgatttgaacaaaaattaaaatctcgttatttacaaaaacaaaatcttatgtattggggtatatctgatttctctcagcttaataaattacatgatgaattcgttaatcttgatgaaaaaatatcggtgaatgctatggactttgaaactattagcgaacatttaatttctcaaggcgttgttgatactattcgcaaggctaatattactgctatgtatgctttgcaatggtttcatgggcagagctttgatcttaataaaacgcaagttcagactcaccgtgcgagattacgaaaaatcggtattgatattgctcaaaaatgcaatattgctaagttctctccggttatcatgaaagaaagccgcgaaattcatgtttcacaatgcgttattccagactggtatattaaaccttctcatttacgtgtagcttaa

SEQ ID NO: 149191 - DNA, 189 bp, Enterobacter cloacae
atgccgacaaagcacattaacgatgttcaatggcgaaaaatagagaaagaaactgtaagagaagtaacaacactagggataccagttaaagataccaaaatgttagagtggatcatcgagaaaggactaaagagcatcactgaggacgactatcgcaaatttctggacacgccaagcccaaaaaaatag

SEQ ID NO: 149192 - DNA, 267 bp, Enterobacter cloacae
atgaataaagaccagataatacaggtacttaatgaaacagagaatgacagccccgtagcaagagcagaattagcaagattcatcgtaaaaacaatctacaattttgtaaaaatggagaggccagaaggtgaaggtctggacggacgtgatggcccagaaaggcgcagcatgggaaaaattgtagatgcggcagaaaaccactactttaacatgataaaagaaagccatgaaaaacagggaattggaagaagaaaccctgaggaatga

SEQ ID NO: 149193 - DNA, 1266 bp, Enterobacter cloacae; identical to SEQ ID NO: 149185

SEQ ID NO: 149194 - DNA, 1095 bp, Enterobacter cloacae; identical to SEQ ID NO: 149186

SEQ ID NO: 149195 - DNA, 1215 bp, Enterobacter cloacae; identical to SEQ ID NO: 149187

SEQ ID NO: 149196 - DNA, 243 bp, Enterobacter cloacae; identical to SEQ ID NO: 149188

SEQ ID NO: 149197 - DNA, 318 bp, Enterobacter cloacae; identical to SEQ ID NO: 149189

SEQ ID NO: 149198 - DNA, 1116 bp, Enterobacter cloacae; identical to SEQ ID NO: 149190

SEQ ID NO: 149199 - DNA, 189 bp, Enterobacter cloacae
atgccgacaaagcacattaacgatgttcaatggcgaaaaatagagaaagaaactgtaagagcagtaacaacactagggataccagttaaagataccaaaatgttagagtggatcatcgagaaaggactaaagagcatcactgaggacgactatcgcaaatttctggacacgccaagcccaaaaaaatag

SEQ ID NO: 149200 - DNA, 267 bp, Enterobacter cloacae; identical to SEQ ID NO: 149192

SEQ ID NO: 149201 - DNA, 162 bp, Enterobacter cloacae
atgcgcggaatgagcagaacaaggatgggtctgaactggctggatttactcgtattcaatctatgtcaaagctcactggaattgtctaatcactggctcgttagaaatgtctatatgttgaaaagtctgcttagtgccccgattaatgcaggagagttatga

SEQ ID NO: 149202 - DNA, 246 bp, Enterobacter cloacae
gtgggccttttttcgctgcaagtaatcttcgtctgcacgaattttatcccaccactttttgaagactgcggctgcttctgcttttactggatcgtgatcgaggggtttgacttgtcgttccgcatcatactttttaccgcccttatgattcgcgtatcgccgggcgcgggtatagcccatttgtatgaatttacgcgccatatccctgcctacaaaatcgtttttactgcggtactcttcaaatag

SEQ ID NO: 149203 - DNA, 549 bp, Enterobacter cloacae
atgaacgtaaccagaacaggaattcctgatgtatttatcattgagccaaaggtttttggcgataatagaggtttcttcctcgaaagctttaaccaaaacacatttaatgaagtacttggtagagaggtaagctttgttcaggataatcattcaaaatcatcaaaaaatgttctaagaggtttacattttcaatcacaaaacacacaaggaaagttagtgcgagtaattgcaggggccgtattcgatgtggcggtagatctgcgtggaagttcggaaacatttggtcaatgggtgggtattgaactttctgctgataataaaaaacagttatgggttccagaaggatttgctcatggcttttatgttttagaagagaatactgaatttgtttacaaatgtactgattattataatccttcttttgaacacaccttagcctggaatgaaccaacaatccaaattcagtggccaataccagatggtgtggaacctcttatatctgagaaagatagaaaaggtctttctcttactgaatgccaattcttttag

SEQ ID NO: 149204 - DNA, 1842 bp, Enterobacter cloacae
atgaaaacaaggtctttttctatttttttgcttaaagcaggctacaacgcacagaactccctcaagccagatcatcaacttctcgatgactttcaggctcaaaacctcccacagggtgcaagtttatttatttctgacagatttaaaacaactccttggtgggtgaattacttctcaattggcgggaatttagaacaagaaagtaagggagcgttaatttttcttccagtaagagatcgatgtttcgcactaacttttgggcacatttatcacaatctacgcgatgtttcctatgagtatgactttggtcttaaagtaacattaaacagccttgaacctaaagagttaaaaagtgctgacatagtggatcctggtgcatcaagaagaaaaagaatgcaagttcctgtcatgtctgacttaacctatttggattttgacagtaatagcgagattttaaaaagcttaacaggaaaagttaagccacagtatatagaactatttaaaaatgccactggctctacaagtttaaaagtaggtctaaaattagaaccggatgagcttatagttttatgtgaacagctactggatttatatgcaagcaatgaatatttagagtctttccctaacatacaaaaaatagtcccggaaaaagaccctctgaaaatagaaaagttagacacttcacttttagaggcatttataaacaaaagtgatgaattatccttatcaattccggacattgttgattacagtgacaatatatattgtgttttcaaaggaagaaaaggaatctccccaatatatactgatattagtcttgatgaattttatgactatctaggagagattgatttaaatacatttgatatagaaaaaataaaaagcttttcattaaacctctgtaatgaagaagggattacaactaaagcatataatatttacagaagctttatttatgacattccctttgacgatgaaggggttgtttatcatctatgcgaaggagaatggtataaagttgatcaagattatttagcaattttgaaagattatatcgatcaaagatgcgagaacacctcacttccaccatacaatcacgataacatagcagcaaacaaaagaagttatagtgaagaaaactacaatgaagatgttgcccgtaactcacttacacatatctgccttgatcaaacagatataagccctgatggatatacgcaaatagagccttgtgacataattagttataatggaaatacgtgcattttccaccatataaaaatatcctcacgctcatctcagcttagtcatctttttaatcagggtgtcaactctatggagttgttaattctggaaggacacagtagagataaattaaaaaatctcattgaagaaaaaatacaacatcgtgatttagatagcttcaagcgagtaatcgatggaaatgactataaagttgagttcggcataattacaaaaaaacctgcaatgtctaaatctgataaccttccacttttttcaaaaataagcttaatgagaagtttaagagcactttctctttgccgcacggaaggtgtggtaagttttatacaagatataagtccgcctaaagaaagctatagtaaatatcctcgtattacagtagtcgtatctcttgatgcaaatggtaagaatgaggttgttgtagataacaaccaaattttcccacaagggaaaaaagtaatgagatgctctcaagaaataactaatagcgctatcggttcaaaatatatgctttatgtcaaagcaagcgaaaatggggatcttagcaccagtcacgcttgggaaagtgaaccgatttag

SEQ ID NO: 149205 - DNA, 672 bp, Enterobacter cloacae
gtgcgctggagcggccagtacggcagctttggcgaggtgcgccatcagagcgaagggttctcacggttggtgaatcgcacggcgatggcgcaccagccgcttcgctatgccgggcagtacgctgacggtgaaacggggctgcactataacctgttccgctactacgacccgcaggtcgggcggtttattgtgcaggatccgattgggctgaatggcgggtggaacctttatcagtatgcgccgaatccgttggggtggattgatccgtgggggttagcaggtgtcaggctcccaagaaataatggccattgggacggtataccaggagaaagtaactggtattcatataatgacaaagttaatgcagttacatcgaaccagcctatacctttcagtgaaggaaggcctgatttttctgcgtggtcaaaaggtacacttactttcgaagatggtgtgctgaatgggacggataaagatttttcaaaagtatatagtgccattgcagagaaaaaaggcattacacagaaagcggctcagaatttgttaagggaaaaaatgcttactccacatcatctgagtgcgaatactataattcttgtcccaagagatcttcatggcaatgtgccacatattggctccgcatcagatatgaggaggaaaggaaaatgttga

SEQ ID NO: 149206 - DNA, 1851 bp, Enterobacter cloacae
gtgaacgggcattttacggatgaggaagcggtattacgggttggtgaagtctgcgaagtagctgggcgagcagtaattatcctcgtagataaaaacaaaaatcttagcgatttattttatcaaggaaaagttctgagaaatgtttccgtaggaagttttattgaaatcaagaaaggatttatgagcctgattggcaaagtggaatcagagagactcattgaagaaaaacatccttctggcagtggcagcgatgcttggcgttatcgtcgctacttgacggccacgttaacgggatacatcgaccgaacgagaggtttcgttagcgggtcgcgtgagctacccctcataggtaatgaggcctttgttgttactgaagagatggtaaagacggtacaccagatcgcgaaagagggcgaaacggtaatgtctttcactcgaacagatcttgaagatatagaaatctcgttaccagtcaatggcctcataaattctcatattgcaatttttggcaacactggcagtgggaaatccaatacacttgcagcactttataaagctggagtcgctcagataaaaccgatgctgggtgacagttttaatgaaaagtgccgatttattctcttcgactttaatggcgaatatacaacgcaaaattgtattactgatgagaaaacggtttataacctgaacacacaccatgctaatggcaataagcttccacttcctaaagaagtactacttgaacatgacatgctttctgttctgactgatgcgacggataagacccaaaaaccttttttaaaacgtgttttggaattccagtccgaagttatggggtctgataatgctcttgaatacatgaggaatgtgctaaagaaaaaaataaagcagaacttgtttagtggtgataagataaaaagtgaagcaataaatgcaatgtttagtccgatcttctgtgacgatccagaactattatctgatcttgagtttcactcaggaggctcaaaatggaaaataagaaacgaacggcactatttcaactctgaaatcgatgtggaaagatcttatatctactctaaagcctgctcttttaattttaaagaagatatgatagaaagtctcttggattttatgtggcttaaacttatctatgaatttttctccaataaatcgaatccggaacatgtctcgcctgtaataaatagaatgaatgcaaaccggaaagatatagctaaaatatttgatacatctggagatagagacttctggaatggaggtaacttcattgttatcaacctcaatatggttaatattacaatgaagaaaacactccctcttttgattgcaaaatgggcttataacttgaaaaaaatgtctaccgagccttcaacgcttcatatcattattgatgaagctcataacatcctctcaaacacatcatttagagaaagtgaaagctggaaagattataggctcgaaacttttgaagagattatcaaagagggacgtaaatttggcgtgtttgtaacaatttccagccagcgcccgaacgatatatcatcaactatcatttctcaagcgcacaactattttattcatcgtcttattaatcaaaatgatctttatgcaattgaaaagtctgtttcttatattgatcggttgacagaggagtccattccgacactttccacaggaacctgcatattcagtggtattgttagcccaatgccgctgaaactgagggtggcggaacttcccaacaaccagaaacctcgaagtaaaacaataacatttggcgagttgatcgacagagagcaagggaatgatatagaaggtaacttaattttataa

SEQ ID NO: 149207 - DNA, 432 bp, Enterobacter cloacae
atggataagattatttacaagatttccgatgtgaaaccactgcggtttaactctcagctagaaaggaaagagtgggttcttgctcataccctaattcttccgagaaaggaaaaatttaaagaaactcttctgcaaaatatttattatgatttactgagaacctattcaaatgagctggataaagaggccaccctgctcgttgtatttggtttttcatttgctgatgaacatcttgaaacgctaacaaagaaagcacttcgtaatgctactctcaaactactaatatttgcttttgacgaggcaaatgttaatgggtttatggataaatttcgtgattattccaacgtggaagtaatcttccggccgggagggaatatagatttcccgataatgaatagaattatcacaagttatcttggaggggcgaggtga

SEQ ID NO: 149208 - DNA, 3063 bp, Enterobacter cloacae
  misc_feature (119)..(128): n is a, c, g, or t
atgaatttcagggcgctgtatttatgtattaaacggattttggggatattctcatctcaggagaatgatgcaacctctgtaatgattgaggatatatcaagcctctctccttttgcgcnnnnnnnnnngaagtacactgttcctgatcatccaaatccagaagtcctgaaattcatcgagtatccaactcgtccgacgggcatacagacatttaatgaacagtcaatcctgtctctgtatcgggaaaagctgcactcaatttcaatgatgttagctatcagcgatagcgacatcagggacgatgcatatacatttactaatttagttttaaagcccttggttgaatatgttcgctggatacatcttttgccagcttccgaaaatcatcatcataatggtattggtgggttactttctcacagcctggaagtggccatactctctttaaaaaatgcgcatcactcagaactgagaccaatcggatatcaagatgaagaagtagtccgtagaaaagtatatctctatgctgcgtttatctgtggtttagtccatgatgccggaaaggtttacgatctcgacattgtaagcctgaatttagctagtccgatcatttggacgccaagctcacaaagtcttcttgactgggcacgtgaaaatgacgtggttgaatacgaaatccactggcgaaagcgtattctaaataaagaacgtgtttattcaaaaatgatcaccgccctaaacgtttatactgatgggaatgactttttgtctaaatgcgtgaggaccgctgatttctattctactggtacagaccttaatgttttacgtgaccctatcatgggtctgcgttctaatgatgcagcagcaagggccattagtaccatcaagcacaactttaccagtatcaatatcaacaattacaatgctaagcctatgcacatcattatcgtaaatggtgaggtataccttaacgagaacgcattccttgattttgttctcaatgatttcgaattacataaatataacttccctcagggagaggctggtaagaccgtattggtagaatccctagttcaacgtggttacgtcgagccctatgatgatgagcgtgtcgttcactacttcattccgggtatctattcggaaaacgaaatatcaaacatctttagaaatgggatagggaaactagaattctataaccttcttaagctaaggtggattggtttaatctttgattcctataaaatccctgactcagtgccgggtctttttagcgttaatgccaataaagactttatttacattgacgagcaaaaaacagttactgaatacagaagaccagtgcccggtcgggacgttataactaaaattactgatactgttgagacggctgttcttaaggttaatgatttaggccgctcctctgcctctattgatgttgatatacattctaagaaaaatgaaggctcatccgacgattttgagaagaaagccgaaagtgataatgaaattgataatgacacgcagatagttaaatctgagggtgaggaagcagctgatcctgtcattcctgatatagaagaaagtgaagatgaatcggcaaaggacacggaatcccatgtcctggtcaaccaacttcatgaactccttttaagcgctccactttccaatgactatatagtgtgtgttgatgctgtcccctacctcaacatagataccactatggcattgctgccgggattagatgaaaaagcattcagtgaagagccctatttccaactgacattcagagaaggctctctcgatggaatgtggatagtaagggacattgacgatctgcgtttagtccagctcggcgataactgcgccgggttccagctcacctatcatgagccaagaaggccaacaactttaaagtcacttttcaatacttctatgtatcaggcattagtgattaatgatgagtcttctgttgaaaactctgccccacgtccaaagcaaacgcttgagctgcctcccccacgtgtaaatgcagtcgaagaacattctggcgacgtggaatatcatggaaccgatagtgcatccgcgactggtccgctgaaaactgaggctgtggaatatgaacattatcaacatctttttgagaaagaagatgaagagcatgagatcattgattataccgatttctcacagcttagtgtttctcggccagaagtcggtagttgtgcaacaagctcttcggtccataatgaaaagcttctctccgagccgtcagaattaccagaacttaaccgagaacagaacgctgatccccagggtacgaatgaacgctctatggatgtttctgtaggacaagaaaactcagaaccagatactgagggtaactgcccaccaccagctgaagttgtgtattcccagaccgaagcagccgcaaccagtgtgatggcaagtgaagagcccgccttacctcctgtacttgaagaatcaaatggagagcatgcgcccacagacgctaaggggcatcatctttcgccagcactggccagactgttcgccccaacagcaccggtagaaaaacaaaatcccaagcgcaaccggaataaatcatcggacaaagcagaagtacaaaaaccagcatcacctgtttctggtcacaatctgaacagtaaagtctttgcatctactgaatcagaccaaaatggtgaattctcgcttataagcgaaggtgacgttacagagcttgaatttgtagaaattgcgttagtactgcatcaaattctgtccaaaatggaggtggcgtttaaaagaaagcgcaaaaacagatttatggtaagtactcctaatactctctatctgacccaatcttgcgtggaaaaatttgggtcgcagttagaggctcaagatcttttcaataagcttcctcagtacctcgttaattctggtgctgtgatcaatacaaaatgccatgcatttaacatgcctactttgctggccgcatcagaccgggcgaaagtggacattgaacgaattatcaataacctgaaagaggctgggaacctataa

SEQ ID NO: 149209 - DNA, 354 bp, Enterobacter cloacae
atggtggttgagcatgcccatggcctccgtcagcgccgagggcccaatgccaaaagctctctccacaaggcgcacctcgcccctgatgccgggctgcaggcaccaggggcgagcctgtcctttgcgcagggctcgcatgacttcgaatcccttgatcgtggcataggccgtggggatcgatttgaaaccgcgcaccggcttgatcagtatcttgagctttccgtgatcggcctcgatcacgttattgagatacttcacctgccggtgggccgtctcccggtccagctttccttcgcgcttcaattcggtgatcgctgcaccatagctcggcgctttgtcggtattggggtctga

SEQ ID NO: 149210 - DNA, 1248 bp, Enterobacter cloacae
atgagtgggttgaactttctgaacaaattgctggatggagttgatgttgaatggttgtcactgggagagcttggcgatttcatacgtggcaatggactacagaaaaaagatttcgttgaaagtggttttccagcaatacattacggtcagatttatacaaggtatgggttatcagctgataaaacatttacttacgtgcttccagaactagccaataagctgagaaaggctcaaaaaaatgacttattgctagcaacaacatcagaaaacgatgaagatgtagttaaacctttagcctggcttggcgataacgttgctatttccggagatatgatgttatttcgccacgagcaaaatgttaaatatctcgcctatttcttccagtccgaaatatttcaaacacaaaaaatgaaatatattactggagctaaagtccgacgggtttcgagtggcgatttatctaaaattaaaattccaattcccagttcaaacaatccagaaaagtcccttgccatccaggctgaaatcgtccggattctggataagtttactgcccttaccgctgagcttaccgctgagcttaccgctgagcttaccatgcgtaaaaaacagtacaactactatcgtgaccagttgctcagttttgatgatgagcatgaaaaacctatttatctggaaaaattgctggatggggttgaggttgagtggaagactttgggggaagtggctgttataggaacaggtaaccatgatacgcaagatgctatagaacatggcaaatatattttttatgcacgtggacgtgagccattaaagttaaatgtatttgattttgatgaaacagcaatcattacggctggagatggtgccggggtgggaaaggtatttcattacgctaaaggtaaatatgctttgcatcagagagcatatcgtattgtcccaaatgcatttatgaatccgcgatttgtatatcactatataacagcatatttttttacctatattcaaaaagcatcagtaagttcatcggttacctcacttcgtcgaccaatgtttttaaatttcccaatacctgtaccaccttcagaagaacaagctcgcattgtcgaaatactcgataaattcgacaccctgaccaactccatcactgaaggtctcccgcgtgaaatcgagttgcgccagaaacaatacgaatactaccgtgatttactgttcagtttccctaaacctgattccgtaacgaactga

SEQ ID NO: 149211 - DNA, 255 bp, Enterobacter cloacae
atgaaaatcaccaatgatgcacaattcagcgccgcatacgatttaactcatgcccttagccagagcgcggggcgcattaaatatggctcggagtcgttgaaggttgaaaaagcgcgggtagcgtattactacccagatgtattcaacgcgctgacgctgggaagcgttacccgcaaagccgagtttgtgaagcgcataacggcccacgttgcggaagtggatagcgccatcgctcactaccggaaaacaagataa

SEQ ID NO: 149212 - DNA, 411 bp, Enterobacter cloacae
atggttagtttgttttatgccgcaaggggattatggcgcattgttgcaaactttattcgtgaagccgtccgtagttcgctacttgccgttatgcacatggttagtgtccatatccccgtactcatttttttagctgtgttcgtgttggcattcagtggttttgggcttctggtgatcaaagtattagctatcgtgttgcaccctgtaacgcaggggccaatagtgggaagtattgcaaacgtgctagatgctctgaatcaggctctttcgccaatggtatattttaaaattgccgtacctgtcttttttgtggtggtccttgcatcactgtttggctcggttagagtcaactggaaaaagatagtgaccagatggcagaggctggttgaaatcgggaaagataagcgttga

SEQ ID NO: 149213 - DNA, 576 bp, Enterobacter cloacae
atgcttatcggttatgcccgggtttcgacacaggaacaggatactcaggctcagatatcagcactaaagtcagccgggtgtgaactgattttccaggaaaaagcttcgggagggcgatgggatcgacccgaactacaacgtcttttacagcaactgcgcaaagatgatcaggttattgtatggaaactggatcgcctttcccgttcgctgaaggatttattgctgacgctggagaagattgaaaacacgggagctgattttcgcagcattaccgaaaatattgacacatccactccggcgggcaggatgatgatgcagatcgttggctcctttgctgaatttgaacgcgccatgcttcgtgagcggacaaagagcgggcttgcggcggcacgccaggatggccgggttggtgggcgacgccctaagttaaccccccaacagcaaaaagagattgtctcgctcgtcacatcggggcaaaaaacgggcgctgatgctgcacgtttgttccgtgttcatccttccaccgtggtgcggcttcttgccagacaccggatgactgagatcggacagacataa

SEQ ID NO: 149214 - DNA, 666 bp, Enterobacter cloacae
ttgatcggaactagttttagcccctcatcgatattttatttgatagatcaactgtcaaacctgagaactaaatctgtgcaactatctcaattgggaccattttatcaatatatccctaatgttgatttgattctttgtacggatatggatacagaaccagctgattttgttctttcttccaaagacaaacttatctatgtacacataaaatgcggtgccgcaggaaaacctgaatcttcagcaggttcgatttgcgaagtcggtagccaagcgataaaaaacatacattacttgattagtaatgataaaaatttacaatttgccaatttaactaggctgagaaatccttggccaaaattaggaggtaataagcataatatagaattagacagtagaataagattgtttgagggaactttcaatattaatcacgacataaatgatgtcttagaaaagataaacaaacgaagagccagttcattagtaagaaaagaaatatggatcgttgttggtaacggattttcattgagtcattttaagtcacaatttaatccttcagtagtgaaaaaatcacaagaatcaatgcaatcatatcaacttatagactcatggctattacaatccaaaagtcttggtatagatcttaaattttttgtttctccataa

SEQ ID NO: 149215 - DNA, 168 bp, Enterobacter cloacae
atgcgcaaagcacgattcaccgaacaccagaccatcattattctgaattccgtcgaagctcgacgcaccgttaaggatctctgtcgcgaaatttcttatggagaaacaaaaaatttaagatctataccaagacttttggattgtaatagccatgagtctataagttga

SEQ ID NO: 149216 - DNA, 6066 bp, Enterobacter cloacae
atgactttaaatgaaaagcccgattcatcaatgaagattgagaaaacaaaaaccttgcccccagcagagggcgagcgccgggcaatgcgtggctatatgggccaatatgaaagagccggtgcagccatttatgctgaattagagcgtgggcaattggagtggataggcgtggcggaccgcagtgcgggtatcgctgatgatttagtacttggatttaatggccttatcgttgggcaccagttcaaaacgtcccgtttcccaggtacatttacagtacagacactcttagtaggggctgatggtctgcttaagccattagtttgcgcctggcaaaatctttgtagtgctaacccaacgtctcacgtagaaattcgtttagttgtcaacgactatccatcagtaaacgacgcccccggaatggaagctccagctcacagtgctgccttccttgatgagtttgaacattttcccaaacgcacgcttgaggaatggcgctacagtaactggggcggtttagtcgaaatattgtttcaacattcttgcctaggtggcgatgatttcgagagattttttcatgcgttgcgcataattcatggctcagcagcagattttatacaatttcataaactcagtgcagaacaagcgagactggcgtctgatatagcaaaaatattacctcagttggtctccgataaacgagatagggaccgatggtcctgtgaagaactattaaatgaactagggtggaaagatccgaccaaaacacgccacgtacatcgctttcccatcggtgctcacgtccaacgcaaccgcgatacggaactacaacttctccagacgatacgcaacacaatccagggctatgtggcattgattgggcctccaggttcggggaaatcgaccttgctacagacaaccctagctaccgaatataacactcgggtcgtgcgctatctggctttcataccgggagctgcgcaaggtgtaggacgcggggaagctgatgatttcttcgaagacatttctgcccagttacgcagcagcgggctgcctgggcttcgccttcgagacagcagccaatttgaaaggcgcgaacaattcggtgaactgctcaaacaagctggcgagcgttatcaacgtgatacagtaagaaccatcattattgttgatgggctggatcatatcccccgcgaagaactaccagcccattcgctgttaggcgaattgccgctgcctgcagccatccctttgggcgtgacatttatacttggtacccagcgactggaactcaggcatctcaaacccgcagtacaggaacaggctgggcatccggatcgtctcgtaacaatgcatccacttgagagagtggcggtcgccaggatggcagacgttttgggtcttgattcaaccatttcgcgtgtaaaactttatgaacttagccgcggtcatccgctggcggccaattatctcattaaggcactgttatcggcagatgaacaggacacatcatgcatcctcgccggagggatggaatttaatggcgatattgaatcagtttacgcatccgcctggagagaaatcgcaaacgaccctgatgttatgcatgttctgggtttcattgcccgtatcgaagctccgatgccgctgaaattgctggcaacaatcgtagatgctcaggcgatagagcgtaccttaaagaccgtccggcatttactcaaggaaacctcaaaggggtggactgtattccataacagcttccgtctatttgtgctctccaaaccaaagataacactgggcagtatagatgaaacctattcacaacatatttatcgtgaattagctgaactatctcgtcatgcaccagagcattcattacagtcctggctaacactgcgctatctcgcccggtcaggagagcgtgatgaacttctggtgctcgcaacgccagcatattttcgacaccagtttgcacatggacgttcctgttcagagattgattcggacatccacttggctctgattgctgcacgttccacgtatgatggtgtaattgccacacggttgctactttgccgtgaagagatatccagacgaactcaagcactggagtatgctaatgaacttccgcgcgcgatgttaaaagttggcgatattgatgcggcgatctctttcgtccaggactttcccaatgcgggctatgaagttgttgacctgcttttggaacagggtgattttgaccgcgcgaaagaactgtttgagcaccttgagccattgtctcacttgcatacccccagattcgagcactatggggactcgcataatctacaagaattcaaaaaatgggcaaaacgagtttttcacttccgcgactctgagcaaattaagcaggcaatagactatttgaccgttgaggggttaaaacacgccacaagtgtatcaacagatgaaaatattacctctattcgcgaacagttaaagtggacagtggtcgaggcaattgttaactggcaagcagacgttaatattcaggatacctgcaatcagtatggcattcatgagcaagagataccggttttgatgactcaggctggatttactgctagagacagaggaaataatatcttagcattggaattattcaagactgccatggcattgtctgattttaatgatgtttctaatggcgggcgaagatcgattgcattattttatgccacctcgggttgcaccgatctggcttcaatattattcgaaaacctttttgcacctgcaatttcgatgggagacaatgaattagaatcaacaaaagcactgactcttgcagccatggaacatgcgcaactttgcgttttgctcggcaaatccctgcccgacgtagtcacctccacacacgctatcttacgaccgctgcagacacatgcttcagaaacgggacgcttgttggggctgtccataataaatgcatcatgcattccttctggaaatattcaaatggtctgtcgcatggtgatgagatatgtaatgcaactcaatagccattctggaaacgatacctatcaggctcaattggcattgacagctacatcaccactgatttgtacattaattaaaatttctgcgctgcgtggtaaggtcgaatataattcagtactaaatgaaattgataatgtaatgcctgctttaatattaaaaggcaatacactactccggcgtgaaatagcattggcaatgtatcaggctgacggtgaccgtgaaagggcggccgccagacttgagcatatggtaaacgagttggtagaaaatacacctagcgaacaactcgagaccctgtcagttctggcaaacagctttgctgcaattggtgatgttgaccgggcactaaacttacttgcttcgatacatgaccactgtttaggctacgctctggcagcgcgtaaggaccctttatactctgtctggaaagacatattgattttggccaatgcggcagacccagaacaccgtgctcaacgaataggtcagttgatacgacaggttgatggtatgaaggaaaccgagggagcatctgccgcatatcgtttgacagaagtgttaatcaatgaagcaatgcgtatgaatgcgcacagtggttataccgtggcacagaaactcagcaactgggggctgattccatggccaaatcaggtaaatgaactggtaattggtatgctagaacgccgtcctgaaatggtgtttctctgtacaccaatttggtgcgggctatgccttccattctacattgaaccctattatcgtgaccctacacatgtaggcaattatattgacgttgctgcaaatgcagcggggccttcatcgattgccaaactggtatcaattctattaccggcaatccaggttcatagtcgagctcacgagcgactcacactattaaatcgcctgagcaaggcggcattgagacacggttataccgataaccaacttgataatgccattactcgatggacttcagaggcccccgaagcccgccgctcctacacgccacaaaagtacgacgaggcttcaacccttgacgaacttcaacaggcatttgaatcaaatgattcagaacctgagtatcatgcgccttatcgtttttgtgagcttgcaaagtccgccgcattagacaaggtggtgaaaatgtatgagcgctggcattgcctgcagtcggatgcacgttgtcgttttttggttgcagagcggctagttaatgcgggggacactacgttagccagaaaattagttgatgattacgataccagtagtgaccgggagatgtcatggagccaatggttaggaggaaatcgattccgtctcttccgcgcgcgtaagctactcgatggcgcagcaattcatcatgaagcatatgaagacttcatcagttcaattgtggcggggaaagaaagcaccatgtcgttgctaacagatatggccgacattcttcctgtgatctgtgagtcgccagactggcccgccgtttggtctatcttagcagagcagatgtctttcactcgcgaacaccgtattggtgaaattttcgaatttgagaatgaaaatataaccgacgaagagttactcgcggaattgctccatttttcattacgattgcctatcaccgaagctcgacaacatgcagagaaaactgcactaattctggcggaacattcaacaggagggcaaatcgtatttgagcacactatcacacgactcctgactggcccccttgatgaaccactccaggcattgcaagttttgcttttgctaaaacagaaccactttgcagctgaaattggtgatttagtctctggccttacgaatcatcgtgatatagctgttgctgaagctgcgtgcttgctagcacaatattggcagctacctatatcgattgattttcatccgttgccgttgacatatcgattggcactcgacggagaccctgatcatgaacatgctctgttagatcctgtgagtggggcgatgcgtattgaagtcgacttaggatggacgcaaatgcttcgtcccgttgcaaggagacttgcagagctggctgattgtgaggaaatgaacatacgccagcgtgccgcaacgtttatccagcaatggggagggctggcagcctttggccctggagcaacaaaaaagaccgaatctcagttacgcacactctcaatgcaaatctcctatcttaagccccatgcttacattggcatactggcacttcgtcatgtcgctggagagctgagcttggcaggcttgctctcaccaagggataaaccatcgctactggaacaattggatgcagcacttccgccagcacctcgccctgaaatgcaaatccgaccaactggcattaggcgaccgctgaaagtcaaggatgccccgtggagtgaagctgaagaaatgtggacaaatttggttgaagaggatgtaaaaccctggagagatcgtgccgatgaattcgtaatagccgaggtttcacaattcaaaatgcatgatacccggcgagctgaataccaggtctatcgaattagcgcacctcaaattcatatttctgatgccaaattcatggcatggtatcaaagtttgcccgcagtcgtttggctgggtcaaatgatcccactcgacgaagacctcgcaccgacaatagtcagacgtgtagtcagttccatcgggacaatgtcttcgccgggatatgccattgcattatgccctaatatccagatgcatctgggatggcatgaatgcagcgagatgcctaatatttataccgaccagaattcaaaagtcgtagcaagattagtgaattggcgagacgccggaccagttgatattgatgatgattatatatggggggaaggttgctatctgacgctttccaaagcaggcttgatacaagtccagactctgtttggtgagctcaccgtacgtaatttcgcaagcagatctgttcggcaattacgacaaggcgaagcgcaaatgataaagacagctcagaatcttttcagtactactttcgactcgctggattaa

SEQ ID NO: 149217 - DNA, 2682 bp, Enterobacter cloacae; identical to SEQ ID NO: 105740

SEQ ID NO: 149218 - DNA, 555 bp, Enterobacter cloacae
  misc_feature (357)..(366): n is a, c, g, or t
atgaacatcaaaagattggtactcagtgctctggttgtaggtacatcctcatatcttacggggtgctccatcggtagttccgaatccgaatgtccaggcattgaaaagggcgttatctgtaaaggtcctcgcgaagttatggagttaactaataatcgagatgatctgtctgcactggcgggggaagagtcggaatcgggaaaggagaaatcggctgtcaatgacagccgttatccaactgaaattagccctccaggggaagtcaaatatccacagtctactacccttaaaaatcagcctgtggcttattcaaaaaccgaaattaagccagttggtcagttacctgtcatgtacgannnnnnnnnnctgcggaagtcgttaaacaaacaagctatccggtttctgctggaaatgccccacgctacgttgcacctaattctgatatcagccctggtaaggatatgtactctctttacaatggccagcccgttaacccgactctcaaccctgggcagatccagcaataccgttcgcaaggttataaacaagctgtag

SEQ ID NO: 149219 - DNA, 1254 bp, Enterobacter cloacae
ttgacgcttactgtcgttgagcatgatcttgacctgatgcgacgggcgcaatggctggttgatgtgggacccgctgcaggagaacagggcggtcatattctctacagtggtgtacctgaaggtctgaaagctattgctgaatccagaacggcgcggtatttgtttgatgaaatcaggccaccacaatcatacgcccgacagccagcaggatggttaaaattacaggatattcaccgtcacaacctgaagggactggacgcctgtattcctctgggggtactgaccgctgttacaggtatttcgggttccggaaagtctagtctgattgctcaggccttacctgagctggtgctttcctcgcttggccatgaaccagaagacgtgttatccgagggcagtgatgctgagggaccaaccgttactgagaaaacttacggtacgctgacaggcgacaccggactgatcaaacgtctggtgcaggttgaccagaaaccgataggccggacaccgcgttctaacctggcgacatataccggactgtttgaccatattcgtaagctctttgccggaacacctgctgctaaaaactatcattatgatgccggacagttttctttcaatgtggcaaaaggtcgctgtgaaacctgtgagggtgaagggttcgtcagcgttgaactcttgtttatgcccagtgtgtatgccccttgtccgacatgtcatggcgcacgctataacccggatacgctcagggttcgctggaaggagcgaaacattgcggaagtcttgcagatgacagtggatgaagcctgcagcttctttgctgatgtagaacccgtggcgcgacctctgcgcctgctgggcgaaatcggtctgggatatctgcgtctgggtcaaccagccactgagttatccggaggagaagctcaacggataaagctggcaaccgaactgcaacgtagccaacgtggccatacgctgtatgttctggatgaaccgaccaccggactccatgcgtcagacgccgaccgtctgcttgtgcagttgcagcgtcttgttgagacagggaataccgtagttgtgattgaacacgatatgcgtgcagtcgtgcaggctgactgggttatggacattggtcccggagcaggtcatgagggaggcaacctggttgcagaaggtacacccgcccaggtatcacaggtttgtgaaagccgcacggcaccgtttattgcccgggagttgtcacggaactggtaa

SEQ ID NO: 149220 - DNA, 213 bp, Enterobacter cloacae
atgacgtccaacatcatggccctgggcacgcagggctgcactcaaacgacgactgccataggtgcgaccactggcaagaaaaaccgcctgagcatgcacgctgtcctggcaaataggtttgggtgtattgactctgcgacgcgctgcgtagtaaccagagcgactgatgtccaacgcctgacagacctgcttgatcggggcctgcttcgctaa

SEQ ID NO: 149221 - DNA, 510 bp, Enterobacter cloacae
gtgagaatcgaactgagaacgcccgagctgaatgatgcagctttagtacaaaatagtgctttgggagccttttttttatgggtattttgtcggtattatcaacaatacaagaaggagtctccaactgttactatcagttttcttgttttaccgcttattttacataaagctactgttacactaatttgtagcacccaaaaggcctcaggtatacatctctttgcagggaaaatacagaaaaaaaaggaagcaatatttactattcatgaaagaacgcttcagttgcgatcacttacatttgaatctttaagtgttgctgaagacgctggattaatagaaattgacgttaaaacagccacattaagggttagatgtgatggttcagaggttgatttaccattgctctctgacgagttgaaaaaaattcatgcttgctgtgataaattagcattttggttctctgaagtttcggatcaacaaattgcgaaaacattgatggtggatttctga

SEQ ID NO: 149222 - DNA, 885 bp, Enterobacter cloacae
  misc_feature (870)..(879): n is a, c, g, or t
atgagtataggaaaatcctcccaaccaaagtccagcgcgcctggccaatatttgggatttgcgcttcaacctgttcgcctctgctaccatcttctcaactgttctgatgatgcatgtgtatcgctcgagtatcttgacgacgtagccgtacattatcctgatggccggattataatggagcagactaaaagtgctttaacacataaccctttatcagactggtcggaggatttctggaagacaatttctaactggatcgacatagtgacagtaaatgatatatgtcttagcaaagtaagttttcgctactatgttacacctgcaaaaaatataggtacaatttgttcgctatttcataattccaaaaatgatgacgatattaaaaaattaatgttttttttgcagagtgaactgaaaaaattaaaatcagaacctgcatgtatgaaatatatttctcggtttcttaatgctacacaagaacaacaaaaagcaataattgcaaatttagttatagagaatgacagaatagatccgcttgattcaattcgtaagtgtttaaaacctacaattgcagaagaagtaattgaactaacttgccggtatgcgataggaatggcaaaagaaaaagcggatggacttatccgtaataaacaaaatgcagttatatctgtgcaggaatttagaagggtgtttataaattttgtacagaaaaataatattcctggataccttcagccactcagtacagaaattaataattctgatgctgaagcattgctcaaacgggcccccacgtttataaaacagctaaaactgatagaacttcgtcaagatcgtcagcttagggctgtcagtgatctattaaagacnnnnnnnnnncgctaa

SEQ ID NO: 149223 - DNA, 858 bp, Enterobacter cloacae
ttgaacgattccgctccgctcataaagccacgtcacaccttacaggccgtgcgtatcccttcttcagaagttcaggatttaggttttacttcattttatagctggctcaatagcttaggatatgacacgactaatcatagtaatcagcgagctgattgggctagaagtggtggctggcacttaaaggcatgtaagaataaggtcagtaaccaagaagatttctggttaatttcatttgatggaaaaggcggtgttttactttctgaaaagtcccaacaagactaccgaagtgcttatcgtcgcttgattaaagagggctatcagcccgcacgaatcgaagcaatgacgagaggagagctttactcgacttacaacgaggttagaggatcagcaggaagccaccctcacttaaaaccgagtcaggttgatcaagctgatttcgagctacatcccgatcagatacgggatatggtgaatagctcaatgattaagacctataacacatatagtcgcttcggccaggctcgcttccgtaatgcagtattgctgaattccttgaatgtgtgcgctgtaactggtgttgagtatcgtgccgcattggatgctgcgcatatacacccgcatagtaatggtggtgcgatgaaggtagctaatgggattgctcttcgaaaagatcttcatgctgtttttgatcgcggtgatatggcagtcaacccggaaaccctcacgattcattttagtgagcgagcaattgatagctacctcgattttgaaggacacgtaattcaaacagtgctgtcacttgataaaattgccttggtcgctcgctgggaagagttctgttctcgtgtaaagtaa

SEQ ID NO: 149224 - DNA, 1170 bp, Enterobacter cloacae
atggaacagataaaagcccccggcatcttggcaggcaatattggtgaaccgataaaactagagaaggttgaaccccttatcggcttttcctctgcctatgcagctaaaggagatatgtgtcagctttggacgaaacacggattcacatctgatcaggatgtttttcatcaaatagctaaaagcttcatttcaacgcttgagcattacactcaaagagaagggaaattcgtaaagctgtctaactgtgaaatgcttcttttcattattcatggggatttatctgctgagatttggaatgataaagccgcagtggctagccgtattattatgaaaaagcaaattcagccaggaatggttgtttttgaaaaggaagttgctgatatattagatgtgcacttcccacttgtcgagtttaagcaagatgataaagtcatatgcttgtttagagaggggtggcgctttggtctatattttgatttaaatcgagatgacgatttttccgtggaggatatgaataaaaatcttggtgttttgcaccgagctgtgaagtataaaaatatatacgactcaatgttcgatcctgaaactttatcttttattatcgctcgtggttggtttccttttgctgagttgatcaacgacggttttgatatactccagtatcaagagaaaaatgatgaagtgtttgataaatcagcaagccatcttatctctctatttgataaggatagagtggattcaatacgcagtcgttggaacagcaaaatttacctaaatgagaagatgcctatattagatgcggcctttagctcttattattatggaaactatattgcggcaataaaaattatacttactgaaattgaaggcgttctacaatctttttatataaaagcgaacttaaaaaaaggtagcagctcagccttaactgatttcgccaaagatacggcgattagaaaattgcaaagtaaaaatacgttgctctttcccgaagagtttttgctttatcttaaacaaaacacatattgtagctttgatttgatgacagggactgccagcgccaattccagacactctgttggtcatggtgccgcagcagcaaaaacttatacgaaagagaaagcgatccaagccatattaacttttgatcaaatcgttttttatttgtaa

SEQ ID NO: 149225 - DNA, 333 bp, Enterobacter cloacae
ttgagaaccgtcgaaatactgcaatacaccttacgcaaaggcagcggtgccacttttcacgccatcatgcaggaaatcagcgttccccttcaccaacgccacgggatcgatgttgtttcgtttggcaactcgcttcatgacccggattactactacctcattcgcacctttgacagcgctgaaaaaatggctgcggtgctcaatgctttttatgcaagtgatgactggcgcagcggcccacgcgaagacattattcgcagcatcgaaaccagcattaaaacagtgatgaatctaccatcagaaagcgtggaaggtctgcggttgcaatcatag

SEQ ID NO: 149226 - DNA, 651 bp, Enterobacter cloacae
atgaaagagttagctcggctggagagtccggagattctggaccagtatacagccggtcaaaatgactggatggagattgatcagtctgcggtatggccgaaattaactgaaatgcagggtgagttttgtgcttattgtgagtgccggttgaatagacgtcatattgagcatttcaggccaaggggaaaatttcctgctctgacgtttatctggagtaacctgtttggttcttgtggcgattccaaaaaaagtggcgtgtggtcacgttgcggtatatataaggacaatggtgctggcgcctacaatgctgatgatctaataaaacctgatgaagaaaaccctgacgactacctgctatttctcactaccggagaggttgtaccagctatcggactcacggggagagggcttaaaaaagcgcaagaaactatccgtgtttttaacctgaacggtgacataaagttgcttggtagtcgcagaactgcagtgcaagcaatcatgcctaatgtcgaatatttttattctctgctcgaagagtttgaagaagatgactggaatgaaatgctcagagatgagctcgaaaagatagagtctgatgaattcaaaacggcgctaaaacatgcatggacttccaaccaagagttcgcatag

SEQ ID NO: 149227 - DNA, 1653 bp, Enterobacter cloacae
atgaccaaacaatacgaaagaaaagcaaagggtggaaatttactgtcagcgttcgaactttaccaacgtaataatgataatgtgcctggtctgggtgaaatgttggtggatgagtggttcgaaacctgtagggattacattcaggatggacacgttgatgagtcaggaacgtttcgtccagataatgcgttctatcttcgccgcctgacgctaaaggactttcgccgtttctctcttcttgaaatcaaattcgaagaagatctgacagtcattattggcaacaatggtaaaggtaagacaagcatcttatatgcgatcgcaaaaacgctgagttggttcgtcgcgaacatcctgaaggaaggtggtagtggacaaaggttaagcgaactgactgacataaaaaatgacgctgaaaacaggtatgccgatgtcagcagcactttcttctttggcaaaggacttaagagtgtgccgatcagattgtcacgctcagcccttggtacagcagaaaggcgggacagcgaggttaagcctgcaagggatttagctgatatatggcgagtcatcaatgaggcgaagacgatcaacttgccgacgtttgctctttacaacgttgagcgatcgcaaccctttaaccgcaatacaaaagataatgccggacgcagagaagagcgttttgatgcctatagtcaagcactgggcggcgcaggtcgtttcgatcatttcgttgagtggtacatttacctgcataagcgtaccatatcagatatctcaagttcaattaaagaacttgaacaacaagttaatgacttacagcgttccgttgatggcggtatggtttcggtaaaatcacttctggaacagatgaagctaaagcttagtgaagcttcagaaagaaacgatgctgcggtttcctcgaaaatgataactgagtctgttcaaaaaagtgttgttgagaaatcaatctgctcggttgtacctagtatcagtaagatatgggttgaaatgacaacgggttctgatttagtcaaagttaccaatgatgggcatgatgttactattgaccaattgtctgacgggcagcgtgtatttctgtcgttggtggctgatcttgcgcgaagaatggtcatgcttaatcccctactggaaaatccattagagggacgtggcattgttttaattgatgaaatagaacttcaccttcatcctaagtggcagcaggaagttatcctgaacctgcgcagtgcattccctaacattcaatttattattacaacacacagtcccattgttctttctactattgagaaacgctgtattcgtgagtttgatcccaacgatgatggcaaccaatcattccttgattctcccgatatgcaaacaaagggaagtgagaatgctcaaattcttgagcaggtaatgaacgtacatcctacaccgcctggtattgcggaatctcattggttaggtgactttgaactattgcttttagataattcgggagaactcgataaccagtctcaagagctttacgaccaaataaagacgcactttggcatcgatagtgctgagttgaagaaagcagacagccttattcgcattaataagatgaagaataaaataaacaagataagggccgagaagggaaaatag

SEQ ID NO: 149228 - DNA, 936 bp, Enterobacter cloacae
atgtctgttattcgtagattagctgcggttttacgtcaaagtgactctggtatcagcgcctttcttgtgaccgccccgagaaagtacaaagtttacaaaatccctaagcgtacgacggggtttagagtcattgcccagcctgccaaagggctaaaagatatccagcgagcctttgttcagctctataacttccctgttcatgatgcttcaatggcctatatgaaaggaaagggaattcgtgataatgctgcagcacacgctggcaaccagtatctcctgaaggcggatctggaggatttttttaactcaattacaccagcaattttttggcggtgcattgaaatgtcatctgcgctgacacctcaatttgaaccccaagataagttttttattgaaaagatccttttctggcaaccgataaagcatcgcaaaaccaaattgatattgagtgttggtgccccttcttcaccaatcatatccaatttctgtatgtatgagttcgataatcgaattcatgcggcttgcaataagctggagataacatacacacgttatgcagatgacctcacattctcgtgtaatatccctaatgtactgaaagctgttccttcaacacttgaggcgttactgaaggatttattcggaagcgagctcagacttaatcacagcaaaacggttttctcatcaaaagcacataaccggcatgtgactggcgtaacaataaataatgaagagaaattgtcactagggcgcgatagaaaaagatttatcaaacacctgattaaccagtacaagtatgggctccttgataatgaggataaagcttatctgaccgggctgttagcatttgccagccatatcgaacctgggttcatcacacggatgaacgaaaaatactcattagaactcatggagcgcctgagaggacagagatga

SEQ ID NO: 149229 - DNA, 669 bp, Enterobacter cloacae
atgtttgagtttcaatttagttattttgtcagagaaagattcgttgatagttcccctgaaagtatctttccattaattacagcctttgaaaataactttctcccaagttatgccgatgaggtatcgcctaatggcgttcgaaaagtaattagaatggtaggtattaatgattttgataatatcgctgttttattttcctctgaagctattaatataaatatgttgtatagagatgtaaggcctagtaaagaacaagtcatcgctaaactggattttatagtaagtgctttatcaaaaattaaatcgaatacaaaagcgtggcgtattgcttctgttgttacttctattgagaaggcgactcaatcatacaattctaaaatgtacagtaaatatcttagtgatggtgcttccgatgtttgttttgaatggaacgttcgtcaagcaaaaaaaacgcagataaattctgaaatattgaatgttgttacttctttgagccgaggcccggttatgaactcagctaacccaaccgaaagttttgacgctgttgtagtccagttggatgtcaacaccgctccagaaaacgcatcagaaaggttcgaggtttcaaatggtttggttgcgcaactcgttgatatggctgttgaaaatattgatatagtattggcttga

SEQ ID NO: 149230 - DNA, 642 bp, Enterobacter cloacae
atggctcatatctatacaaataaaaactgggttcaagacaatatcgccaaagtagattcatactatgaccaggtggttttgaattacttaaataaagtttatataaaagattatgagagtaataaatcatcgactggggttaatacatatgttgaattaactgacaataatagtcgtggtatgaacttaaagtcagaggactcctatgagttagataaaataatgtcctttgtttatactatgttagtgtctgaggattttgggtatggagatactccagaattaaaatatgttgtagaaaatatatttaggcgaagtaaatctgaagctcaaatggcatttataaacatggcaactagacgggtttatacttctgatagtgatatcattgagaagttttttgcacttctaatgtctttggaagaacacgatattgataatattgcgcttcctattattcagatgtttctttctcataaggatgtcagtgcagctgagggatctctatcacttttagataaatatggtaaggatagagatgcattagatgtagcaaaacaaatcagggattttgagtacgattttctcaatgattataaagaaaaagttatttgcaacctgaagaaatatgctgaagagtga

SEQ ID NO: 149231 - DNA, 552 bp, Enterobacter cloacae
atggctatttatattaggaaggtgacaaaatctaaatgggattggaaaaacccggttagtcatacggtgaatgccagtaccttaggtaccgatggggttaccaattgctgtaagacttcaggtaataccttgtccatatggaaaatcgatagtgaaactttagctagtgacaatgataaaaaaattgtcgctaccttagccacgaacggtggaagcttatctccgattgattatgttatttttagtgatgatgatattaaatcatgtggtttagctgttgatcagaaagacggggaatctttgatatctgatgttaaatcaatgcattacaatatagtcggtttggatatgaatagtgttagcgcactaggattaatgattaataggaaagtttctggtgtaagaaatggaaatgaaatcattcagaaaacccagttaaaaaaaatagaccttggaagtataaagtcctgtataaatcaatttataccaaaaactagtgaggcaggaaacgcattaatattaaagagcggtttcagcaaagtgtatgaatga

SEQ ID NO: 149232 - DNA, 312 bp, Enterobacter cloacae
atgaaaaaacaccattggcagcagccactggtaatgggttcgcagaacaaagaagtgttgaagtgtgaggcaaattacagctacactgttagaacgaattcggtttctgtgctctgcgaaagccagttaccacggttcagaaacttgccggttaatgaaccctcgaaaaaccaccttgccgggtggttttttcgtttacagagcaggagattacgactgattgccaaggatctcaagaagatcctttatggattattgtttgatccactgtcgtacgtaacattaggcgctatgaaaggtggaacgctgtag

SEQ ID NO: 149233 - DNA, 165 bp, Enterobacter cloacae
atgaatacgaaattacaggcatcgttagtcaaggtgcctcagattacccttacgttctggatagtcaaaatagcagtaaccactttgggtgagaccggtggggatgctgtttcaatgtccatggggataggctacgccggcagggtaatgactccaacttattga

SEQ ID NO: 149234 - DNA, 369 bp, Enterobacter cloacae
atgaaacgcacaattttttttgccctttctacatttttactggcaatgactgccagctctgtatacgccagtaccgaacacaccggtatgtctgacttacgggttcagaaaaccgctaatgccagctactgtaatccaggttcacatcgttgcgaggccccttttactattggccgggataatattgcaaaaccagacgggtcagataaaaactactgtaatccgggatcacatcgttgcgaggcccctttttctactggccgggataatattgccaagccagacggaacagacaaaaactactgtaaccctaactccagaaaatgtaatgcacctttcaccaccggacatgataatattaatcagtaa

SEQ ID NO: 149235 - DNA, 168 bp, Enterobacter cloacae
atgaacataaagacgttaaaaaatgatacggtggaaaccgtgtcatttctggtgaaggctctgtttttcgttgtaagaaagatatatctgaagccggcagtcgcggtatgtccgctgccgcagacactggcggagtgccggatatacgcagcacggagtatctgctaa

SEQ ID NO: 149236 - DNA, 1368 bp, Enterobacter cloacae
atggctggtttcaaaaaacggatgaaaacctccgttcagttacggttatcactggcgctgggtatcgctatcctgcttaccgccgttatttccggagggattaccttttatctggcgctggatgaagccagggagcttcaggacgataccttaaaacagatagcttacgtcacgaagtcccccggacataacgcgctgcccgaaataaaggggcaaaagagggccgacgaggacagcgatggcaaaatactggtggaatatctcaccgtctcgggtacgcaaaacgatgacacaggcatcacctttcatttgcccgcgcccgtgagggaaggttttcagaacgccaccatcaccggtgtacaatatcgggttcttgttcaccgtctgacgccggaacagtttgtgattgttggtcagcagaccgaggtcagggatgaaatcgcctttgcaagcgcattacgcacgctgatcccatttatcctgcttttacctgtgctgctgctggtcaccaccgacctgataaaaaaatccttccggccagtgctgaatcttgctgcaggagtataccggcgagatgaacgggatttaacaccattgagggatgataacataccggacgagattcgccctttcgtggaaagtattaacagacttttgcacaaagtgaacaacacaatacaggcacaaaaacgcttcattgccgatgccgcgcacgaattacgcacccccctgacggccctgtccctccaggctgagcggttatcgggttcagacatgtcggcagaggcgcgtgagcgtttagccgctctgaggctggggttgacgcgggaaaaaaatttgcttgagcagctattatctctcgccagagagcaacagcctcttcagacgcaagggacagaagcggtatcactcaatgaagtgtttcggcaggttatagagaccctgctccctctggcactggaaaagggtattgatatcggtgtggtggaaaccccttaccaggcagagtcgcaggtgattacggaaaaaaacaccctgtacacggcgctcaaaaatctggtcgaaaacgcgattcactatatccctgaaaacgggcagattgacctgcggttacagtttattgataacagcgcggtgattgatgtcgaggataacgggccgggaattgcagcggaacaaagagaacgagtatttgacgcattctaccggcctgcaggcaccgaaaaacctggctcagggttgggcttgtctattgtaaaagcatgcgtgcaccggctgggaggaacaatcattcttgcgccatcctcacactttccatccgggttgagggcaaggataatcctgccggttgaaagccactccgggtaa

SEQ ID NO: 149237 - DNA, 639 bp, Enterobacter cloacae
atggttggagaggtcgtcaccagctcgctgaaagacaacgcctgggcggtagactgggttaaaagcggcaatgatgcctgtgtcgggtttagcacctggcaatatgatgtgattttgcttgacctagggttgcctggcaaagacggcctgaccgtgctggccgaaatccgccaaaaagcgcttccggtgccggtgctcattctgaccgctcgcgacgcgctcgaagacaggttaaaagggctcgacggcggtgcggacgattatattctcaaaccatttgaaatgagcgagctactggcccggatccgcgcagtcattcgaagaaacactggcaatggaaaccctgtcctgagtaatggcgtactgacgctggatccggtcactcatgaagccagcatttccgaaacccagcaaaagtttttgctctcgaaccgcgaatacgccctgttggaagctctgatgctgcgtccaggaggaatactttcccgcagcgcactggaagaccgaatttatggctggggtgatgaagtcgaaagtaatgccatcgaatttctgatccatgcgttaagaaagaagctcgggcgggacgcgattaaaaatgtcaggggagtcggatggctggtttcaaaaaacggatga

SEQ ID NO: 149238 - DNA, 777 bp, Enterobacter cloacae
atgcgaccacaacaaaatacgtccccggctttcccgatgaataaagttcctgaagtcacactctttttctggctgataaaaatgatgtccactaccgtgggtgaaacagcggcagacttcctgaatatggatctcaactgggggctgactaatacctctctgcttaccggcatattgtttgccgtggtactgacctttcagttacgtgcgaatcgctatattccggctctttactggtcaactgtactattaatcagcgtgttcggaacgctgatcactgacaacatgaccgaccactttggagtgccgctcgcgctgtcaacatcggtatttggcggattgctggttctgacattcggactctggtacgcgaaggaaaaaaccttatctattcacagcatcaacagcctgaagcgggaaacgtattactggatcgccattttgttcaccttctcgctgggaactgccgcaggagactgggcagcggaaagtctggggcttggttatctgaatgcagccattgtgtttggtgcgctgattgcgctgaccgcggtcagtcgctatctgttcaaagcgaacagcgtactgtgtttctggattgcgtatattttaacccggcctctgggagcctcttgtggtgatttgttatctcaaccccttaccagcggtggtctggggcttggcacaacaggaaccagcattttgttcctgctgaccatcaccagtcttatcggttacctcacctataaaatgaaactcgaagaaatcaacagataa

SEQ ID NO: 149239 - DNA, 927 bp, Enterobacter cloacae; identical to SEQ ID NO: 11456

SEQ ID NO: 149240 - DNA, 348 bp, Enterobacter cloacae; identical to SEQ ID NO: 6026

SEQ ID NO: 149241 - DNA, 534 bp, Enterobacter cloacae
atgattatatccttccggcacctcaaaaccgtgaataatcagccatcgtgcattgccgttcaggctggtctcccaaaaataccccatttcgttaagatagcgctcatcattgggcagaagactgaactcacggcgcttggcaggggactcttcgccattgttcacatctttcggcgtaagtcgcagtttctctatcccgggcgtgcgcaaatcgatgacatcatcaatattcttctcaacttttggctgcccttcaactttgagaaagatatgccatgcctgattgggattcagccctgcccggataacagcatcccggatgacaacggtcggggtatcaaaagtaaattccttaccctgaacattcagcttccaagttgcctttctgctgatgaaatgctcaatcccatcaccatccagatcgataatctggtcattttgtatttcaagatcggcttcgtcttcacgttcaagaagaagttttttattgtcgtcaatgtttccgagcttacggacgttataaccagtgattaa

SEQ ID NO: 149242 - DNA, 471 bp, Enterobacter cloacae
  misc_feature (450)..(459): n is a, c, g, or t
atggaaagtatcgcgctatacaactgggctacaagtgttttgtcttctattacagaagatttgaatgatcattactataaagaaattaatggcagtctcgctttacaatttgaaactacagatattgtgaacgctagagctttagtttactcagagcgtgatgaaccaccaaagcatgctatatcaatcacatataaattaatccgatcattatatgatgatgctgctgcttttgtagattatgttcactcgggtaaagatgatgaagcttatgatatgtggtttaacgggcaaaccaactttaccactttaagagatgagtgggataaaactaattttactaaaaacatttttctagcaggtttgacatgggttttttttcatgagttaggacacttaactcagggccatttatttataaggaacaggtatagttccgatattaatgtnnnnnnnnnngaacaggtatag

SEQ ID NO: 149243 - DNA, 651 bp, Enterobacter cloacae
  misc_feature (5)..(14): n is a, c, g, or t
atgtnnnnnnnnnngaacaggtatagttccgatattaatgtaatgtctgaaattcacttaaataatttatcatcagacaataacgatgcatctgccatttggcacgcaacggaacttgcagccgattatttttccacatgcatgtgtgtagtagaaattgttcgacaacttgccaataatgaaaattgcgaattggcaatttgctttttgacatgtggtatatcattaatgttacatcgttttcaaggcgaaaaattttatgaggttcaaacagaaccagttggtacacatcctaggccattcgtaaggcttgaaatgatcgtacctttaatttttgaattactttctattacaaacacagatcaacgtcgtagttatgtgcttgcaggtggtgaatcggccaacagggttggactgttctggataagaaagactggaataatggagggtattcctgaacattaccttatcgaaggtacattgaaccggcctggagttgttgagtatttgaggcatattatttttatttgggatagcatttcatctgaaatctctgagatgttcacttttggcacaaaaaaaatgcttctcaacttcacgaatgtacttcggactgcaccagatttgaatgatgatacacaggaaaaataa

SEQ ID NO: 149244 - DNA, 297 bp, Enterobacter cloacae
atggatcgccagattcagcgtgagcatatagaacaacagattgatatgagcctcggtgacggcattaaagctgcgttcagacgctcgatcatgactacctccaacgcacatttctgccgtaagacgggttccctgatgttccagcaccgcataaagatctataccacgtcgtttcacctcaccaagtacatccacggaaggcgtttcgaaacacgcatcatactggtctataaactgctgataggctatgccggcattttcaaatcgctcatccctgatggcgtccagtatctgtga

SEQ ID NO: 149245 - DNA, 792 bp, Enterobacter cloacae
atgactactttaactgtcggccagtgcctcacctcttttaacaacgagtatgtagtaagcacggttaatctggctgacggcaaaatcagctataccatcctcggcctgaatgccccgaccagcgccccgctgctggaaacctccctgcgattttaccgggtgatcgacaagaccctttcactcgatgaactccgcgcccgccgtcaggttgtgcagaacgttaccgaccagcgcgaagcaagacaccaggcacaagaagccgcccgcattgctgcgaacgagcaggaaagcaataacccggataacgccggactgctgaccaccgacgcggaaagcaacaccaccaaccttgccgcaaaaaatatccgcatcctgctgaaaaagcattttccgggcgtgaagttttccgttcgcaaacgtgattacacctgcattaacgtttcctggacggatggccccactcgtgaggctgtagaggcgattgtggacaagtttcaggaaggtagctttaacggtatggaggatatttacgagtacaaccacagcgcgtttaaccgcgtttatggcggcgtacaatacctgttttgctcgcgtgatgtgagcgacgaactgatcgcggagtctatcgatctgcttcgccagaaatacggcgaaaccactatccccgcagatgtgacgctggaagcctacaaaagcggtgcgttaagcgggcgcgggcatgactgctttacctacgggttggcctccgaaatccgtacaaacgcactgaaggtggataaatccaagcgctga

SEQ ID NO: 149246 - DNA, 537 bp, Enterobacter cloacae
atgaacgaattccgccgactggccgcgaagatcgaccaacacatgcagcagcttgccgcccagggtgtcagcgaggcccatgccatcatcaatcgcatgatggggtacgggcctgacctgcacaggatttgggtcggcacatccgatcagcagctcatggcgctgtcccgcgagttcccagggttctaccgctacgcccgcatcatggaagaggcatccgaagccgagcgccgcaaggcttcgcggccctatgacggcatggccgagttctccgaacagcacaagcaaatgggcgcgcaactgctgaccacggcggccacgcttgagcgtggctaccaggcgtttcgtgcgagcggcagtctccaagacttccggcctcagctcgacgagctgggccgcctgcatcggcaatggctgtccgacctggaagccttcaaagactcgctgcgcacgcagggcgcagaacccaaggtgctggaatacgtgaacgaggctttcggccgcctggccgagcgcatcaagcagcttgccggttga

SEQ ID NO: 149247 - DNA, 396 bp, Enterobacter cloacae
atgaaggtcgcagtcgataccaacgtccttgtgcgtgcggttgtgcgtgacgatcccgcacaagcggacgttgccgccgcagtcttgaccgacgccgagttgatcgcggtcgcgctgccgtgcctatgcgaatttgtttgggtgctgctgcgtgtctacggcttccagcaagccgacgcggccagcgcgatccgggcactactggccgccgcgaatgtggaagtgaaccggcctgccgtggaggctggcttgctggtgctcgacgcgggcggagactttgccgatggcgtcattgcctacgaaggcaactggcttggcggggaaaccttcgtttccttcgataagaaggcggtggcacttctcacggcgcaagggcaatcaacgcgccttttgtga

SEQ ID NO: 149248 - DNA, 252 bp, Enterobacter cloacae
atgaccacattgaccgttaccgcacggggacaagtgacgtttcggaaggacgtactgcaacacctcggcatcaggccaggcgacaagatcgagctggacttgttgccagacggtcggggcgtgctcaaggcggcacggcccgcagggacgatagccagctttgtcggcctgctcgcgggcaagacgcagaaggttgccaccatcgaagaaatcaacgaggcggcggcgcaaggctgggcaggtaagcaatga

SEQ ID NO: 149249 - DNA, 408 bp, Enterobacter cloacae; identical to SEQ ID NO: 86679

SEQ ID NO: 149250 - DNA, 1524 bp, Enterobacter cloacae; identical to SEQ ID NO: 77500

SEQ ID NO: 149251 - DNA, 741 bp, Enterobacter cloacae
atgtttaatttaaccatcggtgaatcagcgtcgccagtttcccgcgaaaccgttgagcggacagcctattctttgggagttagtagttctacgttcactccattaccttataatgagctatcaaaaaaactaggatataaagcaagtttgctaatgctatgcctttcaaaaaaccctaatgtcagccttcctgcattaaaagggactgtagaattaatttctacactaactgaatatccagcgttcaaagttaactcgttaacaacatctaataatgcctatccagttttcacattggagacattggctgctaacggtatattttcaaacgatttggaattttctacaaatatctctcattgctttcgaattagtccagaattaaaagtaccaaagatatctctaggtttgaatgcaagaggatcgtatgaattagacttatccttggaattggtgattattaaagaattgattgaatactctgtagcaaaagtgatcgttgaatttgatggcccgatgcatcttaattcagataatgttcgtaatgataaactaagagattcttatgtccaaagtcaaggggctacggtttttcgtattcagagcgtgaacacacatgatctgaccaaaatccagcaaaccgagaaatcacatgagcaattgatggcacacattggaaatattaaagaacacttccgcaggagactattcgaatttttaaaaacgtttcataatagttga

SEQ ID NO: 149252 - DNA, 237 bp, Enterobacter cloacae
atgacgcgactgaccaatctgacgccggcagagaagcaatttcttgatgatgctgttgcagctgcagagcgtgcttccggcaagaaactcaaccagccgaaccgacatatcgtgctcaaccgggcaagagcgcagattgagtcgcagcggcacgccgaccggcagcgcgctctacgtgaggaagaacggcagcaggccgaatttacctggtcacgtccgcgatcgccgcgccggtga

SEQ ID NO: 149253 - DNA, 183 bp, Enterobacter cloacae
atgcttacatttattggtgtagtggtagtcgccgttattgcatttaaattatttatgcttttttttagttcatccgaatctgccgtcgaacgtgctacccgtaaatatatggagaacccgacgagagctaactataaaataatggtggctacacgcatgagaaatgagaagaaaagagggtga

SEQ ID NO: 149254 - DNA, 786 bp, Enterobacter cloacae
atgaatgtttacgattacttcaataaacaatcccagccttcgtacaagattgcagtgcttgacatgcctgaattacgtaaggaatttttcaagcatcacggaggccgtactgctgacaatgatagatctcaattcgaagaatatttcagaacattaatgaagatctaccgtgaccgtggctatttaattatggctttcgccattatggcgaatacggtcacttatgcttcagagcaggtcctaactaatagtgatgctgctgcgttaatggcaaaggcaaaggaaggtggcgtttcacccagtcagatctcgggtgtgttatcaaaaatgaaaggatataaacctaaggatgccatatacattccttctggtgggctatacctctttcaggacgaacgttcgcagctaatggcagtaacgaccgatggccgatactcccttactgggggaagccttgttgatgtaattaaacgtaaacctgttctgactgtagaagaaatcaggaattcctattttattagtcttgatgaggcccccttccctctggaaactgtagcgtccattcctctgggaaattcaaagcttaaaagacaagcagccattttcataacacttgattgtgacggttgcatggaacttgttaagaaattctatgcagatcgggacaagtatcggatagatattgttttagttccctcacccggtgagccaaaagaagagcttagaaggctctggtgtagtaaagaaaaaggaaaaataaacaacctcgatattcttcgatactaa

SEQ ID NO: 149255 - DNA, 468 bp, Enterobacter cloacae
atgtgcttagtgcatctaacgcctgagttaagccggagcgctttgcggccgcggcgttgtgacaatttacagaacaactccgcggccgcgaagcgatctcggcttgaacgaattgttagaccgcgcttagaagaactcatccaagatccggtagtactcaatcttagctatgttcggatttggctctccatactcgatgaagaactggttagtgagttctggtccaaataccgcgtcaatgtttctcgatgcaagcgccaggtcttgatacttatcggcaagcccgacccgaccgcagtctatgaagccgacgaaggcattaccttggaagatgaagttctcgggacaggcgtcgccatgtgtgactaccagctgctccgctccaggcatttgtataaaaagttgctcgtaaacatcccgcgccagcatgccttgccttgcgtgatcaaagtcctcctcatcaactaa

SEQ ID NO: 149256 - DNA, 279 bp, Enterobacter cloacae; identical to SEQ ID NO: 127157

SEQ ID NO: 149257 - DNA, 504 bp, Enterobacter cloacae
atgccgggcaaccgcccgcattatgggcgttggcctcaacacgattttccgccatttaaaaaactcaggccgcagtcggtaacctcgcgcatacagccgggcagtgacgtcatcgtctgcgcggaaatggacgaacagtggggatacgtcggggctaaatcgcgccagcgctggctgttttacgcgtatgacaggctccggaagacggttgttgcgcacgtattcggtgaacgcacgatggcgacgctggggcgtcttatgagcctgctgtcaccctttgacgtggtgatatggatgacggatggctggccgctgtatgaatcccgcctgaagggaaagctgcacgtaatcagcaagcgatatacgcagcgaattgagcggcataacctgaatctgaggcagcacctggcacggctgggacggaagtcgctgtcgttctcaaaatcggtggagctgcatgacaaagtcatcgggcattatctgaacataaaacactatcaataa

SEQ ID NO: 149258 - DNA, 894 bp, Enterobacter cloacae
atggaattatttgcaataacagataataccgttggcactcgcattgttaaaattgttactgacagaccaacgcaaaatgtaataactcagttattcaatgaacaaaaaacattttttgaagatcgctatactgaaggagtagagttttcaggtggatatatcacaagcggtgatgagttctttgtaattcctgattttgatgatgttatagctgtattggatgcaattaataaccccacagcaattcccgaatgggaaccagaagatatctctgtattcaatattatcgctcttttttcaggttatcctgaagagaatgaaaaacctgcaatcgccttgattcaaagcttcgataaaagacaagtcattgataatagaagaacaatctttcacaaaccttttcaagcaggtaataccttctgtcagtctgctgagcatggcatcgtcattgataataaactaacagccattctaacaggtacagaattgaaatttaaaagtttccatatgctgcgtaggatattcgatgtggatgcatatttccgagaagccacaaatgaagagttaacaactttttcttcccatgaaaaattttcagttgctcagggatttgatttaacgactattgctgattcagtcattagaaagaaagtttccttgattaacaaatcaagaatacttgaggactactctgtcactgagttaaggatttcagcagctgaaattggtgtcgttttagatactgaaaatgctggcgaatttgagaaaataaaaatgccacaaataaggaaagacgttaaaagattattgcacttcctagatgaagactatttcacctcacatataacaagaacgctgtatcgagcaaactctaaacgtcgagaagatgtataa

SEQ ID NO: 149259 - DNA, 573 bp, Enterobacter cloacae
atgataaatgctatactgtttttatatacagacatcaatgcagataaggaggattatatgttaaataagcttgccaaatatcttcttactgctagctcagtagctcccgtatttttcaccttagccttcctgtcctatatatcaaagcactacaaattcatgattgcttacctatctctaggtgtaactattcttttattgtgtgttttgatcgtcaagtatgcaataaaccataactctgtcactaataaaaaattaacaaatgcctctcctgccgataaggaaataacaaattactttttaacctatctgtttcccttgattagcgggccagaagctttcatggacgtcaggattgcgtcattttttgctttgagtttgtttttttacatcagcttttcaggctcttacagcttcaacccattgttgtccttttggggatataaatattatgaagctgaagatgatacaggtgtaagctttgttgtattatcaaaaaaaccattgctaaaggcatcaggcaatcgtattaatttgattaagcttactgattacacatacatagcaatatag

SEQ ID NO: 149260 - DNA, 312 bp, Enterobacter cloacae
atgcgcgataaattcattgatgcgatccacagttgttctaaaatccaattaactttttactcaaaagaagataatgcgataatcacgagattaaccgctccaatggacttcgggcctagccgtagagcacatgataaaagtgataggtttcatttttgggattacgaaagtgacaagaaaaatcatgttctcagtttgcaacctgaagccataaaatctctagtagtaacagatcaaaacttccagccgcaggagtttgtgagctggacacctaactggtttatcgctagagactggggccaatactcgtaa

SEQ ID NO: 149261 - DNA, 777 bp, Enterobacter cloacae
atgaataaaataaattttactgcggtaatactcattgcaatatcatctcctgcatttgcctcatcttttgatacagcatcgacgtttactatcggctttggaacaaaatatgcgccaaaatatatcggctctgataaatatgatatagctgcggcaccttatttaggctggagtaatggttccttatatataaactccgaaaaaggctttgggtatacccaccagtttgataatggggcctatgttgggcaggctctcggatactcattaggtcgtgctgataacaataactcttggttaaaagaaggttcagacaaactgaagggtatgggtaccattaaaacagctatgacaagtacaactactgcagggtggtggttaacaccttggatgggagtcgagggaaatgttattgccccaattactgatagtcagggtatgcaatataatttaaaagctaatttcctggtagttaataatgaaactgacactcttacattaagcactactgcgtggtatggtgatgcccggtttaataacacttggtttggtgtcaacgaaaagcagagccttcactccagcttccaaaaatataatgccaaaaaaggatttaatcgtctcgattatagcattacttggcagcatggcttcagcaaaaactggtccggttatgctgaagcaagttatacgatgctggaaaaccgagtaaataatagcccgctggtggatgcgaacaactcgttccaattggctacaggtgtattttactcgttctga

SEQ ID NO: 149262 - DNA, 225 bp, Enterobacter cloacae
gtgctcaatcagtgggataccttgtgctactactgtgatgatgttctgatcgaaactgacgacaacgccgcagaaagctcgctgcgtgcggtttgtcttggtaacaaaaactatatcttctccgggagcgaacacggtggcgagcgcggagccatgctgtatggacttatcgggacatgcaggttgaacggtatcgatccggaagcctaccttcgctattcctga

SEQ ID NO: 149263 - DNA, 558 bp, Enterobacter cloacae
atgatgaaatggatcccggtagccctggcgctgttgctcagcgcctgcagcagttcaccacagaagacttactatcagttgccggcgctgggcgcgccggcggtggtcagcagcagcggcgcctccacgcgccagctgtggctggagcacgtgagcgtggcggattatctggcgcagagcggcgtggtgtatcagaccaacgacgtgcagtatgtgattgcccagaacaatctgtgggccagcccgctcgaccagcaactgcagcaaacgctggtcaccaacctgagcagtgcgctgccgggctgggtggtctcttcgcagccgatgagcagcgatcaggttgtgctgaacgtgaccatcagcggtttccacggccgttttgacggcaaggcgatcattcgcggcgagtgggtgctgaaccgccaggggcgtttgatcaaacggccgttcagtctggagctgaaacagggtgaggacggttatgacgccctagtacgcaccctggcgcagggctggcagcaggaagctcaggctatcgctcaaatactaaacctctga

SEQ ID NO: 149264 - DNA, 1647 bp, Enterobacter cloacae
gtgacggaaaataatcatagcgtcgcggacgttgagaagataaaacgctggtcgccggtgtggattattcccatcgtgaccgcgctgatcggcgcctggatcctgttttaccacttcagccatcaggggccggtggtgacgctggttactacgacggcggaagggctggaagcgggtaaaaccaaaatcaaaagccgcagcgttgacgtcggggtggtggaaaccgtcacgctgagtgatgacatgagcaaggtaatggtgcaggcacgcctcaattccggtatggagaaattgttgcaccaggactccgccttttgggtggtgaagccgcagatcggctatgaaggcgtctccggcttgggtacgctgctctccggcgcctatatcgaactgcagccgggcagcaagggtaaagacggcaaagacaactatcagctgctcgacgcgccacctttggccccaccggatgccaaagggctgcgcatcgtactggacagcgagaaatcaggccagctcaatgccggcgatccagtgctgttccgcggctatcgtgttggctcggtggagaccagctacttcgatcctaaagcgcgcgccatgcgctatcagctgttcatcaccgcgccttacgaccaactggttaccaccaatgtgcgcttctggaaagacagcggcgtggcgttcgacatgtcggcgcagggcatgcgggtggagatgagctcgctgaccacgttgtttagtgacggtgtcagcttcgatgtgccggacggttggggccgcggtgagcaggcgaaagagaaggcggaataccagctgttcgacaaccagcgcagtacgcaggattcgctgtataccgagtataaggaatacctgctgttcttctccgattcggtacgaggcctgcagccgggcgcgccggtcgagttccgtggcatccgcctgggcacggtggcgcaggtgccattctataaagagggcatggcgcagcgtctggataacgattatcgcattccggtgctgatccgcatcgaaccagatcgactgcataaacagctgggcggcaaattcgatatcgaatggcacttgaaagacgccgagtcacgcggtctgcgtgcttcgatgaagtccgccaacttgctgcttggttcgttgtacattgatctcgacttctatccgcaggagaaaccgtggaaaggaccgcgtgaggatttcggttatccgctgatgccgaccaccagcggcggtctggcgcagatccagcagaaactgatgctggcgctggataagattaattcgatgccgatcaatccgatgatcaacgaagcgaccaagacgctggcggaaagccagaaaacgttgaagtcgacgcagcagaccatgaagtcgttgaacgacatcatcgccagcaaagagatgcaggcgctgccgcaggatatgcagaaaacgctgctggagctgaaccgcagcatgaaaggattccagcctggttcaccggcttacaacaagatggtaggcgacatgcagcgcctcgaccaggtgttgcgtgagctgcagccggtgctgcgcaccctgaatgagaagagcaacgcgctggtgtttgaagccgccggcagcactgaccctcagccgaagaaggccacgaaatga

SEQ ID NO: 149265 - DNA, 1224 bp, Enterobacter cloacae
atgttggcagtgttgccgccgttgtcccatggcagcaaagcggtatgctcgcgctgcaaaaccacgctcagcacccgctgggacgagccgcgcaagcggccgatcggttacgcgctcagcgccttgttcatgctggtgctggccaacattttcccgtttatcaacatgcgcgtcgccggcctcggcaacgaaatccggctgatccaaatcccggaagtgatggtggcggaagactacgccagcatggccaccttgtttatggtgttcgtgcagctgatcccagcgttttgcatggtggcgattatcctgctgtgcgccagagtgcgcttgccgctggggctcaaagagtggatggctcgggtgctgttccagttcaagacctggtgcatggtggaaattttcctcgccggggtgctggtcagcttcgtcaagctgatggcttacggtgatatcggcatcggcagcagcttcgtgccgtattgcctgttctgcctgctgcaggtgcgcgccttccagtgcgtggatcggcgctggctgtggcaggacatcgaaccggcgccgtgcctcgatcgcccgctgacggtggggcgcaccggcatgagccagggcgtgcgctcctgcgcgtgctgcacggcgatcctgccggccagtcaggtgcgctgcccgcgctgtcacaccaagggctacgtgcgccgccgccacagcctgcaatggacgctggcattgctggtgacttctgtcatgctttatataccggctaatctgatgccgatcatggtgaccgaggcgctgggcaacaagatgaactccaccatcatggcaggggtgatcctgctgtggggagacggttcttacccggtggcgatggtgattttcatcgccagtatcatggtgccgtcgctgaaaatgctggcgatcggctggctgtgctgggacgccaacggcaggaagaagccgcgcgccgacagcgagcgtatgcatctgatttatgaagtggtcgagttcgttggccgctggtcaatgatcgacgtgtttgtgatcgcagtattatcggcgctggtgcgaatggggcagttgatgagcatttaccccgcgacgggcgcggtgttgttcgcactggtggtgatcctcaccatgttcgccgccatgacatttgatccccggctgacctgggatcgcgcaagtgaaacaatcaacaaggagccgcaaggtgacggaaaataa

SEQ ID NO: 149266 - DNA, 2088 bp, Enterobacter cloacae
atgcaatgggaagcagcccctgatgaccaagagccgattcagtgggatcgcttctcaccattcctggatgtatggctcgacgttcctccaaatgaacttcatcacgtacaaaagattttgcccacgctggattgggatggggaaagcataggtgtgcgcctccgttttgaacccaaggaccctgacgcactgcaacacgaatatctcacggcaaaacgcgcagccgccgaagttatggcccaagctaaagagtacggtgaacaagtaagctccacaaccgcatttgcactttggccgcgttcgatgatggagtttttagcccaaagaatgcgctctactttcgagatccgtgcttatttgcttgatccttcaaaactgaaaatgccggaagaaggtagagcctcccctcaaacactcccagaaagcagtgaccctatcgatggcggggatccgtttaatggtcttattcgtatcgacgagattagcgcacagcgtggatttgggcacagcgatcaaacagggtatacgcggggtaacgaatcacgtgaggatatggctgaacccagaatggggaaaaaactttccagccagctgcgcaactactatagccaacacttggatcctttcgatacgccggaacccaaagaccttcaggcgttgatggcattgcatgaagcacaaacggctttcggcacgcgtttagcagattgcttctcagatgccttgaccgaactggaaaatattggctatcccggcgttaccgaccccaagctgacaataaccaccaacatcaggcctatcgatgggcttaatcatccgtccgccgtgcaatacgaagtgccaacccatgttaccggttcttttggcgcacatcgccttcccgaagattcgaacggacttggttaccaaaatctcgtctccatcgtcttcgcactcatggcatttcgtgataactggatgaaagtcggaaaggctggaaaatcaaaggtggcggaagaaactctcattccaccgcttcatctagttttgattgaagaacctgaagcgcatttacatgcacaagttcagcaagtttttattaagcaagcctacggtgttctgcgaaaacatgacaagctaaaggattcttcacgccttcaaactcaactgatcatcagtacccactccagccaccttacccatgaagctgagttttcgtctttgcgttactttcggcggctaccagcactcgcacaaagcggtgctgtacccttgacttccgttatcaatctttcggaagtcttcgatggcaaagacaaaaccgaacgtttcgtgaaacgatatttgaaagctacccactgcgatctcttcttcgccgatggagcgatactcgtggaaggtccggctgagcgtattctcgttccccattttgttcgtgagcgtgaagcctatgcttacttaaagcgtagctatatcacatggcttgaaataggcgggagccatgcacaccgattgaagaatttgattgaacatctgggtctcaataccctgatcatcacagacattgacgccaaagacggcaccaccaatgctgcggttgtcccgaaacgaggcatgggccaacgagcccgcaatgagacagtgaaaacgtggctacctaaggaagaatctttcgatgcactcctcgacatggaaagtgagcgcaaagtgcttgccgaaccaggcggctatgccatccgggtggcgtatcaaacacctattttcatgccattcaagtctgaagaagcgcttgaagcagtagccaacactttcgaagatgccctcgtgtatgaaaatccggggctattcgccaacctggacggttatgggctcatcgcaaagtttcgtgaagcgctaaaggagtccgccgatctcagcgaattggcaagaaagatatttgaggcactgaaaaatgggacaaaggccgaatttgctctcgatgtcctttttagtgaggaaatcgagcggctgaaggtcccacagtacattgacgaggggttagtctggctagcagaacagctgaaacgtaaagaatatgatgttcttggaaaaacggaggtgggagagtga

SEQ ID NO: 149267 - DNA, 1875 bp, Enterobacter cloacae
gtgagcaggctggaaactataattcccgacgatgagatagacatgccggctgatgcggaaatcagaaaatgtcttgacctcgacaccccaaaaagtttcttcctttttgccggcgccggttcaggaaagacaagatcgctggtatccgctctccagtatgtgcgcgacacattcggggatgaacttcggctgaaaggacaacgagtcgctgtcatcacttataccaatgcggcgagcgaagaaattcaacgccgcctggattttgatccgactatagacgtttcgactatacatagcttcgcctggtcgctgatagaagggcttaaccgtgatatccgtgaatggcttcgcgcgaaaataaccaccgatatcacaaagcttgaagcagaagaagcaaaagggagaaaaggtacggaggcatcaagaacccgcttaaaaaaaatcgcctcgagaaccaaacgccttcaaaacctcgataacgtcaaacgttttgtttacagcccaaccggagaaaatctcggccgcgattcgctgaatcatgcggaggtgattcatctcaccgcctattttttaacaacaaaaccgaccatgcagaacatcttgatcggccgtaatcccattctgcttatcgatgagagtcaggataccaataaatttctgatagaagccttatttgccgttcaggctcaacataaagagacattcgttctcggtctgattggcgacatgatgcagcgtatttatagcgatggtaaagacggactagataaaaatctgcctgccgactgggcaacccccggaaaacagatgaatcaccgttgcccaaaacgcatcgtaaaattaattaacaccgtacgtagcgcagtggacaaacagatacaacggccacgaaccaacagccttgaaggcagtgtgaggcttttcgtgcttcctaatcataccgttgataaacctgctgccgagcgaaaaattgcgatgtatatggccgaggttgccgatgatgaacaatggcggaatttggcgctctgcaaatgcctcacattggaacatcacatggccgccagtcggttaggctttttagagctgtttgcccctttgtatagcgtgaaaagttggcgaaccaatcttattgatggctctttaccctgcgttcgattctttactgatgagatgctgccattaattcaggcaaagtttgccgaagaccgtttttccatagccagaattctaaaaaaacgatcgtcgctagtcagcccagatgccttgcaatacgcagcagatcaacgctcgcaactgaagttagcatcggcagcaatggaacgccttatggcattgttcgcacagggttctgatccttcgcttggcgatgtccttcgcttcgtagcggatagcgcgctcttgcctattcctgaatctctgcagctctgtatagcaagcgataatacgctacctagcgtaacaccgtatgtcgatgaaagtgatgccgaccaccagagtgagcgtacaatggcgataggcgagtttttacttgcccctttctctcaggtcgaaaaatttgcatcctacgtatctggaaaagcgcctttcgatactcaccaaggtgtgaaaggactcgaattcgaacgtgtgatggtcattatggacgatgaagaagcccggggttttatgttcaaatatgagaaccttttcggggcaaaaagcgttaccgatccctcggttgaagcagttcgccgactgttctatgttacctgcagcagggcgcagcaaagcctggccctcgtagcctatgcagcgtcaccggaacaagttcgccgattcgtgatggaccaaggctggtttaatgctgatgaaattgtcatcggaatacctgagtaa

SEQ ID NO: 149268 - DNA, 1212 bp, Enterobacter cloacae
atgccactaaatgcacgacagattgatactgcaaaacccaaagaaaaagaatacaagctcactgacgggggcggcctgtatctgctggtaaagcctaatggtgcgaagtactggcgcttgaagtatcgttttttggggaaagagaaaaagctctctatcggtgtttaccctgacatctctctggctgatgctcgcctgaagcgtgaggaggctcggaagatcatcgccttaggcggtgatcctggagaagagaagaaagctgagaagttggctaaaaaagccaatgccgaaaatacctttaaagctattgcagtagaatggcatgggtacaaacgatctaactggtcgaaaggctatgctgacgatctgatggaggccttcgagaacgatatcttccctgatattggtaagcgtcccattgctgagatcaagcctcttgaagtgctcagcacactacgcaaactcgaaaagcgaggtgtgctcgataagctgcgtaaaatccgccaagcctgcaatcaggtgttccgctatgccattgttaccggcagagccgaaacgaaccctgcctcagaattggcgagtgcgctgactgcacctaaatctacccattacccccatttgctagctgatgaacttcctgatttcttacaagcccttgctgcgtatacaggtagcccgatcacccgactggctactcgaattctgatgttgactggcgttcgcaccgtcgagctccgccaggctgaatggaaagagtttgatttcgataaacgtacttgggaagtcccggttgaaagaatgaagatgcgccgcccgcatctggtccctctatccgatcaagttttggcatcacttcgtgaaattcaggcggtgacgggccgttacaacctggtgttccctggccgtaacgacattacgaaaccgatgagtgaagcgagtattaatcaggtactaaaaaggattgggtatcatggcaaggctacagggcacggtttccggcacacgatgagtactatcctgcatgaacagggctataacacggcatggatcgaattacagcttgctcatgtggataagaacaccattcgtggcacttacaaccatgcacagtacctggagcagcgcagggagatgttgcagtggtatggggattatgtggatgggttaatgaataggatagtgttatccgaatcttttgggaaaacaggatga

SEQ ID NO: 149269 - DNA, 1119 bp, Enterobacter cloacae
atgggagaggtttgcttaattcctgaaggaatagattgttgcctgggccaacgtcaggttttattaagggccaatagtgaaattgatccatattatttattttgggccttgcagtctccttatgtacaacatcaaatttcctggaatgagggaacaggtacgacagtaagtaatgtgcgaattcctgtactcaaggatttgaaaatccctcgactgggggaacatgagtcttggattgcaaaaaccatgacttctctggcattgaaatctcaaataaatgaaaaaataaatcaaaccctcgaacaaatggcgcaagccctgttcaagagctggtttgtagattttgaaccggtaaaaactaaaatggctgtgctggaagagggcggttcgcaggaagacgcgactcttgcagccatgacggcgatttccgggaaagatgctgatgcgctggcggtttttgagcgtgaacaccctgagcaatatgctgagttaaaagcaacggcagagctgtttccgtctgcgatgcaggagagtgagttgggggagattccggaaggttggaggactgagaatgttgaaaatattatcaacagattaaaagtaaaaaatacctttcccgctgattgtattaagcaatttggacagcatccagtgcttgagcaaggggctaagatttatcagggttatcacgatgaagaaccttcgtttaatgcatccttgcaaagtccaatgtttatttttggtgatcacacttgtgtgatgcatctgtcaactgtgccatttgatatttctaaaaatacattggttctgaaaggtaagggatttaacacgtattggacattttttgccttaaagggtaagcagaagtttcaagagtacaaaaggcattggtcagacctaaaagttaagcaggttgttattcctgatgaaaataatggtttgttgttaactaaatactttgccgtcaaatgtgagggtttattcgggttattggagcaaaatagaaaacaaaatttaattttgcaaaatatccgagacacccttctccccaaactcctctccggtgaaatccccctgccggaagccgagcaggcggtaagcgaggtggaaaatgtataa

SEQ ID NO: 149270 - DNA, 651 bp, Enterobacter cloacae
atgaaagcaattaaattatctcttgattctactgataaaataaataaaaaaatgagttgcgagggatttaatggagcatcatggtctgatgatgatattgcatctgtgcgaaaagaaataaaagaattctatatacaagagcaaaactatacatgtgtttattgtaagcaggtttttaaatccaaatacggtcgagtgtgggatgttgaacacataatatctcgtgaatctgtatgtgagtttatgtttgaaccattaaatttatgcgttgcctgccctgaatgcaatcagaggaaaggaaatgggaaagtcactaatagtaccgcaaaaaagaatctcccagttgattcggaacaatactctattgttcatcctcactttgataattatcaagaccatatagaggcgataaagccgggtgaattctatttctcaaaaacaaaaaaaggggagtgtacaattgcattatgtggtttaaatcgcttttatgagtatggtggatatattcccgccgtggctgcaaatgatatgatttttcattatgcgagccttttgtcatctacagataatgaagataaagttaaatttttactgagagaaataagctttttagcgctaaagcaattggttgcagacgagggtgcaaaataa

SEQ ID NO: 149271 - DNA, 318 bp, Enterobacter cloacae
gtggaatcaaacgagctctacgcgcaacagtaccgcgttgtcagtgtgagcgataacaataatggtaccttctcaatcactgcggcatttcatgacccggacaaatacgccagaattgataccggcgcgattatcgaccagcgaccgattagtgttattccgccgggaaaccagtccgcaccagccaacatcgtaatcagctcgttttctgtgattcagcagaatatcagcgtcgaaaccatgcgcgtaagctgggaccaggcaaaaaatgccatcgcctatgagcacagtggcgccgtaacgacgggaactgggtga

SEQ ID NO: 149272 - DNA, 228 bp, Enterobacter cloacae
atgatgccaaaagctcgcactaacctttctgtagattcactcattgacctgaaatatataactaacgattcgggattcactgctaaatatttttactcgctgataaagcggggtgagttccctatcccgataaagctaggcagaagttcgaggtggttactaaaagattattctgaatggaaagccagacatattatgagaagagacgcaagagaacgcctcaggtaa

SEQ ID NO: 149273 - DNA, 2304 bp, Enterobacter cloacae; identical to SEQ ID NO: 117482

SEQ ID NO: 149274 - DNA, 642 bp, Enterobacter cloacae
atgccgccccgcgcgaaaacaaagttgccccccccgtccactgcccatagcagcgccgatgcgcagcccggcctccagcaaggagcccagcgaactcgcgaccgcatcctgcaggccgcccgcgaactggtgctggaggaaggtgccagtcgcttgacactggacgccgtcgttgtgcgggccgggttgagcaaaggggcgtttctctatcacttcaagaccaaacgcgatttgttcgtgacactgatcgacgagatgatccgggcgttcgacgcggtacaagccaatcacgagcgcaggtttgccggagatccggacccctggctgtcgagccaggtggaagcgatgcccgacgacgagatgcagaagatgggcgcagcgctgctcgcggcagctgcggaagatccaacacttctcgacccactgcgcgagtgctaccgcgtgcagtacgaacgcgtgcgtcgatccccgcgtggcaccgagaccgcggcactcatcatgctggcattggatggcgccctgttcgccgatcttctgggtttgccaatactcgcacccgcagagcggcggcatttctttcgggcgctccaggatctcgcctcgggccatctcgaacttgtcccggcaaaaggacgcacatga

SEQ ID NO: 149275 - DNA, 237 bp, Enterobacter cloacae
atgatgagaactcccctcaggattctgctggtcctgacttcgcaggcaacgatgggcgacgaactgctcaaccgcgaatggttccgcagtcggaccgaagcgaaggtgctgatcgaacgttggcgacagttctacaacgagcagcggccgcatagcgcgcatgcttacaaaccgccggcgacgatccggcgcaactggatccaatccgatagcatcccctccgaactcactgcctga

SEQ ID NO: 149276 - DNA, 1824 bp, Enterobacter cloacae
atgagcgatatagatgaatatgatattaactactcacgatatggttttgaatctcttgcgttagcccatcctgaaatggatataaagggattatggtattgtgattcaaaatattatgtgttgattgaaaaagatggaatgctcactgaatctgatttagagaaatttgaaaaaatacaagaagagcatcgaattattggtagccctaaattattactaacacaaaccattcctaataatgcaataaaaatcagaggaagagaaaactacgaagttgctctttcttttggcgcaccatatacaaattccgaattggaaaatttacttttccagtatataaacaaaaaattacatccatttaagtataaccttgaactcccatcattatatttgaagctatctttccccagacaattaacagaagatgaaaaatctgaaatagaaacaacactatatagcattggcattaaatacgagatcaaatatataaccgactgcaatttgttaaacatcagcatatctgaaagaaaacactcagatcctttagctttaataccgaacaaaatattacctaataatatcccaacaaagctaagaaatctacatgaggaggatgaggatttttggcttgataaccgaagtttaattctcacatcctatgatttagaaaaggacaatgttctcccaacgagtttcaataataaaaacagcagctgttttgttgacgcacaggttctgaagcctgacaatattagaaattatttaacaatttatgaacgagtgataatatcataccctctcacaggacaagataatgattttttgagtcatttaaaaattccaaagcatcacctattagagttaatatcaagagggcgaattcaatttgcattacctcaaaatataacaagatataacgtatcatttttagaggagtgcctaaacactaatcctgaatgtattattttatccagacgattagcatcatcatcaatcgttgacatccggaagaaaactggttttcttgctacaacatattcttttgaagaaaaattgaacattctaaaaacattgaaaatgttagatagtgaaatattcaatttattcgtgtctgcactatctaaaaattggcattcgatggaaatgaatatacatgaacgcggggctatgggggtggcaaatattggtatagctccagtcatatccgaactgttcaataaaaaaggtcgagatcttcatcttgagttactattttccgcaatgccactagaatgggcaatggcattaaatgctgatttttatccatatcatagcaatgaacattcacaatataatgcttctgcatattgtttatatggatacaatgggttcaggatagataaagatgaaattgtgcaatcaaaaatcggtggaatagccacaaaaatattatcattagacaatgacatgtcagcactagaattagatgatgcaatactcaaaggtgatataccaagaataagaaatttttcaaagaacctttcagacttatcaagtgaagaacttgaaattaaaatttatgaacttaataaagaaataaaaaaaatagaaaaaaaagaaagtaaattatcttccttagatctatgtggattaatagcatctgcaatcggtgtttatgacgacaacccttatattccattgggatttgctttttttagaataatttctggagtattaaactccaacgatattagctcacagggcgtcgataaaataaagtcaacacttttaggcactcaaaatgaaacattgttaatcaagagaacaaaagctagattacaatag

SEQ ID NO: 149277 - DNA, 1458 bp, Enterobacter cloacae
gtgattgcatccacggcgtctgcagataaaaatagcctcgacaccggtacgctgggtttcagtaatctccacaacgagagccagaccagcggcaacggctacacggtggcgctttccggcagcgcgggcggcagcgggaacggtgaaaaccgcaacctggcaccggccatcggtacgggccaggcaaaagagagccacaccggcacgacctcatcagcggtgagtggcggtagcattgtcattcgcaacccggcgggacagaaacaggatattgctgacctgaaccgtgatacggctgacgcccaccacggcgtggacgtgaacggtgatgtgcagaaggtcagggataacctggcggtccagagcgaaggcgcggcgctggccacctctgcgctggatgcttacggcaagtatgcggagcagaaagcgcgggaatccaatgcggtgctgggcgcgaagctggcgtcagaaggaaaactgcagggcgatacgccgcaggagcaggaagcgttcctgaagacgcagcccggatatcagaataccgagtacggtccggggagtgccttctggactaagggcagtgccgcggcgggattactggcaggtgcgcttggcggtaacctgaaggcaggtgcggcagcgggggcggcccctctgctggcgaccctggtcaaggagcagaaagatccgacagcccgtgccgcgctgcacggtattgtggctgcggcgctgacgcagctgagtggcgggagcagtgcggatggcctgaaggctggtgccataggggccattacggcctcggcgatgactgaccatctggtcagcgcgctgtatggagataaaaaatccagtgacctgacggcagaggagaaacggctggtcagtagcctcgtgagtatcgcaggtggtctggcgggcgcagcagtgacggatggcagtgtctccatggcggcgacggcgtcggaaacggcgaaggtggaggttgagaataacacgctgagtcctggccatgatgaggaagagcttgagaaagagcacggcgaccgcctcccaaaagtctacaacattgccaggcctggggtgttgtttgacgaagatggtaagccgcttcctggaactgctggtcttgggattggggctgttccgattggtggtaaatctaaagatactcagatttggacagaaaccaagaaagcaaaacctgtgggtaatgcctatggacactggacaaaacatgggaaagaatttcctgagtatcagaatgctaagcaatatgttgatgctgcccataattttatgacaaccccaccgcaaggtaccttaactaaaactcgccctaacggagacacgctgtattacaatcctgcgactaatgtctttgcttcaaaagatataaatggtgtaccgcgtacaatgtttaaaccagagaaaggtctcgaatattggaaaaaacaatga

SEQ ID NO: 149278 - DNA, 255 bp, Enterobacter cloacae
gtggcatcggcccggctctggccgtccatcaccagctgtccgccgctcagggccagattctctcctgccgagaccgcgctggccgtggatgacagcgtgccgccgctgctgagggtcgcgcgggtatcgctaccgctgcgggtattcgccaacgtgatatctttcccggccgccacgctgagcgcgcctttgctggtgacgctgccgccgcgctgcgtcaggctgccgtcggtggacagcgtggtgtcggcctga

SEQ ID NO: 149279 - DNA, 345 bp, Enterobacter cloacae
atgttctgtccgctgagcgcgatggcgctggcggtaagctctccgccgctggtcaggtcgccggttgcgttaaaactcagcgcgttaccggtggatttcccggcgtgcgcaatcgtgcccgccgtcaccgacagagcacccttcgccgcctgcgtgccgttcagcgcggcattctgcgcctgcagggtaagcccctgcccgctctgcagatgcgcatcccggccggtggtcaggtcgccggtgctgacggttaaggcccccgccgcgtccgtctgcccgttcaggctggcgctgcgggtcgcggaaatctgtacattgccctggctggtggtgcgggacgcctga

SEQ ID NO: 149280 - DNA, 564 bp, Enterobacter cloacae
atggctctccggcggcggcttcacgctggcgggcggacagctgacgaacgccggtacgctgcagggcgccacgctgggcatgaccggcaccaccctcaccaacagcggcacggtgaacgggcagacgggactcagcggcacgctcagcggggcgttaacgaataccgggctgctgcagagcggcggcgcgaccgccttcaccgcggataccctggcgaacccggggcgcatcacgggcggtacgctgtccctcaccgcccgcgatatgaacaacggcgggctgatgcagggaacgaacggcctggcgctcaccggcaccacgctgaccacgggcgcgacctcgcgcaccctctccggcggcatgctgacgctggatgcaggccagctgaccacgcagggcacgctgcaggggaacggcgcggacatccgcgccagcgactggacgcacggcgggtctctgctcagccagggaccgctgacggccacgaccggcggcacgctgacctcaaccggctcgctgatgagccagggccgggcggatatcaccgcacagacgctggataa

SEQ ID NO: 149281 - DNA, 240 bp, Enterobacter cloacae
atgtgcctgttacggctctgccaaatggaagttatggtttttattcgcgagaagtcattactggtccgggtgctggtaactgtggagctaatagtgcatgtaatatccatcgctccacatactattatctggctccttttaaaaatacagtcaggcagcgtttttccggaagatacagcacaactgttatcacagggggcgattctccatcagggcgtatctcttcaggtagtgacctga

SEQ ID NO: 149282 - DNA, 390 bp, Enterobacter cloacae
atgctgaattatgacgctttttttagcggagacataaggcgcttaggaaaagtaagcgacgaagagcttaacttctgggtgatggttgtagaaaacggatgggaaaaacaagctcatcctaattgcttagagctaacctttcttggtggaaataccgcccattgggatacagaggatgaaatcgattcaatccctgactattgccacaatcccgatttgatcaaacaaatggcgaaagaaaaccatatatctaccagagtagtcgaagtgcacggtagtgagcctttatgggaggctacgtcggctttaacttatggcgtgatggaccgatataaatccagagctatttgtttggcattcattgcactgcatcgatcatctatacgatga

SEQ ID NO: 149283 - DNA, 561 bp, Enterobacter cloacae
atgtcggtgtcctgcgacgttaaactccgtccgctggagcgtgaggacctgcgctttgtccaccagctcgacaacaatgccagtgtgatgcgctactggttcgaagagccttacgaggcatttgtcgagctgtccgatctctacgataagcacattcacgatcagagtgaacgtcggtttgtggtggagtgtgaaggtgaaaaagcgggtcttgttgagctggttgagatcaaccacgttcaccgccgggcggagtttcagatcatcatctcccctgagcatcagggaaaaggccttgcgtcacgggcggctaagctggcaatggattacggattcaacgttctgaatctctacaagctttacctgattgtggacaaagagaacgagaaagcgatccatatctaccgcaagctgggcttcatggtggaaggcgagctgattcacgagttctttattaacggtgaataccgcaacaccatccgcatgtgcattttccagcatcagcacctggccggacacaaaccgtcaggcgccagcctgctgaaacctaccgcgcagtga

SEQ ID NO: 149284 - DNA, 276 bp, Enterobacter cloacae
gtgctcagatcctttttaaccttatgcgcacttacaggcgttattgtgctgtccggctgtaaggaaaccaaatccgaagcctggtataagcagcatccagacgaaacatatgcggtttatacgcaatgcctgaaggagggtgaggcaagcgataactgcgagtttgctcaacgagctgccattatgttcgctcaaattggcaagcccggaataaaagaaaaatttgagatactctttcagaaggaagccgaaaagagaaaatccgtcacccggtaa

SEQ ID NO: 149285 - DNA, 645 bp, Enterobacter cloacae
atgctttccaccgcagcctttctggcgctggcgacgcagtgcgccaccagtgttcacccgtccacggcgcttgatgtggcacgggtcgaatccggttttcacccttacgccattgctgaaatcgtgccgggcggtaaaggtgtgatttcacattttcccacgagcctgccggaggcgatccacctcaccagacagctggctgcacaaggccgacgctattcggtcggactgatgcaaatcaccagcaccaatttccgccattacggcgtcacggccagcgacctgcttaacccttgcatcaacctgtcggtatatgagcgcattttcgccgactgctaccggcgcggcagaacgctgaaacgggcgctcagttgttactactccggcaactttgaaaccggacagcgaccggaatccacctttaaccagaccagctacgtgcaacgcattggctatgtcgtcccgtccacgcgggaagaccggcagcgtgaccctgaccggaacgcacagccgtctgtccgttatcccgccgttgtgctgcgcggcgagcctgccggtgccactgtgccggtcctgacttccctgcattatcccggtgccgtcattcgcggcgctacccccgttatctctgatgaggagaaatga

SEQ ID NO: 149286 - DNA, 477 bp, Enterobacter cloacae
atgatcggagtagtaaggttttcagaactaatggagcactgggaggcaatttctctaccagcaccaggaagcatctatgagacaaagcagcgctcaagcaaatgcctcaaacataacccttgcaatataaaagattggattactattgaattctctcaacagggatcctacaaacgaaaatatgaacattttcgccataaagatcttgtactactactctttattatttctgctcgacattttattcatagagttttatcttcattagtcttaatattattcagttcatccttcattatgctcttaggaaatcgtctcctcatccatagttacgagagaaaatttcatagcgaactaaaaactagtttaacaattttatttttaaactctttactttataaaataggattcatgtgtacattatcgataatattcagaaataatgaaacagtgaatcgtaatttaagttttgcatag

SEQ ID NO: 149287 - DNA, 618 bp, Enterobacter cloacae
atggtaagtgaagccctgcattcatctgatcgcgcccgtgcagtgcacgggcatcaggagccaggaaacagtaagatttttggcttctggatctacctgatgagcgactgcattatcttcgccactctgttcgcgacttatggcgtcatggtaaacaacatcgcaggtggcccgtcgggtaaagatatcttcgaaccctcgtttgtcctggtggaaaccgcactgcttctgctgagttcgattgcctatggttttgccgttatcagcatggacaaaaacagtgaagggggagttcttggctggctgaccctgacatttctgtccggtctgggctttatcggaatggaaatctgggagttcagtcacctgattgctgaggattttggtccgcagcacagtggctttctgtcggcgctttttaccctggtggggactcacggtctgcatgtgacctgcggactgatctggatgctggtcctgatgtatcagattgcccgacgggacctgtctgagatcaatcgcacccgtcttatgtgcctgagcctgttctggcacttcctggatgttatctggatttgtgtattcagtatcgtttacctgatgggggtcatgtcatga

SEQ ID NO: 149288 - DNA, 324 bp, Enterobacter cloacae
atgaatcactctgtaaatacggaaggggccgcgcacggcagtgtgaagtcttatatgaccggttttctcctgtcggtcatgctgactgcaattccgttctggctggttatgggtaggggcaccactgagggatccatcctgggaggcgttctggtgtgtgctgttgttcaggtgttggtgcatcttatctatttcctgcatctaaataccgcttctgaaacacgatggaaccttgtggttattgtctttaccgcggtcattatctttatcgtgattaccgggtcgttatggatcatgtggaatcttaatcaccggatggtatga

SEQ ID NO: 149289 - DNA, 375 bp, Enterobacter cloacae
atgaatatgcccagcgcagcgcttagtcaatggcacgctttacatgctcaaagcataacgatgctaaatcttgctcataccggtaagtgggatgagctcattgagcaagagatgcattacgtacaattggtggaaagtatttccagtaatcccattacgtcgtgccctcctgctcaagtagagcaagcgcgtttcctgttaaaaaaaatcctcgaaaatgagagagaacttaaagcgctgctccagtcccgaatggatgaattacgcaatctcatcggccagaccggtaaacagcaatccatcacgtctacctatggaaagctgtcagggaatattctttacccagaaagttttacccgcgacacacaactatga

SEQ ID NO: 149290 - DNA, 405 bp, Enterobacter cloacae
atgtataacacctctggtgtccagtcctatcaaaatataggagtggaaagcgcggtgatgaatgccagccctcaccagttgattgtcatgctcttcgatggggcgcacagcgcccttatccgagcgcgcttgtttcttgatgcaggacaccttgcagagaaaggcctggcgctttcaaaagcaatcaatatcatcgacaacggattgaaatcagcgctgaacatggaggctgggggagaactgtcaattaatctggcgtctttatacgaatatatggttcgacggttattaattgcgaatttgcataacgacgttgaggcaattgttgaggttgaaaaccttttaaacaatattgcggatgcgtggaagcaaattggccccaatgcgtcctctatctcaggataa

SEQ ID NO: 149291 - DNA, 1425 bp, Enterobacter cloacae
atggctactatcactaacctcgggataggctcagcaggactcggggacttgtataatcagttagatacagcagaaagaacgaagctgaaaaccattacaacccagcagacgacctacaatgcgcaattaagcgcgtacggtaagctgcagagcgccatgacaaatctacaaactgcgacggctgcactggcaaaacctgcgacctggaactccacgtctgtcagcagtacgaataccgcgttcacggcgacaacctcgaccgaggcttctaccggcacgtttacggtcaacgtgaaccaaatggccaaagcgcaggtcctgagcagcggctctatttcaagtaatactgaaaaattgggtgaagtaaccggtgctaaacgtaccattacaattacccagccaggtacgaaaaagccgctggaagttgagctctctgacgcagacacgtctctgagcggcatcgctagcgcgattaacaaagcgaacggcaacgtcaccgccagtgttattaaagctaaagatggcgactaccgtctgttgttgacttcgaaatcaacgggtaccgacggtcagatgaccattaatgtcaccggcgacaataccttacaggcagcgatcggttatgactctgcaagcgctacgggtgcactaaccgtacagacgaaagcacaaaatgccatcatggtggtgaatgacatcatcatcgagcgtcagagcaacacgatttctgatgcgctgccgggcgtgacgtttacggtcaaagcggagagtaaagcagacgaaacgctggatattacccgtgcaaccgatgcaaatcagaaagcgatctctgactgggtaacggcatataactcgctacagtccaccatcaacagcgtcaccaagtatgtggctgtagacgcgggtgaagatcagtccgccagcaacggggcattagtgggtgacggtaatgtccgtagcatccaggcgcagcttcgcagcatgttgacggatattcaaagcggctccgtacagattatggcgcagataggtattactcaggacccggcgaaaggtagcgatggcactatgggtaacctgaaaattgacaatgataaactgaaaaaggcactaacagacaaccctgctggtgtacagcaatactttatcggtgatggaaaaaccaccgggctggccactaaaatgagcagcacgctggattctatgctgagtaccagcgtcggtaaaaccggggtcatccagaatgccaaagacggtatcaataaaacacttaagagtctgagtgaacgctacgatgatatggaagcgtctatcgatgcaactatggcgcgatacaaagcccagtttacccagttggacgtactggtgacgaaaatgaccaatacagcgaactatctgactcagcagttcactaaatcatcataa

SEQ ID NO: 149292 - DNA, 891 bp, Enterobacter cloacae
atggcagttatcaatactaacctgttgtccctgactactcagaacaacctgaacaaatctcagtcttccctgggtactgcgatcgagcgtctgtcctctggtctgcgtatcaacagtgcaaaagatgacgctgctggccaggcaattgctaaccgtatgaccgcacaggttaaaggactgactcaggctgcacgtaacgctaacgacggtatctctgttgcacagactaccgaaggcgcactgaacgaaatcaacaccaacttacagcgtattcgtgaactgactgtacaggcaaacaacgatactaactccggtgatgacctggtttctatcaacaacgaaatcgttgaccgcgttaaagaaatcaaccgtgtttctgcacagaccagcttcaacggcgtaaaagtactgtctactgcacagactctgaacatccaggttggcgcaaacgacgacgaaaccatcggtatctcccttaagaagatcgattcaaccactctgttcagcaccgcaggcctgactggtatcaccgaaggctccaccggtgcagctgctgttggcatcctgtcagcctacactgctgctgccggtaccactgcgaccgttgcaactgttaacaccaatctgctgactgaaatcgacaaagcaatttctgacgttgactccctgcgttcaagcctgggtgcgacccagaatcgtttcgaatctaccgttaacaacctgaacagcactgttaacaacatcactgcagctcgtagccgtatcgaagatgccgattacgcgacagaagtatccaacatgagccgcgcgcagatcctgcagcaggctggtacttctgtactgtctcaggctaatcaggttcctcagacagttctgtccctgctgcgttaa

SEQ ID NO: 149293 - DNA, 3333 bp, Enterobacter cloacae
atgaaaaaatcacccgccacgtctttcccaaatagtaaacaggctattaataatttgcttaatgagaagatgcgtcttgctgtggactggttaactaccagcccacaagattctcttgctctggtaaatgagctaatggtgaataataaggataatatcctgctactggtcatcgctggacgcgctcatcagagactggggcagtttttccaggcgggtgaatgtattgataatgcactgaaaattgacaggactaatgtcgaagccatctatgcaaaatcagatttgttataccgcagcgatcgtttgtcggaagcagaagaatatctaacggatgcgatatctcgtatagacaagagtaccgccaggccgctgcgtctgcttcacgctaccgttctgcagaaagcaaaaaaatatgaacaggcacaggcgctttataagcagttaactacggaaatgccagctaactggctctactggaataacctggcgattgtccaacaagacctgagccagttcaacgagatggatgaggcgtaccagcacagctgtgaagtctcaaaagataaccctacgccttattttaaccgtatcgttggtgcgcactataatccggagcgcagcgccgcagacattcttgaattgtgtaaaaactggcaggaaaagttccccccgcgctcggttaagcgtgcggttgccaaaaataaagcaccagataaatgtctgcgtattggttttgtctcggatggtttgcgcatgcatccggtcgggcagatgattgtgatggggctggagcacattcccgcctcccagatcgaattctacgcctacagcaccaactatcaggaagatcacctgacccatcgactgaagcgcatgtgcgccagttggcgagtcgttgagcatgttggcgccgccgaacttgataagattatccgcgatgacgagattgatattctgttcgacctctgcggatacaacgctaacagccgtatgcaaaccttccagctgcagcctgcgcctattcaaatcaagtgggtaggggggttaatcagcagcaccgggctggccggcatggactacctgctcagcgactccatcgaaacgccggagtgggcggattcactgtatactgaaaagttgatccgtatgccggatgactacatttgctacgacccgcctttctatctgccgcctgtcagcgatatgccggttaaatccaaaggttactttaccttcggttgttttaacaatgcgtctaagatcaatgacctgttattgaatcagtgggcggtgttactacacagcgtcccggactcccgactgtttctgaaaagttttaactttgataacgaaaacctgaaagagcgtattcttagcactctcgaagggcatggcatttcgcgcgatcgtgttcgtattgaagggatggcaccgcaccacgcacttctggcgtgctatagtgatgttgatattgcccttgatccctggccgtactctggcgggctgaccacctgtgaagcccttgcgatgggggtgccagtggtcacgttacctggcccgacctttgccggacgccactcagcttcgcaccttgtgaacgctggcctgcaggaactggtcgcctctgactggcaaaactttatcgatattaccgtgggtctgacgcaagacttatccagcctggagattattcgcagcaatatacgtgagattttgctcgcctccccagtctgcgatggtcagcgttttgcgaaacactttgctgacgccatgcgtgcagtatggcaacgctactgcgagggcaaaaagcctgaggcgctcaccttacatcatggcgaagctccgtatttccatgatgataatgaacccgtagtactgcagatgcctggaggtgccgcgaccgtggaaaaaagagtcgaaagtaaagatttctcgttccagttggcgggcagaattatgatgatggatttcggtggcagttttgccatgagtaagaaatttatcagtctgactgagctggattcattcttcttcgttatcatggatacgcttggggtgataaatgataatcacctgccaccgcgccgtaaatcaatccaacatatcaaactgcatgcgctgggcaatggcgaattgacgccagtctatatgtgcttggataatcaacttagcagtacgttgaaacctattgctgatgcaggaaattcgggagcagaaattctggttgcactacagtcacagtcatcaaaactcgataatattcatggcctagaaaaacttgaattattagcgctggataataagttcgatcttaaacctgtttttgagtttggctcacacattattcaggggtgtttggctgttgatgtgcgcatcagttttgtccaaacgcatcaggaccaaatgtcgtttgaggcgatctcgtccttgctcagtgattatgggttggtattccacgcctttaatgaaattgaatacgaaaatcctgtctcacaccctaaatttggtgacatagcatcttctaaaatgctatccgcgaaggcgctgttcattccagatgaaaaacggttgcatatccttgataaaagccagaatgagaaattagccttcattcttcattcagtttatgacatgaaagatgcggcctggcatgtgctttcagcaacctcatatgaacgtgctgaggattatcttaatagtctgaacggtgaagagagtaaaagcacaggaccagttttcgagaccgcaaaaacgattattccggttatgccaagaatgtcacaaagtgaaatcgcgttgtttgaaaaacatatcaaacaagccgaggcatactttgagtttggtagcggagggtcgacaaagctggctgcacgcaacaatgttgctgtctatggcgttgaaagcgataagttctgggtcgatactctgcataaagagaccggtgaattgtgcaaagttgaatatgttgatatcggtccaaccaaagagtggggctatccggtggatgactcacatcaggataaatttgccgattacagtgcggctatcctcaaatatgatcagcctttcgatcttattctggtggatggacgcttccgtgtggcctgcactttaaacgccatcaagcatacgcttgaaaagcagaaaaacacggctgatacccgcatcttcattcctgatttttggaaccgttcagattatcacgtcgtgcttgaatttctcgaggctgtagacatcgtggaaagcacaggtgttttccgtttaaaacaaaacatcaataaacctgtactggatagtatgcttaagcaatatatgtttgttgcagcttaa

SEQ ID NO: 149294 - DNA, 1494 bp, Enterobacter cloacae
atgacagtctccatgaacaacattccgtctgatctccgggttccgctgttctatgccgaaatggacaatagcgcagcgaataccgcgcagaccagcgcgccatcactgcttatcggtcatgtaaacgcaggggcaactattgccacgaatcagctggttttcatgccgtcgaaagactacgccatccagcagtgtggtgccggcagccagctggcacgtatggttgaagcctaccggctcaccgacccgtttggtgaactctgggtggttgctgtacctgatactggaacagccgccacctttaccctgacagtgacaggagcggccacgggttctggcgtggtcagtctgtacatcggccgccgtcgcattcaggctaatgtcactaccggcgatgatgtcacggctattgcatcagcaatcgctgctgccatcactgctgacggacagacagcgtttaccgcctctgccactaacagtgtcgtaacgcttaccgcccgtcataaaggcacctgggcaaacgacattccgatcacccttaactactacggttttagcggaggggaagtgcttcctgcgggggtacttattgccgtcgccccgggtgtgacaggtgctggcgcccctgtactgaccggggcaattgccgcaatgggtgacgaaccgttcgactatatcgggcatccgttcaacgatacagcttcaatgaacgccttcacgctcgagatgaacgataccagcggtcgctggagctggttgcgccagatttacggccacgtgtatacggcaaaaatcgccgctgtaagtgacctgatcaccgtcggcgatatgttcaacgatccgcatgtgacgcttgcaggttatgaaaaaacagttcagtcctgtccagatgaactggcggcaagcagaactgcccgcgctgcggtattcctgcgcatcgatcctgcccgcccgacgcaaacgggagagctgacagggatgttaccgcccccaacgggcaagcgtttcatccgtactgagcagcaatcgttactgactcacggtatcgctactgcatatgcagaaggcggtgtgcttcgtattcagcgcgatatcacaacctacaaaaagaacgcttacggcgtggcggataacagctatctggacagcgaaacgctgcataccagcgcgtatgtgctccgtcgcctgaagtccgttattaccagcaagtatggccgtcataaactggcgaatgatggtacacgattcggccccggccaggcgattgtcacccctgcggtcattaagggtgagttgctggcaacgtatcgccagatggagcgtgaagggatcgtagaaaactatgacctgtttaaagcgcacctgattgttgagcgcgatgcgaatgacccgacccgcatcaacgtactttatccacctgattacgttaaccagttgcgtgtcttcgcgctgcttaatcagttccgtcttcagtatcaagaggagtccgcgtaa

SEQ ID NO: 149295 - DNA, 183 bp, Enterobacter cloacae
atgtttgtgaaacccataaatgggcggtcagttcatgaccctgcccgaggcgatcttttgcctgctgaagggcgaaacgttgatgaaagccagtactggtaccgtcgggagctcgacggagatatcaaaattgttcagccatcgaaagacgctgaaacggataaaaaggtgagcgctaaatga

SEQ ID NO: 149296 - DNA, 561 bp, Enterobacter cloacae
atgaaactcacacctgttattgctgcacttcgtgcccgatgtcctgttttcgaaaatcgtgttgcgggtgcggcgcagtttaaggacctgcctgaagtcggcaagatgaaactcccgtcagcttacgttgttcctggtgatgattcgcctggtgagcagaaaagtcagacggattactggcagaccctgagggaaggtttttccgttatcgtttttgtcagcaacggacgggacgaacgtggacagtttgcgtcattcgatgtggtgcacgaaatccgtcagatgctttttaaagcattactggggtggaatgcggaagagggcggaaaccccattgtctatgacggaggcacgcttcttgatgttaaccgtcacgagctgagctatcagttcgactttgttgttgagacggaaatcaacgaagaagacacccgtcagtacgacgaactcggcgacctggacgagtttaaaaccctctccatcgatgttgactttatcgatcccggaaacggaccagacggcaatatcgaacaccacacggaattcactctccctacctga

SEQ ID NO: 149297 - DNA, 414 bp, Enterobacter cloacae
atgaaacttcgtcaggcgcaaaccagcgcgacatacctgcttcccgatccgggagagctggataaacgggttcatatcagaaaacgtgttgatgtacctgctgctgatttcggtaccgagcctgaatatccggtgtcatttcctgtctgggcaaaggtggttcagaccagcgctacgacatatcaggaaacagctcagactgacaacgttattacacattacatcaccatccgctggcgaagcggaatcacctcagatttcgaggcggtgcagggcgatcaggtgtttcgcgttaagcgggcgcgtgacctgaacagtaaacgccggttcctgcttcttgaatgcaccgaacttggcgttgagtcagtgacagccggagggaacagcaatggcaactcccttttttcacgttga

SEQ ID NO: 149298 - DNA, 324 bp, Enterobacter cloacae
atgctcctgacactggaagaaattaagcatcagctgcggcttgaggaagattacaacgaagaggatgagcacctgacgttgttaggaaaagctgcacaggccagaacagtgagttttcttaatcgcactctttattcggagagtacaggcgttccagaaaccgatcctgacggggtggttatgacagatgacatcaggttgggaatgttgctactggtcactcacttttacgaaaatcgttcatctgtatcagaagttgaaaaaacagagatgcctcagtcattcacctggcttgttggcccttatcggttcattccgttatga

SEQ ID NO: 149299 - DNA, 351 bp, Enterobacter cloacae
atgcctcctcgcacaccaaaggcctgtcgcgttcgcggctgtcgaaacactaccaccgatccatcaggttactgtgaagcccacaaaggcgaaggttggaggcaatacaagccaggacaaaccagacagcagagaggatatggtactaagtgggagattatccgtgcacgcatcctgaagcgtgacaatggtttgtgtcagagtcatatcaaacaagggatcattaagcaggcgtcatgtgttgaccacgtcataccgaaggctcagggcggcacagacgatgatgccaatctacagagcctgtgctggtcatgtcacgccacgaagacaggaaaagaaggtcgcaagtga

SEQ ID NO: 149300 - DNA, 1146 bp, Enterobacter cloacae
atgaggatagtgtattttgtcaatgcagcgtggtacttcgaactgcattggttggaccggtcagaagcggcaattagcaaagggtatgaagttcatcttgtaagtaattttgctgatgacgccatcaaaaataacctggaaaaaaaaggtataaaatgttgggatattgagcttaatagattttctaaaaatgtgtttaaaaacatttcaatattcactgcatttagaaagatctgtaagcaaattaaacccgatcttattcatctaattactataaaaccaatcctttttggtggattgtatgcccgggttgcaggcatcccttttgtcgtgagctttgtgggattagggagattgtttggcaataaacgaggttggttgaataaattcattttcaactcagtactgtcaatttatagtcttttgctatcagcaaaaagcccagcgcaagtaatatttgagcataatgctgactttgctgagctgagtaaatatattaaatttgatgaaaataacatccacatcattgaaggagccggggtagacaggtttcgctttagttatcagccagaaccaactcagaataatttctcggtattatttgccagccgtttgctatggtcaaaggggctcggtgaagtagtcgaggccatcggtaaggttaaacaaaatgaaaataacacaaccttatacgttgcgggaattctcgatgacaaagatccggatagaattgaattagatcaaattttgcaatgggaaaaagaaggaaaaatcatttggttaggtcgaagagatgacatccaaaatttaatcagaaatagccatgtcgtgattttgccaactaaatattcagaaggcgtgccaagaataatcattgaagcgtgtgctatgggccgaagttgcattgtcggaaatgtacccggctgtaaagccataattaaagataatttcaatggatgtgtactaaaaacacatagcgctagtgagattgcggagaaaattgaatatcttagagataacatggaaataagaaaaaaattcggcctacgctcagccgaaattgtaaaagaaaggttcagcaaagaaattgttatagataaaacgttatgtgtttacaataaaatactaagtacaacaaagcggtaa

SEQ ID NO: 149301 - DNA, 732 bp, Enterobacter cloacae
atgggacgctataaaggatcctttcttggtctggcatggtcacttttcaaccccatattgatgttaacagtctacacatttgtattctcggttatattcaaatctcgttggggaagcagtccagatgccgggcatgcagattttgcaatcattttgtttaccggactgattatttttaacttatttgcagaatgtattaacaggtcaaccagccttatcacctcaaatgtaaacttcgtcaaaaaagttgttttccctattgagatattacctatagtaaatctgctggctgctttatttcatgccagcattagcctcatagtcttatttattgcaatactggtgtttaagcatcagcttcattttactgtcctgttactgccagtcattactattccacttatgctctctatacttggattaagctggatcctggcctcactgggcgtttttgttcgtgatataccacaaactattagtatcatcgtaacaatattaatgtttttatctcccgtattttatccgttatcagcattaccggtggttttccaaaaaattgtaatgttgaatcctctggcatttatgattgaagaagcaagaaaagttgtttactggggaaatgagcctaactggaccatgctcgcaattaatatgcttattggtttagttatctgtgctgcaggttttttatttttccaaaaaacaaaaaaaggatttgccgatgtcatctga

SEQ ID NO: 149302 - DNA, 1410 bp, Enterobacter cloacae
atgtcatctgataacattgcaattagcgtaagtaacattagcaaatgctataacatttaccaaaaccccagagataggttaaaacagtttttcttacctaaagtccagagtatggttgggaaacctgtacaacgctactataacgaattttgggcgttaaataacatcaactttaccatcaataaaggtgagtcagcgggaattattggacgcaatggttctggcaaaagtacattactacagctaatcaccggcacgctaactccaacaacgggcacgatacaaaccaagggaagaatagctgccctcctggaattaggctccggtttcaacccagagtttaccggtagggaaaacatctatcttaacggcgccgttctgggattatcgcgggcagaaatagatgcaaaatttgatgctattgccggttttgctgatataggaacccatctcgaccagccggtaaaaacatactccagcggaatgatggtgcgccttgcatttgccgttcaggtacaattagagccagatattctcatcgtagatgaagcacttgctgtaggcgacgcactttttcaaaagcgctgtttccaacaaattgagaaattaaccagcaatggcgtaactttactgtttgtttcacacgatcaagagtccgtgcgtaccttaacaaacagagctattcttctcgatcgtgggacgcaattaagtactggcttatcatcagaagttttacttgaatatcgtcgtttactacaccgggaagaaagtaagtatttttctcagttagcagaggaagttgctgcccacgcggacgccactcgcgatattaatcaaacccccaccgcgccggctaagatagaaattagtgctaatgctgaaacccctgctgtagaggaaacctcgccctctcgtacagataaactatcgttcggtgaaggtgaagcagaggttgaaaatgttgaattgtttacggcttctggtgaacgtagcaatgcctttaaccctggtgataaaatcagagttcgtgttaattgcaaagtaaataaagatataaaccacattaacgttggcattcgtattcgcaataaagaaggcgtcaaaatttattcatggggaacgttaaaccaggacatgtatgttcgtttccatcaacttaaagatccccaattttgggaacgtgagtttaaagcaggcgagcgtttttatgttgatatggaatttgaatgtactttaggaacaaacctatatgaaatacaggcggcgatatcctatgaggggacacctaattatttctcgcagcgcattttacactggcgtgatgaagccgcgttttttcacgttaatgtcctgcgtgatgaatatttctttggtggcattctggatctcaagatgactgcagagtggtaa

SEQ ID NO: 149303 - DNA, 2118 bp, Enterobacter cloacae
atgaatgatatttcaataactgattatctcgggcctggggtgtatttattacaaaattacccaaaagaaactgagggcctgattgcagagaagggttataaggtgcacaactgcgctgatctggcgcagtgtaaagatattcttaaccgcaataaagttaatttccttttaaccaatgataaagataataattttaatgaatatgccaagattgtcagaaccgctgcaagacattttgtaaataaaatcgttattaatatctttgtagaaaagggaaacggtcagagtttccaggattttattaatataactgacaatcttggttattcgatagacactgtattttatttgctcaatcctggctatgatgaacaatttcgggatgatcaaagcctaaagatagttttgagttatagacgtcagtcagtagtttcgacagacaaaaatatcttagaaacgactatttttgaaaaaaaacttgtaaatacttttccctacatacgtcctggggatcgagtacttgtaatcattaagaataaaaattcgataacaaacattaaaaatattattacagaacaaaccaaggcatctgaagttgaaatttactcattggatgaaattaaaagtgttcagctaaatggcaatggctaccattttctcattactgataaatatgccgatgatggactaaataatgcactcaaagtcattatatcttacctggtgcccgctggcaggtacgttagttttcatacagataaaactgtagttgagacattaagtaattacaatttacaacctgaagtttatttattttatgaacatggccttttaaagactcaaatacatcagggagaagaaattacactctctcctgaattatgtgtttttatgaaaagccctttagccaggtcagagcttccgtatcaggaaacgatttatggctactcgcatccaccaaaaaacctattagcttttgccagagattatactaacccgtggcttattcgcgggatcgtagaattcccattcaggaataggtcaacttatcatctacagcagtatagccatcagattttggagcacagtgctcctgacagccccgattatgccgctgcattggcagtattaggttatcaaatgctaagcggcagtgatgatacagctgacatttacgcaaaaatgctagattactgctcaaatgtgtcgcagatggataatcctacgccacatcaatatcgttggctcatatctttatcgacacttttaggtcttatttgtaacaaaaataatgataaagctaatgcgttaatccatttatctcgtgcagcaaactccagcattgataaatttagcccctctatcggcacgaagattttacaaagcttttatcttcagtccgttatattaatttctttaaatagaatctcctgtgccgagataatcgtcgatagagggattaaaagaggtatacagctactttatcaacatcctgacgaactggtgggtaaaatatctcaaccatttaattttgtgctttatatttaccatgatattcttgattggcttataaagatggtcaacattaaaaacgccataccaggcagaaaattcaacattgcaaattttgacaacggtaacacctggtcggctttgcttcatgaacgcatgaatgcaataaataatatgtcgcaaatgatagatgagcgtgaaagaacaattcatgatcaaaaatgcttaattgatgaacgcgatagaactattcacgagcagaagcgccttattgatgagcgagacagcactgttcttacgcaaaaaaatttaattgatgagcgtgacctggtctctgctcagcaaaatcaattaattgagcagaataataaaactattcagcagcaaattcaaaatgtaactgacttaaatagtcaagtttcctctaaggaacagaaaattgatgaattacagaatcaaaacataaaattaatttcattaatcgatgaaaaagatctccatattgcccagctctctgcagatctagaacgtgcaaataccatactgcgtaagattaatagcacgcctgtaataaggcatctactacgaatgctaaatataaaataa

SEQ ID NO: 149304 - DNA, 1191 bp, Enterobacter cloacae
atggctaatattgcttggtttatacctcaactcattgaagggtctggcggccaccgcacaatgctgcaacatgccgcttatctggaaaaaatgggtcatacatgtacaatttttcttgaagataaaagcggcaaaacaagcggtgcagaggtaattcataaattatttggtctaaaatttaaagacgtcatttatgactggaataatgcgcaaccatgtgatgctgcagttgcaacaatatggtattctgcaccattcgtggccgctctaccatttgattgtaaacgtttatatttcgttcaggattttgaagcttacttcaacccggtgggcgatgcttacctgatggctgaaaattcatactgttacgatttaaagccaattacgattgggcgctggttacgatataaactgcaaaatgattttgctgttgaaagctatcacttcgaatttggggcgaatcataatatctataagcgcgttcccaccattcaaaaagaaaaagcggtttgctttatctatcagccagataaaccgcgacgttgttcgcgtattggtattgaggctttaggtatagttaaacattgcatgccagatgttaaaatttatctttatggttcatcaattaatgataatctctggttcgagcatgaaaatctaggtttattagatttgccgaaatgtaatgagctatataataaatgctccgtaggactctgtattagttcttcaaatccctctcgcatcccctttgaaatgatgaatgcaggccttcccgttgttgaagtctggcgagaaaacaatctttatgattttagcgaagatgctatgctgttgtgtaaacagacacctgaaagcattgccgccggtattatgaaaattctaaacgatgctgatttagccgcgagtatgagctcggctggtcaaaagtttatgaatgggcgtaccctggaaacggaaacagaaggcttttacaaagcgttcaactgcgtgatgaacgagcaggcatacacagcagaagtgatttcacgatcgtataataagcccccgtttgaagcccctcttgccagacctgatattgccaacacgttaacattcgcgcatcagagtctgttaaagagaattgctctacgtttaccgttatttgtgcgcacacctttaagcgcgctttattttaagttgaagaattaa

SEQ ID NO: 149305 - DNA, 1797 bp, Enterobacter cloacae
atgcttcaatgggtagaaaactatatctctgcagagcaatatgatacgccagcgatagcacatgagctatattcctgggaaattgagcaagagaagaagcacatctatctggatccaggtattgaggactttcttgcgcaatatccctctgataagacaatctttctgtccgatttttatacttcatccactgatttaacagagttactcgttagcgctggattggatcagtctgtcatatcagatggcgtttcttcaattgacgagcgactgaacaagagaagtggacgtctcttcgattttattcaacaaaaatatcagttagccggcgttgactggatacatattggcgataatgaatggtccgatgtgcaaatgccgacatcaaaaggtataaaaagtattcggtatctcccagcccaacagcatcagctgcgtgagcaaaaagagtttctctggaataaaaatgaagatctcacggaaacgatcaccaataatattcttaataaatatgcagcatctaaagatttatcagttgattttcagcttggcttgaaaacaactccgttaatcgctggtttttgccttaaaattttggaacaagccgtcatatcaaaaagtgaaaaaatcctctttttcactcgtgaaggcgagtttttcattaaagcaatgaatattttgattagtcatctcaagactaatattaaagaaataaagttaccagaaatcgatattatagaagtcagccgtctggctaccttcgcgccgtctctacaagaaattagcataaaagagatgatgcgtgtttggaatttatatagcacacagtccattagctctttattcaagacccttaacgttgcccctgaaacattccagagtttcatcgacaaatatgggattcctgcagatgaacagatccaatatccatggcaggacagccgtattcagcaactttttgacgactctggtttcaaagagacgctctggcagcatgtgatgcagcaaagagctcttttgaagaactattttgcgacaaaaggtctaactgatgatatcaatgcgcgtatttgcgtagtcgatgtcggctggcgtggcaccattcacgataatattgctcttctttatcctgatattcattttaccggcatatatctgggcctgcagaaatttctcaacgagcaaccatcaaacacatcaaaagttgcttttggcccagatttgaatcaccaactggagtatcctcattttcttgattccgttgctcctattgaaatgattaccaactccccttcaggtagcgtaacaggctatgggctggagaatggtaagatagtcgctattcgcagtgttaacgacgacgaaaacagcgcgtggcataatttcacaaaaacatttcaagaagggatcctggccggtatggaatccttctccgctgcagtgttgagttatggcattactcacgacgttgtacgtggctacgccctaaatatttgggatgtgctaattagtggtagtaataaatctctaactgacgcttttaataatttaaatcataacgaaacattcggcttaggtggatacgttaagaaaaaccatgtacccacgaccttcgagatattaagctctttatggaataaaaacaaccgtgcagcattgattgaatttattaaagcaaatcaatggagcgatggcatacgtaaaagagacaatctgccctcgctaaataaatacattttagcactgacgattgaccttgcggttttttataaaagaaaattctatcgcaagtattaa

SEQ ID NO: 149306 - DNA, 261 bp, Enterobacter cloacae
atggggcattacaccatcagaacaaatgacgatgaagatcaggttatcagaaaggcgcaggaggttaccggaatggcgtcagccagtaaagcctttatgacagccatccttgagcttcagcgtaacagagacgagataacgcagctcaggcgctcactagcgcaagaaaaagcgcggagtcaggagctagtatcatcggtgaatcaattccgttccagcctgaatactatgttcgagctggccgacaacggcaaaagttaa

SEQ ID NO: 149307 - DNA, 819 bp, Enterobacter cloacae
atgaccagagccacagaacgcgcttacaacgagctacagcaggcgtttgatttctacaatcagaggctgtttaacggcgaacttcccgactgcctgatcaccttccagcgcggtaaaaacacgatgggctatttcagcttcagacgttttgttgctgctgatggcagcggcaaaatgattgatgagattgccctgaatcctgagtattttccggcatatccgcttattgaagttatgcagactctggttcatgaacagtgtcatatgtggcaatttcactttggtaacccttcccgcaagacgtaccacaatgcgcagtgggcggccaaaatggaaagcatcggactaatgccctcttccaccgggagacctggtggcgcgaaagtcggccagaaaattaacgactatccgatccccggcggtcgcttccagcttgtcacactggaactgtttcaggggcaatttgcgttgagctggtttgaccgcttccccgttcaggttgaacaacagaaagacatgaccgccgttatcgaacaatggcgggaaacgctggctcaggcgcatcagaatgcaggctccggcattgatattgaagcggtgctgtcaatggctctgttaccgtcagtgacgccacagaacgggaacgcagattcagaagttatagccgggagcaatacgtcctttgttgcggcgtttgaggacaagcctaaacggaacaaggcaaaatatcagtgtccggggtgcggtgctgctgtgtggggtaaggccgggctgaatatccattgcggagattgtgaacaagctttcagagaaagctaa

SEQ ID NO: 149308 - DNA, 234 bp, Enterobacter cloacae; identical to SEQ ID NO: 101044

SEQ ID NO: 149309 - DNA, 270 bp, Enterobacter cloacae; identical to SEQ ID NO: 101043

SEQ ID NO: 149310 - DNA, 456 bp, Enterobacter cloacae; identical to SEQ ID NO: 101042

SEQ ID NO: 149311 - DNA, 210 bp, Enterobacter cloacae; identical to SEQ ID NO: 101041

SEQ ID NO: 149312 - DNA, 2322 bp, Enterobacter cloacae; identical to SEQ ID NO: 101040

SEQ ID NO: 149313 - DNA, 657 bp, Enterobacter cloacae; identical to SEQ ID NO: 101039

SEQ ID NO: 149314 - DNA, 657 bp, Enterobacter cloacae; identical to SEQ ID NO: 101038

SEQ ID NO: 149315 - DNA, 774 bp, Enterobacter cloacae
atgatgactgaatccgataaagaacgtttcaataaccgtttatgtgttggtaacttgcttgtaagtgcagatgtttatgttacaccaggcatgacagaaagcgcggctgaggtaaagttaatcgtccctaacgatgattatcaaaaggcaatggatttgtatgatcgtatttgccagtttgctttgcttcatggtgaagatttacaagggttgttccagacagacagatattactatatgtcatgtttcgtgcgtgatattgaagcatttaagaaagaatttgaaaatgaggaggagttaaaccctttattcaatcatgataagggtgaaacggctgagtttcttatcagtttcccggagaaagctaactatgatgataaggaaccagttaaacaatcctttctggaaatcacacaaaaacatgtcgattcattagatgaacttacatggggtaattttgaacacagagcattcactggcggaacggtaggttttggcatcaatccccatacaatggaacgcattaactttgatgatgagcgtgacaaaataacaaaactatctcgtaaggatttcgtagcgtctaatctcactgattctttcgaagatgatttttatgtcaatcctttgttcaataaagcagaacaaattggtgagattgacggttattccgttttcttcaatcccaggggtttttatttttactggaacaaagaaaccgaatacctgcttgaaagctggctgacgtttcctgcttatccgtatggctggtaa

SEQ ID NO: 149316 - DNA, 471 bp, Enterobacter cloacae; identical to SEQ ID NO: 101036

SEQ ID NO: 149317 - DNA, 336 bp, Enterobacter cloacae
atggtgaggattattatgggatcagcagcaggaagagtcagtgatattctgtttattttcataggatactctaaaaaggttgcctcagtgtttactcggctactcttttttatggcttggttccctgtattggtttatgggttttatcgtatcgccgttatcttatggggaagtacatctgaatctgaatactattactttgagcgtttttttaattatacaattaatttgtatagcttgattattcctatgttggtagttgttggtgtttcaatcatcgtgattttctcactgtttaagataggaactatcatgtgggaggaaaagaaacgatga

SEQ ID NO: 149318 - DNA, 204 bp, Enterobacter cloacae; identical to SEQ ID NO: 101034

SEQ ID NO: 149319 - DNA, 339 bp, Enterobacter cloacae; identical to SEQ ID NO: 101033

SEQ ID NO: 149320 - DNA, 396 bp, Enterobacter cloacae; identical to SEQ ID NO: 101032

SEQ ID NO: 149321 - DNA, 1836 bp, Enterobacter cloacae; identical to SEQ ID NO: 101031

SEQ ID NO: 149322 - DNA, 1044 bp, Enterobacter cloacae
atgcagggtgatattaatactgaaaatcgccatattgtttacgatatcgtgaatgattattttcatcagtggctaaatagtgtggagggtttaaccgagattgccgtaaatcgtcccggtgaactgtttgttaaagtcaggggtaaatggcagcaacaccaaacgaatatgacttttggtgactgtatgtcatttgctggggcaatttctgattatcatgatgggggttctgttacgccagaatatccattgcgctctgccacgctcccccttggggagcgcgtacagattgtcatccccccggcaacggaacgtgaaacggtatcaatcacaattcgtaagccgtccagtgtttttattgaccatgaaacattcgttaaacagggtttctactcgaagctaaatcagggcgctgatttcaggaataaagaggacgaattatctttaatgtttaaagataatcgttttgaacggtttattcctgaatgtctggttaaaggtaaaacgatggtgttctgtgccggaaccggagccgggaaaaccacgtttgcaaatgcctgtctgcaatacatccctcatcatctgcgatgtgtttcaatagaagatactgatgaggcaaaattccgttttcataaaaaccatgtgaagctgtattacccgtcagagggtgaaagtatcgttgttaactcggcctctctactacgttctggttttcgtatgaatccagacaggatactgatgacagaagttcgtggcgcggaagcctgggattttcttaaaggttcaagttccggccacgcaggaaacataaccacggtacatgaaagcacgcctgaagatgctgtgcttggccttgttcagcggtgttatatgaacccggaatgccagaatctgccctataacattatactgcgaagggttttgagcaacgtcgatgtaatcatgagtattaagtacattgatgacgaagatctacgctttgcatcgggtatttactatcgcgatattcactttcaggaatactttgaaaagctgaaggagtga

SEQ ID NO: 149323 - DNA, 1212 bp, Enterobacter cloacae; identical to SEQ ID NO: 101030

SEQ ID NO: 149324 - DNA, 930 bp, Enterobacter cloacae; identical to SEQ ID NO: 101029

SEQ ID NO: 149325 - DNA, 729 bp, Enterobacter cloacae
atggggtttaaaattccacaattaaaactgcccggttttaataagaaaaaagaagtaacggactcttcaaccacatttgaagagaaaaatgtagtgttacaggagaaaatgaaccgcatatataaatttggtggtattgctgggatggccgttggtgtgttgtcgctgcttgccctgaatggtgcgcttccgttaaagagtacggttgtcgaggcttatcttattaatggtgtcactggcgttgctgaaagactgacttctgttaaaaaagaaaatctctctgaaaatgaagcgctggcaaaatactttatcactcagtacgttaaacgtcgcgaaggttataactattttagtcttcagcatgactatgattatgtattgctctatagcgctgaaaatgtggcaactgaatataatgctctaatcaatagcagtaattcacctaaagtcatttacagaaaagctgaaagaacggctaccgtgcaagataagccgtctgtcattatcagcccgtcatcccgtcctgatgataaggatatgggggcatatgttcgctttaaactaaccgtcagggatgtggcgacaggccaaaataatgatgaatactggaatatccggctaacttaccggattgagccacaggtcgaaatggcatcgggtgaacgtaataataatccgctcaaattcgttgtaaccagctacgttcgcgataaagaagttaaagggtga

SEQ ID NO: 149326 - DNA, 1056 bp, Enterobacter cloacae
atggcaacttctaggtttttccaagccgcccatgacgttattgttaaagttctcgaccagtctttgactggtcagttagataacttttcttcaatagcgtatcaattgggtaagtatggtatttctatttatatattgtggtatgcctatacagtaattgtagggaaacagaaatctcatgttcaggattttgtctggaatttatttcgtttttggctgatccttgtttttgtcaggaatatgggcggttggctagatagcgctaatcaggctatagatggactaaaggaaacatttgcaggaggtgacccttggaaatgggttgatgaactttgggaaaaagttcagcaagttgcagcatatcttatgtcaaaagatacttccacgtatgttaaaacagacggcgctattgcggcgatattaacatatgctggcggtatattagcgctgctattaacatctatagtttatcttgctgctgaagttacacttaaaatgctaactattactgcgccattgtttattgtttgcctttcttttggttttttaaggcaaatgtttaatagctggctacagttaatatttagctcatgttttatatttctgttttgcggtttggctattaaagcgggaatgactttccttaatggcatcttgaccatatctatagcaaatgcagacgaactaaatctcatctcgaccggtgctcaagccggggttgcgggtgcattcatggcctggattatctggcaggccaaaacctatgcttcacagctcgcaggtgttggcgttgagggggcattgcagggggctgctgctatggggataggtgctggcgtatttggtgcttcccgcatggcgcgtggtgctcttggcatggggagaaacgcaggtattggcgcatggaagggcattagtcgtcagaaaggggggcttggtcagtctccgggaatgtccggtaagctgggtaatctgaccgggcaggggttaaatattggtgcaaaaaaactgcgtagtgccgcaatcgaaatggctaagaagaaatatggagggtag

SEQ ID NO: 149327 - DNA, 258 bp, Enterobacter cloacae; identical to SEQ ID NO: 101028

SEQ ID NO: 149328 - DNA, 750 bp, Enterobacter cloacae; identical to SEQ ID NO: 101027

SEQ ID NO: 149329 - DNA, 2760 bp, Enterobacter cloacae
atgagtactctttttaaagggctgacacgccccgctttaatccgggggttgggcgttccgctctaccccttccttggaatgtgccttatttctgtattacttggtgtatggattcatgatgcaatgtatgcactcatattgccagggtggtatgccatcaagcgagtaacacagatcgatgagcgtttctttgacctgctttatctacgaactgtaatcaaaggtcatcccttgtcaaacaaacgcttcagtgccgtccattatgcggggagccagtatgatgaagttgatatttccagagtggacaattttatgaagctgaaagaccagtcttctattgaggagctgataccgtactcttctcatatcacagataatctaatcgtcacaaaaagccgtgatttgctggctacctggcatattgacggcgcttactttgaatgtgttgatgaggaggatctgacgttactgacagaccaactcaacacgcttattcgaagctttgagggtaagcctgtgacgttctacacacaccgtgttcgtgtaaagaaagaggttcagtcttcatttaacagtaaaatcccatttgttaaccgggttatgaatgattattaccgttctctttctgagcctgaatattttgaaaacaaactttatctgacagtctgttataagcctttcaatgctgaagataaagtttcacattttctttcaaggaataagcggaataaaaatatttttgatgaacccattaacgacatgaacgaaatttgtggcagacttgatacttatctgtccaggttccactctcgccgtcttggtttgtttgaagaaaatagcaaggtattttctgaccaactttccctttttcagtatctgctatccgggaagtttcaaaaggtaagagtaactaatagtcctttttatacttatcttggcggtaaagacttgtttttcggtaacgatgcagggcaaattacagcttctgatcacgccagatatttccggtgcattgaaataaaggattactttcaggagacggacgccggaatttttgatgcgctgatgtatctccctgttgaatatgtctttacatcgtctttcactacgatggataagcaagcctccatcaaggcgctggacgatcagattgataagcttgagatgactgatgatgcggctaaatcattgctggctgatttgcatgttggtctggatatggtttccagtggttacaactcttttggtaagagtcaccagacgctgattgtttttgctgacacgccggaacgtctggttaaagacaccaatatagtgaccacaacccttgaagaccttgggcttattatcacatattcgaccctgagtcttggggctgcgtattttgctcagttaccgggtaattataacttgcgccctcgcttgtgtacccttagcagtcttaattttgctgaaatggaaagcttccataacttctttacagggaaagaaaaagggaatacctggggtgacagattaattaccttgcgcggttctggtaatgatatttatcacctcaactaccatatgaccacggaaaaccagaatttctttggtaaaaacccaacgctgggacatacggaaattcttgggacatcaaacgtaggtaaaactgtccttttaatgacgaaagcatacgccgtacaacagtacggtgcgccggagtcctttccgtctaaccgaaaggtcaggaaactgaccactgttttttttgataaagacagggcgggtgaagtcggcattcgcgctatgggaggtgaatattaccgggttaagggtggcgcaccgaccgggtggaatccagcggctctgaagccaaccaagcgtaacatcgcttttatgaaggatttgataagactgatttgtacgcttaataacaataccctggatgattaccagaacggcctgatttcagatgcagttgagcgtttaatggcaagggaagatcgttcattccctgtcagtaaacttattccgcttattcttgaaccagatgatgcagaaactaagcgtcatggtatcaaggctcgtcttaaagcgtggaaacagggaggtgaatacggctgggtcattgataatcgcacagatacttttgacgtatccaatctggatgtttttggtgttgatggtacggaatttctggatgataaagttgttgccccggtagcttcgttttatctgatttatcgcgtaacaatgctggccgacggccgacgactcattatttatatggatgagttctggcagtggctgaacaacgatgctttcagggatttcgtttataacaaactcaagactggacgtaagctggatatggtgctcgttgtcgctacgcagtcgccggatgagctgattaaaacgccgatagcagctgctgttcgtgaacagtgtgccacacatatctatcttgcaaatcctaaagccaagcgtggggaatatgtcgacggcctacaggtaaaagagctttattttgacaaaattaaagctattgacccgctttcgcgtcagttcatggtggtcaaaaacccacagcggcagggcgaacgcgatgactttgcagcctttgcaaagttagatctgggtaaagccgcttattatctcccgattttaagtgcttctacggagcagctggagctgttcgatgaaatctggaaagaagggatgaaaccggaagactggattgatatctatcttgaacgtgccaatcgtggaattaattaa

SEQ ID NO: 149330 - DNA, 291 bp, Enterobacter cloacae
atgttgaaactgaataaacgttacttaatactcactgtctttatggctgccttaatgctttgtgttgcggaaccagcttttgctgatgatgtatctacaaagactaccggttttttacaaaagatcattgatttccttactgacttgagaaaaccagcaatcaccattatttgcttaggtattgcatatattgcgctgtttgcacgtcaacatatgacatggatttatcctctgattatcgggatgattatctttatcattgctccttacgtaccggactggttgtcataa

SEQ ID NO: 149331 - DNA, 645 bp, Enterobacter cloacae
atgttatctacctcagcttttatcgcgcttgctatgcaatgcgccgccagcgttcatcctgatactgctcatgaagttgcaagggttgaatctggctttaatccttatgctatagccgagattataccgaaaggtgagcgtaagcccggtgatagtggcgtaatttcttatttcccaagttctaaggaggatgcactaagcataataaaaaaaattgaagctagaaatcaccgttattcaacgggtcttatgcaaataacaagcactaatttttctaaatatggcgtcaatgcagaaaaacttttctcgcagtgtacaaaccttaccgtattcgaaaaaatcatgcttgattgctatcaaaggggagggagtttaaaaaacgctcttagttgttattactctggaaattttgtgacggggcaaaaatctgaatcaaattttaataatacgagctatacgcagcgtattggttatagccgtccagacaacaaaaaggtatgggctgttccatcggttaaggatgaaataggaaaggagactgcaacacaggacattacgcgaaaagaaactactgtttatccaaaatatgccatgcgtggcaccgtatcagatgaaaaggaaacaaacgatgttgaaactgaataa

SEQ ID NO: 149332 - DNA, 228 bp, Enterobacter cloacae
atgactgttaccagaaaaaagacttcaagcaagcgcaagcctcaacgtaataccctctatctcccttctgacgttcgtgatgaagttgagcgaatcgctgttgagattagctaccgccggggaaggcgtatttctgactctggttttgtgcagtatctcattaaaacatgttcacaaaaggcaatagatgaacacataaacggtgccgatatcgactccgaagagtaa

SEQ ID NO: 149333 - DNA, 492 bp, Enterobacter cloacae; identical to SEQ ID NO: 101052

SEQ ID NO: 149334 - DNA, 1161 bp, Enterobacter cloacae
atgggcgtttccgttgataaagaataccggttcaaacgtaaatcctctgaagctggccgcaaatctgcttttgcccataaagtgaaaaatggtggtaagaactatcagcgtaacgtacaggaacgtatcaaccgaaagggtgccagtaaggaagtggttgtaaaaatatcaggcggtgcaatcacccgacaagggataagaaacagtattgactatatgagccgggaatcagaattgcccgtgatgagtgaaagcggccaggtatggaaaggtgacgagatacaggaagcaaaagagcacatggtagatcgtgcaaacgaccctcaaaatgtaatgaacgataagggtaaagaaaataaaaaggtgacacaaaatatcgtgttctcaccgcctgtctctgcaaaagtgaaaccagaagacttgcttgagtcagtcagaaaaacgatgcacaagaagtatccaaaccatcgctttgttcttgggtatcataacgataaaaaagaccatcctcatgttcatgttgttttccgtatccgtgatgaagatggaaagcgtaccgatataagaaagaaggatttaagggagattagaactggtttttgcgaagagctaaaacttaaaggttatgacgttaaggcaacacacaggcagcagcaaggacttaatcagtctatcagggatgctcacagtaccgctcctaagcgacagaagggcgtttatgaggttgtggatgttggttatgaccattaccagcatgataaaacgaagccgaagcagcatttcttgaaactgaagacccttaacaagggggttgaaaagacatactggggggctgattttggcgatcttacatcacgagaaaatgttaagaagggcgatcttgttaagcttaaaaaactcggtcaaaaggaagtaaaaatacctgcacttgataaacatggtgttcaacatggctggaagacagtccatcgtaacgagtggaagcttgataatcttggtgttaaaggtatcgatagaaccccttcatcaagtaaagaactggtgcttaacagtgctgcaatgcttcagaagcagcagctccagatgaaacagttcatccaaatcaaacaagcgatgctccagaacgaacaaaagatgaagattggtatcaaattaggataa

SEQ ID NO: 149335 - DNA, 549 bp, Enterobacter cloacae
atgaagcaaattaatttcagactagaagaaaaacagcatgataatctacttgaatgtctgaaggttatttatccagatgagcctggtttaactgttgctaaaggcatgaaattgcttgccagtgctttacttaaaagcaaagtaacagaagatgataatgataactttatgccagatactaatgattttatcaaaactacaatgtatttaacaatgaaacagcggaataaaatagaaaaagccgcaaagcgtcatggatggactttgtccagagagtgccgctaccgtattcagaccaccttagataatgaactggatttctttgatcaagaacttcttatgatgaatcggtgtcgcaatgctatcgataaagtaggccggaattttcactacatcatccttaatgatcaggcaagagttcttgataaagatgggttctatcaggatgcagaaaagcttgaaacagaaatcattaatcttaaaagtgagtttgaaaactacataatgttatgcaaaggtcgaactgtatctaataaggtggaggtgtaa

SEQ ID NO: 149336 - DNA, 258 bp, Enterobacter cloacae; identical to SEQ ID NO: 101054

SEQ ID NO: 149337 - DNA, 342 bp, Enterobacter cloacae; identical to SEQ ID NO: 101055

SEQ ID NO: 149338 - DNA, 267 bp, Enterobacter cloacae; identical to SEQ ID NO: 101056

SEQ ID NO: 149339 - DNA, 543 bp, Enterobacter cloacae; identical to SEQ ID NO: 101057

SEQ ID NO: 149340 - DNA, 516 bp, Enterobacter cloacae; identical to SEQ ID NO: 101058

SEQ ID NO: 149341 - DNA, 903 bp, Enterobacter cloacae; identical to SEQ ID NO: 101059

SEQ ID NO: 149342 - DNA, 444 bp, Enterobacter cloacae; identical to SEQ ID NO: 101060

SEQ ID NO: 149343 - DNA, 357 bp, Enterobacter cloacae; identical to SEQ ID NO: 101061

SEQ ID NO: 149344 - DNA, 978 bp, Enterobacter cloacae
atgagatatttaaccgaattaatctgtcaactctacaggttgacagatcaccataagctgaccgctgcaacgtttaaaaatcttgctgatattaagttagttgaacctacagcggatgcagacaccatattgcagcttgaaaatatatttagcgaatactcactgagatatattgacagggatctggctgagattctgagtaacataataactacagataaaaaacactctctggatttcgattttaacaaattacagtctctgactgcctcgaaaagtttcggttgtggatggaacaaggtaataaatggtagttggttcaaaaacctttactcatggggggaggggatgtatcccgccaaaaacctgaaagctgaaaacatttcagactgggaggataatatatggcacattgagcatgaaggtttcaaccctcgcgattctatcaatgttacatattactcctggcttgaccgctatgtagcttcaaacagtggtggttcacatcatgcagcaatggttgtatatcaatctgtcagagacaaattagagtataaacgagaagcggttattgaacaactgagcataaattcaaacaccgttgaaatacttgaccagaactactattcattcatattccagataaaacgccctagtaataagacagaaatttatacatcagaatatgaatttatagatgctttaaaagagtttgtagaaaacagatatactatacttaatcctgtcaattacgtttccagtattaaattagtttttattccaaaacatgcactaaaaacaaatgacaaaactttccgtaactggttctattctgcaattagttgcgggaaaataatatcattccccgattatctgaaaaatccagcgcattaccatacacaccattactcacatgaactaaactcgataacacttggtgaccctagcagaaagtataaactgagagaagatttttag

SEQ ID NO: 149345 - DNA, 282 bp, Enterobacter cloacae; identical to SEQ ID NO: 101063

SEQ ID NO: 149346 - DNA, 663 bp, Enterobacter cloacae; identical to SEQ ID NO: 101064

SEQ ID NO: 149347 - DNA, 585 bp, Enterobacter cloacae
atgaataccgataagatgacaattagccaacgtgcaaatcaatggcttgataatgactacttatttattgataccgaaacgaccgggctgggtgatgatgcggaaatagttgaaatatgcattattgatagtcatgggtttattatgcttaatacgcttattaagcccactaagcctatccctgatgaagcaatagccattcatggaattactaatgaaatggtagcttttgcgcctgcctggactgatatatgcggggcagcggaggaactatttcggcgctttgggtttgttatctataacgccgattttgatctccggttaattcgtcagacctacgcattgaatggaaaaccttctgaaggtgcgccatggatgctggctgctcattctgtttgcgcgatgaagctttatgcagagtatcgaggcgagccgggacgatttaatggctataaatggcataagctggttgatgctgctgcgcatgaaggtgttgtggttgaaggtaaggcgcaccgggctttagctgattgcaaaatgacgctagggcttgtccgtgctctggctaaaggtggtgctaaatga

SEQ ID NO: 149348 - DNA, 705 bp, Enterobacter cloacae
atggctatgttagtggaaaattgcccaaggtgcggtgcgcaaaaaatagcatttgatgttcgaggggctaactgctgtggtacgtatgaaacattttccggcgaaaatttacccgaatatgaagtatattgtgtatgcagggagtgtaagaaaaccacaatatatatttgcgatagtttagaacgggggcgtgatcttagcagtattaactggggcatggccttatttaagttaactgatattgcaaaagtaaaacgtccaattagtccagcagatttagatgcaggagaaccaccagaatttttgcctcagcatatacatgaagcttttgtagaaggttctaagtgtttagctattggttgctataacgcagcaggaactatgtttaggttatgtttggattatgcaacaaaggacttattacccaaggaagatgctgaaccaaatcaaaaaatacggcgaagcttagggttaagaatgaattggttgtttgataatcagcggttgccagagactttaagagacttggctgaatgtgtaaaagatgatggcaatgacggcgcgcatgaaggagttttagattacgcggctgcagaggatcttgaagagttcacttatatattgttggaacgtttatatactgaacctcaacgccttgttcaggcaaaagcaagacgtgaggatagaagaaaaaatagagggtag

SEQ ID NO: 149349 - DNA, 447 bp, Enterobacter cloacae
gtggatgaactgcagagggtggatgactggctaacggcattgctggcaaatctggagcctgcagcacgcagccgtatgatgcggcaactggcgcaacagctacgccggacgcagcagcagaacatcaggatgcagcgtaatcctgacggcagcggctatgagccgcgccgggtgacagcccgtaacaagaagggacgcatcaaacgccagatgtttgcaaagcttcgcaccacaaaatatctgaaaactgcagccagtgccgactctgccagcgtgcagtttgagggcaaggtgcagcgcattgcccgtgttcaccactacggtctgcgtgatcgcgccagccgtaaggggatgctaattaagtattcatctcgaagattactaggtttaaatgaccatattaaaagtgacataagggatttacttttgagttatttgttaatgtaa

SEQ ID NO: 149350 - DNA, 531 bp, Enterobacter cloacae
atgagccatcctattgattattacgccatagaagagcatgcaaggataattgaacaattatgctgctcatcagaggtttatttacagcgtatacagtctacccagaaggaatatgatggcgtcatggtaactgaatttgaaatagaggagttatcgtacaacggttggttggagtatagtattagcaataatctcattaacctttgtactaaattacgaattcttcaagactctagtaaacatgaatgggacccagattactcacccgagatagaagcattcgaagaatataaaaatatattttttgttattgatggccatgttaaaggctccatacgcgagtgttgcaataaagttattcacgcactaaatttcgaactaacaaaaaaaacctccaaaaatggagtaaagtattgggacggttctattattgtttcaggaattcaaaacaaaaagaactggaaaataaaaatcaacctttttcttttttgtcaaagcgtaaagctctatttaagattattaagtgcgtaa

SEQ ID NO: 149351 - DNA, 183 bp, Enterobacter cloacae
atgacggataaatatgctgttgttgatagcacaggcattatcgtaaatatgattaagtgggatggagtaacgccattcaaccagggtgaagggctgtcgttgataaaatatggtgagggttacgttatcggcgggacgttggtagatggcgtatacacgccacctatagtcaatgaggagtag

SEQ ID NO: 149352 - DNA, 558 bp, Enterobacter cloacae
atgcttattggatatgtacgcgtatcaacaaatgaccagaacacggctttgcaatgtgatgcgctggagcggtcaggatgtgagcttatttttgaagataaaatgagcggtaaaacagcagaaagaccggggcttaaaaaattactaaagcgcctttatcctggagacacgcttgttgtctggaaactggatcgacttgggcggagtatgcgtaacctggtcattctggtggaggaactaaaacaacgttccgtgaacttccgcagcctgactgacagtattgatacttcaacaccaatggggcgttttttcttccacattatgggcgcgctggcggaaatggaaagggagctaatcgtggagcgtactcgcgccgggctggcggcagcaagggcgcaaggtcgtattggtggcaggcgtccaaagctaaccccggagcaatgggcgcaggctgggcgtttgctggaaggtggcgaaacacgtcagcgtgtagcgttgatcttcgatgtgggtttatcaacgttgtacaaaaaattccctgccagtcggcaagcttaa

SEQ ID NO: 149353 - DNA, 357 bp, Enterobacter cloacae
gtgctcaatctcatcgacagtaaacgcccctttcgggaaaagcggctttcctttccaccccagcgccagctgaataacagcaccacgtcgcggcagaacgatctgcccgtcggcgtcgtccagctccagatcaagctggtcagcttcaaaaccccggttatcggtcagcgtcagactcatcaggcgcgcatccagcgcggttgtcacgtccttaccttcaatagtgatactgaaagccgggcttttgctgttcaggtcaaaaagatcagagctaaaattcactgcagcaaccctccaacagtatttttaatattacctatcgcagacgttgcagagtcctgcaggttactgagctga

SEQ ID NO: 149354 - DNA, 282 bp, Enterobacter cloacae
atgaccgtcaccgactttacgctcaatggtgataaccggcagcggcttaccgctcaccgtttttccctgcccctgccggataaacaacaggtttccatccttaacggaagcaatcgccccatactggcgcgccagcttcatcaggaaactggcatcgctttcattggtctggtccatgtgatccagcgccttgtccgtcaggtctttacccagcgccattttgaggttatgccgcgctgcgatttcctttaccacatcgccaacggttgtctggtgccatga

SEQ ID NO: 149355 - DNA, 849 bp, Enterobacter cloacae; identical to SEQ ID NO: 105317

SEQ ID NO: 149356 - DNA, 1647 bp, Enterobacter cloacae; identical to SEQ ID NO: 105316

SEQ ID NO: 149357 - DNA, 165 bp, Enterobacter cloacae
atgttcatcaaccccatcagcgacaaactgaccaattttcttttcaagacgctgcattgcctcataaagcttggcatcagtattatttttaagaaacctaaaaataaaaccataaaaaacataatcagaagtagattattatacttgagtaagcttttcagctaa

SEQ ID NO: 149358 - DNA, 264 bp, Enterobacter cloacae
atgaacggtcagggtggccggatctatgcccataagatcggcatcaaacagagcatgcattgttggagtcatcaggatgccattagacggattgtaccgggttccatgttcaatgtgtgccgcatccaggacaccgccattaacccaaccggttaccgcacaacggcccgcgaaattctcgatgagcagagctttaaatttaccctgtgccacgccactacgttgcgtcactacgcgctcgcagtgctcaccctggatatctag

SEQ ID NO: 149359 - DNA, 750 bp, Enterobacter cloacae
gtgctggtcattaaacgcgtattcaggctgaccctgcgcgctgcgcagggctttattgattccattttttctctgatgaacgttccgctacgctgcccggattacagctgtgtcagcaggcgggcaaagtcggttaatgtcagtttcaaaacgtccacccggggtgaaatcgcacacctggtaattgattccaccgggctgaaggtcttcggtgaaggcgagtggaaagtcaaaaagcatggccaggaacgccgccgtatctggcgtaagctgcatctcgccgttgacagtaaaacacatgaaatcatctgcgctgacctgtcgctgaacaatgttacggactcagaggccttccccgggttaatccggcaaacccaccggaaaatcaggtcagccgccgccgatggcgcttacgatacccggctatgtcacgatgaactgcggcgtaagaaaatcagcgcgcttatccctccccgaaaaggtgcgggttactggcccggtgaatatgcagaccgtaaccgtgcagtggctaatcagcgaatgaccgggagtaatgcgcggtggaaatggacaacagattacaaccgtcgctcgatagcggaaacggcgatgtaccgggtaaaacagctgttcgggggttcactgacgctgcgtgactacgatggtcaggttgcggaggctatggccctggtacgagcgctgaacaaaatgacgaaagcaggtatgcctgaaagcgtgcgtattgcctga

SEQ ID NO: 149360 - DNA, 1512 bp, Enterobacter cloacae
atgcgatcttttaatgtaaataaaaaatatttaccaatacttcctggacttgcgttatgtgcagttttaagtaatacaaatgcaagcactgagtatcaacatgatgctgacctaatcgctcagcaagcaaaagggcttggggcacaggctaaaggtgcacagcagccagatggggctcttagccttgatgctacgctaaaatcaccagatgtgcagaagtacatagcgcaagctgaagcactccaaaaaaaccaggacctgagcaagcaaataaaccgtggttacgtccccggtatgaatgcggatagtgttcaagcagttatagaccatacccaggctatcagggcccaaagtaataactctgaagctgtcaacgatataattagaagacgtgatgaaattcaagaaaacgccagccttaatgaagcggctctgaaagctgtggaaaataagccggaagtcatgcgaggacaatctaaaaatatcgaaaaattgtttggttcctcgggcatcacagctgctgacttcgaaagaaaaatggatagcacacgtgaagaagcactatcaactgaaaatggaataacgatctttgcttcatttagcttgccggattatgtactggaagaccttctacgtacggcctcagagcataaagctcgtgtagttttcaatggtctaaagaaaggaactactcggctaccagagacacaggcagcaataaaccaaatgattgtcaaaggaaaatttgaatctcctttgattacaattgatcctgatagcttcagtcagtatcaagtaactcaagtaccgacaattatttctagggagcaagctcgttttgcaaaaatggtaggctccttcaacgttgagttttttcagcgagaacttgctaaaaaacccgatcaggatattttcccggttgctggtaccacttatcccgttgaagaaaagagcatcattaaagaaccggaagaacgtgcacaaaaatatgactgggaaggtgcaaaaaaaagggccgtttctgacacatggaaaaatcaatggatggtcgacctccctcctgcccaggaacacaaagaatttttaattgaccctacagtgagggtcactcaggacgtaaaagataagcagggccgtgtaatagcttccgccggtgagttgattaatccactttcgagatttcctcaaaacctgacgatgataattttcgatccactcaatccgggccagctggtatgggctgagcagcagtatcgacaacgtctgggtagtggaaaagtaatgccaatgtttacccgtatccaaaaagataatggatgggatcacctaaatgatttacgtgaaaaatttaacggtaaggtgtttaaagttaacgaacagatcatctcacgctttcagattaaaaacacacctgcgcttataactactgaccaagataaattccggatcaccctgtttagcgaggcagaagtccgtggtatcggagccccaaatctttcagaggaaaaataa

SEQ ID NO: 149361 - DNA, 375 bp, Enterobacter cloacae
atgttgaagcttgccggtattacgcagggcagaaagcaggttaataaaggtattaccggtggttgcctcgtcatcaatcaaaaccagcgttcgtgcgttggtaacacgacgtcttttctcttcatcatctggcagatagatcagatgatcggtggcgtggctgtgttcttccttgaactcgcaaagcaacgtgccatcaaccgggtgacgggtagaggtcagatagacagattcaggatgctggtggcgcacttcatcaaatacaccggccccaagcccaacggcggtttcagccataccgataaacagtacgggtcctgtcagtgtcgaggggaactggctggcaagctgtctgtaggcctgccgcatgactga

SEQ ID NO: 149362 - DNA, 336 bp, Enterobacter cloacae
atggctccggcccttctgcctgaggtgcaaaacgaactggtagcggcgcagcaggtggcagcagccacccgcagcgagctgtcagcctgccagcaccagatcaatatgctcaatgcaaacgtaagccgggcggctgaggatgcgtatctgagcgcccatctggcctacgtgagcactctgctgcgtgagtccatggatctggctgcgatggctggcgcgaaagtaagcaatggcgcggcttcggttacgctggatcgtcgtctggggctgcttctgcaaaatcagggtatggttctggcgcttaaaaattaccagggggatcgtgctaatgggtaa

SEQ ID NO: 149363 - DNA, 606 bp, Enterobacter cloacae
atgggtaacttccaaaaacttcttgatctgctgcgtgatgcgcagggccctgtgacgctgactaaagcgctgtctgtggcttccggtcaacctctggcgcgtcagtcgctggatttagcgctgaaaagctgtgttgagctgggcgtgccggagcatcatcagaggatgctcaaagatatggttgcagctggtgaggctgctggcgtttctcaggaggagatcgaggggcgaattgctggcgttatgcgccgattctccactgagccaatgaccaaatccaccgctggcgatgtgctggcgcaggcaatgagcggttcccctgtgcagtccgtcccggatatgacgatcacccgcaacctgtcggttgagcaaatccatctggcccggcagcagcagattgccgatcagcagctgctgcgcgagtgtgagagcgctggcgtttcaagtgggcagattgttgagctgagcgaggctctttctgcctctcgtggccttccagacgctgcccgtgcccccggtatcgctgccgttcgccagcagttgactcaggcgcagccgtcgccagcggctcaaggcatcgactggagcgcccgcggatggaaataa

SEQ ID NO: 149364 - DNA, 2733 bp, Enterobacter cloacae
atggctattaaaatcccggtcagtgcgcagtttgacgctgctgaccttaaacaacagatccagatggtcaacgaccagatccgcgtccttgcgtcgcaggttgggcaggccaataaacagaagtttgagcccattaacctgcgctcaaaagacgatctgaatgctttcattaagcaaatgcagaagctgctctccatccagacagagctcaagcagaccatgggcaagaccggacagggcgcgactaacccgctcatggctgactggaaaaagatgtatggcgatcaggctgaacgcatcaagaaaatgcaggccatgttgcaattccttggcgtggagtttgacgacgctccgaaaccgaagccgaaaccgccagcgcctaccccctcaaatccttctccagcgcctcagagcgggccgcagaataataaccagcctccggcatggcagaaccaccttagcacgatgctgcgcaacgctggcccggttggcggcaccattagcggcgcaatgaatgccgggctttctggcggtgcaggtgcagggctcatgggcttagtaggcggtctcgcagctctcggcgtcggcaaaatcattggtgcggttgcggacaagatcggacaggcgcaggacaacgtgatcggactggataagctctatcgtcaagtgggcggaattgtcagcttttccagcctccagcgtggtgtcatgagtaccgccaaccgtctgggcatgaccaacggtgacgccatcgcgttggcctctacatactcccgcgccgctaacatccagccgggacagaaccttggcaccggaatgctggtatctggaggtctggcacgctcctacggcctcgatccaaacagcgtcgcgggcacaatggggcagctctccgcctcccgtgtcgtaaataacgatcagcagctgcgccgcatgggcctgctcatgggggaagctatcggcaaatcaggcgcgtttgctcaggctggcgaagctatgcaggcaatcagcgactttgccacccaacaggcacgcatgagcctgaccgcgcctaatgtgcctggctatgcgggtgcaatggctggcctgatgagctcagggatccccggcatggatttgcagggctccaccaacctgctgggccgcatcaatgcaagcctccagcgcggtggtgcaatgggcgacccgtcgcgggcattcatggcccgcatggctctccgcaacggcatcaataacccgatggcgcttgaagttctccagtctggcggcgctttcggcacaatcagcagcactctggggcctgattcgctgtacggtcagcgttttggcggcaattatcagggcgatcagactcttctcgatatgacccggcagagcatccatcgcgcctatggttacggccctgattcagtcgtggcgctctctcgccaccttggcgtcggtatcaatgacgcgctggcaattgaccaaatgagcagcgcagatatgagcggcgtttctgatcgcctcagacgcctgaaaattaaccctgacagcgtaaacgcaaccagttacgcagcactgggccagatccaaagtggcaaagggctggaggtcatgggcaatgagtacctcaagcgtgggagccttgatgctggcgaacgccagcgccttaccgatgcccttcgaggggctgacccgcagaagctgaaagacgtgctcactgaggttgccgcaacgcatggcccggctaaaacagaagggagcgagatccgcgataatgtagcgaaacttaataatcaatttgaggattatgcacgccgcgccctgcctgctctcgatgtcatgcgtatggcgctggtcaaaatgaccgggggcagtgaggacagtctgcgccgcgattatgagaaggggatgcgcctcgatacgcagcagcaggcccgccgcaaatacggctggcgtctcgatgcctaccagcaggaaatgaacaccttgcaggacaagggcgtcggtatgcagaccatgggaccagatggcgaccgatacagggcactgaaacgccagcagcacctcatgcgtcagcagcagctcaactttgtagaggagggcaatgcaaatgcacacgcagctgcatacggcccgcaaacagcaggagaggctgcgctcgacagcaactatatttcttcaccatccgccgccgcagctggcagcggtgctgccggaaactgggcagggaacaatgtcggcaacgtgaaagacgttaacggcaactggcggcgcttcccatcccagcaggcaggcgtcgcagcgtcggcggggcagctgctgcgctatagcaccggggcattcaaaggcggacgcaagcgcaccctgcgcgagattgtcgccacatatgccgcaggtgatccagaagtgccgcgctacatccagcaggcgagcaagtggacgggcttcgaccccgatcaggagctagacctgcgcgatcaggacacgctaaagagggttacagcagctgttttgcgcaaagaaaacacgaagaacaccagactgccagtcagcactgtagaggcggggattaacgacgccctgcgcaactcgtttaattacagcgccgaccggggccagctcaacgtcaacggcgggcagatggagatcgtagtgaaagaccagcgcggcaacgtcctgcaaactcagcagcagccagttactgccagttttcagcagtcgagaagctgggcaaatcggaatcggtag

SEQ ID NO: 149365 - DNA, 1215 bp, Enterobacter cloacae
atggattctccaacacccgaaaaactccagcttgtcggagccgtcgaggcttacccggatttgatgcccggcattctgtttgtcacctgcccggataaagcaaaatcatgtgtcagtgtcagcacctgccagcgtcttcacgacgaaacgataagtcgtaaggcagaccctgaggcttgcgccagaccatgctcacgatgcgctacgggcgtgattttgtggcgcggtgaatcttcacggctacctcccgttaatattgagcattgccctcgatgcgggagaacagggagacttgttgggaagaagaacggcagcaaggctacaccatggagcgtgtgttgcgtgtcttgctggaatcgcgtcgctgagaacaaaaagggcgttggagcccgtgggaatccgatcatgcagccgcctcttatggccccgtggcttatcggtcacgttgaggacggcgtgcctgtctggtcagtctggattggcgacagccaaagcgaggccatacagcgccagctgctgcgtaatccatcaacagagtttcacaaccagcgccccggagtgacagggtttaatgcaagtggccacccggtttatttatgcgagaaacacccatcgaccccactcaattgggactgggacagggatgccccgacagtaggcacagtgcggttttattgccctgaatgcgagccgaaggcacgccttctaccgctcgccattccacgctcccccatgcagtttatgacagtgcaggaagcggtagagatacacgccacagtggaggataaagcatacaccgcagccatctgcgccgattgtcaccgggcaccgctgcgaattgccagagaccgatcaggctttgttactgcgtcatgcccttgctgcaatgccagcgctacctcctccggcaataatgtctcacgcaagtggattgacccggagccagtccagccgcgctatttcggcgtctaccgggctgcatacaacgatttccccctgagcggtagcggtgcagctgcgctgcaattggcgtccactttacccctaacgctggaacgggtgccgcagctcctgtttaaccgcttacgggcctgcattctggctgcgctgggtgcttgggtgtatatcgacgggttgatgattgacaccgaacgtggcgacgggccggaacttctcgccctactggcacagctacgggcggctgatttgtcgtga

SEQ ID NO: 149366 - DNA, 1212 bp, Enterobacter cloacae
atgagcgagagcaaagatgaattcctgttgtggcccggcgtgtttgatgaagcgctggcccgcgtgctgcctgcatctgattatcttgggtgggtgcagcaggtacggcagatcgcctgctgggctaacatcctgaggctgggcgatgcgcagaccatctgcgagcgctggagcgcatcaggcgttaatgcagccccggctgacgcgggacttattcgcgccgctctccgccctcagtctctcgaaaaactcagcccgttctccatggctggcgcgttcctgcgtgattctggtcttatcccggagatccactctgggcgctttggctcctaccaaccgaccgccgcagacctcgccaaacgtgaggcacagcgccgggaaatggaggaggcccaccgggtagcactggaggctgacgaacggcagcgccagattgccgtccggcaggctacgcagatttacaacaaggccagtctcgatccggctttgtctccttactggcaggcaaaatgcagtgcggcagcactgcccctaccgctcccggatgacgtaaaggccgcaaactggcgcaccttcgagaaaggggcatccagcaagggaattttctggaatcactcgatgattgtccctttgtatcgctttgatgacgagttgcagctgggcatgagcaccgtcgagatcgtttgcggtcgccctagcccagaaactgagctgtcattcaccggagcaaaacgcggcctcaagggtgcccagcgtggcgggagcttctacccgttcaacatcgacaaagcccgtcacggttcacctctggttatctccgagggttttacctctgggctggccctgtctctcgctatgggcggagcattgcctgtgttctgtgcaatgagctgcaataattttgccgcagtcattgatgagctgcgcattgtttacgaccacagcccgatctacatcgtgggcgacgtgggcgtgggtgaggaaatagctcagggcatcgctgagtccagcacttcacgccgtccgccagtgtatgcagtaccgctctcccgcgtcttgtttgaagacggcaacgatccttttgacctgctggcccgtcatggcgtggataattcccgcgccctcctccgctcattgttccgggaggcccgtattggtcgtgacggtacgctgtcagcgccgagctcatcggatgccagtcacaatatttga

SEQ ID NO: 149367 - DNA, 288 bp, Enterobacter cloacae
atgaccgatcaggactttgaaacgatgctgtttaacgaatccagccagactgcgacgctgtttgtggcacgcgctgtgactgacctcgacgctatgctgggagaaggttacgccgtcgctaaccctaccgttctggcgcaatggctcgcggtagccggttctcaaatggttacgctccagcagctgcacggcggtaacggtctggcgactcaaatcgagcggctgggagccatggctgacgccattgaagcaagcgcagcagctgcgcacacggggagaatgcagtga

SEQ ID NO: 149368 - DNA, 432 bp, Enterobacter cloacae
gtgaaccacgaacaaatccgcagagataccacagcggagctcacgcacatcatcaaattatcgcttgcacagtggcaccgggaaggcggcaaatcagcagggcctgagggccctgtgatcgcgttcggtaagcgcattatgcgcggcggtgtgatgatgatagtggggcattccatacgcggacacgaatgggccaccccagcctattacgctgatgtggcccgcagcctgcgcaaagacaaaacgggcaaggtatacgccagccactgccagatagagagggaaacattcacctgccagctgctcgcacgaattatggggctgacgcaaactgcttatcgtgggttgcctgacgtggctcctgagtggcaaacaatcagcgagaatgagcagcgccagatcgttgagtttattagcagctgtatggcgtga

SEQ ID NO: 149369 - DNA, 159 bp, Enterobacter cloacae
atgatagtgcgcatgagtgctgagggggccgggctggctgacattacgaatgcgctcaatgcgctgggctttaccagtgcgaccgggcaggagtggacacgcagccgcctgcgggactatcggcataagctgcgggatagtggactgctcaatggctaa

SEQ ID NO: 149370 - DNA, 1557 bp, Enterobacter cloacae; identical to SEQ ID NO: 27181

SEQ ID NO: 149371 - DNA, 456 bp, Enterobacter cloacae
atgaaaccaacaccacaacagaaagccgccgcacgccagatgcggagagatcaccccgatatgagcgtgcgccagatcgccgcaaagctcggcatcaacagcggaaccgtcagcaaatggctccgccagcctgaggcagaaacaccgctcagcatcgagggcctgatcgcccagacgcagcagaactttgagaacctgccacccagcgaggccgaaaagctcagccagctgcgcgatgagctccgggcaaggcagcaagccatcattaagcggcagatcagcctactggagggactacaagcggaggggatgaccgcgctcaaaaagaaagacctacccacagcccgcgcagcagccagcctgatctctgcattcacaaaggcattcagccatgaggccatggtctaccagatcattgaccccgccgctgtcatgaaatcagcgctcaaagagtaa

SEQ ID NO: 149372 - DNA, 363 bp, Enterobacter cloacae
atgaaaatcaatatacccgtagcgctcgcgctactcctcgccagcacgcagctgcacgccggagagattgcctcccgctttatctgcactgacggcaccataatcagactcgagacaaataccgggccacgcatgaccgttacgtggaacgggaaccgattcccagtcagagaactaacctctgaaagctacggcgtccatatcaccgcaggcgtgccacagcagactaccgccatgatggatattttctggctggacagcggaaacaggaaattctttgcgaccttctccacctccccgaaagctgacactgtatcggtggaatgctcccacgatttaggcagcaaccgcctgcaattctga

SEQ ID NO: 149373 - DNA, 195 bp, Enterobacter cloacae
atgattattgcatcacagcgtcacactgcacaaacctttcccggcctcactattgagcacgggcagatctgccagtacggaaaacctcgcagtgtagcgatgaacgggcgcggcattcatcaagtaagcctcagaactacagaggggcgggtgctgaccctgcccgtctgccgactgttcgagtggcaggcataa

SEQ ID NO: 149374 - DNA, 630 bp, Enterobacter cloacae
atgaattgcatgatttacttgagagcaagcactgctgagcaggattccgcccgtgcagaggttgagctcagaacctttgccgccgccaacggcctgacggtttgcggcgtttatctcgagaatatcagcggcacgaagctggagcgcccacagctcaacaagctgctgaacgatgctggtcacggttttgtcgtgctggttgagaaaatcgaccgcctgagccgcctcacacacccagaatgggaagagttgaaaaagcggatcgccgccaaacagctgagcatcgtctcccatgacctaccaagcacactggcagtattgcagatggaacagccgaccggggcgggtggtttcgacgttcgccacatattactcaaaacgatgaatgacatgcttctcgaccttgccgcatcatgggccatcgatgactaccagacgcgccggaaacgtcagaagcagggcatcgaaaaggcgatggcggaaggaaaatacaaggggcgacaggccaacccagcactgcacaaaaagattatgaaatacgcgagcatgggacaacataagacgggggagatcgccagactggcgggctgctcacgctccacggtgctgcgggtattgaaggagcagtag

SEQ ID NO: 149375 - DNA, 5424 bp, Enterobacter cloacae
atgatgtcagtcgccccagtagcgtcagccggcgaggctgcaggctactacagcaattccgataactactattttctgggcagccttcagagcctctggatgggggaaggtgcaaaagcgctgggccttgagggcaatgtccgtggcgatgatctgacggccgtgctcgaggggcgtcttccggacggctcacggcttggcaaggaggttaacggacagcatgtccaccgcccgggtcatgacctgaccttttcagcccccaaaagcgtgtctattctggcactcatcggtaacgataaagaaatggtggaggcgcataatcacgccgtccgtgtggcggccggctatgtggagaagctcatctcggcccgcgatacgaaagacggcgttacgtccatcgtacacaccggcaagatggtagcggccgcctatacgcatgatacctcgcgcaatcttgacccgcagctgcacacccatctcctgattgccaacatgacggagtatgcgggcaaatggaaagccctggccacggactatatccataacgccggctttatcgagaccgtcatgaagcaccaggtcacgctcgggaaaatctatcgcagcgcgctgcgtgagcgggttgaagcactcggtcatgaagtggaagaagtaggcaagcatggtatgtgggagatcatgggcgttccggaagacgtcagggacgaatattcttcacggggccgggaaattcagggggccgtgggggctgaagccacgctgcgcagccgggatgtggccgccaaagacacccgcagggcgaaagttgacccttcacgtatgcgcctgatggagcgctggctgggccagatgaaggagaagggatttgacctgaaggcgtatcaggagagcgtggtgccgcgtgatgcaggtcttcgtgagaccgcgactcatccggagcgagatcacctggctaagccggttcctgccgggcctgaactggcttctctgcagacgtcgtccacggcagaaaagagcgtcgatacacctgctcaacccgcagaacgggagagccagtcccgtcagcctgtaccacagcagattgacacgctgagtcagccggcacagaccagacccgaaaagacgccggcgaccaggagctttcctgcagcgcagctggacactgaaataccccgcccggaactgactgaggctgtccgtctggccatctcgcagctcagcgacagtaaaacgcgcttcacctttggcgagctgatgatgaccacggcggagctgagcgaacagctgccggagattcaggatattcgcgtggccatcgatgcggcgctgaaggacggcatgattgtgccgctggacagtgagaaaggggtcttcacctcccgtattcacctgctggatgaactctcgatccaggcgctgagtcaggaacatctcaaatccacaaaagtcgtcagtttcacccgtccggcgcagtacgcgccggcggcgctggaagtcgtggagaaagacgccctggttctgatgaatgccccgtcaggcgtagcgggtatccgggacctgaccgcgcagctggccggtattgccggcgcgaacggtcgtgacgttcaggtgctggccagctctgccgagcgcgccatttcgctggcgaaatccgacgatttgcgggaacggattatcagccggcagcatgttctgagcggtgatttccacctgaaaccccagagcacgctgattatcgaaggggcagagcgtctggggctaaaggagacgctggttctgctgggcgaagcgcgcgcgcaggacgcacagctggtctttctcgacagtgccgggcgtcaggcgaacggtaatgccatgtccgtactggagtccgcgggggttgcccgctcccgccgcactgagccggcgcccagactggaggccgaagtggtcagtattccgaacaaacgcgaccgttacgaggcgctggccaaccggtttgcagagctgagcggaggaactgaaaacgtcaccgccgtcgtggtcggcagacgtgaacaggcacagctgacgggcctggtacgtgaggcgctgcagaacgcagggcagctgggccgcgatggcgtggagatagaggcccggcagccggtctggctcgacagcaaaacgcgccgcatgcccggttcataccgtcccggcatggtgcttgaagatcgcgcggacgcaaaagagcgtaagtcctatgtgattgaccgggtgcatgaggatacgcgagtcctctcgctcatcgatggtgatggcgtgctgacccggatgaaaatcggtgatatcagcgctgactggcgtctcttcagccgtgaaaccctcagcgtggccaccggcgaaaaactgctgtccgtggcgggcgaccgcgagcacagcctgaaggccaaagatcgtcttgaggtgaccgggataagtgaaaaggggattgaggtgaaacggggggaagacaccctgacgctgccaaaagaccagccgctctatctgtcacatgcttacgtgaccgcgccgggtggacgggataacgacaccggggtggtcctggccgcgctgaacagccgcgacatatcgacccagaccatgaactcattggcacagagtggccaccgggcggaagtgttcacagccgaagtacaggaccgggctgaagcccggctgcagcgcatgaagacaaatgcctctcccgtgcagctggtcagaaacctgagcggtcaccaggacatcagtcaggcggttgattcactacatgacagagtccggactgacgcgggcctggccgtctggcgtgccattaacgaccagcgcaccgtggtgatcagcgagcttaagctggcgacggaagcgcagaaatatcatcccgaccttgaagccatcgggaatgaaattggcgcgatgattaaaaatggcgagctgttgtccgtatccgcagggggagagccggtactggtttcccggtccacctgggagatggagaaagccattctgcgtgtggtggaggaagggaaaggtacgcagcagccgttgctggaacaggtaccggaggccgtgctgaacggcctgacggatggacagaaaaaggcgaccaccctggtgctgggtaccacggatcagtttatcgggattcagggctatgctggcgtggggaaaaccactcaactgaaggcggtgatatctgcactggagaccctaccggcggacgttcgtccggtgatgacggggcttgctcctacgcaccaggcggtgaaagaaatgagcgacgtcggtgtccgggcgcagaccatcaaatcctttgtcgttgagcatgaccaggcgacggccggaggcgggaagcctgactataaaggacaggtgtttcttatcgatgagtcatcaatggcaggcaaccaggatacggcggcactgttccaggccattgccagcggcggcggacgtgcagtctcgatgggggatatcgaccagtttgaagcggtcgacgtgggcgcgccgtttaagctgatgcaggagcgcagcccgatggatgtggccatcatgaagcaaatcgtccgtcagaaagacctgcagctgcgcggcgccgttcacgacatcattgataaccggatcgatgcggccctgcagcggattgaaacccagccggctgaccgcgtggcgcgtagcgcttcagccgcgctcccggagagtgcgattcaggaaacggaaacgcctgttaacgacatcgtggctgactggaaggaccggacaccggaggcgcggtcccgtacgctcatcattgcgcagctgaacgccgaccgtaaggcgataaatgccggcatccatgccacgctggcagcgcggggagaactgggggagaaggccattaaggtgcctgtgctcgataaaatcacccatacccgccatgcgttcaataaaacagaggcctgggagccgggaatggtggttaaacgcggtgaccgctaccaggatgtggtggccgttgaccgtaacggcagcacggtgacggtacgtgatgaggaagggaagattgctctggtttcaccgaaggagctgatcaccggtgacgtgcagctgtttcgccgcagcgagatggaagtccgttccggcgatctgcttaagttcacggcgaccgatcgcgaacaggggcagatggccaaccagcgctatacggtggagtcggtcagcgaggaggggaatatccgtctgaagggggagaacggtcgcgtcaccatcaatccggagaaggtccgggcgcagcagcatctcgactacggctgggccgtcaccggctacggcgcacagggggccagtagcgattatgtcattgcgcttgagggcacgaaagacggacgtaaggcactggcttcccgtcgtgccttctacatttcagcctcacgcgtgaaagagcacgtccagatatacaccgacgggaaagcggactgggttaaggcggtaaaaacgccggagcgtgatatcaaaacggcgcacgatgcgctggcaccagaaacgcagcgcaaacaggcgaaagccatctgggcaatggggcagccggtgaataaaacggccatcggtcgcgcctgggtgcgccatcagggcatgcaggatgcgtcactgacggcaaaaatcatcccggccacccggcgctttcctgaaccggcgctggcgctgccggtgtatgacaacaatggcaggagtgcgggcctggccctggtttccctggttgccagcccggaaggacggatgacgcagggtgagacccggatggtcatgacagaacgcgcccgtggcgccgtgctgcagcggagtcagtccggaaacacgatagtggccagcgacctgacggctgcactcgatgcagtacgaaataatccaaaggacggcgtggtctggcaaaccggtgatgaaccaccttcagcatggctgcttaaggtaagcggtgggacaaaacaggatgtgtcaccaggtattgtctccacgctgacggacgaacagagcgtacagcagctgcgtgagcaaatgctggcagacctggttcgcaatgaagaagccagtcggagcaggcagccggagtcgttgctagcggaagttccacaggaagaggtgatcagactgaaaccggaagacattaacccgcgtaaaccggaaccactcaacccagatgcagatgtaatcgccagggtgagaggtgaggaaaacaccgatggacgggaaataaaagccgctgcaggcgtcagaagtgagctggaaggtgctgacaaggcatccggtgaacagtcgcgggcatcgcgtgtgattgcagatctggcaaacgcggaacgcgacatgctcagggcggcagaaaatactgaacgcggccgcacgccggagcgtgaagaacagactctcacccgaaccattcagaaagaacgttaa

SEQ ID NO: 149376 - DNA, 3009 bp, Enterobacter cloacae
atgcccgtcgattttctgaccactgagcaggaactgaattatggtcgctatgttgcagaacccaatgacgtgcagctggcgcgctattttcatcttgatgagcgagatcttgccttcattaaccagcgacggggaaggcataaccggctgggaattgcgcttcagctcaccaccgcccgttttctgggcacctttctgacagatttaacccgggttctgccgggtgttcagcaatttgtcgcggtgcagcttaatatccgccgtccggaagtcctttcccgctacgcagaacgggataccaccctcagagagcatactgcgctgattaaggaatattacggttaccatgaatttggcgatttcccctggtctttccgcctgaagcgcctgctatacacccgtgcatggctcagtaatgagcgacccggcctgatgtttgattttgccaccgcctggttgcttcagaataaggtcctgctgcccggagcaaccacacttgtacgtctcgtcagtgaaatacgtgaacgggcaaatcagcaactttggaagaaactggccgcgttgccggacagctggcagaccgcccgcgtgactgagctgctggacattcctgaggggcagcgaatttcaccgctggagcaactgaaaaagggacctgtcaccgtcagcggtccggcatttaccgaagcgctggagcggtatatccggctgcgaaacctggagttttcccgactgagttttaccggtctgcccgctatacaactacgtaatctggcccgttacgcaggcatggcgtcggtaaaatatatcgcgcgaatgccacagcagagaaagctggccgtactcaccgcattcgttaaagcacaggagactgcggcgctggatgaagccgttgatgtgctcgatatgcttatactggatatcactcgtgcggcgaagaaaacggggcagaaaaaacggctcaggacgctgaaagatcttgaccgtgctgcgctactgctggcgcaggcatgttcattgttgctagctgagcaggctgacgatgctgaactgagggagaccatattcagcagcataccgaaaagtaggctggcagaatccgtcagcaaggtaaatgagctggcccggcctcagaacaacaatttccatgacgaaatggtggaacagtacgggcgggtaaagcgttttcttccggcggtattgcgcgacctgcatttccaggcagcgccagccggagaacatacgctgtccgccattcattatctgaccgaactgaacggctcgaaaaagcgcatcctggacgatgcgcctgaacatattattaccggcccctggaaacgcctggtatacgatgcggagggccggatacagcgtgccggttactcgctttgtctgctggagcgccttcaggatgcactacgccgacgggacatctggctcgaaaacagcgatcgctggggaaatccccgcgagaagctgttgcagggggaagaatggcaggttcagcgggtccccatctgtcgggcgctgggacatcccactgatggacataaaggcgtgcaacagctggcggtccaactggataaaacctggaaagccgtcgcatctcgctttgaaggaaatgcggaggttaatatctgccatgacggtaaatatccttccctgactatcagcagcctggagaaactggaggagccaccatcgttgcatcgtctcaacagtcgggtaaggcagctactcccgccggtagatttgacggaactgttgcttgagatagatgccagaacgggctttacacgtgagtttacgcatgtcagtgaatccggggcccgggcgcaggatctgcacatcagcctgtgcgcggtcctgatggctgaggcttgcaatatcgggctggaaccgctgataaagcacaatataccggcgctgacgcgccaccggctcagttgggtgaaacagaattacctccgggcagaaacgctggtcagcgccaatgtccgcctggttgattttcagtccacactggagcttgctggccgctggggtggcggcgaagtggcttcagctgacggcatgcgctttgtcacgccggtgaaaaccgtcaattcaggacctaacagaaaatattttggttccggacgtggcatcacctggtacaacttcgtctctgatcagtattctggattccacggcatcgttgttcccggcacattacgtgattccatttttgtgctggaaggccttctggagcagcagacagggctgaatccggttgagatcatgacagacacagccggtaccagcgacattatttttggcctcttctggctgctgggataccagttttctcctcggcttgccgatgccggtgaagcagtattctggcgggtggataaatcggcaaattacggtgcactagacgaactggctcgtggttgtgccgatctgtcgaaagccgagtatcagtgggatgagatgatgcgagccgccggttcgctgaaactgggtaccattcatgcttcagaactcattcgctctttgctgaaaagctcgcgcccatcagggttggcacaggcgatcatggaagtggggcgcgtcaacaagacgctgtaccttctaaattatattgatgatgaagattatcgtcggcggatcctgacgcagctaaaccggggagaaggccgccatgctgtggcgagggcgatctgctacgggcagcgcggtgagatcagaaagcgctatcgtgaaggtcaggaagatcaactgggtgcactgggcctcgtcactaacgcagtggtactgtggaacacactttatatgcaggaagccctgagctggatgcgcaggaatggagaagaaaccgggggtgaagatatcgtccggttatccccactgatgcacgggcatatcaatatgctggggcattatacgttcacgctaccggaggatattttgaagggggaactgagagaattaaattttaatttaaacaatgaattaccttcttag

SEQ ID NO: 149377 - DNA, 258 bp, Enterobacter cloacae
  misc_feature (201)..(210): n is a, c, g, or t
atgattaaaaacaacgagttaatccatccttttgacgtaaccagtaatgaatcaggtaagacttatcaactgacgcctaactcgtccaagtcggttcagcccgtggccctgctgagattgagtgtatttacccctgtcggcacaaaagaaaaccgcgaccgaaactttgaagttgatgcctctgatgagctttcgtgtatnnnnnnnnnncgtgtatggaaattgcaagatcggagggttatgacgacatcaagataa

SEQ ID NO: 149378 - DNA, 2334 bp, Enterobacter cloacae
atgaaaatgaacgtaacggaaactgtaaaacaggcgtgcggccactggccgcgcattctcccggcgctgggtgtaaaagtgattaaaaaccggcatcaggcctgcccggtatgcggcggctccgaccgcttccgcttcgatgacaaagaggggcgcgggacgtggttctgtaaccagtgcggcgcgggtgatggcctgaaactggttgagaaggtgttcagcgtatcggccgcagaggctgccggaaaagtgggagccctgaccggcaacctgccgccggttgccccggaggtgattgccgccgcagaggcggaaaacgatgctgaccgcaaagcggcggcctcgatggccgtaaaactcatggagaaaacccgcacggccgccggcaatgcctacctgacccgcaagggcttccccgatagtgaatgtgtgatgctagcgaccacgcataaaaccggcggtgtgacctttagctccggggatttggttgttcctctgtatgacgataccggagggctggttaaccttcagcttatcaatgctgagggtctcaaacgcaccctgaaaggcggcacggtaaaaggggcatgtcatatcatcgaagggcagaaacaggcaggaaaacgcctgtggatagccgagggctatgcaacagcacttaccgtgcatcatctgaccggagaaaccgtcatggtcgctctgtcgtccgtgaaccttctttctctggcgagccttacccgacaaaagcacccggcgtgtcagattgtgctcgccgccgaccgtgacctcagtggcgacggccagaccaaagccgcagcggccgcacgagcctgtgaggggattgttgccctcccgccggtgttcggtgactggaatgatgcgttcatgcacaatggcggggacgccacgcgtaaagcgatttatggtgccatccggccagcttctgaaagcccgttcgacaccatgagcgtggcggaatttaccgccatgagcgcgagtgagaaggcaatgcgggtatacgagcattatggtgagacgctggctgttgacgcaaacggtcagctcctttcccggtatgaaaacggtatctggaaagttgcccagctcaccgccttttcccgcgatgtagcagctcagtttctcaggctgggctctccattctcatcaggaaaagttgcctccgttatcgatactttaaagctcataattccccagcagatgacaccatcaaggcgtctgattggatttcgcaatggggtgcttgatacccaaagtggcattttcagcccacacaacaaagcacactggctgcgcaccctctgcgatgtcgattttacgccgccggttgaaggcgaaacgctggaaaacaatgcaccgaatttctggtgctggctcaaccgtgccgccagtggccgtgctgataaacgtgacgtgatactcgccgcgctgtttatggtgctggcgaaccgctacgactggcagctctttctcgaagtcaccgggccgggcggcagcggtaaaagtattctcgcagaaatcgcgaccctactcgccggggaggataacgccacgtcggctgatatcgacacgctggaagacccccgcaagcgagcatccctgattggtttctcgctgatacgtctgcctgaccaggaaaaatggagcggtgacggtgccgggcttaaggccatcaccggcggtgatgcggtctcggttgatccgaaataccagaatccgtattcaacacatattccggcggtgattctggccgtgaacaataacccgatgcgtttcaccgaccgcagcggcggcgtgtcccgtcgtcgggtgattattcacttcccggaacagattgccccagaggaacgcgatccgcagttgaaggacaaaatcgcccgcgagctggccgtgattgtgcgccagcttatgcagaagtttagcgatccgatgactgcacgctcgctgctccagtcccagcagaactccgatgaagcacttagtatcaagcgcgatgctgacccgacgtttgatttttgcggctatctggaagcgctgccgcagacgaacggtatgtttatggggaatgccaatattatcccgcgccagccacgtaactatctctatcatgcctatctggtctatatggaggccaatggttacaggcacgtactgagtctgaaagcattcgggatggggctgccgatgatgctgaaagaatacggcctgaattacgagaagcgacacaccaaacaggggacgcagactaacctgacgctcagggaggacagcaacggcgactggctaccaaagtgcgacgaacccgcagcaacataa

SEQ ID NO: 149379 - DNA, 321 bp, Enterobacter cloacae
atgaaaaagccattaccgcccgtactccgtgccgccctttaccgccgtgctgtggcctgtgcctggctgattgtgtgcgaacgccagcgccgctatccccatctcaccctcgaggcgctggaaagcgccattgccgccgagctggagggcttctacctgcgccagcacggcgaggagaaaggccgtcagattgcctgcgcactcctggaagatttgatggaagccgggccgctaaaggccgccccgtcactgtcctttctggggctcgccatgatggataaactctgcgcccgccatatcacatcgcctgtactgcactga

SEQ ID NO: 149380 - DNA, 228 bp, Enterobacter cloacae
atgaaacacaccaccatcacgattcaggagctcgaatgcctggagcatctgcgcaacgtcggccacttcgttaacagcctgatgcaggagcaggactgctccacggtacgccgcgacccggcgcagcagtcgcagctcacctccgtgatttacctcatgaccgcccagctcgatggcgtggtcgggcagtgtaatcagcgctggctgaccggggagagcaacgtatga

SEQ ID NO: 149381 - DNA, 195 bp, Enterobacter cloacae
atggctacgatcctcaccccgtcacaccctcagtttatctttgtgtttgccgctattcgtcgcgcagaccgtaaaccccgtatctgtatgctccgcaccatcgccggtaatgagcaggccgcacgtctttccctcgtccgcgattatgtcctctcgtttgctggccgtctgccggttgtggaggtgtgcgcatga

SEQ ID NO: 149382 - DNA, 738 bp, Enterobacter cloacae
atgaccgacacttccattcctgattacctgaaaccggcattcagccgtctcgataaggcgaaagccacccacaccgaaaatgcccgtaagctggatgaaaccaccaccgccatagcccgtaccgctgaacagaaagcagggctggaacaggagagcggcagtgacatgagcgaatggcgcagtgcctttcgtgccgccggttcggtgctgactgatgaactcagaaaccgccatctgatgcgcgttgcctcccgcgagctggcgcaggagtgtgacgcactggcagaggtactcgcctttgaacgtgacaggctggacggagcctgtggcgtctcagccagagcttaccgtcaggcacacgggcgcatcctgaaagaatattcgtcacacgagctcgacagcgcgcttcgtgagagcagcggggcacttgtccgtgcgatgaagctgaaaatgctggcgcacagtggcgcacttgagagtgaggctgcggcggcgattggttatgtggagccggaaaaagccatcatgaacgaggtggccgcatggctgaaagatgccattcaggcatgtcacatccgtctgaacgatgaacccgttctttaccgcaccggtctgtcggctgagacactcccgcacatgaatacgacccgggcatccaccccgactgcccgctataaattccaccaggaaatgcgcgagcgagaggaagacctgaaagcgcggggactgttgtcatga

SEQ ID NO: 149383 - DNA, 246 bp, Enterobacter cloacae
atgatgcgctgtccgttctgccagaatgccgcccacgtgcggaccagccgttatctgtcagatacggtgaaacagagctatcaccagtgcgtgaatgtcttctgttcggcttccttccgcacgctggaatccctcgacaaagtgataagcccgcccgcggagaaagagcaggagacaccggctcaggtaaatcccgcagccgccccccggattgcagaccgcgcgcgctcgtccgtgcgccactga

SEQ ID NO: 149384 - DNA, 567 bp, Enterobacter cloacae
atgaatgagataacactgacgcaggcctttaatacctgccagaaaaataaaagcacctggcttacccgtaaaaatgaactggcggaagctgagcgggaatatcaggaagtatttgcgaccgggaatgacagcggtgcccggtcactgcaaatgctgcgcgacattattgatgtgaagaaatgggaggtgaaccagagcgccgggcgctatatccgctcacatgaagatatgcagcgcatcagtatccgtaaccggctggatgattttatggtgtcgcacggtaccgaactggccgctgcgctggcacctgaactcatgggctataacgggcagcacagcgccgtaaaacaatgcgtcatgcagcattccgttgaatacctgcgtgaagccctcgtggtctggctggccagaggcgaaaaaattaattattcagcacaggacagtgaattattaacggctgccggattcaggcctgacgcggcttcgcgggctgacatccgtgaaaaatacacccctgcacaaaaccagaattacgtgaataaacgcgctgaactggccgcccggtag

SEQ ID NO: 149385 - DNA, 1284 bp, Enterobacter cloacae
gtggtaaggcatcccaacgaaaaaacattttccgatacaggctttggaggttgttatgcgttagaaataaaagggaacaatgcattcaactacccaaaaaattatttttttgacgagttattacgctccaaatacatagataagggaatgttccccaaccacttcaccagattttcaaacaaaggcatatctagatacgttcaacatttttctcctttcgatacatcgggcataacagatgcgtttgatgtacctgactttagctccacattacgctttcatttcagtaaaattggctacaccattaaagaaacacctaaaacatttattttaggccaggtaataaaccttctgaaaggattaaataactgcaaactgttatgtgataaaaaaatttatacttttatcaacaaaataactccacacaatcgaacagaaagtataatcaaaagtcatcttcctgagttattaaattcccctcataaagacactattacatcttatttaggaaagcttaatgacattggtgatgtagttataccttcaaaaatactcacaatcgaaaactgtgtacaagaaatttccgacactgaaataaaaaacaaagagtcccgaaaagatgatgccatattaaaagtgcaacaattgtacaataataaaatactccttcgcgggaaaaatttcacatgtgaacattgcactgcttcactttggtttgcacttgaggacttttctcgaataaattattgtaacgaatgtggaaatagcatcaacatccccataaccacctccaacaaaagcactggagatcactttaaaataaaccacttagtttcccgcgcagtggatcaagggcaattagcaacgctattattagtacattacctgtacagtcaaaacacaagtattccttacatagcaaattatgaaatttatgatgattcagaattattatctgacattgatgtatgcgtgaaattaggtaacaaacttgggctttgcgaatgtaagtcaaaacaatcatttagtgaaaagcaaatcgatgagttagttttcatcgcaaataaaatagattgcgattttattttactgtcatgccttttaaataaagatgatgctgagatatctcgtaacatagactacatcaaagagaaaaacattaacatcccaattttcatcataactaatgaagagctattttcaacaaaacccaaacgtttatactcttattttgaggttaaccatcaaactaataaattttataacggaccaatattaatataa

SEQ ID NO: 149386 - DNA, 438 bp, Enterobacter cloacae
gtggatctggccgccgaactgaatgaattacgtgagttattcgagccccttgcagacgagacaggaaagacaatcacggttgaaggtgaaggggttattgccggagacagcgacatgctgcggcgtgctttcagtaacctgctttcgaatgcaatcaagtattctcccgataacacctgtacagcgatacgccttgagcatgacagtgactgtgtgaacgtgatgattacgaatacgatgtctggcccggttcccgctaatcttgaacgtttgtttgaccggttctatcgcgcagactcatcacgggtccacaacacggaaggcgcggggctggggttatcaataacgaggtcaatcattcatgctcacggcggcgagctgtcagcagaacagcaggggcgggaaattgtgttcaaagtgcgcctgttaatggattaa

SEQ ID NO: 149387 - DNA, 234 bp, Enterobacter cloacae
atgcgtaaatcccgactcactgaacaccagttcattgccattctgaagtccatcaaggccgggagtaccgtcaaagatgtctgtcgcaagaccgctatttctgaaagcagatatcccggctcagcgtgtcatccagtagtacacaggctagtggcaaatcgcggatacccgctgaagtgtacggacactgttccggaattagtctcactgacacaatgggctgaagtgcattga

SEQ ID NO: 149388 - DNA, 3054 bp, Enterobacter cloacae
atgaattcctctaaacctaagaaatttaacctgtcggcttgggctcttgctaatcagcaactagttgctttttttatgctagtggtcaccattgccggggtgatgagctactacaacttgccacgaaatgaggatccggcatttactattaaaacggctgttgtttccgcgagttggcctggagcctctgtggaggataccgtcaatttcgtaacagacccattggagaagaagcttcaggaagtcccctatctagattatttagaaagttatagccgacccggtgagtcggttattttcatatatctgcgcgataacactccgccggataaagttgaagaactgtggtatacggtcaggaaaaaagtaaaagatatttcccctcagcttcctgccggtgtcacttcacctgctgtcaacgatgaatttgctgatacctacggcactatttatggcttcacgcgtgaaggtttcaccgagcgtgaattgcgtgatatggttgatagagttcgcacagaagtcttaacactgccagatgtagggaaagttaacctgctgggcataaaagaagagcaagtcattttatcattctcaccgcagaaaattgcgggtatgggattgacgctcgataaaatcaagaacgccatcagcgcacaaaatgccgttactccggcgggagaaatcagaaccgataaagataaagtcatgctgagagtcagcggcgcttttgcatcagaagaaagcctcaaacagctgacattacatattcaggatagatacgttcctctgacggatattgcaaccatctctcgcgaggaagtcgatccgccgactccggcctttagagttaatggggagtcggcgatcggcttggccatctccatggcccctaccggcaatatgttggacttcggtaaagcgcttaacgaaaagatggatgatatttccagccgcttacccgcaggtatcaacgtaacaaaagtggccgatcagtcgactgtagtacatgacgccgtggggaactttatgaaagtgctccttgaagcggttgtcattgtgttggctgtttctttcctctcattaggaactcgtgccggattagtcgttgcagcctcaattccgctagtattggctatgacattcattggtatggaaattgccggcataggtatacagcgtatctccctaggtgcgttaattatcgcgctggggctgctggtcgatgacgccatgatcactgtagagatcatgatgtcgcggttagagaaaggagaacctgtcaaaaaggcggcgacagcagcctggacgacgacagcttttccgatgctaacaggtacactggtaatgatcgccggctttataccggtcggtttcgcaacgtcaagtgcgggagaatactgttattccctgtttatggtggtgttgatttcactcgtcaactcttggattgttgctgttcttttctcaccactgataggcgtgtggcttttacctaagatgatgaaggaacactcccacggtaaaggtaaaatcctgcaaaagtacgaaagcgcattgcgatacatccttaagcgcagagggttgactggtatcgtggcggttactttgcttgccatatcttttatcggaacttcatacatggaagaagagtttttccccacttctgacagacctgaattgctcgtcagtctgacgttgccgagaaatgccgtgcaggaagatacggcaaaagaagccatacgtttagaggagattcttaagaaagatcccgatattgagtatttcacgacgtatgttggctcgggcgctataaggttttatttgccaatggatctgttacttgataacgaaaatatcgctcaattagtggtggtgaccaaagggcttgaagaacgcgatgctgtaaagtctaggctcgaaaacattctacaaaaagattttggtcatcttgttactcgtgcttcggcgttagagctaggccccccggtgggctggccgttgaaatatcgcgtttctggcccagagcttactaagatccgtgagatatctactgagttagctggaaagttaggcgaaaacccgcagacgagagaagtcaatctcactgcgggtgagccacaacgagaactctatataaaggtcaatcagacggaagcaagggccttgggactaagctctcaagatgtcgccagtgcccttgctgaaatgtattctggttcggctgtgacgacgatcagagacaaaaatcgtcaggttaacgttttattgcgagcttcagaagattcgcgtcgagatattgaaaccgttgcggacttgcaattgactacagccgatgggcgtgttgtaccattgaaacagattgcaacgataagttatacgttggctgagcctatccagtggcggcggcaacgcgagcctttcatcacggtgcaaacagatattgcaccagggctgaatgcgttcggtgtatctaagggcttggagcctgttgtcgatgaattacgtaaaagtttgccaccgggataccacattaccgaaggcggaagtgtcgttgaagccatgaaaggtaacagttcggtattcgccgttttgccagtgaccctattggtgatgttgatcttgctgatggtacagttgcgtagtttttcacgcatgatgctagcgctgttgattgcccccttcggtttgattggtgtcgttgccgctatgttgcccactggaacgccgatggggtttgtcgctattcttggtgtgattgcattatcgggcatgattattcgcaacgccgttatccttattgaagaagtggaagtaaacagagcacaaggtgcagacaatactgaggcgataattgaggcagcattgcatcgttccagacctatactcttgacggcttgtgctgcaatattagggatgatccctattgcgtttcaggtattttgggggccaatggcctatgccattattggtgggttattagttgccactatatttacccttactgtattgccggctgcaatcagtgccgttctgcagtgggagacgtctcgataa

SEQ ID NO: 149389 - DNA, 1122 bp, Enterobacter cloacae
atgtcagtaggtttattcagaacaataaatacgctcaagagcgtgttcctatttcaatactggaaactgtttattattccagtgtttgtgctattgccagggtgtgatgataatgcaaagaaggaggaggtgcctatacgttccgtacgaacccttgtcgtcgataatccggttagcggagttttgataaagcataccggagaaattcgtccccatgaagaatctcaactctcgtttcgtattgacggtcggctcctcagccgtccagtcgatgtaggggcgaaattaaaagccgggcaaacgatcgcgactttagaacctaggaataacgagaatcaggtgcgtagtatgcaagctgagctggcaggtgctgtttctgcggagcgcctagcttctctaaatttcaaaaggttgcagtcattgcttaaaaccggcgctatcgcacaggctcaggttgatgaagcaaaggtcaatcttgaagtcgcagtgacaaagcgtgtttctgcccaatcgaatttgaaaattgctcaggaacaattgagttacacccgcttagttgcgccctcagatggcgtcgtgacttcggttagcctgaatccgggacaaactgtcagtgctgggcagggggtcgttacactctctcttgataagggagtagatgctgtatttgacgttccagaagctattttgtatagcgacctacccgataataaagtcaagattgcgctgctttccgatccttctgttgtgactgagggcatgatccgtgatgttaatccacaagctgataagcaaacacggacctggcgagtcagagtctcgctgccccaccctccggagaaaatggctttaggttctacggtacagggaagcattgtgattccaggtcaggaaacgtttgttctcccggcatctgcgttgacacgtgatggcgccgatcctgccgtttttatcgtacaatcggatacatcaacgctgacgttgcacaaagttaacattattcgctatagctctgaggacgtctttatttctgatggcatcaaaccaggtgacaaggtggtgatcgctggagtgagtaaattacggtctggtgagaaagtaagcttggaggataaattctga

SEQ ID NO: 149390 - DNA, 2016 bp, Enterobacter cloacae
atgtggtttagcagatttaggcaagcattcctagcattgctactaccttggctatttgtttttcttatccagatgttggggcgtgcttatttattttacactaataaaacaccagggctattgacggatttttctcatgatgtcatacggatgttctggattggaggcctgttcgatgtccgcgttgcctgtttgatttttgtgcctttcttattagtcgccgccagtttttcagtggataggcgtggttttattatatggcaacatttttggccctggatggctgccgtgttaagcttgatagtcacagcaattacagttggaaatgttttttattatgtaacttatgggcgttttattgatgtttttgtgttcgggttagttgatgatgataccactgctgtattaaaaacggtttggaaagaatacccggttatatgggttttactttttcttatattgtttttttctattgtgttaaaaatttactggcgctggcagtattatctgagtcataagaaaggaggcacgctcaggctgtcggtatctattattaatacattacttgtcattcttgcttgtgttgtcggcatgcgcggttctgtcggaacttttcctttgcggcagagtgatgctcaagtttcagaagtaaaaatgctaaatatgctcactcctaatggagtgattgctcttaactgggctttcaatgcttatgctgaaagcggtaatttttcagcagctacggatgaagaaggtagcaagttattaagtcagtttttggggggaagttcggcacctggccttcggtcttttatgactcagactgatgcaaatccatatgtgaaaaaaaatccgccaaatgttgtactgtctgtaatggaaagtatggggtaccacctggcgagtttcgacaatcaagaaagagatttactgggggccttaagaaagcactggttggctgattggcgtttcgaccgtttcatttctgaaggtgatggtacgattgatactttgagtcggctttttattcgtagcccgatgagcagtatcggacagactagcgctcaaaatgtcaattttgccagtaatatgtttaaacccttcttagcaaatggctataaaattatttttgtaacttcaggaaatggtgcctggcataatctcaatcagtttcttcctcatttaggtgtcagcgaatttatagagcagaatggtctaaaaaaacgctaccctgaggcggaaatcggaacctggggcgtcccggatgaatatatgtttcgttatatgaccgagcgtttgaaagaggcggaaaaaaaaggagagcatgtgtttatcatgtcgatgtcaacaacacatcatcctccttacaaaacgcctaaaggtcacgaaaaaaagcatattgatctaactgttcaagaaaaactaagattaagaaaattagcagctgatgaggagttgaatgaggttatgagcaccttatactattctaatgatcaattagggcggtttattagctgggttaagtctgagacgttaggttcgcatactattgttgcagtcactggtgatcataatatacgggggataggttatccagagcctcaagagttagcacttggccatgctgtgccattttatatttacgttcctctgaactaccaacatagcagctatttcgatggtaatagggttggaagccataaagatattctaccgacgctatatcaacttagtctttcggatacattatattatcgcacggggtgcaacttgttggctcagcatttggatggtacttggtgtaatggatataatcctgaaatcacgattacaaatgaaggtgcctgcatttttaccggaaagcctgagtttcggccttggaaaaataaatctggactgcttcttgctagccctgagcgcatggatttaatcaaagggaaagaatgccatcgctgggaggcatttacaggacttttgtggtggcaattaaatcgtcaggttcacggcggtaagtag

SEQ ID NO: 149391 - DNA, 696 bp, Enterobacter cloacae
atgaaaaccattaaagtacttcttgcagaggatgagaaagacattcgtgagatccttactgcctatctcaataatgagggcttcgaagtcgtgactgcatgcaacggtcagcaagcggtcgcgctgtttcgggcttcagcaccacagttagtgattctggatatcaaaatgccgctaatggatggctggcaggtacttaatgaaattcgcaagacacacgacacccccatcatgatgctaacagcactagatacagatgttgacaaaattcatgcactccgcaacggtgctgatgactatattgtcaaaccatttaatccagcagaggtgagcgccagggtgaatgttatcttgcgtagaatacagtttcacagcgccgacaaaaacacctcagtttactcaaccaagaatatttacattaacatcgaaaatcatcaggttaaaataaaaatctccggtgaagatatcggcgacaaattaacatcaaccgaattcaagatattgacacatcttattcgctaccccaagcgggtttttacccgacaagaattgcttgagcactgtttgccggaaaatgacgccaatgagcgtaccgtagatagccatatcagcaagctcagaaagaaattttggcaagcgggtctgctaaatgtccctgaaagtattcgtggctttggttatcggctgggagactga

SEQ ID NO: 149392 - DNA, 588 bp, Enterobacter cloacae
atgagccaaaaattcgcagtgatgattgcttacgacgacgatccaaacgtcaaaaggtattcacctgactttcaaacgcaggatgagtttgctaaagggtggcagtcggctcttaaaaaggcacaccacacctcaggtcaaaaatcagtcatcacctgcggatgtcgtggaaaaggagaaaagcgactttatgttcgtgctttaccgaacggtgatgcctttattctcgtcaaagccgctaacacgggcattgagcatgatccttcctgtgtattcttctcccttgatgcccggcataccggcctgaaaggatatgcgagtggtgtggtccggattacaaccgaaggtgatatggctgtaaggctcggtatcggtatgacagagaaagatcctcctgaaaaatcagaagtgcctcccctgccccatgttcagcgaccagaaggaggtcaggcctcaatgaccctcctgggcttgcttagtcttttgtggacagagtctggtctgaatgtctggtacccgaaaatggcagggaaacgtaacgattcactggtacggtatcgtctgctgtcaacaacgggtaaaaagtga

SEQ ID NO: 149393 - DNA, 381 bp, Enterobacter cloacae
atgaaaggcaacgagataagaaagggcttaacacaaaaagagatggctaaaaagttcaatctttctttaagcactgtaaaaaaatacacttctcaaccaagagaacattatgaatcagaagcagaaaacagaagaaaaacagcttataggttacaccatgaaaaaggcttaaaatggcgtgaagtagctgaaaaaatggacgatttaaaaaagcagattagcgaactaagaaaagcagaaagagaagaacgacaacgagcaagagacgaaaaattaattattcttgcaaaagctgtttatgaaaaggcaggaaagccaaaagatattgaagcattaattgatttcgtaaagtctgaagatttcaagattgaatataaataa

SEQ ID NO: 149394 - DNA, 858 bp, Enterobacter cloacae
atgatactacaaaaagaatatagcagaagtgattttataaatcaaattatatcaagaccattttgcactgacgacttcaaaagagacggtatttatagaacaaacaaaagacgagctttaaacagcgtttatatcgagcataacaacgatagctttattaactctattgtgtttgatattgacagcgatacagcggctattgcatggcaagatgcaaatataccgaaacctaactttataactcaaaatccagacaatggtcatgctcatttattttatgctttatcgtctcctgtttgtataacagaaaacgccagaagaaagccacaaaaactcttgaaaggcgttatagaaggactcaccgaaagactaggtgcagatccttgttatacgggcaagataacaaaaaacccgctcaatccgagatggcgtaccttttggaacgaacaaccgcgatttgaattgaactatctatgtgagttcatagatacaaataaaagagtaaaaaaagaagtaagaaaatcaatagttgcagaaggaagaaatacagctttatttgatactctgcgtttttacgcttacagcataatttttaaatatcaaaaaaatgacgatttctgcggtttcatttcagcattacaagaagaagctgaaaacataaacgattcattcgaagatcaactaggctttaaagaaataaaccacacaataagaagcatttcctcttgggtatgggggacttttgatagtgatactttcagcgaaatacaaagcaacagagcaaagaaagcgaaaggtaaaactaaaaccaatacaaaagcaaaaaaacttatagaatttataggagtaaaaaaatga

SEQ ID NO: 149395 - DNA, 1260 bp, Enterobacter cloacae
atggctttatataggttagaaatgcagaacgtaagccgtgcaaatagtgtcagctcagttgcaaaggcagcttatcgtcatcgttcagtcatgatagatgaacgaacaggagaaatgcacggcgagaaatcagctaatcgtgacgatctcgtttatgctgaaatattagcaccaaaaggcacgccggattttcttactaaatcgagcaatgagctatggaactttgtcgaaaaaacagagaagagaaaagacgcaagaacagcaaaagaatttaaaataactttgccttgtgaacttaccaatgaacaaaatataaaactattgaaagaatacttaacaaaaaactttgttagtaaaggcattatttgcgactttgttatacataacgataaagacaacaaaaacccacacgctcacgttatgattacgacaagagaaataaccccgcaaggttttggtaaaaaagtaagatcatgggatgaagaaaagacacttcatgattggcgtaaacaatgggcaaaagttcaaaatcagtatttgaaaaatgcaggcttaaaatctcgcgtcagtcatagaacactagaagaacaaaaaaatataatgatcgatttagctaaaaaagcagaagatgcaaaagattttgacaagtctattttgtatttagcaaaagctattgaactagatcgacctcctatgcagaacctatcacgtaaaaaatggaggacaaaagaaggtcaggaacaacgcaaacgtgaccaagcgatcagagacaaggcaagagaagatgcaagggccgtcagggtgttgaggggtgttgcagttgttgatgttgcttcattcacagttcatccattgcagaaaaaagagcagtcaaaaaataatgacttttcagaaaaaaaatcgtggtggcgttctactgttaattttataaaaaatattaaagctaagttctcaactaaaaaagatattaaacccgttcaagaaaaagaacctgatttaatgattgatccggtcactggtttaccgattaccacgcaaaaatggcaagagatgagtgacagggcaaacgtaagaactccacaggctgcgatctcatatcaagttaagcaatcacacgctgacagtgagaaaacgcctcagaatgcgttacaggacgttttagacgtatcagagggtaaatcgttaaaggtgaagtctgtaccggttccgggttctcgtaagcgtcgagttgtcgaggaagacagcagtgacaagggttaa

SEQ ID NO: 149396 - DNA, 390 bp, Enterobacter cloacae
atgataaaaaataaaatagaactaatgcttagtttttactacaacgatcacgatgcaaattattttatgtctctagagtttttgattgaagagatgaggaagggtgaaacatttgaatcagctagaaatatagcattaaaaaaatcgcaagatcactttgaagatatgacaagacaaatgctagaacttgaagaggaagaatattcagaaagtgaaataaaatttgcaatagaagaagcgaagtacagctattcattcatgtggatatttaatgagatgacagacatatatgaaaagtatggtgatgaaggattgtatcagttgttttttattcagtatcaagcaataaaaaatgaaagaatgggcattgaagatgatgaggattattga

SEQ ID NO: 149397 - DNA, 279 bp, Enterobacter cloacae
atgagcagtaaaaaaacattagagcaaaagttggcacttgcacaagatagattatctaaacttaaaaaagaagcatcgcagaaagaaagaaaagctagagaacataaaaaatttacggttggaggtgaagttacaagggtcttcggtttagattacgatctagctcttgtcgtgggttttcttgaacactttaacaagttaagcgatgagcaaaaacaagcgttaaaaaacaatggtgaaagattgctaaaatcacgtctagaaaacgctgacaagtag

SEQ ID NO: 149398 - DNA, 267 bp, Enterobacter cloacae
atgtctcaaaaaaaagagcaaaaaacagcagaaaaaccaactgcagggccacttcgtaaacacagatctagagctgaaaaaatagacgatttaaaaaagcagattagcgaactaagaaaagcagaaagagaagaacgacaacgagcaagagacgaaaaattaattattcttgcaaaagctgtttatgaaaaggcaggaaagccaaaagatattgaagcattaattgatttcgtaaagtctgaagatttcaagattgaatataaataa

SEQ ID NO: 149399 - DNA, 231 bp, Enterobacter cloacae
atgcaggactttaataactctaagggattctacatgaaaaaagacgatctaattacgcgttgtaaattacttaaaggcgaacgcgatgagtctatctttaccatattaattgggatagtagtaaagctggggctggtaggcctggcattctatctgttgcttggttccacgattgattggtcaagctggaaaacttatgccgccatgttgatcttgggagcatttctctaa

SEQ ID NO: 149400 - DNA, 354 bp, Enterobacter cloacae
atgagtgatgatgaaatacaaaatacctatctaacaggtaaagcttttcagggtgataaaagcagagtagaaataaagaaaacacttgagcaaaaaattgcgggagcacaaaataagctcaattatcttaaagcaaaagaaaagagagataacaaaaaagaaaatacccgacaaaaaataattctcggtgcagaggttgccaaggttttagactgtgatataagtgaggtagataaacaattactctttgggatattgttagaagttccatctctatatacgcatgacatcgcacggtataaaataaatggacaaatttacattgaaagagtcctcaagaaattcaagccataa

SEQ ID NO: 149401 - DNA, 1107 bp, Enterobacter cloacae
atgtattcaataatcagaaaacaatcacacaaaaaaacagctatacaagctgtacataatcataatatgagaatagttatagaagaaaatgtaaattctaaaaaatcaaatttgaatgaaatattaatcggtactgaaaatactagatccgacataatgagttatattaaaaataatgatattgtcattagaaataaagacacagtaatttttaacgaattcgttttaactgcatcaccagaatttttctttaacaataaagatggttcaaagaaaactagatctgaatataatgacaatttgaaagattgggttaaaacccaaattgagtttttggaaaaagaaaattacggaaaatgtgttaatgcagttttgcatttagatgaaagtaccccacatattcatgcattaattttacctatagttgacaacaaattaaacaacaaaagcttttggcgtggtaaaaattcatatggaagattacaagatatatataatgcatcaaatagtaaatttggtttaaaacgtggtgaagaaaaaagtaaaactcttgttgatcatacaacactaaaagattacagagaattaataaaacaagatttagaagaagaaaaagaattttataatgagttatcgaaagatatattagacattccaccaagaaaaaatttaattggtttagaaaaaaaatactctgctgaagaagttaaagaaattgctacagctacttttaaaaagctaaatagacaaagaagaagagcaaaatttagagctaaaaaatctgatgaaaaagctgatgcagctacaagtgaattttataaaaaaaagaaagaaacatcgaaaattgagtttttttataatcaaaatatgcagcaattggaaaaaacctctgtggaaaattccacacttaaaacccagaacttggaacttaagcaatcacaaagtgacctagatctggtgagaaaatttttacctatggagctgcaaagccttgtcatcagagccagagaactggcctctggcggcgattctggcggtacaaagcatactgcagaacctacaccaactgcagatctaactacctataaaagacctaaatacaaataa

SEQ ID NO: 149402 - DNA, 735 bp, Enterobacter cloacae
atgacaatacaagaagtaaaaaaaacaagagttagaacaaaaacagaaaatgataaattaacagaatataagatgaatccttttgtttttgacaaagaactaaaaattgaaacaaaaacaagaaatttaactgttagaaaaggtactgaattagtaaataaagataatgctgacgaatcagaatcttatttttctaatattgttcaaaagaaagaagtagataaagaagaatttataaaattatttacatctcaaataaaagtatattttgatctaacaaaaacagctcataaaattttccttataattttagctttatatcaaaaagaaatcggtaaagattatgttttattgacatgtaagaaagctcagaatgttgctaaaacattagattttgagctttcagcaccaattttttatcgaggtataaaagaactggtagagaaaaaaattattgctaaatctgtagataaaattgttttttatataaaccctgcagttttttttaatggtgatagagcaagatttgtaactgaagttatcaagaaaaaagaagagatagagaaaaaacaatttctcgaagagttagaaactacatcaaaaaataaagattttgaaactgatgatagtgttgaaaatttagatctgatgattgcaagattacaaaagaaaaaagaagaattagagcgaaaagaaaaattcgggcaatggcaggatctggaagatgcatcataa

SEQ ID NO: 149403 - DNA, 825 bp, Enterobacter cloacae
atgacaagaggacaggagcgtaatacgaaaatcaatgtctcttttgaaggacttgatgtagggctaacaggcgcgattccagaacgtgaaagctggaccgaaagagctatggatagagggatccttgaattcgtggctctattcagtggattaatttttaagtacggaggaaggattgtccatggatgccacccaagttttacgcctataattcttcgccaagcaagattgcacgcaacatggaattcaaggccacctgtcacgcttgttatgtcagacttgtggttctctggataccttgaggatgaaattattgcaatgacggatgttgcagagttgatcgtgacccgtaaacgcggtcacggaacggttgccaatgcgcaaacaagaaatggaagcctgacagatatgcgtaaagttctggttgcatctcagaatatgatggtggcggtaggtggaaaaatgcatacaaaagatggtatcaatcctggagtcgctgaggaaatggaacttgctcaacaacataggttaccgtgttatcttattggaggactcgggggattttcgcagaagcttgcggcggagcttacgccagcgtctctgaacaacaatttatcccgtgaggacaacataaagttatttggtacccatgatgtatcatcatgcgtcaacgtaatatttgagcaattgtgccaacgttattggacttataattctatcaatttaccgcctactactctttctgacgtacaggatgttgttaaaaccgttattattcaagacgataaagtggggaaaccgcgcggaccttctttcagaatttaa

SEQ ID NO: 149404 - DNA, 1218 bp, Enterobacter cloacae
atgataaccattttgcataatgaatcctgcgcggtttttgctaaaacggtgaaggaattgctgtatgagttattccacaacaacgtatcaattgaactggttctgagtggccaggttacctcatggccgggggagccagagtggaatgatttattgatatttttgtttgacgaaagctcgactcctgaacaatctgatgattttatcagaaattttctttctaatagacaggaaacggcacttttgctacctgttgcaattaataattttacactaattcctcctggtgttgcttcagaatataaagcgcttccctttgacaattcgatactcattccagatggcgggcttacacgccgtgttggggcaatgctgggtttacgccttcaggggcgcaatactaaggtgtttatatcctaccgtgccgttgatggaacgcagatcgcaaaacagattgaagctcatctccacgagctaggctataaaccttggagggatgaggcacttgagcttgatggtgataccagaattttgcccgggaacctcgttcaaaaaaacatagagtcagcattgactgaggccagtttacttttacttattgatactccggagtctatcaattcaaggtggatcgcagaggaaatcaatattgcagatggcatgttgatccccatccttccagtcgtcttcaggacaaaatccgaccaaaaaaaaggtccccggttgcgcaccttattgaatcttcagcgatgggtcgatatgccttttgaagatgcacatgtacagacacctctttcagaagatgaactggataccgttactcagcagattgaaacgtatctttgcgacatttttatcagaagatgccgcgttcctttcatcgtagaaaacagctttaaggatgccggttatgactgggcttcattgaacaaagcactttctatgtacagatcgagcaaagtcaataatcgaagatttcagactacagtcaatagccactgttcggcgtattctgaagtctacctgccagctcttgataaattcaggcagttcctaaaaactcaaccaaattcaaattatgccttttttatttacgatggtgatctattatcttttaatcagctagagtgttttctcgatgggtacgtaacggtattacattaccaggaagtatctgctttattagcctcaaattttgttgatgtggggaataaatga

SEQ ID NO: 149405 - DNA, 1401 bp, Enterobacter cloacae
atggagaacatcagcagaggcgaaggtcagtcttcggttaactctgctgcatatcgtcaccgtaaagttttcttcgataacagaacgggtgaagtgtgtggccgcaaaacagcacataaaaaggaccttgcctttgcgcagatttttgctcctgacaacacgccacctgacctgattgttgacagtgaaacactctggaatgctgttgaagcctcagagaagagaaaagatgcccgtcttgccaaagagtttaaaatcgccctccctgccgagctaacaccagaacagaacattgaactcacagcagcttttgttcttgagcactttaccaagcaaggcatcatcgcagatgttgttatccacgatattaatggtcataacccgcatatccatatcatgggaacaacccgtgagattctttctaccggctttggtaaaaaggtccgtgagtgggataagcctgaaacccttgatagctggcgtaaaggctggcagaacatctgtaatgggttccttgagctgtatggtcatgatgaacgcgttgatcaccgttctatcagggttcagtatgaagaagctcttgaacaggctacggctgctgctacaaacgaagaaaaagctatctggcttgctaaagctattgaaacgaatcgtgatccaatacttcatatccctcgtgatcgctggggtactgtagccgctcaggaacaacgtgctgcagagaaagccatacgtgatgagcagaaaaaagaagctgatgaagcctactttgcctttaaggatttaccattagacattgtggttgatgttgccagctttacagtgcatgcactggctgaacctgaagaaattgttatcccggataataccgggagagcttcatcttcagactcgaaaaaacctgttctggttgccccagcacttcatacacgcactacactgaaaaacccatcctcttcaacaacaagagcgattaaacgcgctccttttaaagctaagaggaagaatgttgaacctcgtcaggacgggattttcaaacgtttcacactgttgctagtagattatttaaaagagaaattcgtctgggccaagaagaagccagcccctgtttcagtcgatgctgaacatgataagcgtatagctgaaaactatgtgtttgatgaggttcagggcatctatgtgccacgcgctgagcatgatagacgttccagatttaacaaggatgactacaaaccaacatctgatgaaatcaggcgttttccaagtcgtcttaagcaggatcagccagaacatgatcacattatggatctcactccatccataccacctgcacaggtgagaaagaatagctatccaaagtttagaccaccgggattacgaggtagagattcagattcgtag

SEQ ID NO: 149406 - DNA, 1023 bp, Enterobacter cloacae; identical to SEQ ID NO: 77658

SEQ ID NO: 149407 - DNA, 573 bp, Enterobacter cloacae
atggttttttcctggcaacctgatttgatcttattggatgtcatgctgccagggataaacggccatgaaatactggctcgagtgcgtagaaagagcgatgtgccggtcatcatggtgactgcaaccggcgaaatacaagataagatttcctcgttgaggcatggggtagatgattatatagtgaagccgtataacccaggagaggttgtagctcgggttcatgcagtgctaagaagaacgagtatattgaatataagatctgagcttattatttgtggcccagtacaacttgatgaagaggcaatgttagttcacgtttgccctaccgaacatattaaaatcgcagtggaacttacgccaaccgaattttcaattttatctgtgttaatgcgagcgcccaaaagagctttttcccgacaaacattgttgaatatgtgcttgccagaaagtgatgcatttgaacgggttgttgatacacatatatacaatttaaggaagaagctcaattcggttggagtgaatgatgtactgttgacagttagagcaatgggatataggtattggaacaaatga

SEQ ID NO: 149408 - DNA, 330 bp, Enterobacter cloacae
gtgaagaagtggcagatcccgcgattcatcaacacggataaagcgcccgcctatggtcgcgcgcttgctctgctcaaacgcgaaggccggtgcccgtctgacgttgaacaccgacagattaagtaccggaacaacgtgattgaatgcgatcatggcaaactgaaacggataatcggcgccacgctgggatttaaatccatgaagacggcttacgccaccatcaaaggtattgaggtgatgcgtgcactacgcaaaggccaggcctcagcattttattatggtgatcccctgtgcgaaatgcgcctggtaagcagagtttttgaaatgtaa

SEQ ID NO: 149409 - DNA, 1005 bp, Enterobacter cloacae
atggaaaacattgcgctcattggtatcgatctgggtaaaaactctttccatattcattgccaggatcgtcgcgggaaggctgtttaccgtaaaaaatttacccggccaaagttgatcgaatttttggcgacatgccccgctacaaccatcgcaatggaagcctgtggtggctctcactttatggcacgcaagttggaagagttggggcattttcctaagctgatatcaccacaatttgtccgtccattcgttaaaagtaacaaaaacgactttgtcgacgccgaagctatttgtgaagctgcatcgcgtccgtctatgcgttttgtgcagcccagaacggaatctcagcaggcaatgcgggctctgcatcgtgtccgtgaatccctggttcaggataaggtaaaaacaaccaatcaaatgcatgcttttctgctggaatttggcatcagcgttccacgaggagctgccgttattagccgactgagtacccttcttgaggacaatagtttgcctctatacctcagccagttattgctgaaattacaacagcattatcactatcttgttgagcagattaaagatttggaatcccagttgaaacgaaagttggacgaagatgaggttggacagcgcttgctgagcattccctgcgtcggaacactgacagcgagtactatttcaactgagattggcgacgggaagcagtacgccagcagccgtgactttgcggcggcaacagggcttgtacctcggcagtacagcacgggaggtaggacgacattgctgggaattagtaagcgaggtaacaaaaagatccgaactttgttggttcaatgtgccagggtattcatacaaaaactggaacaccagtctggcaaattggccgattgggtcagggatctactgtgtaggaaaagcaactttgtcgtcacttgtgctctggcaaacaagctggccagaatagcctgggccctaacggcacgacagcaaacttatgtagcataa

SEQ ID NO: 149410 - DNA, 237 bp, Enterobacter cloacae
atgtcagaaaaaaaactggctgttaaatggactgacagggaaattatggatgtttacataaaagcttttaaatccacattagagttgtttgacgagcttgtttcatgtgatctgttaactaaacgaaacgcttggatcatgtctgaagcttttgaaatagtgggaaatcatcttggttataatgtgcctcaaatcaggaaactgatggcaactatttgccaaatgaatctcaaataa

SEQ ID NO: 149411 - DNA, 843 bp, Enterobacter cloacae
atgccatcaagcataattggtgttcatgctgcagcacgacttgtcactaatggaaaagactcaatttctcgtaatgatatagaaaaaattgaaggtgctgaacagttccattaccatgctgaagctccaagtgagtttaccacattaattacccctaccataaaatacgatttcaaggatggtatttatactcctgaatactcatcttggggttatggattacgctacataactgaagagcatgcagccaatattatagatgcggctctttcaggtgcgataaaacggttatcggctacaactgtttcagaatcaattatcttagagcgcgaaatatctgttctggaagctatacaaagaagatatgcccttccttcatcacaaattaactctcaacaaaaaaaaaccgatacttcaaattctggatggaacaatacccctccagataaagaaattggttttttaggtgaggcatttatctatgaacaggaagttgcttatgctgttaaaaatggcattccgataagtgaagttgaatgggtatcacaatccgacccgcaatcaccatatgatataaaatcagttcgtataaccccaaacggtaagcaagaacatttcattgaggtaaagtctagtcggagtataaatgaaagtaatatttatatttcttcacgacaagttaaattctttcaagaaaatgaatccaattcaatacttaagtttgttactttcatttccaataatcaagtagatacagtagaagagtacagttttcaacgactcatgaatgagtttgaattagcccctataaaattcaagttaaaaaaattgaaacaacaataa

SEQ ID NO: 149412 - DNA, 777 bp, Enterobacter cloacae
gtgaaagcacaaacactcttgagggtgcaaacatttggaggagggacctggctatcggagtttgcagttctcacgggactgcgcagtgatgattttggtgctaggaaaaatgcggtattttactcggttatcgaccatgtgaatgatagccttttcaaacagatgaaagccaatggttattataccgtggtactcactccattcaataagtcagcctataatgccggccacgcctatactatgatgggggtcgataagattatccagccacaggagctgggttatcccggtagtctgcaagataatttgtggcatatcaccacagcagacatactgcattacatcaaaaaaatcttagatattcatactgataagcctatttttgtctatgcacttaccatgtatgagcatggtccttacgcttctgatcatagggatgactatcaactatcctcggtggtaaaaaacaaagattctgcatctaaattcagtcactatatggaaaaaataaaaaattctgacgtagcgatgtcagaatttttccagtttgtcgaccagcgccaaaagccaacaatgtttatgtattttggtgaccatcagccgagcatagattgggctaacggctatacgacatcgctaacagatgcctctcatcttacgcagtttagcctgagagataacaccaatatgcgaacagtatcagacctgggatcggtgactgatatagcttttctgggagtgacctgctccccgttgattagtacaccccgatgttag

SEQ ID NO: 149413 - DNA, 588 bp, Enterobacter cloacae
atggccaagaaggtgtttttcagttttcactatcaagatgttgtcgaattccgagccaatgttgttcgtaagcactgggtgctaaagtcggacagagaggaggctggtttctttgataaaagcatctgggaagaaaacaagaaagctggcgatatagcgctcaagaagatgattaacaaagcacttgaatataccagtaatacggtagtcctaactggaactgagactttcgaaagaccttgggttcgttatgaaataatgaaaagcttccttcgtggaaatcatttacttgttgtgcatattaataacataaatgggaaggatggcaaaaccaaacctaaaggcagaaatccactggagtacgttgctgcatgtttttcagttgatgggaaaactgtaacattgaaagaatacacagatgggaactgggttgagtataaaaagatagatggaaaatctacacatacttgctcgtcttcaatgtcctcaggatatgaaagcaaagccataaagctaagttccctttacctaagttatgactggacgctcgatgaaggttataaaaatttttcatcgtggttaaaataa

SEQ ID NO: 149414 - DNA, 225 bp, Enterobacter cloacae
atgatttttgtgttgaacttgttttcactgagtataaagcaaagagatcttgcaatggcttttaaaaacaaaatacgagtagttaaacaagcccctaaaattaaagcgggtaatcttttaatgcaaatcaccaagattctaattttcatagctcttgtcgctttggtcggcgcacaaatatactctgactttgattttagtatgttgtttgcccctatgatgtaa

SEQ ID NO: 149415 - DNA, 360 bp, Enterobacter cloacae
gtgacgcaacgtagtggcgtggcacagggtaaattcaaagctctgctcatcgagaatttcgcaggccgttgtgcggtaaccggttgggttaatggaggtgtcctggatgcggcacacattgaacatggaacccggtacaatccgtctaatggcatcctgatgactccaacaatgcatgcgctgtttgatgccgatcttatgggcatagatccggccaccctgaccgttcattttaagccaggcattgaggtgggcgagctgtttgaaggccgtaaaatcacaccgctggtgtacgatctggacttagagcggctggccgtacgctgggcagaataccagggccttgctcaggaccaatga

SEQ ID NO: 149416 - DNA, 246 bp, Enterobacter cloacae
atgaatagtgaagagtgtttattttggttcactattaaccaagatcatattgcggaaaaatatcatgaagaatgggaactggataaaatattccatttcttacccaaagaagaaagagtttatactttaatggatatggaaaatagtggcgcatgcgagatagataaaagatgccgtactaaatttggtaataaaaggccaaaacaaaaatatcattaccaaagtaataatttgagtttactttga

SEQ ID NO: 149417 - DNA, 462 bp, Enterobacter cloacae
atgagcaacatcgacaaacaggcgcaggaagaaaaaacacgcgaggcctttgaacagtgggctgagcaatctggagctcttccgtgggggatccttaaaaagcaccgcaatgaagacggtagttaccccggaccccattatacctacatgtggcatgcatggaatgcctgcacggagacgctgctggatgagctggaagcaaaagactcaaccatagccactcagcagcaggagatacgaacgcttcttaatgcgttagggcaatcatcagagaagagaaattctgaccttcctgaccagaagcgaattattggttggcgagcatcagactacaccgacgagacatctgaccctgagctagctaaaaactgggccgctgcaattggtgtgctgccgatttttgaaggcgacgtgaatacaaaattaagcgccgcctcagccggtaaaggaggtgcatcatga

SEQ ID NO: 149418 - DNA, 708 bp, Enterobacter cloacae
atgatttttaacggagagatggtgcgcgccattctcgacggcaggaagacgcagacacgcaggatcatgaaggtacagcctgtcctcaatggtagtttttatgaggtatacggtgctggatgggtcgggagcatgaaatctgttcctgcaattccaggacacagccttgccagtaattgtccattcggtctggttggcgatcgcatctgggtacgggaaacgtggggagtagtgagtcatgaactggatgaggacggtcgcattcagccatggaaccctgaccgtcctgccacagccattcacgaaatgccgtttggtagtggttactacactggtcacgctatctacgcagcagatggggattttacctggggtgatgacgatggctatgaagatggccgttcgtgctggaaaccatctatccacatgcctcgcgcagcctgtcgcattctgctggaagttaccggcgtccgcgtggagcgcttgaactctatcagccaggaggatgcgcaagctgagggcatggagcttaccggatggcggccaacttattctgacccagatagtggtggtgaagtatggactccatatgacaactttgcgcagctgtgggaatccatatacggcgaagaaagttggaaagccaacccatgggtctgggtaatcgaatttaaggtggtgcccaatgttcaggataatccagcctaa

SEQ ID NO: 149419 - DNA, 951 bp, Enterobacter cloacae
gtggccagtaaaaataaaataattgtacatattggggatgagcttctttattctgttattaagaatgagattgaaggtacaggtgaaaaaaaatctgagtttgtgcgtaggatactggaggagaaactttcagctaagatttcagagaagagaggtttgttaaataatatgtattctcctgagagaaatactgatgctgtcagtgtttaccctctcaatataacgatagattctgagcggcaaattactaaagatggggttttaagactcaataaagttgatgagattctgtatgacgactatgagtctattttttttgggatgatgagttttacccttaatcaacttaaaaaaacggtgagggatgaagctgtaaaacgaattccggaggcaattaagagagcatggtcttcgattgaatctcaatatgattctgctgatattaatcttgtctttgtcaatagggttgatataagctttcttgagaataaggataataagttttatgtgcgtataaaaattcacttccatgtgtcgaggtttctttttagcgctattgactggaatgatgattttctgcgtattgattttctcaatattaaatacttacgttttaaacatattgcagtaaatggatgtttgcctaaaaaatatcaccgctggctttacttaaaaccaacgaaggaaacaatgctgggtggcttttttgcaggcctgttatatacacctaaaaagaaagaggtactgattaaggaaattgaacagttgctctccagtcaggacttttgcaggaatgatatgctggagattcccggtaaatttgtgaaggtacatattaatagcgaacagattaaagtggatgggcgctctttctccgatggtttcaatatgctggagcagagaaggcaaatgcatagcgtgggggcagtaaaccctccgtggctaaaatga

SEQ ID NO: 149420 - DNA, 450 bp, Enterobacter cloacae
atggataaacgtatttcactgccccctgaggtgacagagccattcatcctcaaggccactgttgtatcggatgaagagcgccttcgtttctggcctcagcgctttggctccatcccgcaatggataacccttgagccccgtatctttgcgtggatggaccggctgtgtgtggattacagcggtggcgtctggaacttttacaccctcagtaacggcggtgcctttatggctccggaagagagtgatggtctctggtcgctgtttaatatcctgaatggtaacggggctgaaatgagtgctgaagctgcgggtattgccgcctgtctgatggcttacagccaccatgcctgccgaacggagtgcgatgccatgaccgaacattattaccgtctgcgggattatgcgctgaactaccctgagtgcaacgccattatgcacatcatcgactga

SEQ ID NO: 149421 - DNA, 480 bp, Enterobacter cloacae
atggaaaaacaattaccgttgtttgcatatgaactgacggcatcagcacaacagaccatccgcgaggcgttgactcttctggagcgccagttacgagaacccggcgcgtcgtttacgtccagcagctcagtacgtgactggttacggctccatctgacaatggaggaaagagaggcatttgttctgctgctgctggataaccagcaccgcctgattacgcatgaaacgctgttcaaaggcaccatcagccataccgaagttcatccacgggaagtggtgaaggccacccttaaatacaatgcggcagcggtcatagtcgctcactgccatccctcatgccatgccgaacccagccagtctgacagacgggtgactgagcgactgaagaacgctctggaccttgtgggtgtccgtctcctggaccacctcgttatcggcggaatggatatcgtctcgtttgctgaacggggctggttataa

SEQ ID NO: 149422 - DNA, 360 bp, Enterobacter cloacae
ttgtcgaagaaaaccacactaacaacacatgatatcagcgagccctggtgggggctcagacgcagtatctccccgtgttttggtgcccgtctggtccagatgggaaaccgcctgcactacctggctgaccgcgcgaactttgatggtcagttctgcgatgcagatttgcgccatcttgaccaggctttcccggtattgatgaaacagctggagttaatgctcaccagcggtgaactgaatccccgccaccagcatggcgtcacgctgtatgcaaaaggcctgacctgcgaggccgatacgctcggttcgcatggctacgtttatatcgcgatttatcccgctcccgtcaccacagaataa

SEQ ID NO: 149423 - DNA, 387 bp, Enterobacter cloacae
atgcaaacgaaattacccttcatgcgggcggcatcgtcacgtccgtctcccgttgatgtctggcagactctactgacctgcctgctggaacaccactatggtctcacgcttaacgatacgccgttcagtgatgaactggtgattcagcaacatatcgacgcgggtatctcgctggccgatgccctgaattttattgttgagaagtatgaactggtccgcactgaccggccaggcttcagcatcagggagcagtctccgtttattacggcctttgatattctccgggccagaaaggctacagggctgatgaaccgtggcacgtataaagaggtgacggctattaccagaggacaacatccgcaggccagcacttcaggcaagcgatga

SEQ ID NO: 149424 - DNA, 846 bp, Enterobacter cloacae
atggccggaaatagtgttaatgaacccgaagtgttaaccgggcacactgatgtgatttgctccaccagcattgaacgtattgttacaggccgtaatgctgcgctgacacggattcaaagccttatcagtgaacttgatgatatctccattctgacccacgatatcggcggtggtacagcacaagagtggggaatgcgggagggccatcgctacgattgctggttcacggaaaaaaccgataaagcaatgaaagcgatgacccgcaatattgatcgccgtatctggcgagagctgatgaataaatcaggcatgctgagcctgatggatgctcaggcgcgtgacgagtggcacaaaagtctggagaaagacgatatccccgcgatctctgaagacaatatcctgagtacctttcagcaactgcatcagagcaaaggtgaggtatttgagcgtggcgtaatcaatgtattcaagggattaagctgggactatgaaaccaataacccctgttattttggcaagaagattatcgttaacaatctggtgaagtacgacaaatggggttatagcctaagttggggctggcggcgtgaccagttagccgatctagaacgcatattgttcctgctggatggtaaaaccattcctgataaccggcacgatgtaactatccgactgatgaacttcattcgcgataatccacgacagcaggtattcggagatgatctcttcactattcgccttttccaaaagggcagtggtcatatcacgtttaagcgtatggatttggtagagaagatgaacgatatcatcgcgaagcactatccgggaatgctggctgctaagtga

SEQ ID NO: 149425 - DNA, 693 bp, Enterobacter cloacae
gtgataaataaaacaaaggcagctttgcagagctgccaatgtcactacgaaaaaccgaaacaaattcagcataccagggttaacgctggtggtcaaagactgagcgttcctgtgattacaggaactgtgtcaatggcgcggttacgtgaaactacccagaaattgggttgtgtagggtgtacggcattggcgcataccccatttccccaaatctggggagatctggatcagcgtgcagggtctactgcaatgcagcataccccggaggaactccgtagtttcgaccgttacccagatattgggtatcactctttgtcggcttccttggcctttttacgctggcggcgtttgatttcgcctttggcggcagtaacgagaaatgccgccgtgctttctccatcttccttaaggcgatccatatcctctatcacctcgtggggaattctaattgttgtcatttgtgattttgcgttcttcgcacctgttgccattactgtgattccttgtgttaggtgtatttcagtatacgcaaaaaaaatgagaagaaaagacttgaggtgtatttcactttggtctagttttaatagcggaggtgacatacacctttcgaatgcgaagcccggcagtgctaggaacactaaccgggcctctaaccaaaccgttaatagaggtaacagtaatggcttctactaa

SEQ ID NO: 149426 - DNA, 186 bp, Enterobacter cloacae
atgcgtgaattaaccaataaaagcgcgtcaatagcctgtgagctggctgcgttgttgatggttgtcgaagagtgcgacgttgatcaggtagaacgtgaaaaccttatcagcctggccagacgagtatctgatcaactggcggcaagcatggtggagcagaatgaaacgggagcgctcaatggataa

SEQ ID NO: 149427 - DNA, 261 bp, Enterobacter cloacae
atgccaatcactcatgatgaacgcagggaacacctggaaaagtttggtttaaccagtcttgatacaatgcacactgccgattaccgtaaggcccttgaagaggaagcgttcttttgggatgacccacacggttttgtgatgcacaccctgtctggagagcgactcgttacgaatacagaacagctggatgccttgctcgagcatctggaaggataccggactctattgcctgcccctccggaatggatgagtgagaaatag

SEQ ID NO: 149428 - DNA, 1062 bp, Enterobacter cloacae
atgactacacaagaacccataacatacaaaagaagaactgttcattataaaagggcagtaattggtggttcaaagcaatatctgcaatctattttagaggaagccttgagtgaaggcggtgtttatgaattagcatctagcagaaaagagcaaatagaccctaatgatccatctgctggatttcacctgattaataaaagccagcattacgaaagtatttttttcgggcagtttttactcttcgaacctggtaaaactcaagcaactataacgatggaagataatgcccaagcttataaaatagatcctataacaaccgcatcgcttaagaagcgtaaaggcgataaagggacggaaaaagagtttgtagaatctattctttattttgggatttataaaaatcatgtcttaattgtccagtctgccgcattgagaacaaaagagtttgagcagcatgtaaataacctgtttgccaataacacattatctacaacaggcgttacttctataatctttaaggacaagcctgcaaactctatagtgaaaaaattagaggcatctccggttaagagtgtagtgctagggcgttcacctattgaaagtgaagaattacaattccatccaaaaacaaataaagaagcggctaaaagggaaattcagcgtcttgaagctaaaacagtacaatttaagcctgcaggaatagggactaaaattcttgatacagtgctgggggatggttgggctagtaaattggatctcgacgattcactggatgaagcgaatcttaatgttaaacttgagataagctataatcggactaccacaggcagcggtcagttcgtactggatactatagccagtaccttgcgagatcttgataatgatagcgttagggtagagcttaaaaatggtggaattataacgggtaaagaactgaaactttctgactctctaaatgtccaagttcatgaaggtttgttgtcagaagatgacttatatcttaaaatgtttaaatggttgtctgcgaatatacttaatggagaaatagacaacagggggtaa

SEQ ID NO: 149429 - DNA, 483 bp, Enterobacter cloacae
atgaaggtgttaagtacatttatattcactatcctgtcttttttgataggagcattttgtttattcggtcttatccattattttggtgtggataagttgactgcgccttcaccaatcattgcagttttagttcttcctttagcttactgcttgcaagcaatttataaattaagtgatttgaaagaaagtcagcaattaaatggtgatgaagctaggcggcttttttatatagttgatgtgaaacggggtcggctatttacatgcatagttttttattttctgtcagctatctttgttggcatatctatgatggttggcgacggtgggcaattatttaaaacaataaccctcataatatctggtgggttgcttggggttacagtttttacaatctttatcatttattcattgatgaacgaagttacaaatttcaaagctaaattggttcgccgtgaacaggatgagaaacaccgaaaaatgtaa

SEQ ID NO: 149430 - DNA, 480 bp, Enterobacter cloacae
atgagcttcgaatacatcaattcccaatatggcgtgaatgcctgtgtcggccgacgggtggtggcttatggcgaaccaggaactattgtgcgtgatttcgggcactacattggcgttgttctggatacagcgccctatcattcaccagaacgttatcaccctacggacggcatcgtatacggcgatgtcgtggattattcacctccgaaaatgacctcccgtaagcacaaggccaaatgcaattaccaggattttctggatgccgacagtggtcatgatttccatgaatggcttggcattaacaggcctgaagttgattacgacagaaacggaagctgtcgcatgtatcggatcggaaattaccgcgatgtgagcgtttacggcgactggaagccaaccaaaaaagaagcgaaagccagttataaagcgaaattgaataatttactgaaggagtcccgaaatgaccgcagagattattga

SEQ ID NO: 149431 - DNA, 225 bp, Enterobacter cloacae
atgaacagagcctcaccagttgatctgaggaaaagcctcgaaatcgccaaccacctcgcacacatcgggattcgctttgtgccgattccggtggagaccgaggaagaattccagactctggccgccgagctatctcgacggcttgagcagatggccgccgagttatcgcgacggcttgagcagatggcagccgaagccgagaagaatgaaggcggtgcagcatga

SEQ ID NO: 149432 - DNA, 153 bp, Enterobacter cloacae
atgactcacgctcacgacgacatcagggttggcacactgtgccttcccttcattggtaacggctggctaatgccatggggtgaagtggccaggaatccattaaaggcgcagagactccctgaggaatatcgggaaaggcaggaggcggcatga

SEQ ID NO: 149433 - DNA, 531 bp, Enterobacter cloacae
atggctgatggtcaaaaagatttagaccggttagatttaatgtgcaaggtcatcactagaacagatggatttcacaactacgcaaacacaaaatcgactgttatattaacattcaccaccgcaatattagccttaattattactaatgtaagccatttttatgaattcttgaacacaagtaccgttcctcatgttaagttagtattctcgatattactatttgctgaattgctgctactattttttgccttgttgcttatatcaaagactctaatacctaatactgataaaagtaaaacaaaaaacatttattcttttgtggatatttatacaaatttcaatgctgaagaatataaggctgaagttctaagtgttacgagagatgaccttattgttagcatgtgtgatttacaatataatttatctaattccttagataaaaaatatatctgtcataaaagagcagtgtggtgtttgaagaacacattaattttaatgctaatatcatccctgattttaataatttcatag

SEQ ID NO: 149434 - DNA, 1341 bp, Enterobacter cloacae
atggaatttgaaagtatttttactgcggctcagtttgagttaaataataggataaaaaatccgacaaagaaatcatccgtatatgactcacgctcaagtgatggggcatccatggatttggtaacaaaagcaatccaggagtcggttagaggcaccgcatcaatggaaggctttgtaataggagatgatttacttgatctttctggtgaaggggttgcaaggaaaaatattaggaaaatatttggtaaggtgggggaaccaagtatgtccattggatgtcacccggattttctccatcttactaatagttcagaacttgaaaatgggtacgctattactttgtttatggatatttctggctcaactaaacttggcaaaaaatatcccatagaaacagtttttaatataaagaacacaataataaaatacgctattgagattatacaagcctttgatggacatgttcacagaataatgggagatgctgtaatggcatttttcagaacaaaagagcatgaggcgagtgaaagtcttatgatgaaaaatgcagtcgattcgataaattgtgctacgtatttaatagaattcatggagaaggtaataacaccgataattgaggagcagggtgctgatgagcctgtaggtattagagttggagtagattatggtaataacgatgatgtaatctggggtaactatggtgcttttggtgctttcgaggttactgcgacttcatataatgttgatgtagccgcaaaattacaacatgctgctaaaacaaacactataatgatcgggtataatttaaagaaattgttagggttgggtaaggaatatacttcaatcatagagaaatcaggagtttctcaaacttatgtaaaacctaattacaagattggcgagtctcaaataaattataaacaatataagtttaatcacaaagagtattttaaaatattacctcaaaatttaaaaggcagtgcttataatttaaagctaaacgacactaatacttattatactggttgctcaacaacaattgagaaatttaaagaaataactttcgaagcagcagtgagttatgttccagggcaaagattaactttaatagctgaaaaaacaaatacaggcagtgattgtggtagagaaagaggcgtaagtaaaaaagaatttttaatgagtgaagtacattccggttattacactgttagtgttcctgagtcaacggcatatcatggaatccatcatatgaaattcagaatacaagatagccatggtaatatcgttgaagatgataaatgtgtaggagttatcgtttcgcatcctattcttctcaactga

SEQ ID NO: 149435 - DNA, 417 bp, Enterobacter cloacae
atgaaaaaattactcggcggtgccatgctgttagccgcaggtatgttctcaatatctgtttatgccaatcctgataattcctgcgatggtgaacaaaccatctttgatgcttataccgccaagggtggcaagcacgtgggtgtgtgttacgtgtacggtaatattcgttatgtgtatgggaaggatgataatcctgaaattttaattaatgttccacgtgaaaaggttgagttcagtatgtctggaaatggtgatcaaagtgtcactattcccaatggtgagtatcgatatgagataggtgaatatttacgtggtggtccatttatacaggtatggaaagggagtaagtttattaccgagatcaagttaaatggcgctaactttgaaaataatatcgagcaatatattaataattaa

SEQ ID NO: 149436 - DNA, 213 bp, Enterobacter cloacae; identical to SEQ ID NO: 25793

SEQ ID NO: 149437 - DNA, 456 bp, Enterobacter cloacae; identical to SEQ ID NO: 25798

SEQ ID NO: 149438 - DNA, 1254 bp, Enterobacter cloacae
gtgagtgaaaatttcgatttcgaattagctaaattgttacgtgcacaggctcctcatgatgagtcgatacacagtatcttgattaggacgttattagcttacgatcctaatgttaagccgataggggttattagtaattctggtttttggaagaatgctccttttgttcataaggggtatgagcaccttttctatcgttatcctgaccatgttttgttagaaatgatagatgggactttatctgtggatggcaaagataacagtctttttgataaccctgcttattatacttatcgaattgagtctacatttttcaatgggcgaagagcgagatcaagaataaagtcttcaatgtcatcgaagccagtgaggtactgtttgtcctgtatagaagagagtattgatagtgtaggttatggatactttcgacacttttgggattgttcaaatatatgtcttattcatggtcaaccactcaaagaactacctgagtttggtttttctaaaacgttaaaagctgttaagcggttgcttaatgcaagagattgtgagcattcgactactttaaagattcagcctaaaaaagttaacaatagctatagaaaaccttcatgggatgaaactgggcggtatttattcccgattaaatttgctccaggatgtttgatgccagtttttgctcaatgggtccatagtagttatccccaatttgaaaacataacattgagagactttgcccaaaaagttacaaaacaatatctaatccttgatagggtatatgatcgttatgcctttaaacgagatgagttttttgagcgttatgaactttacaattttaattataggaaagaatttgcaggcatttttttgctgtgtgcagagtttgagcctgaattattgaattcgtttatgaagaatcaggtgagtcttattggtttggagttaggcccgagaaaacaaggcgttatccgagaggtttttgcaaagcactcaatgcgtgattgcagttcttgtgacgaaaacaattgtattatgaaaacacataaagacatttttaatgtagacgcaacacaatggaatcttaaggcgttatttgaacattcctatactctggctagagtatcaatgcaggggcgaccgattaaaaaaagtatggattatatttggggggctattgatgttgccccagagattactgataggaaagcccttaagaaagttgagtttcagttaagcgaaatctgcgatagttag

SEQ ID NO: 149439 - DNA, 777 bp, Enterobacter cloacae
atgacatcggtaagttcgaaagaaggcaagcttgaagaatacagcttcatctatggtgatgaagctgtcacctatgaagtggtgcgtaaacctcatcctgagggtaagaggcgaaagattgcgattaaggttcatcctaattgcgaagtggtggttaatgctcctgatgatgccgaacatagtgatatccatgacgctgtcatgaagcgagcaaaatggatttacgatgcgctcaaggagtttcgaggtcacttgcagtatgtgcagcccaaagactatgtcagcggtgaaatgcaattctaccttggcaggcgttatgttcttaaagtgattgaagaccgagaggctatttctaacgttaaaatggaacgaggcaaattattggtgacgctaaaccgctttaacgaagacaagcaagcactgaccaaagccctagtttctggttggtatagcgtgcgtgccgagcgtatcttccatgaacgcttagccacattgttgccgcaaaccacttgggtgaaaggcattccgagttttcgggttttgccgatgactaagcaatggggtagttgttctactaagggtaatctcatgctgaatccacatttggtcaaagcgcccaaagagtgcatcgactacgtaattcttcatgagctttgccatatcgcggaacataaccacagcgagaaattctggcgtttattgactagtgtgatgcccaattggaaagaagtgaaaagccgtttagatggtatggcggagttgtatttgagtgagtga

SEQ ID NO: 149440 - DNA, 3270 bp, Enterobacter cloacae
atgagtgataaagtggctattcccaacttccgcgaggagcacagtgccaaaatacccgcattaacgctgctcaccaaccttggctaccaatttattcctcctgctgaatgcttggcgatgcgtggccgactatcatcggtaatcctgcccaatgtattgcgcagtgtgctgaaacacaaaacccatacttttatgggtaaagcctacccgctgtcggattcggctatcgataaaatcattcaagagcttgccactcctgcaatgaatgcagggttaaaagcggcgaatgaaaagctctacaacgctttaacctatggcatcagtgtgacggaatttatcgatggcaagaaagccaacccgaccattcaaattattgattgggaaaaacctgagcataaccagtttcatttcactgaagagatggaaattgaaaatgcacatggcacaggcaaacgcattcccgatgtggtctgttttgttaatgggttgccttgggtcgtgattgaagcaaaacgtccagactcttcccatgaaggcaaaccgactgtttccgaaggcatttcgcaaaatattcgtaaccagaaaaatgatgaaattccacatctgtttgcctacagtcaattgctactttccgtcaatggtaacgatggcttatacggcacttgcggcacacccgagaagttttgggctaaatggaaagaagaagatatcaccgaaaaaacctatttacgccttaaaaacaccgcattagcacaagataaactcgacctgctgtttaaccatcggccagctaaagtgcgcgacgggtatttatcactgattgctggcggtgaactggtggtgaccgaccaagaccgcttattagtatcgctactgcgccatgatcggctgttagaaatgacgcgcctatttaccttatttgataaaaaagcaggcaaaatcgtcgcccgttatcagcaggtatttggtattaaagccctgattgaacgtgttacctcatttgatgagaaaggtgctcgcagtggcggtgttatttggcataccacaggttcgggtaaatcgttcaccatggtgtttctatctaaagcgttaatctggcttgaggccttgaaaaaatgccgtgtggttgtagtgaccgaccgagttgacttggaagatcaattagctcgcactttcgcatcgggcggtgcgttatcggataaagacaaaaaagaggcaatggcaactacgggcaaacgccttgctgaacaaattggtaaaggcaatgagcggattattttctccatcatcaataagtttggtaccgccgtgaccttgccagagtgctacaacgacagccccgatattattgtgttggtagacgaaggccaccgtagccaaaatggttccaacaatatctttatgcagcaagccctgcccaaagcggcctacattggctttacgggtacgccactgctgaaagatgataagaccgaaaacaagttcggaaaaataatccactcttacactatgcagcaagcggtagaagacaaaactgttacgcctttgttgtatgaagagcgtattccagaactcagcaccaatgaccgcgcgattgatgcatggtttgatcgtgcaacggataagctatcggaaaaacagcgtagtgacctgaagaaaaaattctcccagaaaggccagatctaccaaaccgaagggcgtttggagttaatcgcttatgatatctccgaccatttccaaaacttcaaaagccaaggcttaaagggccaactggcgtgtgactcgaaagcctcagcaatccaatacaaaaagctattggataagattggtaaagtcacctccgtggtagcgatgtcatcacctgacactcgcgaaggtcacgataccgttgatggtgaaagcaaagacttggtgcagaattggtggaaagagaacgtcggtaatatggacgaaaaagcctacaccaaacagatcatcgaagcctttggtcgtgaagatggccccgacattatgattgtggttgataaactgctgacaggttttgacgaaccaaaaaacactgtgctttatatcgataagccactgaagcagcacaacctcattcaagcgattgctcgtgttaaccgtctgcatcagaaaaaacaattcggttatctgatcgattatcgcggaattctcaaagagcttgattctacaatcgccgactaccaagagctggcagagcgcactcaaggtggattcgacattgaggatctcaaaggcttatatagccgtatggataccgaatataaaaagctgccaagtttgtataacgacctatgggctatcttttctgatgtgaaaaacaagcaagatggtcaggcgttacgccaagctctaacacccaagattgaaaccatcgatggtcaactgaccgataccaatctgaaaaaacgtgaagatttctattcagcactgacgctgttcgcaaactgtttaaaagtggctctccaatcagcgacctattttgatgataagagcttcgacgataagcgtgatttgtataaaaagacgctgaaatcgatgtctgaactgcgtaaacaagtacgtgaagatgccgaagaggcggtagattacgaccaatatgccgaagatattcgtgcactattggacaagcacattgctggggttgaaattcaggagcctgatggcgcgtatctggtcggcaatatgggtaaaactgccaaacctgaagagatgagtgatgatgaagcccgtaacaaaaaagacgtcatcactggccgcgtcaccaaaatgattgagcaagatttagcggatgacccttacgcacaggagtatttctctaatctgctcaaaaaggcaattgaacaagccaaagaaatgtttgatgcaccagttaagcaatatctgctatttgccgactttgaagagcaagtgaaagagcgcaaagtcgaaggtattccaactgaccgttttgccgagcttgatccaaagattaaacgccatgttcaggcttattttggtttgttcttaaaatatgcttcagaaaacccactatccgagcaagagcgtttcgactttgcgattcagattgatgaaatcgtgacggctgccgtggctgagttttccatcaacccaacggaaatcgaaaaccaaattcgtcgcgcattattgccaattttgtttaaagccgtggggatggatacggccaaaataatcattaccgatattattcaaatcactcgtttaggcgtagcaggtcatcattaa

SEQ ID NO: 149441 - DNA, 636 bp, Enterobacter cloacae
atgcgcaaaataactaagggtattcatcctgagccagcaagtttgaccgattttaagcgtactaaccgtactgctacttacgatgatttgaataaaatagaacgcactgatattcgtgcaagatgtttggaagaacaacactttctctgtgcttattgttgtaaagaaatttcaggtgaaaatcatgattgcatgaatgaacatgtagaagcacgaagaatagctcctgctcgcagtcttgattttaccaatattgtttctagctgtacgacgccaggacaatgtgatgcctcgcatggctcacaaccattgccattaactccttttatgtctgagtgtgaaacagaactggaatttacgttaagtggcaaagttcgaggacttacagatcgagcaaaggaaaccatcagggtgctaaatcttggtgatgaacttcaaagtaatcgctctttaatcgaacaaagaaagcagtttattcaatcaataatgttctctaatggtatagaaccagaggatggacttgatgacgatgagcttttagaaatggtaatcaatgatatatcaacgcctaaaaatgggaagcttgaagcatttgcacctgttgttgtaaatgtactaaagcaatgggtggcttaa

SEQ ID NO: 149442 - DNA, 1380 bp, Enterobacter cloacae
atggaagtcaaaaatttaactttacataatattggacgattcaagcaccttgaaattcctttggcgccactgggttatttggatagtaatgttaccgtttttgtagggaacaacggttcaggcaaaacctcaattctcaaagcattagcaacgtctctaagctggcttgtttcacgtattcaatctgagacaggtaaaggtagtcccattccagagctggtcataaagaataagacgtcttcagccgccattgatataaatattttcaatcatgtacgtggtaatcctgaagacggtgatttggaagggttagatgataattactttccttggcgaatagcgaaagcccgcaaagggcgtaaaggagaacacaaaagtgatttttggggagctacagcgttagcagatcactatcgaaaaaaattgtctaatgatgagaaatcctctcttcctctaattgcgttttactctgttgagcgggtcgtgatcgatatcccgttaaaaattagggggaaacatgaatttttccaacttaatggttatgagaattctttaactcaaggtgtcgattttagacgcttctttgaatggttcagggaacgcgaagatactgaaaatgagtcgggacttactgatgatgtgttagagcaattaagaaccgttctgggtgacgacaatgaaacatggtcaaagttagataaacttcgagcatcaagccgtgatagacagcttactgctgtccgttccgctatttataagttcatgcctgaattttctaatttacgggttcgaagaaaacctcggctgcatatgtcgatagataaaaatggggaaccattcgatgtcgcacagctttcacaaggtgaaaagtctctgatggctctgatcggtgatattgccagacgtttatccgtgatgaatcccgaattaaaaaatccacttgaaggtgatggcatcgttgtcatcgatgaagttgacatgcatttacatccgaaatggcaacgttcgttgattaagcaacttactacaacttttcccaaatgtcagtttgtgctttctactcattccccgttagtgattagtgactgtaaaaatgttctggcatacctgatcggtgacgaggaacttatccaactgccttcgctatatggtcaagatgctaatactgtattgctagaaattatggatacagatatccgaaatgcggaaattaatgaatcactgagtatggctttagatgcaatccatgattctaatctttctcaagccaaagagataatacagcagcttgaggaagaacttccaagtggtaatttggaattatcaaaagcaaaacttttacttcgcaaaaaggagttaaaagatgcgcaaaataactaa

SEQ ID NO: 149443 - DNA, 1188 bp, Enterobacter cloacae
atggtgcctaatggttggagtttagttaaattgggcgatattctaactcttggtagcggtgatacgaaacccgatgatttgcaaaaagagtattccgatgattcaccataccctgtctatggtggaaataacatcatggggtactctagtcaaaagaactcttctgactctgtaattttaattgggcgagtgggcgaatattgcggtgtaacacgatacatagataaagcatgttggattactgataacgccttatatacaaagaaagtctcttctgagattgataaagagtatttggtcagcaagcttaaaaagtttgatttatctaggcttagaaataaggggggacagccgcttgtctcacaaaaacctatctatgcagtaaaactgccaatgccccccctcccagaacaacgcaaaatcgccaaaatcctctccacttgggataaagcgattaccaccaccgagcgtttgattgccaccagcaagcagcagaaaaaagcgttaatgcagcagttgttgacgggtaaaaagcgtttgattgatcctgaaacgggtgaagcgtttgagggggattgggaagaggttaagttgggtgatgttttaacaaaaatatctaatggactaacttacgattctaaagcaacacaagggttaccagtctctagaatagaaactatttctactggaaaagtaaatcatgccaaagttgggtatgcaccaaatgatgaaaaaacaatcaagttcaaactgcaatttggtgacatactatatagccatatcaatagcttagagcatattggtagagtggcttactttcttgatgataaagatttataccatggcatgaatctcctactattacgcgcatcaaaagacgcagactcaaaatttatttactttatgctttcgtcaagcttaggtaaggaatttgctagaagtcatgcaaaaagtgcggtaaatcaggcgagtatatcgacaacagatttaaaggggttcaaggctaagcttccaggccttggtgaacaacaaaaaatcgcctcagtgctcactgctgccgataaagaaatcgagctgttacaagccaaactcgcgcacctcaaagaggaaaaaaaggcgttaatgcaacagttgttgacgggtaagcgcagagtgaaagtggaagaacaattggagatcgtatcttaa

SEQ ID NO: 149444 - DNA, 1512 bp, Enterobacter cloacae
atgaataccccaatcaaccaaagcgaaataaacaaagcagtatggaacgcctgtgatactttccgtggcaccgttgatccatcgatttacaaagactttattctgaccatgctgttcttaaagtacatatccgatgtgcaccaagataaagtcgaagagctgaaagccgaatacggtgatattcctgaactgatcgctgaaatgctggaaagccagtcctttaaaatcccagcgggcagttcattctgggacctttacgaagcacgttttgaagcaggtaacggctcacgtattgataccgcgctacatgcgattgaagaagccaacaccaaactcaaaggtgttttccaagacatcagctttaacaccgataaactcggtgatgaaaagcaaaagaacgatattcttcgccacctgttggaagattttggtaaaccaacccttagcctgcgcccaagccgtgtcggttcactggatgtgattggtaacgcttacgaatacctgatcaaacactttgcggcaggtagcggtaaatcggcgggcgaattctatacccctgcggaagtctctgatcttttgtcgattatccttgcaccgcaagaaggcgataccatttgtgaccctgcctgtggttctggctcgctattaatgaagtgtggcaagcaagtacagaagaactttaacggttcgaagaaatacgccctatatggtcaggaagcgattggctcaacctggtcactagcaaaaatgaacatgttcctgcatggcgaagataaccaccgcattgaatggggcgacaccattcgcaaccccaagctgcaagatgccaacggtggcctgctgcactttgatgtggtgaccgccaacccgccgtttagcctagataaatggggccatgaagatgccgagaacgaccactttggccgctttcgtcgtggtgtgccaccaaaaaccaaaggtgactacgcgtttatctcgcacatgattgaaaccctgaaaccagagacgggccgcatgggggtggtggtgccacatggcgtgctgttccgcgcctcgagcgaaggccaaattcgtaagcagttgattgaagaaaacctgctcgatgcggtgatcggtttacctgaaaaactcttttttggcactggcattccggccgcgattttgattttcaaaaagcacaaagatgacaacaaagtgttgtttattgatgcctcgcgtgagtttaaatcgggcaaaaaccagaacgtactgaccgacgagaacatccagaaaattgttgatacctacacagcacgtcaaagcgtggataaatacgcctatctcgccaccttagaagagattgccgagaacgactacaacctcaatattccgcgttatgtcgatacctttgaagaagaggaagagatcgacatagtggccgtgcgccgcgaacgtttggcgttgcaaagtgaactagcggatctggaagacgaaatggcgggctacctagaggagttgggttatggtgcctaa

SEQ ID NO: 149445 - DNA, 639 bp, Enterobacter cloacae
atgcttcaaaacactaatcttcgattactcagtgaagtagccgatattcggactgggtatacatttcgagaaaaagtggaagaagttgaggcagagacgggcagtgctcgtattgctcaaattaaagatgtgcgtgagatagccgaaacttcaaactccttcttgcttgatccaagcaaactccctgctattgagtggcagggtaaagataaagcattagtcgagtctggaactgtaatactgccttcaagaggttcgagaggcggttacttccaagcatcctgtgttgttgataattcggaagattcattacctttggtggtcacgagtcagttcttagtgattacaccaacggttgaggtgttacccgaattcttgtgttggtcgttaaaccaaccctcaattcaatttttactgtctgaaggtgcgggcagtcaggggtcatcgatggctgtcatgcttaaaacatctattggcaatgagataaagctcaatatcccatctatcgagacacagaagaaaatacttcacctcaatcagttatgggaaagagagcaggcattaacccaagcactgctaatgaatcgaaaaacaatgcttcaaggcatgtttcaacaattacttaatgagaataaataa

SEQ ID NO: 149446 - DNA, 402 bp, Enterobacter cloacae
atgcatcaagattaccaaataaccgctcgtgtgcaagaaattacagcgactttcatcaagaaaaatcttctgaatgaagattgttatcctcaaaatattcaagaagctgttgtttctattagtggaaaagctcaaaagcgtgcgcaatatcagtttccaaaagcggcagaagaaaacgactcaattatttgtgaatatgatcgtgtgatgaatatttataacaagtatcaccatgacacgcgaaagaagcttacagtaatcatggagcagtggtttttggacgaagcaaaacggtgtgggtgggctgatgcaaagttttacaaatgtgatggttcgactaaaaaagcctgttttctagtaaagcaagccgattcggagagtttttatgcttcaaaacactaa

SEQ ID NO: 149447 - DNA, 1398 bp, Enterobacter cloacae
atgcgtttacctgatgcattacccgatgaactactatttagtcgaatgattagatattgcagtgtaggcgcggttcccatacctgaatttctcaaaagcgtatacggagaccatagagcaagtattaacccgatacttactgctggtttaagttcgctttcaagcctttaccgtgagagcaagaatgaccttctaatggatcaaactcttgctccgttgtttatgcattattacccgcaatacaaggccaaactatcagaatctatatcttcaacggacaattatacagcgattaggttaagccagctttcgtgcgtgagagaacatgctcaactcaccctcaaaatgtgccctatgtgtgttcaggaagatatcagagaatttggtgtggcttattggcaccgagttcatcaaatacctgctattgagtcttgttgtgaacatcggcagcaattagtgcatgttcgacttcctaaacgattaaagttagcagttgggtatccttcttcttttgaaactgagtatcaagaaagtagcgatgaaagctttcatttggcgcggttttctcggcaggtactgctagagcaatcaaagcatatttctaattttggatcagatagttactctgataaattatcaaatcttggctatgtgaccaagagtggtcgaatacgtagggtgaagttactctctcacttttattcgtttacaagccaattgcattatccatcttcaaacgttctaccatcatccgaatcggattttaagtacattaccaacttgctctataaccagtattcacagcatatttttaagtacttaatttttgaatactggttatcgaagcagcgaaggattagaaaaacaccagaaataatcactgaacatagtgccgatagtacccataatctagagcaagaatgtttggttctcctaaagcaagggctatcaatttcatcgataagcaagcaaacaggaaagagtcgcacttatataaaatccgtggcgtatgcttttgggatggaggatctgtttgaccccacgaaactaaaatcatcggttagagagcgtgttattgctcttgcacggaaaggtttccatcgctctgagatcgcccgacgtttatctgtatcgacaggaagtgttgaaatgttgatttcgagcgtaaatgggctggttgagtggagaaagcagtgtaagcatgaatcgaaaaggcgacgctacaaatgccagatacttcgataccgatacaataatccgttaaggattagaaaagaaataaagcgagattgcaacgcagcattttactggctgtatcatcatgaacctaaatggcttgaatccgtattacccaagccatcccgcccacatctacatcctcggattaagcggaaataa

SEQ ID NO: 149448 - DNA, 1452 bp, Enterobacter cloacae
atgagatgtgaagaagccatttaccatgaagcgatattacctgagcatcgtggtaatcctttgattgaagctttgccacctaaggttgaggatgatgagttagttattaagctgagtaattatcctgagaggctcgttgaggaaacaacgttagaggcaattgaaagattggattatctcactcgattaaaaacgttgaggcagccgcttccactctattttgatgtatttagggccatcgaaatggccatcaaagagggatattcagcaaaaaatccgttatctcccacaacaatgaactatctacattattcttcagataatcgacctgatgttgaaccccgaacaggcttttttaaacctaaaggcagtggaataacaataattggtgaaagcggagtaggtaaaacctgcatgcttgagcaagtattaaactgttttcctgacgtcatagaacaccgctattaccagaataaagtgttagcaataccgcaagttgtatggataaaagtcgattgtccagatgattcgagtgttaaaggtctttgccatcgaatattagagcaaatcgatcaaaaattaggacaccctccaacaaaacctgcgggaacaatagctcttttacttcaacaaattgaatcgaaaatgaagtcaaatttcctcgggattttggttattgatgaaatgcaaaacctaaaccttgctaaagcaggcggtgccgatcgacttttaggttttttgcataacttagttaacaatttaggtattccgatacttttctgtgcaaaccctccgttcgatgaactcctaagtaagagttttaaatcagcgcgacgagcggaaagtagtggctacttcgatgtagagctaatgaagaatgatgatgagtgggaattgttcgtggatgaactttggtgtttacaatggacgaatgttgaaacgccgctgaccccgagtttgaacaataaactttactcgttatctgctggcaatatggatttagctgttcgaatttattattcagctcaaaaggcaattattggctcttcagacgagaggattactgaagaggttcttgagcttggagcaaatattgctatacgtgcaacgaaaaagctaacagaagaaatgagaaagaaacacgcgatttctctcttaaaacgaaatcgaaaagatggtagtactggagctgacagccatctgtgtgaagatgtttcatcgaaagaagtcatcaataccaaatttaaaactgtaacgataccaggagacttgactcgtccacatcatcctgagttcattgaagaactaaccgaactagcttttgctgaagatttgagtgatcggatattggatactaatctgatccagagagcttctcaggatagtgatccacttgaaaacctcagggcttcgggcgttttgtgtgacgacccattggagacgtttagttag

SEQ ID NO: 149449 - DNA, 2160 bp, Enterobacter cloacae
atgcaagttgaattaaatagcgtttggcgagttcataacttggatggtcttgaggatggtctttacagggttttgcaactgtatataaaggaacatatcgttattctgtttcctttgctcgaatcaaaggctttgcaacgaccacttaagcttgattttgacttttttaatgaggccattaaaacgggtaattctgaattgagttcatatgagcttccatattatcaattgcagtcagaagacgatatttcagagagttatcttgaaaaaagagatgaaaaatatcgacttatcattgaattagtatctgatccgtattttttgctaaatttggttgagcaacctcgtagtaaagctgtttcgatacacgcgaaagcccaaaacacatatgtgcagaatatctatcgagcactaaatctttattggaaatatggtcaagaacgaaatgcactcttgccgagctacaaaaactctgggggaagaggtaaatcaagagtagctggcgcaacaaagcgtggctctccgatacaactctccagtccaagtattgacgtgcctgaaggtgttaataccactgagtgcgataaggctttgtttattaaggcaatgaaaaagttcggactcaaaggtgaaaaagtcaaattcagtcgcgtatatgacaaaatgctcaaagaatattatgcagaggagctaattgctgctgaatctgagtcacgagaagctttagtacctaattaccgagcgtttgtttattgggcaaaaaaactagttccagcgcaaattctaatacgtaaacaaacaaatcagggtgactttgaccgcaataagagaggtttaaaaggttctgctactgatcatacagaagttcctggtagttgctttgaattggatgcaacagttttggatgtacatatcgtatctgactttcagagacatcatgtattggggagaccaaccgtttattgtgtggttgataaagaaagtcgcatgattgtcgggctgcatgtctccatggaatacgcttcttggagggctggtcggcaggctttaatcaacagctttacctctaagaaagagtattgcgcagaatttggcattgagatagaagaagctgattggccttgtaaccatatacctcaacgattgctttgtgatcgaggtgagtttatttgtcaggatgccgaaaatctcgctgtgccattgattggtcacttgagcattgctccaccatacagggcggaattgaaaggtatagtagaacatcgtttcaatatcttgaacgagaagctagtacatgagctgttagggacgacgaaagggcggcattatatcagaggagatagagatccaagattagatgctacttttacgctcagagaaataaccaagctccttattgatgaagttttagagcacaacagttcaatttttaaagatttagccaagcaaagtacattacttattgagtcagggctttctccaactcctctaaactattggaatctacatgttaaagcgcagcgtcatgctttaagtcgagcagacgaggctcatattcgttctcgcctattaccaacagtaaaagtgaccatgacaggcaaaggaattcggctgaacgatcaaatgtattatgagtcagatcatgctgattttgatacttggaaagtaattgcgagaaataatggttcatggcaactagatgctttagttgatcatgataattcaagcttcatatttgtcaggcttgaggaagtaagtggctttacccgatgttacctgatgaaggagtcggctaattttgctcataggcatcaagctgacatcctgtattttgaagactggattaagttggaaaaaaacaaagctaagccaacatcgaaatcgatagagcgtcaccagagaagaaatcaggttatcgaaactgcaaaagaagaagcggcattggctccatcgctgagttcaaaatctgagagaacaaagggcatgaaagcaaggagaagggaagctattcttgcacagaggattgaggacggagaatcccaacttcatcaagataagcctgatatggaatcagatatacccagtgaacgtcttgatgacaagaagaaaaaagtaatttccatgctcaagcgaaaaagggccaatgataatgagatgtga

SEQ ID NO: 149450 - DNA, 825 bp, Enterobacter cloacae
gtggctggacgaagaaaacttgaaaagctcgctgatttcaagcgggctttaaaacaaaaatatggcttaggtgaaggagccaattacactccttggataagagttcaggatgttaagtctcatgggcacagcggtaagattgacggaataaaatcgggacgaactcaccataccttatctgagcaagagacatgctttttctatttagcagagttttccgattcagttaccgatattcgggagcagtttccattgctaccgctcacgctctcattaaaaatttcccaattacttgatattgaacatcccaaacatcccatcaccaaagatccaattattatgactacggacttccttttaacctgtagtgatggaaagcggatttggtatgaagctgtaactgtgaagcctagtgaaaaactttcagataagaggacggcagaaaagctcgatattgaaagagtttggtgggagttattaggtgttccctttcacgtattttgcctgtcagaactgaatcagattaagtcaaaaaatattcaatggattaccgatcctaaacgtaaaaattactcatcaccttcgaataaagttagagaagaagccaagcgtatgttgacggtgggaacaatgcaattaagtgatgtttgcgacacgctttctcatcaagtcggtatgtcgaatgatgacgcattgattttgttaaagtatttaatagctgataaagaagtgattgtagacttggcgcgacccatagttctatctgggatgatcgaaattgttcaagttaagatggatgggaaatcacagcaatatgcaagttga

SEQ ID NO: 149451 - DNA, 159 bp, Enterobacter cloacae
atgctggctccccacaatgaagcagggaaggccgtcgtcgccttggtgagccattacctcaccaactggctgataaccgtctgccagcccaaagcactcaccaaaaaccccgacatcgccggggtttccgaaagcgtttgtggtaccgattatttgtga

SEQ ID NO: 149452 - DNA, 249 bp, Enterobacter cloacae
atgggcatgctcagactttctcctgaagaagcggttaaacaaatgactgtatcgggattgatggatgaattagatgcattgatcgacaaatacaaaatcgacaaggcagcgcgcaggctatcgggtgacagaacgtggcttgtcgcttccgaaagcatttacggggaattttgcggagacacgttaacacatgccgttcatatcttcgttttgagttatgaggcaaacaaaaattcgttattcgtctga

SEQ ID NO: 149453 - DNA, 240 bp, Enterobacter cloacae
atgagcaacaaaacaggcggtccagctttcccagaattaggcaatgttggttgcaactcagactggcaaagcgaatctggcatgacgctgcgcgattacttcgcagctaaggctatgcagtccgcgctcttagtttcaaagcaaaaccctgaaggttcttttgaaaccttcgctcagtcagttgcagaagtcgcctatgacgttgcagacgcaatgctccgcgcccgggaggcatcatga

SEQ ID NO: 149454 - DNA, 711 bp, Enterobacter cloacae
atgattttcaactgcgagatggtgcgcgccatcctcgacggccggaagacgcagacacgcaggatcatgaaggtgcagcctgtcctcaatggtagtttttatgaggtatacggtgctggatgggtccagagcataaaatctgttcctgcaattccaggacatagccttgcaagtaattgtccattcggtctggttggcgatcacatctgggtgcgggaaacgtggggcgtagtgagtcatgaactggatgaggacggtcgcattcagccttggagacctgaccgtcctgccacagccattcacgaaatgccgtttggtaatggttactacactggtcacgctatctatgcagcagatggggattttacctggggtgatgacgatggctacgaagatgggcgttcgtgctggaagccatctatccacatgcctcgcgcagcatgtcgcatgctgctggaaattaccggcgtgcgggttgagcggttgaatagcatcagccaggaggatgcgcaagctgaaggcatggagcttaccggatggcggccaacatattctgacccagatagtggcggtgaagtatggactccatataacaactttgcgcagctgtgggaatccatatacggcgaagaaagttggaaagccaacccctgggtctgggtaatcgaatttaaggtggtgcccaatgttcaggataatccagagggttaa

SEQ ID NO: 149455 - DNA, 183 bp, Enterobacter cloacae
atgtccgacatctaccaaatcactctgaccactcaaacaagcgaaaccttcagaggcaagatgactcgtagccagcccgaactggttaacggcttcattggtgtggcaaagaaagatggcgcttgggcatacctcgcgccggatgacgtatttaggatggagtatgtgccgaaatcgctataa

SEQ ID NO: 149456 - DNA, 690 bp, Enterobacter cloacae
atgaacagtcagcaactggaatacgtacgtcagcagctcattgtggcgaccgcagacctcagcggggcgacgaaagggcagttggtagctttcgccgagaatgcgcaattcaccgctacggcgcgcagcaggggccggaaaaaggtattcgacaaggataagcagcgcatggtcaacccggaaggcccggcgatgagcggtagccagtcccgcgccaaagggtcatctatcgcgctggttgggccggtggagttcgtgacagcatcgtggcgccgcgctgtcctgtctctggaagaccaccagaaagcgtggctgctgtggaactacagcgagaacatccgcttcgagcaccaggtggcgatcactcagtgggcgtgggcagaattcacgtcgcagctcggcccgaagaaggtggccggcaagacgatggagcgcctgaagaagctgatatggctggccgcgcaggacgtcaaagcggagttggctgggcgtgagccctacgaatatcaggcgctggcgtcactggttggcgtaacgccgaagaactggtcagagacgtttacggaccgctgggtagagatgcgccgcatcttcctgcgcctggacagtggagctttgttgcaggttacgcgatcacgttcacaacaaaaggcgacaaatttagactcaagtcttgcaaaactggattga

SEQ ID NO: 149457 - DNA, 1014 bp, Enterobacter cloacae
atgactgtaagaaaaactactgaaggggaatggctatgtgatatgcggccgaacggtgctaaaggtaaacgcatacgcaaaaagtttgcaaccaaaggtgaagcactagcctatgagaagtatatctctaatgaacttgaagataagccctggcttggagacaagcaggacaacagacggctttcagaattgattgagcaatggcatgcactttatggcagaacactttctgacgcggatcgtatgatgtcaaaactgaaggggatttgcgcgggtatgggtgatcccatcgcttcgagcataaccgctgcggatttcagcgcttatcgtgaaggacggttgaagggggtgatacccgatgtgaacgggcgttgcatgcctatacaacctcaaactgttaaccatgagcaaagaaacttatcagctgtttttgggactttgaaaaaattggggcactggccactacccaatccagtggcaggaattccaaccttcaaagttgatgaaaaaatggtttcgtttctttacccaaacgagattaagacattactggaatttctctcagaatctaatagccctaacgtattaattatcgcaaaaatatgcctagctacaggtgcaaggtggagtgaagctgaaaacctagaaggggcgcaggttactccttatcgaataacttataaaaataccaaaagtggcaaggttcgctcagtacctatttcaaagaagctttttgatgaaatccccaaaaaaaggggacgcttgtttacaccttgcagaaaaacttttgaaagggtagttgaaaaggcaggaatagatttaccagaggggcaatgcactcacgttttacgccatacttttgctagtcattttatgatgaacggcggcaatatacttgtccttaaagagatactgggacattcggatataaaaatgacaatgatttatgctcactttgccccgacacatttggaggatgcagtttcaaaaaaccctcttgcacagcttgaatga

SEQ ID NO: 149458 - DNA, 258 bp, Enterobacter cloacae
atgcttccaaactacaaaggtgaaattcaagtcattacagacggcaacgccagttactttgtggatgtagccaaccatgccaacgcagatgggaagttccttatcgagtactcaggggcgaaaagcatcaaagagctgacgcttttacccggtaataaattgcgaattgactggggtaaataccctttagattgcgatgtgtcagatgtgactcttttaggaaaggttgtagccacttacctggttagcgagcaatga

SEQ ID NO: 149459 - DNA, 273 bp, Enterobacter cloacae
atgggcaaaatttcaattaacggtgcggtttttatctttatggccagaggcgaaaaacttaaagattctgacgttcgttcctgtaactcacttcctgaccaaaaatatgtgttatggccacgcggtgaaggatgggatgtacgttactcggagtttggttcaaaaggtattgagtggttgccgattgcagaacatcttttcgccgatgaaccagaagcgtggcaagcggcatatgagcactggatgcaaaaatgtaaaaactggggttactga

SEQ ID NO: 149460 - DNA, 849 bp, Enterobacter cloacae
atgaagaatgatgagctggccacacgacgcgctgaggcgatagccggtgatcggtgtttcacgaaagggcgcctgcgcgatgaattcagaatgaagccggctcccggtgctgagccggtgaaatggtacaaaagcgcctatggcggcaagtacgccgtataccgcattgcagactgtgttccgatgcgggaaaaacggcagccgaccgagaagcagcagcaggccggcctgcgtctttccgtcctgtcccggcttaacagcgccagtggccggatggcacggcgggcacacgactggctgagtctggcgccgctcttcctggataccgaaacgacggggctgggtaataccgcggaagcgctggaaatcggcctgaccgacgcggacggccgggtgatatttgaaacccgcctgaagccgacggtcgccatcgaggcgcaggccgctgccgtgcatggtatcgatgagccggcactcagcagcgcaccatcctggccagatgtggcgctgcagctgcgtcacgccatcggggcccggccagtgattatctttaacgccccctttgatacccgcattctgaaacagacggccgccgcacatggcgatccggccgactggctgggagaactgactgtgtattgtgcgatggagctggcagcagggtattttggggccaccaatcgctatggcaccatttcgctggccagcgcggccagtcaggcagcattggcctgggaaggggaggcacattcggcgatcgcagatgcacggatgacggccggggtggtgaacgccattgctgcataccatttggcattgctgcaggagcaggaacggctgcaggcctga

SEQ ID NO: 149461 - DNA, 351 bp, Enterobacter cloacae
atgaaaatgaaaacaaagattgctctggcactggctacttctctcatcagtagcagcgtctttgctcagactgttactgcacctgaaaccaacacgctattgaacaatatctatgtacagcaaagtgaggctaatcagcttctcaaacaactggtaggtaaagcaccggcatctgagatcacgttgacagatgcacaaaggaaaacctcctgcctgtatgaaagccattactacagcagtggcgcacgacttaccgtcggaaaagaaacactccgctgcaagctgagtggcgaaatcccgacatgggaaaatgcgaatgagggaaacattgtctcagtcgaaggcaaataa

SEQ ID NO: 149462 - DNA, 966 bp, Enterobacter cloacae
atgtcgcgtggtctggaattactgattgcccaaactattttgcagggcttcgatgcccagtatggccgctttctggaagtcacctccggcgcgcaacagcgttttgagcacgccgactggcatgcggttcagcaggccatgaagcagcgtatccatctttatgatcaccacgtaggtttggtggtggagcaactgcgctgtatcaccgacggtaaaagcccggatgcggaattcttactgcgcgtgaaagagcattacacccatctgttacccgactacccgcgcttcgagattgcggagagctttttcaactccgtctattgccggttatttgaccaccgctcattatctcctgagcggttatttatcttcagctcccagccggagcgccgcttccgtaccattccgcgtccgctggcgaaagatttctttcccgatcgcggctgggaaaagctcctgcaccgcgtcttaacggatttgccgctgcgcctgccatgggagaataaaccccgggatatcggctatatctacgcgtatctcagtgaaaccttcggcgaggcggtgctcagccgcagccatttgcaggttgccaacgagcttttctaccggaataaggccgcctggctggtgggcaaactggttacgccgacagctatcgtgccgtttctgctacccattcaccgtaccgacgacggcgaactgtttgtcgatacctgcctgaccaccggcgctgaggccagtatcgtatttggcttcgcccgttcctatttcatggtctatgcccactgcctgccgccctggtggagtggctgcgcgagatcctgccgggcaaaaccaccgccgagctgtatatggcgattggctgtcagaagcatgccaaaacggaaagttatcgggaatacctgcgttatgtcaccacggctgatgagcagtttatcgaagcgccgggtatacgcggcatggtga

SEQ ID NO: 149463 - DNA, 996 bp, Enterobacter cloacae
atgttatttataaatctaaatattgggttgggtgtaaaattaaataatgacacactccgagtggtgaaagtagcactgtattattctcgtgtactttataaccatagtagatatagagatgcaataatattttgtgaagagcttattacccttttacaggggtatgaagaggttcctataaataggctttattttgttttgtcagaatcataccgtatggttagtgacagagaagaagcagttttaaatatggagaaagttcttgaggatgtaaaaggattagatacgtccgaaattgctgacgcacaccttgagttagctttagcatactataaaataggcaacttcccaaaagcgcaagtacatgctaaaaaagcaatagtattatcgccaaaagggagcgcgctaagcctccagtgtcaggcaattttagcatcggaacttgtagatagtgaatgcaagaaaaaattatatagaatcgaaaagaaagctagaaggcaaaaatatacgtgggttgcgaataatatacttctgacgtttgcagatcaagaagatttaaatgaaaataaaataaaactctatgataaagtaattgaaacttcatcaagagggtataaccatataagggcaacgatttataaagctcataccttaatggaaatgaataaacttcacttgctatctcccacggaaaagatttatttatatgacctttatggctacttgtttactcaacgtattcagtcaatgtttataaaactacatggggttttatggacaatgtttaagcgcgatgggaatgtttcgtcattagctagtttattgagatatagctctacaatatggcgtattgaaggtgacgttaaaaatgaaataaaatatctgaaagactgtagaggattcttgggcgacaagacaagtattaataacacattaatagttacagactatattgatgcgcgtcttgaagatttggaatcgttagataatgtttaa

SEQ ID NO: 149464 - DNA, 156 bp, Enterobacter cloacae
atgaagcgaggcgggttactgaaaaacagccggctttatcgagttggcgaagtcgccatggactctggcatcccaccaaatgccattaagcgcagtgagcaacttaaaggccagtgtggaaacgtgactgttgtcctgcgctggaaggagggctga

SEQ ID NO: 149465 - DNA, 435 bp, Enterobacter cloacae
gtggctgtaaaattcctgctgcgcgaccagcgcatccgccaaaacctcatcgattacatcaatcaacagccgctgaatgctgagtttcctctcgtcgtttctttctcagaccctgaccggacattgccacaaaactcactcttccacgcgttatgtggcgacgtgtcaaagcaactgcaatgggcagggaagcgccggaacctctcggaatggaaggttctgtttgtctccgggcatgcggtcgcaactggcaaacccggtgaagttgtgccgggtattgagggagagttctgcgccatccgagaaagcacctcgaagatgggcattaagcgcatgaacagcctgattgagtacacgcaggcctttgccgcaggcaatggcgttcagctccgcgaagtgcgctattcgctggactatttcgggagggttgcatga

SEQ ID NO: 149466 - DNA, 195 bp, Enterobacter cloacae
atgagcgaagtaaaagatttggactttgataaatcatctcaagatgtatctgaaatgattgcagatgctctcgttaggttcgctgttgagatccgtaatgacccaaagaaaatctatgacagcgagtggtcatgggatgaagtgcaaggcagaaaatcattaactgtcgaatctctagacatccgatttaagtaa

SEQ ID NO: 149467 - DNA, 642 bp, Enterobacter cloacae
atgagcaagaagacatcaggtaaaaatgtctctaatcagtactacgcccggcgtataacagaaaccattgataaagccctagagtactatccccggttgttggcggtcaggtttgaccttcgctttcctgacgaagaagaacgtctggactgccctacacgctactacgactatcctgacgttatatcccgcttcattgactcagtgaaatcccagatagcggaagacattaagcgcaagagaaaagccggtaaaggatcgttaacctgcaagatgagatatttctgggtaagggagattaatcaggaggaaacaaaacaccactatcacgtggttctgttgcttaacaaagacacttatccgtggccgggtaaaagacataccgaaacgtcattcgaccgctacagtgtgtttcagaaggtcattaatgcctggatacgggctattaaacgtacagactctgataaagactttcatggactgatccaccttcctgtttctggtttttatcagttaaaccgcaataaccctgacttcaaagccgattatgaagaactaactgaaagagctatgtatctggctaaagagcgcagcaaagataaatcagacggttatcgtaactttggttgctctcagaactaa

SEQ ID NO: 149468 - DNA, 216 bp, Enterobacter cloacae
atgatcattcagaataacaaaaccagcctgctcaacgacaaaatggtcgatatggcattcatcaccaactttacaggcttaaccgacaaatggttctacaagctgattaaagacgacgaatttccaaagccgattaaactgggccgcagttcccgctggatgcaaagcgaagtcgaagcctgggttcaacagcgtatcagtcagtcacgaaattga

SEQ ID NO: 149469 - DNA, 501 bp, Enterobacter cloacae
atgcacaattccacgttacacaatctgaagttatacctggctctcgacagtgacggtcattacgtgatttcgaaagagatgaaaaacgctcccgatgctcagtggttctgtccctcctgctcttgccctgtgaaactccgcaacaatacccccggagaagatgcctggtttgtacacaaccccgatgaggcaacaaaaccgctattggcgaattgtggttatctcaacactgaaatcaaaaggcgtatcttcatcctgcggttacgcacgatgattgacgaactggatacgctggcagcaacgcggtactggttctgtgtatggtgtaaagggcattatgaaggggagaaacactgcaaagcctgcaatacggggatatacagcatcagccatggcgactggtgctggaattataatcagaaggaaaatgcatcagaaatcagcgaccatacagtcaccaacataattcatcatcaccagacagcctgtaccccatcctga

SEQ ID NO: 149470 - DNA, 135 bp, Enterobacter cloacae
atgagccacaagaaagaacacaccgtcatggtcaacaaggtgctccaggagcttgccaggcagcagggccagactgtcgaggctgttctggaacaattttctgccgggtcagcatcgtcaatacggggctgctga

SEQ ID NO: 149471 - DNA, 429 bp, Enterobacter cloacae
atggagagctatcagaatacggtggcctggggagagcctcctctgccaaaaggggctgagcactttggtgaacgcctgaaaactgttatcgggaaacagtctgtcgcctcttttgccagggattgtggggtttccgaagcctccatgaggaaataccttaaaaccgataccgtgccgggtatcgacagtgtggctatgattgctgcctgcacggggcgctctctgacctggctcattaccggtgaaggcgagccctttactgacaacgctaaacagaaacgcttttcagaagaagaaattaaaaagtggtggactctgatttttgacgctctgaatacggaagataaatccagggttattatggcgtttcagcaaggcgggctgaacgcggtgttcagctctgaggttatgactggcaaaaggaagtga

SEQ ID NO: 149472 - DNA, 468 bp, Enterobacter cloacae
atgagtgactgctggcaaccgggtaataccattaacggtgataaagaacaggttgtacgccccactcaggctgttctgtcagtccggacgggagatgtggtcattagcctgatccatggtaaggccgctatcgtcagccccgagcatgccggtcgtctgctcagtaataactatgtcagggtcgaagttgacggcagtaaggttgttcctgcgtggtttatctggcacttcaacgaaagcagggaaagccgtcgtcagcaggctctggcaactcaggggtcaacgtttgtattgcgtttgtctcttactgaggtacgtcagtttactgcaacgctgcctcctcttaataagcagcaggcaatcggtgggctctatcttgcaaccattgaaaaacgccattaccaggagcgccttgccgcccttaacgaacaacagatcctgagccagctcagtgatatgattcagtaa

SEQ ID NO: 149473 - DNA, 1197 bp, Enterobacter cloacae
gtgatagcaccaaaacttcgatttagtatattttctcaagagtggactaaaattcgcttaggtgattatctacaaatctaccagaaaaaggtgtcctctgataccaacatacctgtttattcctcctctcgacaaggattaaaacctcaagcggaatattttgccgatcgtgaacttaaaaatgatggtgagtatggtgtagttccattaggatatatcacttatcgtcatatgagtgatgacaacactttccatttcaatcttaatgataagatttctgaaattgcagtaagtaaagaatatcccgtctttactggcaaaggtcttaataatcattttctgttatcaaagttgaactacactaatgagttcaaattatttgctattcaacaaaaggcagggggaaccagaaccagactttattttaagaacttatgcgaatggtatgccacatttcctgcgttcgaagaacaaaccaaaatcgccgattttatttctgctattgacaaaaaaatcactctactgaacagtcaatatgagcagctcatccagtttaaaaaaggcatgatgcaaaagatttttagtcaggagttgcgatttgaagatgataatggaacattatttcctgaatggagtattcttcagctaaaagatgttgcaacacgtgtaacaagaaaaaataaagaaaataataatacaatattaactatttcaggaagggatggtctagttgatcaaatgacttattttaataagcaaatcgcatctaaaaatgtgactggttactatttgatcaagaagggtgagtttgcgtacaacaaaagttactctcagggttatccgatgggagcaataaaaatgctttctaactatgaaaaaggggttgtttctactttatacatctgtttcaaattaaatgatgagcaatcttgtgacttttatcaacattactttgagagcggtttacagaatcgggctattgaaaaggtagctcaggaaggggctcgcaatcacggtttattaaatattggtgttaacgacttttttgatatcgaacttcaagtacctggccttgcagagcaaaataaaatagcccattttctctctgccattgacgacaaaatcactacaaaaaaaacagaactggataagttaaaaacctggaagcagggcctgctccagcaaatgtttgtataa

SEQ ID NO: 149474 - DNA, 1656 bp, Enterobacter cloacae
gtgacgtacagcaccgcctcaggcagcgtcactactgacgcgacattctccggtacgctgatttccgccgttgaaacaaacgacggcgctgtggttaacccggtgcgctggtacacgttcacgatgaaccagctcgaaggaccgcaggacatcccagcgaatgccacgatcaacaccgcgaaattcatcctcaacgataacgaggcgctggtggttgggccgttcttttccccggtcgagtcaacgcagctgtggctgcatacacagtccagcctcggcggcaagaaagagaccaactggaaggttgtcatctggaaaatcgacgacgactacaaccaggtgccgggaacgcagcagacgtttacgtaccggcagacgacgccgcaccagtcgacgagtgaggtgttttatcgcactgacaagatcactccgaccggcgggttcgggaaatacgcggtcagcttccagcgcacggataactccggtgacgcgtcactgctcaaggtcgaagagatccacagcatcaacatcaggacaaacgtcgttcaccctaccgacacgcttgtgcgagtaaaagtcagggcgacagagaacgctcttggcagccgcgagcgcaaatataacgcactggtgacgcgccacaccattacgtacgatctggacacgcagacggttgattacaccctgaggccgtcgcgctcgttcgctgatgcagtggctcacacctggctgattatgggcgagcagccggtaagcagcattgacctttacggtctgtactctattgctgaaagcctgcctgacgagcgtcttggctacttcgactacacgttcgacgacgagaacgactcgcttggcgaccgggtgcaggcgatctgcaatgcggcgtcggtggtggcgtactgggatgacggcgtgctgaccttcactcgcgaccagaaggttgactatccggctgccgtattcaaccgggccaacatgaagacggacgagtacaaaatgacgtacgaggccacgcttcctggcggctacgacggcgtacaggtgtcctatgttcacccgaccacgaacaacaagacgtacatcaactaccgcgtgctgaatggcgccatcgtcgagcaggaagcggaaaacccaaacaagctggagatcgtcggcttccgtaatgagtatcaggcccgggagcgcgcattacgcgaaaccaaacgcctgatctactcgcgcgtgaagatgaacgccaaagtgtttgaggacggaattatccaggttggaagcgtcattcagatgcctgatatctacgacagcaaccagcagcagggttacatcaccggccgcgccgggaatgacttcgataccagcgagccgatcacgtttaccggctcgatgtatgtgctggttaccgacagtctgggcaacccgacgctgcgctatccggctacggcccgcagcgatacaaagtacggattcaccgcggctatccccaacattcagctcaatatctggaacggagacactgtgcagctcccgtcccgctacctcatcgcgaccgttgaggaactggacagtcagctatggacggtcaacagcatcaaacctaacacagataacacggtatctctgaccgtcgcggaatacagcgacgccatctacgaataa

SEQ ID NO: 149475 - DNA, 285 bp, Enterobacter cloacae
gtgtgtggcctcgagtctttcagatgtctgattgaactgctcctgactgattttcttagcagccagagcggtattcagatcctgaacatcctgcttatagcttgcgttttcgcgcgcttctggcaggagtttctcggctgcggcttgtgctttgagtgcgttggccgtatcccattttgccgccgcgtactgcccagccagcgcgatctgttctttagtggctccttttccaagagactgctgcgcattcaggatcgcctgctcgcgactcagattattggttga

SEQ ID NO: 149476 - DNA, 636 bp, Enterobacter cloacae
  misc_feature (523)..(532): n is a, c, g, or t
atgaacaatattattttattcaaatctaaaaaacaaattacggcagaaaacaattataatgaattcgtaagtttttgtcgctatcaactatcaggtctcacccaaactcaggattgggaacaatatgtttggaaagggtatgtaacctttagaaagataggggttggacataaagcatttaactccaaggatgcaatgcatgaagattttctcgattttgcaaaagcatatatcagatatcaacactcattgagacccttgaaaaattatggggccataatgatggctttgagatgtctcgaacaggctcttttgcaggttctgaatagtggtctcatttacaatgttacagccgttgtttttgatgaggcaatgcagatcggaagtaaatattttgaaggtaatgtcctcgctcaatgtgggatacagcttgaaaaattatcaaagtttctatgtgaacataaccttgtgaaatcaggatacatatcctggaaaaaccacgtgaagcagaaggtcaaaaacnnnnnnnnnnctatcttcctgagattgaggactatcacagaaacgataagttacccgatgaagcagcattacttgctattgctgatattttttctaaaaatgatgagctactga

SEQ ID NO: 149477 - DNA, 1167 bp, Enterobacter cloacae
atgaagggtatgcagaagatcaaaaggggtaagagcttcgcaggtgttgttcaatatgcattgaagctgggagcacatcataaaagtgatcccatcatcattggcgggaacatgttaggtgattcagcccttgaactgatcgctgaattcgatagcaccaagcatcttcgccaggatgtcgcaaaatcagtttggcacaactcgcttcgcttacccaacggtgaatcactaacgaatgaacagtggtctagtatcgcagatgactatatgaaacgaatgggattcagtgatacccatctccgttgctatgtattacatgacgacgaaggccagcatatacacattatcgccagcagaatcgacatagccagtgggaagctctacttaggtaggaacgaaaatcttataagcacacggatcatcagtgaacttgaaatcactcataacctgacagtgaccatgacagcaccaaagcaaccgaagcgaagaaaggtttcccgcaatgaacagatgctttcagaacggactggccttccctcccccaaagaagctctccaacagatacttgataaaagtttggcagatacacctgaccttttaacttttatcaaaaggctaaaagaagcaaaagtcggctggacggctaacattgcttctaccggtaagatgaacggcttctcattcgaataccgcgatatagcattcaaagcttcgcaattgggtaagagctactcctgggcaaatctcagtaatcggcttaactacaaccccgaccacttagaagctttacgaaccaacacaccggcaaaagaccactctgctcctgctcctgctcctgctcctgctcctgctcctgctcctgctcctgctcctgctaaagatgttgcagcaaccgatataccaagggaaagcataagtgaaaaaattgccgaactggaactacggctcagagaagacaaacgacacgaaatcgtacaaaagattcttcagaagaatgcagtacaacagcgaaagcatctcaggcttagtagctggcttccctttttacaacggctcatagagcttctccgaagctacggtaagagcattcttcacaacaaccctgcgagattctcaaaagtctatgcaacccgacttctacataaagaaaggaaaattcatttatag

SEQ ID NO: 149478 - DNA, 246 bp, Enterobacter cloacae
atggtagagtatctccataatgagaatcgtgttcctgactatatattaaaagcgattcattttgcacttaaagatagagaactgaatgctgtgcttactaaaatgcttgcctataatatgtctttaatgggaactcactgggatgatgtatgcaacaagattaattctgaacctgattttgataaaaagatgcaagagtataggaaacatttcaatgatagcttttctagattttgggagttgtaa

SEQ ID NO: 149479 - DNA, 426 bp, Enterobacter cloacae; identical to SEQ ID NO: 23459

SEQ ID NO: 149480 - DNA, 201 bp, Enterobacter cloacae
atggaactaatattttttttggtgaatcgcattctgactggttgcctgtcagaggcggagaatctggtgattttgtttttcgacgtggtgacgggcatgccttcgcgaaaatcgcacctgcttcccgccgcggtgagctcgctggagagcgtgaccgcctcatttggctcaaaggtcgaggtgtggcttgccccgaggtga

SEQ ID NO: 149481 - DNA, 204 bp, Enterobacter cloacae
atgggagccaagccgcgccagtcgcagggtgtcggcgtcggacttgcggtagatcagcagcaggtcgggcttgatgtagcattcgcggtagcccgcccaatcgccggaaagatcgtggtcgcggtatcgcacatccaggggctgatcggtcgccagcgcgaccagaaccggcttgaggtcatcattcgtgcagcggactcctga

SEQ ID NO: 149482 - DNA, 618 bp, Enterobacter cloacae
atgatggagcaacgcacccctgaatggtttgctgcgcgctgcggcaaggtcacagcgagtcgcctggctgatgtcatggcccggactaagtcgggctactccaccagccgccagaactacatggccgagctgatttgccaacggctgaccgggaagctggaggaagggttttcgaatgccgcgatgatgcgcggcactgaacttgagccagtggcgcgcgaaatgtacgcgctgaatgagttcgatgcggaaatcactgaagttggactcatcgatcacccatccatacccggatttgcagccagcccggacggacttgttaacgaagacgggcttatcgaaatcaaatgccccaacacctggacccatcttgaaacgctgaaaactggcgagccaaagcgccagtacatgctgcaaatgcatgcacagatgatgtgcaccgggcggaaatggtgtgatttcgttagtttcgatgatcgcctgccgcctgacctcgcctatttcaagaagcgcattcatttcgacgaagagctggcgcgcgaaatcgagtctgaggttaagagcttccttgcagatctggaatctgaaattcagaaaatcacagagcgtgcagcatga

SEQ ID NO: 149483 - DNA, 429 bp, Enterobacter cloacae
atgaaacgcacacccttttaccgcaggcccgggcgaaccgggcaattctccggcctccgcgaacgcgttatatggatgattcagacgcgcggccgcccggttaccggcagcgaaatcgccgagaagtttggcgtaaccctgatcgagtttaaccgggtggccaacggtatcacccgcggcaccggacagatagcgcagatcgttgagtcgaaaaaatggctcaacgaggacggcatctgcgaccggacattcgacctggtcacgaagccaaaagtcgtaacgccgcagggtaaatcgcggctgttcacccggcgcgccttagagcaatcgcaggaaggcagacggcaggaatgcatagcacgtgccgcccgccgtcgtcgcctgattgctcagggcctctacatcgacgaaatggagtccatcctatga

SEQ ID NO: 149484 - DNA, 153 bp, Enterobacter cloacae
atgactcacgctcacgacgacatcagggttggcactctgtgccttcccttcattggtaacggctggctaatgccatggggtgaagtggtcagcaatccattaaaggcgcagcggatcgctgaggaatatcgggaaaggcaggaggcagcatga

SEQ ID NO: 149485 - DNA, 300 bp, Enterobacter cloacae
atgcagttccgggaacatgtctttcaccgcctgctcggtttcggcgttcagcttttcactgacgccaatctggcggatagccgcatgcgccagggggttacgaatgccccagtctacatagctgttccagatattgcgggtatgctcttttggctcggtgatggtgcgatcgagattcgccagcatggtctggcagagatcctgcttcagatgcaggtagagggcattcagcagatcgtctttggtagcaaagtagcgaaacagtgtcccttcagcgacgcccgcattacgggcaattaa

SEQ ID NO: 149486 - DNA, 315 bp, Enterobacter cloacae
atgttccccgtcggcctgggtcgggagtgttaccgtccaggtgccgtccttcgcaaccatggtgctggcgatggtgctgccgctgccgtctttaacctgaatggtcgcgcccggctgcccggtaccgctgaaggtgggggtgttgtcatccgtgaccgcttttgcactcagcacgccctgcttgtcacccgcgttgtccgtcagcaaaaatgtcggcgtggcgctttcgacttcttttgtattatcaataactttggttttggtttcgccatcgccgccgtgagccagcagtgcgccgatcgcaccgccccctaa

SEQ ID NO: 149487 - DNA, 522 bp, Enterobacter cloacae
atggcctcctgcgcattcaggacgttatcctggctgatggggtcaagggtaaattccggcgggttgccgctcagcgtaatgccgtgcgtcgcgctgccggtgttgcccgccgcatcggtcacggagaccgaaatgctgtggctaccttcccccagcgcgccaatgacggaggcaggcacgccgacgctccagctgccgtccgcctggacggcaccggtaaaggtcttgccgccaacggtcacggtgacaacgtcgccctccgccgcgccgttcgcctggccggaaataatctgcgcctgcccctgctcgctggtgttcagaatgtcgtcgcccgcgacggtgttgatagtgaccactggcgctgcggtatcgaccgtgaaatcggcggtggtggatgacccgttacccgctttgtcgctgacgtttaccgtcagggtgtgctcgccgttagccagcgcctgtacttcactggccggaagcgtaacggaccagctgccgtcgctgcccacggtcgccgtgtga

SEQ ID NO: 149488 - DNA, 516 bp, Enterobacter cloacae
ttgatccgcgaatttcaccaccacggtctgcccggcctccacgccctgcgtctgaccagaaagcgtgacatccgcgcctttttccgccgcgttgagcatatcgtcagtggttacggtatcgatggtgacggccaccgcattcaggtcaagctcgatcgggtgttcagccgccacggtgttgccccaggcatcttccgcgctgacgctgacggtcatgcctcccgccgtccatgcctgaaggtccgccgccggcacgccaatctgccagttgccgctggcgttaaccgtggtgacgtattcgacattattgatggtaacggtgatctgtgtgccttcggccagatgagtgctggagccggttacggccagatcctgctgctgctcgatggcgttaatcacgtcatcgccagagatcgtgttcacgcgcaggcccggcagttcggcgttgatgttgatatcacgttcgccggtgccggtattgccgtgcgcattggtgacagaggcgctgaaggttaa

SEQ ID NO: 149489 - DNA, 387 bp, Enterobacter cloacae
atgggccagctggttaacggtgttggtgtcggtgacgaaatcgttgatggtcacctgcggcacggtggcatccaccagcccaacgcggtccgcgctgctgctgttgcccgccacgtcactgacggtggccgtcacggtgacattgccatcggtcagcgcgcctacgtcggcggcaggcacgttcagctgccagcgaccgtccgcctgtaccttggtctggtaagatttaccgttcagcgtcacggtgaccgtctggcccgcttcagcggttgtgctgccgctgagcaccagatcctgctgcgcttctgccgcattaatgatgttgtcgtcggtcaggttatcaagcgtaatggctggcggctgcgtatcgacgatcaccacgcgtga

SEQ ID NO: 149490 - DNA, 1575 bp, Enterobacter cloacae
atggctggtattcgcgctattacccgcggtatcggtcacgctggccgtcacgctgtagctcgcttcgcccagtaccgagacgtttgccgccggaacggtgacgctccagttaccgctggcatcggtggtggcggcgtaactgataccgttcagggttacggtgatgcgggtcccgtccggctggttgctggtgccggagatcaacaggtcctggcctttttcggtcgcgttgatcacgtcgtcaaccgccagggtattgatggcaatcaccggcgcggtcagggagacgtcaaacgcgtgcgtcgcgctggtgctgttgcccgctttatcggtgagtgtcgcggaaatcgtctggtcgccgttaaccagcgcgcccacgtccgccgccggaacgcccacgctccagttaccggcaccgtccagcatcgcggtgtagtctttgccgttcagggtcagggtaatcacatcgcccgcctgcgcgcccgtcaccttgccggtgacaatcagcgcctggccgtgctcggcaatattaacaatgtcgtcgcccgccacaatgttgaagataatctgcggcacggtagtgtcgaccagcacggacgcccccgcgctggccgggttgcccgctttatcggacacggtcaccgtgaccgccgcgctgccgtcggcgatccccgccagatccgccgccggaatgtccagcgtccagctgccgttcgcctgcacctgggcggtgtactgattgccgttgaaggtcacggtgaccgtctggcctgcttcggcagtagacgtcccgctcagggtcagatcctgcgccgcctctgccgcattcagcatgttgtcgccgctgatggtgttgatggtgaccgctggcgcggcggtatcgacgctgaatgcctgcgaggaagaggccgcgttgccgttcacgttggtgacgctgacctgtacgctggcgtcgccgtccttcaggccgctcagatcggcagccggtacggtgcaggtccagtcgccgttggcatcgaccgtcgtggtccaggttttacccgcaaagataatggtaacggtctggcccgcttcaacgttcgaggaggagccggacagcaccagatcctggcctttttctgccgcgttaagcacgttgtcgtccgtcacgctgttgatgcttatcgccaccggggcgagatcgacatccacaacggtaccgatattcaccgggttgccggaggtatcctgcgcgctggcgctgatgatgagcgacccgtccgcccaccgggagacgtcggcagccggaaccgcagcctgccaggtgccatccgccagtaccgaggcggaataactcttgccgttgatggtcacggtgacggtgctacccgccgccaggtcggtgctggtgccggagataaccaggttctgcgcgtgttcaataacgttaatgacgtcgtcaccggcgacggtatcaatgcgcaggccgggcagctgggcgtcaatggtgacatccagggaagacgatccggtattgtcgtgcgcgttcgtcacgctggccgatacggtcaggtcgccgttgccgagcgcggttaa

SEQ ID NO: 149491 - DNA, 1737 bp, Enterobacter cloacae
gtggccgccaacagacacagtcacggtgttgcccgcttcggcattcaccactgtgccgctaatggtctggccggttgccagctccgctgcgttgatcacgtcgtcgcccgccacggtgttgatgatgacgccaggcagcacggattccacgttcacggtgtgcgaggtgctggagctgttgccgacgctgtccgtcgcggaggccgacacggtgtaaagcgcttcacccagttgccccacctcgctcgccggaacggttgtggtccattggccattggtgtccaccgtggcgctgtacgctttgccgttgagcatcacggtgaccaccgcgcccgctgccagcccggaagccgtacctgtgatggtcagatcctgcgttttctcgctgctgttgatcacatcgtcaccggacacggtgtcaatggtcagcaccggcgcggtgaggttgacttcaacctcgtgcgttgtgctgttgctgtttccggctttatcggtcagcgccgcggtgatggtgtaatccccggcggccagggcactcacgtccgccgcaggcacgcccacgctccacctgccggaagtgtccagggtcgcggtgtaatctttgttattgatggtgacggtcaccacgtcgcccgccgccgcaccggtcacggaaccggtgacaatcagcgcctgcgcatgctcggcgctgttgatcacgtcgtcgtcggaaacggtgttaatggtcagctgtggcaccgtggtatccaccagcacatcgcggtccgccgaggccgggttacccgccttatccgcgacggctgccgtgatggtgtaatcgccgtcggtaatcgcgccgatatccgcagacggtacggtgacgctccagctgccgttcgcctgtacggtggtggtgtagtccacgccgttcagcgtcacggtcacggtctggcccgcttcggcgttggagacaccgttaacgaccagatcctgctgcgcttcggccgcgttgatgatgttgttgtcgctgacgatctcgatggacaccgtcggcgcggtggcgtccacgctgtattcgcggcccgccgaggcgctgttgccgttcacgttggtgacgctgacctgcacgctggcgtcgccgtctttcagtccgcccaaatcggcagacggtacggtcgccgtccagttgccactggcatccaccgtcgcagtgtacaacttgccgccgaaggtgatggtaacggtctggttttcttccacgttggtggtcgagccagacagcaccaggtccgcgcctttctcagccgcgttgattacgtcgtccgaggcaatcggattaatgctgatggcgactgccgccagatccactttcacgtcgtggctgatagaaaccgggttacccgccgcgctctggccgtcaacggtcacagtgattgtgcctgcgctcagcgcgccgacgtccgccgccggtatagccgccgtccaggtgccgtccgccagcacggttgccgcgtaggttttgccgttgacggtgaccgtcagcgccgatccgctcgccagcccgtcgctggagccggtgataatcaggttttgaccatgttcgatgctgttgatcacatcgtcgcctgctacggtatccacgcgcaggcccggcaggctggcatcaatcgtgatgtcgcgttcgccggtgccggtgttgccgtggccattggtcacgctcgctgttacggtgagatcgccgttaccgatagcggttaa

SEQ ID NO: 149492 - DNA, 1317 bp, Enterobacter cloacae
gtgccgggcacgcaacagacgtttacgtaccgacagacgacgccgcaccagtctacgagtgaggttttctaccgcaccgacaaaataacgcccacaggcggcttcgggaaatacgcggtcagcttccagcgcacggataactccggcgacgcgtcactgctcaaggtcgaagagatccacagcgtcaatatcaggacaaacgtcgttcacccgaccgacacgctggtgcgggtgaaggtgagggcgacagagaacgcactgggcagccgtgagcgcaaatataacgcgctggtgacgcgccacaccatcacgtacgacctggacacgcaggcggtggattacacgctgcgtccgtctcgctcgttcgctgatgcggtggcgcacacctggctgattatgggtgaacagccgctcagcagcattgacctctacgggctgtactcgatcgccgaaagcctgcctgatgagcgactgggctacttcgactacacgtttgacgacgagaacgactcactcggcgaccgcgtacaggcgatctgcaatgctgcgtcggttgtggcgtactgggacgacggcgtgctgacgtttacccgcgatcagaaggttgactacccggcggcggtattcaaccgggccaacatgaagacggacgagtataaaatgacgtacgaagctactcttccaggcggttatgacggcgtgcaggtgtcctacgtccacccgaccacgaacaataagacgtacatcaactaccgcgtgctgaacggcgccatagtcgagcaggaagcggaaaacccgaacaagctggagatagtcggcttccgtaacgagtaccaggcccgagaacgagctctgcgagaaaccaagcgcctgatttactctcgggtgaagatgaacgccaaagtgtttgaggacggcattatccaggtcggtagcgtcattcagatgcccgacatctacgacagcaaccagcaacagggttacatcaccgggcgcgccggtaataactttgataccagcgagccgatcacgtttaccggttcgatgtatgtgctggtgaccgacagtctgggcaacccgacgctgcgctatccggccacggcccgaagcgacacgaagtatggcttcactgcggcaatacccaacatacatctcaacatatggaacggtgacactgtgcagctaccgtcgcgctatctcatagcgacggtggaggaactggacagtcagctatggacggtcaacagcatcaaaccgaacaccgataacacggtatctctgaccgtcgcagaatacagcgacgccatctaccaataa

SEQ ID NO: 149493 - DNA, 564 bp, Enterobacter cloacae
atgataataaatttcctttttagagttcttttaacatttaacgcaacatcgttgttggctataattttctttgtacaaaagaagtacaccctttattactttttcgaaaggtttgaacacagtcattggttgagtttattaccacaaatgatatcatacgtattttacatgctaatccccatattactaacttggattagtttgcttttaagctccagactgggcaaggatgagtttaaagaaggtgaagtagtttctgtggagcatgcgaacaactcattccttccaagctatcttggttatttctttgtggctttaagtataactagttggtctgctttgttttttgtttatgccgttttatttatttttacctttatgtctcaagcactatactttaaccctttatttctactgtttagatatgagttttataacattaaaaacaagaacggcgcatccatttttttaattagtcgtcataaatacaaaacccccaaagaaatcaagatccccgttgcatttagaataaacaactatacctttatcgaaaggaaaaaatga

SEQ ID NO: 149494 - DNA, 207 bp, Enterobacter cloacae
atgatcggaatgcactatggcaccgcatcagtgccacgtagcgaggttttaccgggaacaatgctgcaacaccacggcaaaacttatcgcgcctctgcgaacgttgagaaaggcctgtacgccttcaacatcttcgaaaaaaccatcatcaaaagtgattccgtcgttgtgctgctgaatgagcgcggcgagccgatggttcactga

SEQ ID NO: 149495 - DNA, 159 bp, Enterobacter cloacae
atgaaagtcacccacaacggcaagcagtacacagccaaaaagatcaacgataacgagtggcagctgacgtcggtatcggcaccgcgcgacaagctgacgcttaaccgctggcagatgcatatcgctggcctcctggaacaggttgaggtgaaggtatga

SEQ ID NO: 149496 - DNA, 606 bp, Enterobacter cloacae
atgacttggttatataagttattgacgagatgggattttctttatgatgaagtatatattatatcccctttcgttggccatcaatttttaaataatacagatttggtaaatacatggctgaatgttctttccagagttaacccgcaaaagacaaagatatttgtaagaaacggtcagtctaaatcctttaagcgagctttttctgaaaccaatatcattagttatgatgacatggaaaaattcgacttaggatcagtacttattgatgaacttaaaagtaagaataatttccacgcaaaagtgtattgtgcggtgagtcaaaacagatgtgaaatattgaatggttcaatgaatctcgtcgaaggaaaatcatttgaagtggctaattttgacatattagatagttattcgaaagcatttgataaatttcttaatccacttggtattaaaagaacagataaaatacctcctgaaaataacaagaaagaattctcactattatttgatgaaaaaagtgacttcaatccatacacgggcacattatatcctgagagttatatctctgtcgcaataaacaatcaagacccaactcctcgccacccttaa

SEQ ID NO: 149497 - DNA, 471 bp, Enterobacter cloacae
gtgtacatattcgaataccgactcctgaatcagatccgggaacgaacgaatctggccatagatatccggcttggccttgtaaacgcgagcggtatttgtctgaccggtcaggctattgttcggcgagtcgacggtattaccgccgttgttcgcgattgccggcttcggcgccagaaacgaaaacacttggccaacgactttaaaaatcgggctcaggatgtcgccgacaatgccctttggctggtcgaaaatctggatatggtccagctcgctcagttcaaaggccagctcatcatcgtcgcccagctttacgccgttgcggactatcagcacatcgcggtgaaaagtagcgtcattggccgccagccagtcataaaaaagggtgccgtttggcaccctgcaacgcagcttaggcgttcctggaaaattcgatatctcaaccagcgccataagaaaaatactccactttag

SEQ ID NO: 149498 - DNA, 417 bp, Enterobacter cloacae
atgacccaactgaatacactggccttcagtacctctgattttatcagcaggatgatcggcgtgccgtgggctaaccgtgcctgttctttcgagaaagtcgattgctgggggctggtggtgctgtattaccggcacgttctcggcattgagctgcaccagacgccggactacgaagccggggaggacttcttcacctgttatcagagcgacgtcgtcttctggcgccaggtcgataaaccggtcgacggggggatatttgtcgggtaccgcggcgcgcagccggcacacgttgggctggtgcttaacaggcaggcgctacattcgcgcggcgagaatggaagcgtgcgcatggactcgttgctggtcattcagcgagcattcactaaagtggagtatttttcttatggcgctggttga

SEQ ID NO: 149499 - DNA, 186 bp, Enterobacter cloacae
atggataaaacgcatggggtgatttctgatgagattcatcagcagggaaaagatattcctttttatttgcttttcttgaaaatccctaataactctgatcctgaatttaacaagagaatgagcgaagaatgtcatatgttcattgagaacataaacacgaaggtactaaaaaatgagaatagataa

SEQ ID NO: 149500 - DNA, 264 bp, Enterobacter cloacae
gtgcggcagaaccagccccatgaaatagtcgaactcagcctgcttaacgattttcatcgctatctggccgccggaatacgttccgctgacaaccgtgtttgccgttgctgtttcgatcgggaagtcgctggcttcgttctgcccggggacctcctgcccgtcgacgtcatcaaacccgtaaccttcgacgatctgcgggattacttcgccaggctggaagaactggaactcggcgccggccagagagcccagactggattctga

SEQ ID NO: 149501 - DNA, 336 bp, Enterobacter cloacae
atgaagaggctggtcttattatttgcagctgttgcttttaatgttagcgctgctacaacatatacaaaagaagaactgagcaacatggacgcggctggacagtatccggcccaggggtcgcctgtaacaaaaagcgtagaaaacgtttcgttcgatgaatgcaaaagcagcgctcgcgacattatgaatcagattgctggaaattatcccgcgaaagaggtagtagatacaggggtcttatacatcgtaaaaatctggacgaacgatggcgtgattatggtttcttgctcagggccagataataaaaaggtcgttacgcaatctgattatgagtaa

SEQ ID NO: 149502 - DNA, 417 bp, Enterobacter cloacae
atggtaaaagtcagcattactgaaggcttgtttcagcaagcggctgcgcataggtatgctcagatgctggcagaaaccatttcaaacggaacggcatactggtgctttggttctcatggcggctttgaaagaagttatgaggccatggccgctaatatcaggaaaatacacttaaagctgcctggggacaaaccttggcctcctgagtactccccaagcaagagaacgtgtgataattatttggtctatgctaagcatctgtataacgatgaacattaccaaattcttgcaattattagtcctaacgcgcacgaacagattgattcgttacttccatctattattaagcttgtagaggaaaccttctccgagattcctcaggaagagcttgataagttgaaaacatatgaagcatga

SEQ ID NO: 149503 - DNA, 573 bp, Enterobacter cloacae
atggctatcggtcaagcgattgcattggctgcgataacgcaacagatgaacaaggttcaggatgccgtgaatagtgcattcaagcctttgatatctaatgcctgtgaaatgccggagaggcttaatgttgaggaatctctgcgcagatgcacagcaattgttgctagctcaaaactgatcgaagaaacggcaaaagagggaatgcaacatttagctagcattcgatctggctctatcgatgcaagtggctttcctgaaggcttcgttgaatctctaagtgccctggttattgcatgtaaaaatgcgcgtggacacgttgttgaaatgttcaatgttgcagaaaactctactatgtggagtgggcacatgagcatgttaaggccgttaaagagaaaatacgtgaaggccatttccgctgtagaaaacattgcagggcagatgattaccgaagtgaagcaggcaaggtcttctgcggttgatgttgattctttggatattagtcgcgaagaagcaatatctctgattaaaacatctcacataatactgggtgccgattctcctaaatggatgtga

SEQ ID NO: 149504 - DNA, 231 bp, Enterobacter cloacae
atgaccaacaacaacggcggcccggcatttccggtcgcaggtagtgagcacaattatcctatcgagggaatgacgctgcgcgattacttcgatgcaaaagcattgtctggctggctggcaagttatccggagtcgtgcactcaccctattgttgccggcaatgccgatgaagttgcgaagcactcatacatgcttgctgacgcaatgctccgcgcccgggaggcatcatga

SEQ ID NO: 149505 - DNA, 219 bp, Enterobacter cloacae
atggccgatatcatcgataccgcagcagagattgaagagcttcagcgtaatgctgccctttccgctcaccgagtaaaccgcaacgctgtatcagctgagcattgcgaagagtgcggggaaccaataccggagcagcggcgcgctgccgttcccggctgccagacgtgcgcggagtgccagggcttgatcgaactgaagaataagcagagggggatgtga

SEQ ID NO: 149506 - DNA, 447 bp, Enterobacter cloacae
atggattacgccatgctaactgacgatgaaatcaatgcgttggtaataaagcaacttatcctcacgggcttttacaccgacgatccgcaggaagttagccaccgccaatatgtaagcgatgggtggtgctggggtcgaggtactgaaactggaatgcgcaataaagacggctctgttttcgttactcaccagaacggacatcgccttgatttttgcaatgacgccgatgtggcctggcagctgatcgccaagcacagaatctccatcgagtttgacggtgacaacagcacagagccacaaactacctggtgccatacgcgaaacctggatcggacgtgcggtactgattaccagaagaaccccctgcgcgccgcaatgattaccttcctcttaatgcaggagcttccaaatgttccagctaattcaacgaggtcagatttacgctga

SEQ ID NO: 149507 - DNA, 540 bp, Enterobacter cloacae
atgagaataaagacaccaataacacacgccctcctccagcagctactccactactcaccagacacgggcatattcacatggaagatgcgcgaaaggcgattctttcagacagacagatcgtgcaattcatggaacgggacttacccgggcagagttgccgggaagcatgtcgatggtgaatacgaaaagataatggttttgggcatacgttatccgtcacacaggctggcattcttctatgtgcatgggtttatgccggaaatcgtagaccacattaacggcgatattaaagacaacagaattatgaatctgagggccgccaccgcatctcagaatggacacaacaaattcattgcttcaaacaaccgtagcgggttcaaaggcgttagctggagcaaccagcaaagaaaatgggaggcttacataaccgttaactacaaacgaacccggctcggatttttcagaaataaagatgacgcggcgaaagctgtgatgtcggcaagggagaaaatggttggcgaatttgctaatcaccaataa

SEQ ID NO: 149508 - DNA, 195 bp, Enterobacter cloacae
atgaaacagttccgaattaccgcaacctgttgtgatggttcaggagcgtcgattccggtcacatggtacggcgaggccgagacgcccgatattgccgttcagtgtatgagagacgaagcgcatggcaacggatggagtatgggagcagtcaccgctgttcagcagcgtgagaaacaacaggagttagcagcatga

SEQ ID NO: 149509 - DNA, 279 bp, Enterobacter cloacae
atgagccagttacctgaccagattgaggaagcaacagcagtaagtaaccgcattcgtgccgcgctgggttgcggtgaaatcaccgaacaacacaccccggagaatgtttcacgcgcccgccttttgcgtgtacgtgcaggcctttgccatgtgctgacggagattatgcccggaataacagcgagcgcggaacgtgacgagttgtatgcgtggttgtttgagattcactccgtgacaagagctgaagagtgtcaggtgagactggaggcggacaaatga

SEQ ID NO: 149510 - DNA, 684 bp, Enterobacter cloacae
atgaattcgtttgattttttaggttttaaccgttcggagatagaaaagactttaggcctaaaccttcacgataatctattagaatataatatcgggttgaaaaagaatttagatagctggctggtgccttatctttcacgcgataatattctattaagtgatgcggcttgtttaattattggtgctaatcctagattgagcttaagaggagagcaaaataatgaatgtgaagcttataaagaatcgctatgggacgctattgataatggtaagctaagcgcaaaggatatttcgcactacgataatatggatcaagaccgtcgagactgtgtgcttgttcgtagtgaagtcgaaaaatgggttgctgagcatgagtttaattggcctttacctctacagcaatcgcaggtaatcgaaaataccaatcaggtgtaccttgaccagtggggagagttccctggtaaaaatacagcacttatgatgattgctggtatggctattgcgcttgaaaaatcgagtaaatcttttcggaatggagagcggttgaataagctcgccatagccagggctgtagctcacaatctagcggcattgggctatcaggggatggttgtaacagagaagcaaatgactaacctgattaaagaggctttagaaatcactttgcctgatagtgaggagtag

SEQ ID NO: 149511 - DNA, 519 bp, Enterobacter cloacae
atgcctgggtttatctttatgttcaacaaacaaaattcggttataaaattcttgcgccatgctaattgctcgggctatatttgcagcgttgtcgcaaaatcggcaaccgggcgtaggaacccgagtaatctaacggcgacaccacacgcgccaggcgtgtttttttgtgtcgtagctttgactcacccttattttatggtgtggtggttaaccgtatctattcgttatttacgccacatcatccaaattatggtagtccaggcggggcagctttcaggctggccggtatccgttagagccggtattcctacccccgtctgggctaccacccatgagcgtaggaactccggtggtagcgttacccgctatctaacggagattgccgccatggctacgatccctgctttgtctcacccccaatatacctttgtatttctcgctgttcgccgtactgattatgccgcgcgtccattcgccgcacgtattccgatgaacaaactcggggaggtgagcgcatga

SEQ ID NO: 149512 - DNA, 1890 bp, Enterobacter cloacae
atgcataaaaccggcggcgtgacgttccgcgccggggatgtggttgtcccgctgtatgacgataccggcgcgctggttaaccttcagcttatcagttctgacggtctcaaacgcaccctgaaaggcggggcggtaaaaggggcgtgccacaccatcgaagggaaaaaacaggcaggaaaacgcctgtggattgcagagggctatgcaaccgcgctcaccgtgcatcacctgaccggtgaaaccgtcatggtggcgctgtcgtccgtgaacctcctttctctggcgagccttgtccgtcagaaatacccggcctgtcagattgtcctcgccgccgaccgtgacctgagcggcgatggtcagagtaaagccgctgcggccgcagacgcctgtgagggcgttgtcgccctgccgccggtgttcggtgactggaatgatgcgtttatgcagcacggcgaagaggcctcgcggaaagccatttatgacgccatccggccaccggcgcaaagcccgtttgataccatgagcgaggcggagtttaccgccatgagcgccagcgacaaggctctgcgggtgcatgagcattacggcgaagcgctggcggtggatgcgaacggacagctcctgtcccgctatgacaacggcatctggaaaaatatcccggccgccactttttcacggaatgtggctgacttattccagcgcctgcgcgccccgttctcatccgggaaaattgcctcggtggtggagaccctgaaactgattattccgcagcaggccgcaccggcacgccgtctgattggttttcgcaacggggtactcgatacccaaagtgggatattcagcccgcacagcaaatcgcactggctgcgcaccctgtgcgatgtggatttcaccccgccggtagaaggggaaacgctggaaacccatgcgcctaacttctggcgctggctcgaccgggcggccagtggcaacccgacaaaacgtaacgtgatcctggccgcgctgtttatggtgctggcgaaccgctacgactggcagctctttctcgaagtgaccggccccggcggcagcgggaaaagtattctcgccgaaatcgccacgatgctggccggagaggataacgccacatcagccgatatcgacacgctggaagacccccgtaagcgtgcctccctgattggcttctcgctcattcgtctgccagaccaggaaaaatggagcggggacggtgccgggctcaaggccatcaccggcggcgatgcggtgtcggtcgacccgaaataccagaacccgtattcaacacatattccggcggtaattctggccgtgaacaacaacccgatgcgctttaccgaccgcagcggcggcgtgtcacgtcgccgggtgattattcatttcccggagcagattgccccggaggaacgcgacccgcagctcagggataaaattgcgcgcgagctggctgttatcgtgcgccagcttatgcagaaattcagcgacccgatgaccgcgcgcgcgctgctccagttgcagcagaactccgacgaggcactcaatatcaagcgcgatgctgacccgacgtttgatttttgcggttatctggaaatgctgccgcagaccagcgggatgtttatgggtaatgccagcatcgtcccgcgtaattaccgtaagtatctctatcacgcgtatctggcctatatggaggccaacgggtacagaaacgtgctcagcctgaaaatgttcgggctggggctgcccataatgctgaaagagtacggcctgaattatgagaagcggcacactaagcaggggatacaaaccaatctgtcgctgaaagaggaaagctacggcgactggctaccgaaatgcgacgaacccgtagcaacataa

SEQ ID NO: 149513 - DNA, 843 bp, Enterobacter cloacae
atgacaaaaaaaattaacagtaaaagagacttaccaaagtcattcagcctggaaaaatatgatgaccttgaaaatatgtctgataaggatttgtttcgtcagctttattggcgatgcgatgatttaacaataaaaaatacagactgccctgactatggtttgcaatatggtgctaaatacccgcttaacaataattttggtgatccattcggggagctcaaagcagaagaatggtttcttgaaaagcaaaaggaatacgaatacaagactcagcctgatttgctaaaattaagttacggcgatggcataaaaccattaatgagatttgagttggcatttttaaataaaatcaatgctgataaaggtcactggaaaggaaagccaatagtagttgacgatgatttggtgggggatttgtttacagcagataacggtatgttttgggctgtcatgcgcgagccagtaaacttactttctgatgttgtggaaaacgtgatgattactgttgacttaaacaacagagatgatcttttgattgaagcattcacgaacctcctcccaaaatggcgcgaagaactcggaatacctgaaccagataagccagtctcaggggactgggagagcgtcagacgtaagataattgactacagaataattccacttattgatttgatgtcatgggaaagcgctaccgacagcaaaatatctcttggcgtactcgcagtatccctgttcccggatggagaaaaggagtcctttgccatagctcaaacggtaaaacctttcttggataaaatcataagaagtgattctttagataaaatcaggaaagaattatcttga

SEQ ID NO: 149514 - DNA, 240 bp, Enterobacter cloacae
atgaccaagaatcgccttaccagagaacaggctatcgaaaaatttaaagaagaactctcccccttcattgtcagaacggacaaagcatgggataccgatccaatcgcctataaaatctttgcttctaatgacgatgaaaaccatatagaacagggcgaatttggttataaagactactcgaaaccagatacctttcttcaccggctcaggcggataaaagaatcgctcagcggtcactaa

SEQ ID NO: 149515 - DNA, 195 bp, Enterobacter cloacae
atggcaaccggttcaaagaatgcgaaatcacaatcagtaacagctcgcatcgcacacgaaatcattgaaggaatggagtcggtgaaaactcccggcgaaagtacagggcaatttataaactctgccatgcaaggcgagatcaaacgccgcctacgtaaacagagcaagcaatcagccaatggggatcctgagtaa

SEQ ID NO: 149516 - DNA, 510 bp, Enterobacter cloacae
atgaatcttaactctatgatctatcctgaagtttttacaattggagggactgactacaaaggacgtagaaattctatagaaaataaagtattgataccttacacagaagagccacatataaatatcggtgatgaaatcactcagaaattgggaagtggagaaatctccttaaaaataattgatatgtcatttttgcctggaggcacccttaaaaggggtacaaaacacccacacatgcttaaattgatggttgaaaatttaactgccaatgagcataagcccaaaccatccagccaaaacacattcaacattggtagcgtatcaggcacacaagttcaaatcggtgaacgtaaccatcttattgtaaatataagtatcactgaacttgttgaaaaggtgtctcaatcacaagatcctcaagcaaaatctttacttaaggatttattaaataatagcactgtagctagtctcgttggtgctggagcctcagcattattagctttgctttga

SEQ ID NO: 149517 - DNA, 459 bp, Enterobacter cloacae
atgagatggcgtctactcagtacaactctacttctatcctgcgccatctatccaggcaaaggtatcgctgatcagtgcgaaaagctggataaggaggggcttctaatatatcagcagtttaagaaatccaagatgtgtaaggattcgactatcaacgctggatggaccgactgtttatttaaagcctacggcactaatattcttctttctggtgcaataggaacaaccatcgacgaacgcaccacgggaatgttgggtagcggattctatgtcctctctgttgatgaacgtgccaaggttagaacgtttattgatcggaaattgggtcttctattgagggtggacgggaaagacaacgttgaaaagtctggatgcatttacaacgaggtgttcataacacttgatgctcgggtactggatccaggtgaatttaataagttgaccatggggattgagtag

SEQ ID NO: 149518 - DNA, 171 bp, Enterobacter cloacae
atgcggcgatgccagatttatgtggccatcccgctctgtatagcactgctggcgcatcttcaggtgtttccactggaaatagtattcaggaatatttctgcttcaactgaaaaggtaagtttcaggatcgtggccggaatggcgttcatgtcttatatggtttttttatga

SEQ ID NO: 149519 - DNA, 672 bp, Enterobacter cloacae
atgaacaatgcattctgcccctcattgatgtgcgttgacttctcccgccttggcgaagagctggccgaactggaagcggctggagcagccatgttccatatcgacattatggacggccattttgtccctaatctggcgctggggccggaggatattaaggccgtcgctaagctggcgaagatcccttatgacgcccatctgatgatgagcaacccggacgcgtatatcgacaagtttgccgatctgggttgtaacattatctatgtgcacgctgaagccccgacacacctgcaccgtaccttgagcaatattcgccagcgtggcgtcaaggctggcgtggccatcaatcctgggacgcctttgagcagcctgagtgaggtactggatgtggttgatgtcgtgttagtgatgtcggtcaatcctggctttgccggccagccgtttattcacaacacgatcgataagacccgtaggctgcgcaagatgctgagggaacaatacagcgaagcaaaaatcgccatcgatggcgctatctcacccgcaattgtcagagagctggccgcggatgtggatatgtttatcctgggtaccgccgggttgttccgtaaggaaatgagctatcagaaggcaatgcagatattacaggaacaggctgagttgacttcaccctag

SEQ ID NO: 149520 - DNA, 444 bp, Enterobacter cloacae
atgaaaattgccattggctgtgaccatgtagggatcattttaaaacccaccattgccgaacacctggaggcgaaagggatcaccgtgatcgataaaggcgctcatggagagcagcgtaccgactatccgctgtatgccaaagccgttgccgacgcagtagtctcgcaagaggccgatcttggcatcctcatctgtggttcgggcatcggtatttcgattgctgccaacaaggtcaacggcatccgcgcagtggtatgcagcgagccttactcggccaagctgtcccgtctgcacaataacaccaatattctggccttcggctccagggtcatcggtgccgagctggcgaagatgatcgtcgatgagtggcttaacgctgagttcgaaggggatcgccaccagaaacgtgttgaaatgatagccgttctggagactcttccatga

SEQ ID NO: 149521 - DNA, 1590 bp, Enterobacter cloacae
atgaaatcgtcattcttcggtattcttcagcgtattgggcactcttttatgctgcccatcgctctgctccccgtcgccgggttgctgttgggcattggcgcatcattcaccaacgccaccaccatcgaatcctatggcctgcaatccctgttgggtgacggcacggtacttcacgcattactcaccgtaatgaaaagtgccggtagcgtcgtcttctccaatctgccgatgctgtttgccatcggcgtcgcgatgggtatggctaccaaagagaaacaggtcgccgccatctccggtgcagtcggcttctttgccatgcacgctaccattaatgccatgctgcaactcaacgagttattggcccctggcgcgttacctgatggttcgctgggcatgagcgtggggatcaagtctctacagatgggcgtgttcggcggagttctggttggcctgggtgttgccgcgctgcacaaccgtttttatcgaatcgagctgccagcaacgttctcatttttcggtggcactcggtttgtacctatcgttaccgcattgacctatgtgggtgtgggcatcctgatgttctatatctggccaacgatacaggaagggatcatgcatctcggcgcgttggttaaccgggcaggctatgccggtacctttatctacggctttatcgaacgggcactgatccccttcggcctgcaccacgtgttctacatgccattctggcaaaccgggctgggcggaaccgaaatcatcgacggtatctcggtctctggtgcacaaaatatcttctttgccgaattggctagcccgaacaccaaagagttctcggtagaagctacccgttttatggccggtaagttcccgttctatctattcggcatccctggggccgcactggctatctaccattgtgccaaactggaacaccgtaaactggtgcttggcctgctgctgtcggccaccctgaccgccgtgttgaccgggatcaccgaacctatcgagttttcattcctgttcgctgcaccgttgctgtatgtactgcactgcgtgctggcgggtctgtcgttcatgctctgtcacatcttcaacgtcggtgttgggcaaaccttctccggaagcctgattgacttcgtgttgttcggcgtactgcaaggcaatgtcaagacccattggctgaatgccatcctgatcggtattccactgttcccgatttactacttcagcttccgcttcctgatcctgcacctcaacttcaaaacaccagggcgtgaagacgaaggccaggaaaccaagctctatacccgtaaagacgttgaggctgccaaagccaacggccagcaaggcgatcaggtttccgatttgattgttgccggtctgggtggcaaagccaacatcactaatatcgactgctgcgccacgcggctgcggatcaccgtcgccgatgaaaatctggtggacgatagcctgcttaaaagctcaggggcacgcggtgtgatccgccggggcaaaggcatccaggtgatttatggcccgcaagtcacgttgattaaatccaatctggaagactgtctgcaagacgcttag

SEQ ID NO: 149522 - DNA, 891 bp, Enterobacter cloacae
atggcaaatcagcgcgaagtgttaccggataccgaaaatgcactggccatcggggccaagatcaagatgtcgctctcttcgctgaatccgactgagcgcagtatcgttgagtggttgatcaccaaaggaaacatcacaaaaaataccggactgcgtgaagttgcggggtgtcttgatgtttctgaacccttgatcgtcaaggttgccaaaaaaatcggttattccggttttcgcgagttgcgcggcgcgttggtgagttatttcaactttctgccctatgagaaagaggaagagatcacggccgacgataatctggataccgtgctggataaggtattcagtaacagcattcaggtgctgaaggaggcgcaatcggtggcagatacccaggtgattgggcaggcagccggcctgatttatcgcgccagacgggtgatgatactgggggtaggtggttcggcatcggtatgcctggattttgagcataagctcctgcgtatcggcatcatcagccacagctatagcgatttccacctgatgttgatggtcgccagtcagctggacgagcaggatgtggtgatcgtgatttctcaatcaggggagacaagggaactgctgaatgcggtagagattgccaatgagcggcaggccaaggtgatttgcattaccaacgataatgcctcgccgctgtcgcagaattcggatttgtcgatctttagtccggccatgagtgggccgctgttggggcaaaatgcggtggcgcggatcattcagctcaacctgctggatacactgtttatcgcgatcttgttgcaggactatcaagggaacaagcagcgattggagcgtggcattcaggtcgtggaaccgttgcacggcaagaaaagttag

SEQ ID NO: 149523 - DNA, 357 bp, Enterobacter cloacae
ttgctccgaggaggctttttcctgcgattccagccttgcggtgaggctgctgactctgtcacgctcaagcgcaagctccccggcgcgcgcctgtgcatcagcgacggcctgctcgaggcgctgctgcagtgtctcgcgggtggcctgatgctgctgacgttctgcggccagcgcattttcctgcgattcaagacgggtaaggagagaattgactttatcgcgttcagacttcagttcttctgtacgcgcattagcttcggcagaaatttgctccagtcgtttctgcaggtcttcccgtgtggctttgtgttgtgcctgttccttactcagtgcatcctgcagggcagaactgcgtaa

SEQ ID NO: 149524 - DNA, 249 bp, Enterobacter cloacae
atgcagctgtataagagcctcagaaggacgatagtgctgctttgcccaccgcccgtaattattaacggactcatactgacgttctgcagcaccatcacggtaatacagtatatggataattccatgaagctgcaggtaactggctaccgtggttacattattacgaacgaagcgcgtgtggctctggaaggtatcaagatcaactccatcctgtccgtcatcaagcgcatcaagaataaaagcgattaa

SEQ ID NO: 149525 - DNA, 1374 bp, Enterobacter cloacae
gtgccgggttcaaagagaatttgcaggcagtgtctgaacgatgaccgttatctgaacaacatcatcgcaagcgatcctgatgcctcagaatcatgcgattattgtgactccgaagagatgacgatgtcgatggaaacactggctgaaaaggtcgactggttgattgaaaattattatcggggcggagaatataaccattatctggaagagtatgaaggtgaacctctcttctctgttctggagcaagaggtcacagtcaatgataatatcatcaatgacttatcggaactgctcgacgagttatggtttgactggagctcacatgaaagaaaatatggtgatgagccgcattttgttgaagctgtaaccatctcaggaaatctttccagaaaatggaattcaatggaaaggaaacttcgggagagtaatcgattttttaatatggacgcgatggcaactttcgaagaggtttttacttaccttcacgaaaatcatccctcagcattcatcgattttgagcctaacaaaccaattttccgtggtcgtatttttcagtcagaggatgcacttgaaatcgcattacgtatgcccgagtcgagtttcggtcctcctcctcctgaactgacaccttccggcagaatgaatgctagaggtatctcagtcttctatggcgctacgtccagaaaaaatgccatatccgaagtgcggccacctgtaggtagttatgttgctgttgctgagttcactttgttgcggacagtcagattactcgacctctccagtctgaaagggctggctgttaacggatttagtcgctttgatccggagtatctacttcgatatgaacgcagtagttttattcagaatctctccagaaaacttgttatgccggttgttcctgagcttgaagaaacaaattacttgttgacgcaagctatcgctgattatctctcaacatttgagcgttgcgaactcgatgggatactgtttacttccgcgcaaaagccaaaggaaagcacagacccttctgtcatgaatattatcctgtttcataaatcgtctggggtactgaatgcagaccgaaggttccgggaagctgaagtaaatatgtatcagcacgatgaggatatttcatactttgacccagagataaggacgactcccgatgatttccgtcgtgaatttaaggtgctatcacgtaagaaaaatagggaagatatacttgagctaaaactcgatggcatagaagttcataaaatagagggtgttgattactccacatcagaaacaacagtcacgcactatttaacggaaggccgcacaaaagaagtgatttcgcatgcgaaatctggctattcggatgacgaattctga

SEQ ID NO: 149526 - DNA, 261 bp, Enterobacter cloacae
atggcccgtacgatgacggtggacgtgggtgatgagctgcgggaatttatcgattccctggttaaggccggtgattaccgcacccagagcgaggtcatgcgtgacgcgttgcgtctgctgcgtgagaagcaggctgaatcccgtcttcaggaactgcgcgatctgctggctgaagggctcagcagcggcgaggcgaaaccctggaacagggatgcattcctgaataatgtcagggccagggtggcaaatgaaagagattga

SEQ ID NO: 149527 - DNA, 366 bp, Enterobacter cloacae; identical to SEQ ID NO: 120069

SEQ ID NO: 149528 - DNA, 399 bp, Enterobacter cloacae; identical to SEQ ID NO: 119662

SEQ ID NO: 149529 - DNA, 525 bp, Enterobacter cloacae; identical to SEQ ID NO: 130254

SEQ ID NO: 149530 - DNA, 435 bp, Enterobacter cloacae
atgacctgcttattcgcaccttcccttgaccgcatggaaaatggcgatgtgttgattgttactaaactcgaccggctggggcgcaatgcgatggatatcagaaaaacggtggaacaactggctacttcagatatccgcgttcattgcctggccttgggcggggtggatctgaccagccctgcaggaaaaatgaccatgcaggtgatctcagcggtggcagaatttgaaagagatttgctgcttgaacgtacgcactctggtatcgcgcgagcaaaagcggctggaaaacgatttggacgtccttctgtactgacaaaagaacagcaacttatggtgattgcacagattaactccggtataagtatcagcgccattgcgcgggaatttaatactactcggcaaaccatactccgggtaaaggctgggcagcaataa

SEQ ID NO: 149531 - DNA, 996 bp, Enterobacter cloacae
atgacaaccattaaagatatagcaaaaaaagccggagtatccgtagcaactgtatctagagcaataaacaacaaaattgatatcagcgaagatatgcggaagtacattctgaagattatcgatgatatgggctacgtaccgaattccattgctaaaaatctgtcccatggccggacgaaccttattgccgttatgctgccgacattaaacaaccagttcttttcagatttattatctgaaatagaaaaggaagccaacaaaaacggatataacaccctattctttaacagcagtgatgaccggaccaaggttgaatattaccttaactcgatgcgcagtaattttgtttgtggcgccatcattaactcactatcggtcacggggaaggatctggagaacctcgaaaagaatggcattaaaaccatcacaatagaccgttcaggctctgatcctcattattcgtcagtgacggtagaccatcgaacggggggcagaattgcaactgaacacctgtttgaaaagggatgtcagcatcctgtcatgctttcgggggctcctgacgacgccattgccaatgagcgtatggctggatttgcggaagtcattttatcaaaaacgggtcgtacaaatatcacggtgatccacagtgatttaacagcacccggtggtcatcatgcctttatggaatttattaggaaaggtgaaaaatttgatggcgtgttctgttcgaacgatgccatggcatttggtgccatccgtgcctgtacggattcaggaataaaagtacccgatgatttactggtggttggatacgataactcgtcgatggatgagatgtttgtgccacgactcagttcggttaatcagcatctgaataaaattggtcagctctcaattgaatccatgattgagctcatcaatggcaggactgaaattaaacatttgagcattacaccagaattagttatcagagaatcaaccttaaaacgagagtag

SEQ ID NO: 149532 - DNA, 924 bp, Enterobacter cloacae
atgtacgatatcgtcgtcatgggcagtatcaatatggatgtgattgtgaactgccatgagtttccaaagagtggggataatacattctgtaaatccattcagatgactgcaggcgggaaagggaataaccaggcggtcagcgctgcccgttatggcaaaaacgtctgttttattggctgtattggtgatgatgatgccggacgccagctgcgtcagaatctcaaaaaacgccggattgacgattcgtacatgatcgtaaaagaaggggcaaagacgggttcctgtgtgggtctggttgagccgaccggcgataacacgctgctggttaacctcggggctaactttgctttcggtccggaagatgtcagcaaagcgctggaagagatcagcggaaagattttgctgatccagatggaaaccagccaggaatcggtccttgctgccatgcgcatggggcgtgcaaaaggtatgtttgtgatcctggacccggcgccggtgcagggcattaacccggaatgcttcccttatgctgatttgattgttccgaacagcagtgaaacccgccatattaccggtgttaccgtgaatgatgaaagaagcgcactggaagcggcaaaaatcattcacaaaatgggtgtgaaaaacgtcattattaaaatgggtggcgatggttgcctgctttatcagaatgagaaatccgtctttattccagcgctgcgggttaatgcggtcgatactgttggagcaggtgactgttttgccggcgcactcgccaattatctgattgacgatgaaagtaatatcgaagatgcgatccgatttgcccaggttgtcgccggtattaaagtttctcgggcaggtggtcacgatgcgatcccggcgatggatgaagttaaagccgttattgaaagtattaccgtctga

SEQ ID NO: 149533 - DNA, 1287 bp, Enterobacter cloacae
atggcggtcgccctgaccgggatgggggcggtgatttcattactgaccggggcgttcgcaccggcactgaataaattcgttgaatcgacaggggtttctctctctattacggacttagggtgggccccgctggccgtgatcacctggggttccatgtacacgctttatttcgcgacagtctgcatcattattaatgtcctgctgctttcgctgaagcgggtgaaaacgctgaacgtcgatttgttcaacatctggaatatctcagtaataggattattgacgctgtactattcagaaaataatctggtgctgaccacatttgtggtgggtgtgatttatattctgatgctggttaattcagatgtgatgcaaccgcagattaaaaaattgctgaaatatgaccagagcagcattaccactactgcacacccttctttactgatttgtccaccggtcctgatggtgaatgaacttatttcacgttttattccatttatcgataagtacgattttgatgctgaaaagctgaacgaaaaaattggcttctggggttctaaattcgccatcggcgtctacctcggattctttgtcggtattcttggcaaactgccaatgagcgaattgtttgcgctggcctttacggccggggtctccctggagctgttcagtgcggttggtaactggtttggtccggcgattaaaccgctgtcagacggcattgccaccatgatggaaaaacgcttcaaaggtcgccagatttatgtggcaattgactggccgattctggcgtcccgcgcagagctgtgggccgtggcgaatattctggcgccagtgttactggtggcagccatcattctgcccggtaataaggtgctgccactgggggggatcttactgaccgtactggccccggcgctgctgattattactcagggtaaggtgatccggatgaccctgattggtacggtgctgatcccgctgtttttatgggccgccacgctgattgctgagtttgtgacccggacgtctattgccatgaacagcttcccgaaagggctctcgcatgaccagctgttctcctccgtggactctgatccacttgaaaaaatgctttccatgttaatcgccaaagccagcgtatctctcgatatgcagatggtggtgatgtcagttatcgcggtcgtagcctatctgggtatgttcatctggtatttccgccggatgcagcaaattaacgcggcgcgttttgtgtgtgatccttctgtaaattttgaggtggttaaatga

SEQ ID NO: 149534 - DNA, 678 bp, Enterobacter cloacae
atgagacttttaggggcatccctgatgtgtgccgatttcctgcagcttggtgggcaaatctcggaactggagaaagggggtatcgatttctatcatatcgatatcatggatggccagtttgtcgataattttgcgctgagcattgattttatccgttctattaagccactgacgacccgtcctatcgatgtgcatctgatggtggataaaccggagcgctacattgagccgctggttaaagccggcgcggacattatcacggtgcatgccgaagcggtcacccatctgcacggtgtgctgagcaccattcgcagtcacggggtgaaagccggcgtcgcactgaacccgtccacgcatgtggagtctctggggtacgtggtggatctgattgatgtgcttctcatcatgactgtgaatcctggctttgcggggcagaaattcatcgacgcgatgcacgaaaaagttcgctttgcgcatacctggcttaaagagcacggcagtgatgcggtgattgaagtcgacgggaatattggccaccacaccatcccgccatgtgttgcggagggtgcgggaatgttcgtgctgggtaccagcgcattgttccatagccgcggaacgctggcagaaaatctggcggaaacccgggctatcactgacactgtccaaatggaatcatga

SEQ ID NO: 149535 - DNA, 270 bp, Enterobacter cloacae
atgtcagcactgaaaaagcagcgcattgacctgagattaaatgaagacgacaaacacatgatcgaagaagctgcagcaatgactaaccagtcaatttcgcagttcatggtcagtaccgcctcagaacgcgctgcagaagttattgaccagcaccgtcgtctgctcctcaatgaggagtcttggaacctggttatggatgcaatcattaatccgccagcaccgaatgaccggctgaaacgcgccgctaaccgtctccgggaactggagtaa

SEQ ID NO: 149536 - DNA, 531 bp, Enterobacter cloacae
atggagggtttaaggattgagattttttcagaggaagttgaatatgaattaagcaacttcgattgtggagaagagtatctgaatacttttcttactgaccatctgaaacggcagcataacagtaagatcttacgtggttatgttctcgtgacgagagagaataaaccgcgtgtgatggggtactacacgctatcaggaagttgctttgagaaaatacttctacccagcaaaacacaacaaaagcgtgtaccctacaagaatgtgccgagcgtgactttgggccgtctggcaattgataaaagcattcaccaccagggatatggagaaacacttgttacccatgcgatgaaagtcgtgtatcaggcctcgcaggctgtgggtatacacggaatgttcgtggaagcgctgaacgacaacgccaaaaaattctaccttcgactgggtttcattcagttaaaggaagaaaactgtaactcgctcttttacccgacaaaatctattgaagaattgttcgaagtaaatgatgaataa

SEQ ID NO: 149537 - DNA, 267 bp, Enterobacter cloacae; identical to SEQ ID NO: 140997

SEQ ID NO: 149538 - DNA, 267 bp, Enterobacter cloacae; identical to SEQ ID NO: 121067

SEQ ID NO: 149539 - DNA, 1101 bp, Enterobacter cloacae
atgcttagcgataatgaggcccgtctattctttagtgaatacattctatttgtagagggcgccacagaagttgaattgtttagaaattataatctgcaaaagctgtttccagtacttaaaaggttagatgtgtatgattgcgatgaagtaatgttgaaaaatataaaccccagctactcaaatgcagccatcccatttctagtagtaaaggatattgatcagattgccgttgttgacttcgaacatgaacaatttaaatttaattcgaaagggaaatcaattattaataaaatcattaagagagataaactacactatttttcgacataccaaaaaccttttcttaacgcagcaaaatttcttttaagccaagatgaaaggaaagtaacattcagtgaaaatggcctaaaattcagacacttcagtataggcagagttataagcgcagttaattttttatcctctaaagataatgtttattatacttctacaacgatagaaggctcattgatcaatgaattctctttatggatcattgacatagtaatgagaagctttaatgtaaataataaaaaccctgtaaaaatgattaatgctctgctgcaaaaatacgatattaaaacccaatcaaaacaactttttcccaaaatactttcaaaatgtgaaacaaatcataacctaccattgcgacacatgagattattgaaaatcattaaaattagatatgctaaagaaataattgatgagtttaaaaaaaccatccccgacgtaaaagaccaagttgctatcttgcgccttatttttagtggcaaaacagaaactcttgtaagtatagaaatgcattataaaattgatcaaaaaccgatacggcaagatatattggattatatcaaagcattaaagtcagaaaatttctcttttatgagttcttacataggaaagacttctggatgggttacaagcttcattgattttagccttaatcattattcagccctagataaagaaaatgtcgaaaaaaaattccgcttggcttttcctgaaatttcgcatatcatcgatcatgcttcttcttcgatagaagctggagggctcaaatga

SEQ ID NO: 149540 - DNA, 273 bp, Enterobacter cloacae; identical to SEQ ID NO: 130239

SEQ ID NO: 149541 - DNA, 321 bp, Enterobacter cloacae
atgaaaaagccattaccgaccgtattacgcgccgcgctgtatcgccgcgctgtcgcctgtgcatggctgacggtatgcgaacgccagcaccgctacccgcatctcaccctcgacgcgctggaaagtgcgattgccaacgagctcgagggcttctacctgcgccagcacggcgaggaaaaaggccgccagattgcctgtgcactgctggaagatttaatggaagccggaccactcaaagccgcgccgtcgctgtccttcctcgggctggccgtgatggatgaactctgcgcccgtcacatgcaatcgcctgttgtgcactga

SEQ ID NO: 149542 - DNA, 276 bp, Enterobacter cloacae
gtggcttctgtttctatcagctgtccctcctgttcagctactgacggggtggtgcgtaacggcaaaagcaccgccggacatcagcgctatctctgctctcactgccgtaaaacatggcaactgcagttcacttacaccgcttctcaacccggtacgcaccagaaaatcattgatatggccatgaatggtgttggatgccgggcaaccgcccgcattatgggcgttggcctcaacacgattttacgtcacttaaaaaactcaggccgcagtcggtaa

SEQ ID NO: 149543 - DNA, 267 bp, Enterobacter cloacae; identical to SEQ ID NO: 11114

SEQ ID NO: 149544 - DNA, 1308 bp, Enterobacter cloacae
atgaaatctcacaagaaaggaataatgcaagtcaccgatgctcaaatcggttggggcatggcattaataggaatagtttttgtaggtgttgcatatggctattacgcagatgataactcctacagcgtcgcagctcagcatgctataagagtttccgaagctgcggataagtatgtctccgacaattttgattcaattgtggctcaatcttccgcaacaaaggcgtttgtttttgatattacaacattaaaaaatgctggttacttacctagttcatttaatgctacaaacagtttttcacaaacatacagagggatggtcttacagccctcagcgcagaaactacaaacccttattgtgacaacaggtggggtgagtctttctacagggaaagccaataaaataggtatcaggataggtgctaacggagggtatattgaatcgggcaatgcgatgggatcacagggctcctggagtgaaccactatcaaagtattcatttaatcctggtgatggtcatatagctattgctcaattttttaaagatggtgtgtcaggtaacgattttctttacagaaaagcagtctctgggcatccagaattaaatgctatgagcactaacttaagtcttggtggtaatgatataaattctgctaaaaatataactgctactggtcttgtcaacactgctaatgccactgtaaaaaacactctcactgctgcaaatgctaatgttacaagcaaccttactgctgctaacgctagcgttacaaataatttaacggcggcaaatgcaactataaataacctgaatgcaggaacaaccaggacgagtggagaaacatatactggcgggtggttcagaacaactggtgatactggctggtattcggagaagtggggcggcggttttaacatgactgattctacttacatcagggcatacaacggtaaatcgatctataccagcggccagatgaaggctggcagcctacgctcggacggggatgtttctgttgccggagtcatacagttagacaaaatcaacgtagcaggggcgacatgtcctgtgaatggggctctaagtcgcgacgacaaaggggctacactttcttgtcaatccggtgtgtggactgatgctggactaggtaaggtaggctactactgtcgtcgcacctcttttgacaaaggacgctccgatgactatgtaggttacacgccacgaacggatgataactgtcctgttattcagcctggacagcaacctaatggctactgtagttgcattaaagttcttctggcgtactga

SEQ ID NO: 149545 - DNA, 612 bp, Enterobacter cloacae
atgattattttcgcttcaataattgtaaccctcatcgttgtctctttagcccctcgatacattaaaaaggaggaaatgaatcttttatcctcatgtaatgaaattgatttaaataaaatctatacaaaaagctatcttttaggtggtgcatctatagtagcgcctcaacttcttttaacttttggttcatttgattggctatatcatgcgttgttcatctctcttggcattgctgcctattttgatataaaaaggaattggattcctgaccctgtaatattcataattttaattattaatttcctatcgatcatttcttcccaaaatttcgatttgtattctacagttagcaactctttatattttataattccatattgtattttaaacgccctgtcattcttaactatgaagaaatccattttttatagtggtgacatatatattattatatcaatatcattcacaattcctccttttgttggattcattaccacctcgcttgcaattttttccgctctactatttatgttgatatcaaaaaaacgtgaaatcccatttattccattcttgcttttttcttttctactctccaatctcgtagcttattaa

SEQ ID NO: 149546 - DNA, 303 bp, Enterobacter cloacae
atgaatagtcaagaagggcttaaagatacattccgcaacatgaggaagcagggaagcgagccaacaatggttacgcagtcgatggaaaacattttagcaaaaacattccgtctgcgtgctgatagagtatatattcctgctttaaaaaattctcatccagcctttatgttttggttagagaagcttaagccgaatgagaagctaccacgaggaaagttttttaagcgttatgcatttattaaagttcatacaaaaactggtcactgtgtttcggtagaggctgccagcgcaggaataaaatag

SEQ ID NO: 149547 - DNA, 315 bp, Enterobacter cloacae
atggcggaatatggagttcagacatgggacgcctcaggcaaggtaaataactatggcgttaagcctgtcagcgtttgtggctatctccagctggcccagaaccagaaaacaggctcttacaccgtagcgcttccaccgggttgcaggctgacctattttcagagcatgaacggcgatcagtttggtacgagtcggaggaagatcaccatttcagggggaacagcaacagtgtcagcagcaggcgataccgactactcagcagggactgagcctgcggcagcggcttatctcattttccagatcgagagggcataa

SEQ ID NO: 149548 - DNA, 279 bp, Enterobacter cloacae
atgaatcccgacaaccattactcctcttgtcgcgccggtcaggttttcaagcccttcaacatcaaaccattttttgactctcgcatcgctccagaaccaggccattcctgtttccatcagtcccagcccaagagaaacaaagtttttattaaccatctggctccgggccaacggtgtcatctcggggaagcacagttcgatatttctaatcgcaattccttcccgacgtttcagaaagggtctggatatttttccaaggccagaacccagaatatgtaa

SEQ ID NO: 149549 - DNA, 282 bp, Enterobacter cloacae; identical to SEQ ID NO: 121027

SEQ ID NO: 149550 - DNA, 447 bp, Enterobacter cloacae
atgacgcagctgaacgctgccggtatgcctgccaacgcgatgtggatgcagtgcctgctggtgtgcgtgttcattctgctggtgtccttcggcggtgataccgcgtcggcgttctataacaagctgaccctgatggcgaacgtatcgatgacgcttccgtatctgttcctgaccctggcgttcccgttctttaaggcgaagcgggatctggagcggccgtttgtgatcttcaaaacccgcgcggcgacgctgctggcgaccactgttgtggtgctggtcgtcgcgttcgccaatatctttaccgtcattcagcccgtggttgaggcaaatgactggaacagcacgctgtggatggttggcggaccgatcttcttctcgctgctggcaatggggatttatgagcattaccgtcgtcgctcgacggcctgtgtagcagaagtggcgtaa

SEQ ID NO: 149551 - DNA, 162 bp, Enterobacter cloacae
atgttcgatgctgttgatcacatcgtcgcctgctacggtatccacgcgcaggcccggcaggctggcatcaatcgtgatgtcgcgttcgccggtgccggtgttgccgtggccattggtcacgctcgcagttacggtgagatcgccgttaccgatagcggttaa

SEQ ID NO: 149552 - DNA, 1005 bp, Enterobacter cloacae; identical to SEQ ID NO: 115660

SEQ ID NO: 149553 - DNA, 516 bp, Enterobacter cloacae
atggtgcgccgggtcaaggcgtccttcgagcggatccaccagccagtactcttctggggtacaggtggcctgccactggagcagacgcttccccgtcaggctcgatcccagctggacgacaatctgcgcctgcgccagttcggtaaccgctttcgcgttacccagccagaggtcggcgcagggcagcggctggcccgtctgggaaagcacgtcaccaatcagcggccagccaagcgtttgtgcccactccgccgccagcttgccttccgccgcactcatccgcccggcaatcaccacgccgcgcttctggcgccagaagaaccagtcgcgctgttttgcgctttccagatgcgtctgctcgcgcagccagggtttttcgctctcccaccagtctcccagctgctgttgccagacgaggccagtatcgttcatttcgccgtacagcggctcggcaaacgggcagttaatgtgcagcccgccgctgcgcagtgcgttcatggcgtggtcgagagttga

SEQ ID NO: 149554 - DNA, 1617 bp, Enterobacter cloacae
atgcgtgttaatggtttaaccccgcaagatctcaaggcttatggtattcacgacgtccaggaagtggtctacaaccccgattacgatacgctgtatcaggaagagctcaatccggcactggaaggatacgagcgcggtgtgttgacgaacctgggtgctatcgccgtcgatacgggtatttttaccggtcgttcgcctaaagataagtatatcgtccgagacgacaccacccgcgatacgctgtggtgggctgataagggcaaagggaagaacgataacaaaccgctctccccggaaacctggcagcatctgaaaggacttgtcacccatcagctttccggcaagcgtctgtttattattgatgcgttctgcggcgctaacgccgacacccgtctctccgtacggttcattactgaagtggcctggcaggcgcatttcgtgaagaacatgttcattcgtccgaccgatgaagaactgcaagacttcacccctgactttatcgtgatgaacggcgcgaaatgcaccaacccgcagtggaaagagcagggtctgaactccgaaaacttcatcgccttcaacctgaccgagcgtatccagttgatcggcggtacctggtacggcggcgaaatgaagaaagggatgttctcagtcatgaactacctgctgccgctgcgcggtatcgcctccatgcactgctcggcgaacgtcggggaaaaaggcgatgtagcagtgttcttcggcctttccggcaccggtaaaacaacgctgtccaccgatccaaaacgtcgtctgattggcgacgatgaacacggctgggatgatgacggcgtgtttaactttgaaggcggctgctacgcgaagaccattcgcctgtcggaagaggcagagccggatatctaccacgcgattcgccgcgatgcgctgctggaaaacgtcaccgtgcgtgccgatggttctatcgacttcgacgatgcctcgaaaacggaaaacacccgcgtctcttacccgatctaccacatcgagaacatcgtcaagccggtatcgaaggcgggtcatgccacgaaggtgattttcctgaccgcggatgcgttcggcgtgctgccaccggtttcccgcctgaccgccagccagacgcagtaccatttcctctccggctttaccgctaaactggcgggtaccgagcgcggtgtgaccgagccaaccccaaccttctccgcctgcttcggcgcggcgttcctgtcgctgcacccaacgcagtacgcggaagtgctggtgaaacgcatgcaggcatccggcgcccaggcgtacctggtgaacaccggctggaacggtacgggcaaacgtatctccatcaaagatacacgcgccatcatcgacgcgattctggatggttcgctggataacgctgagacctttacgctgccgatgttcgatctggcgatcccaacagcactgccgggcgtggatacgcgtatcctggatccgcgtaacacctacggttcaccggaacagtggcgtgagaaggctgaatcgctggcgaaactgtttatcgaaaacttcgagaagtataccgacaccccggccggtgctgcgctggtgagtgcgggaccaaggtaa

SEQ ID NO: 149555 - DNA, 339 bp, Enterobacter cloacae
gtggatttcgttgacggtgcccgctgcggtaacggcggcttgcgctggcgtctctttcgggacgcgggccttcagcacctcaacgatgcgcgtccgccattcggcggcggcggcctggtattcgacatcagcgtctacgcgatccagcaggcgctctgcacccagctccgccagcttgctgtcgaagtctttaccggactggcagaaaaattcataggacgtatcaccgaggccgaagacggcaaaggcggtgccctccagcctgggcgcttttttcgagaacaggaacttatgcagcgcgacggcttcttccgcaggctcaccttccccctgcgttga

SEQ ID NO: 149556 - DNA, 273 bp, Enterobacter cloacae; identical to SEQ ID NO: 121030

SEQ ID NO: 149557 - DNA, 501 bp, Enterobacter cloacae
atgatgaagcgcaatatcctggcagtggtagtccctgccctgctggtagccggtgcagcaaacgctgctgaaatctataacaaagacggcaacaaattagatctttacgggaaagcagttggcctgcattacttctctgattacgcgggcaacgatggcgacaacacttacgcgcgtctgggcttcaaaggtgaaactcagatcaacgatcagctgactggctacggtcagtgggaatacaacttccagggtaacaactctgaaggtggcgatgcacagaacggcaacaaaacccgtctggcattcgcaggtctgaaatttggtgacgcaggctccttcgactacggtcgtaactacggtctggtctatgacgcaatcggcatcaccgatatgctgcctgagttcggcggcgacaccggcgcgataacttcttcgcaggccgtacgggtggtctggcgacttaccgtaacagcaacttcttcggcctggttgacggtctga

SEQ ID NO: 149558 - DNA, 390 bp, Enterobacter cloacae
atgaaattaaatcttgtttcaaagaaagttcataaagctacccttgaaatgattcagggtgatagcggtaaaaagaaagctaaagctaatgtaactatttctaatgaattttacggaaacaccaaggatcagaacctcttcagaattcgttatgaagttgaggtgacaatcgaaaatgttgttaaagtggatatttcttatgattttgatttcacaactgactctgaagtatcgagcgaattgttcgcttcatttgaagttcgttcaattgcaccatctttagcatacccctacataaaatcttacgccgagcagctaatcagtatgtctgggcttggatcttttaatttaccatatatcaattttacagaagaaccattcgaagagtaa

SEQ ID NO: 149559 - DNA, 675 bp, Enterobacter cloacae
atggaaaactggaaaatcattaaaaccaaaggtgactatgataaagctatggctcgcatcattgagctagccaatgccggccttgaagttgatacagaccaaatggacgagttcgagttgctaactcttctcgttggtcattatgaaaaagccaatttccagatggacaagccagatcccattgaggccataaaattccgcatggatcaagagggattaacttctgctgacatgaagcaatttatcggttcagcatctaaagtctctgaagtgcttaaccggaagcgcccattgagcctgcctatgattcgaaaaatacataatggacttggcattcctgcggaaattttgattaaagatgtcaatgaattagagtggacgccgttggattctagcgatgagttgcttgagttaattggtgtgtcagtttcctctcatatgaatatagatgctggtttttcgaacataccagatttcattgcacatggaaggattactcagcgagcagaggtggttagtccactctctatgagttccgaaagaaaagaactaaaagcggttaaacacacattttcgcgggctagagcaaccaaaatctttgacggagtgattggcacaaaggttcactcaactaacactcgttacctggatgagagttttaatctaatatcatga

SEQ ID NO: 149560 - DNA, 285 bp, Enterobacter cloacae
atgattgtcataggattagaggagctccagaagttcatcaagaagcacaaccaggcaaaagggccacttgaagcttggtatgatgaagcgtgtagagctaaatggaaaactcctcaggacattaaaaatagattcagccatgccgattttcgtccgaacaatagggttatctttaacattaaaggtaatgattatcgattggttgttcaggtggtgtttgtggctggaacggtgattgttgagcaagtcgggactcatgccgagtatgataagtggaggctttga

SEQ ID NO: 149561 - DNA, 573 bp, Enterobacter cloacae
atgtggttaggcataccattcctatacgttcatgagcgtttagcagatacaatcagtattgataaaattgctacagtttctgtagactcttcattctcatgggaaaccataattgcagctttcattagcggcttggttcccgctttaatttctttatatgttatccggcaaaataatgaatcggttagatatcagcaaagccgcgaagacaaaaggaactatgcagcccatgttaggcttaacgtcagtgaatatgcatatcaactcacgaaagtaaaagagttacattccgaatggatagatgaagggattaaaggtgttagctataaacgccctgaaattgaaaaaaatatgtcggctgctttacttgagcttgagaaatataaagtaagtttgcttatatcagtacttgatgatgaaaaaggattggcctttaaaaaatcaataaatgacattcaaagttatctgtcagaaataatcataaagaaacatgcaagtataaatgactcaaggaactgggttggtagatattctgattttatatctgatgctaataaatatcttaataactga

SEQ ID NO: 149562 - DNA, 228 bp, Enterobacter cloacae
atgctagcagtaaaagtaatgtcgccaggtggcggtgaagagattcattgcggattgagcgtagggttcaatccggggcagcagagcatcgcggtatcgggaatggacaaaaatgtattcctgaaacccggcgaggtcgcctacgtgatgaaccagaacggaaagacggtttctcgttacgagcatattgccagtcaggaagcactgcataacgcggtggattcgtag

SEQ ID NO: 149563 - DNA, 537 bp, Enterobacter cloacae
atggaaacgactgagcgccacaatttcacccgcttcccttatcgtcgcgatgttagagaaaacggtgatataaacaacggtggttttgaccttataaaattcccggaaaagataaacgacatccatgaagttaaggacttcccttggtttaaaaatttcatcactgaagtcaatagcatagatggcttatttatgacattgggatgtgctatcggttatgaagaggacgtcctatacggctacatcgatttttccttgaggccaaacgcgtccgaagaattgaaattagacttagttaatcttgacgttcatttcatgaattttatttcaaatgcttttccagaggaggcagcccaccagcaggccatccaatatcttcaaaggatattcctttggatttcatctcctcttgaaatctacggcgaagagtactcaaaagtgaatctgacttttcgtgaacggaatcaggatggattggcatgggcttttgataacctaggttattttttaacaaagcattttccctccaagctgtag

SEQ ID NO: 149564 - DNA, 327 bp, Enterobacter cloacae
gtgattgaacttgtgacactggaacaggccagagaacatttgcggatagatgatgatgccggtgatgctgatctgaccctaaagattcagtctggcagtgcagcgcttctctcatacatccagggaagtcgtgacagggttgttgataatagcgggaagcttatagagggtgagcccctgaaacgcatgcaaacagctttactcgttctcctggggtatctcgatcgaaaccgaaacggagaagaggaagagaaactcaaacagggtgagcttcccttttcagtgacgatgctgatttacgatctccggttaccgacaattatttag

SEQ ID NO: 149565 - DNA, 366 bp, Enterobacter cloacae
atgatagcgcctgtttttaaagtttgtgcagccagccaggaggttcgctccttgctgggagaatctcccgtaaggctgtaccccttcggcaagcattttgatgaagttgtctatccctatgcggtctggcagaacattgacggtgatcctcaaaattacctgaagcagcgccccgatatagaccgcttttctgttcagattgacgtttacgccgacacagatacagaagccatcacggttgcgcgggcgcttcgtgatgtgatcgaaggcagcgcaataatcaccaggtggggtacgcaggaactggaacccagtactatgaagtaccgttattccttcgacgtcgactggctcgtcaaacgataa

SEQ ID NO: 149566 - DNA, 156 bp, Enterobacter cloacae
atgcagcgaaaaaagaaaggtatgaaaagtacgaaagattatgccattacagaaaaaacgacctgcaaaaaacaggtcgcggtgatgcaaatcaaaaaagaccgtattgtattttcagaaaatggtgtcagctttctttctttatcagcgttttga

SEQ ID NO: 149567 - DNA, 252 bp, Enterobacter cloacae
atgaattacaaatttgaaaaatctctatctgtagaaacagatcttcctgacgacaaagttctgattaatgttcatagcgtcgcttatgcggtattagcccgaacactcaatgaccatattcctgggtttgggcatgaacttctgaaaaacctcgatagagtttatgaacaaaatgcgggggaggctgaaacacagctggcttttgctcaaataggggccatggtcaaaacgctgataaagaaagaaagctga

SEQ ID NO: 149568 - DNA, 456 bp, Enterobacter cloacae
atgagcgggacggtagcgaaccggccagcgcttaaaaagcttctgcgaacgctgaatgagggcgatacgctggtagtgtggaagctggatcgcctcgggcgaagcatgcggaacctggtactgctggtagacgaactccggcagcgcggcatccacttcaaaagtcttacggacagcatagacacctcaagcccaatggggcgtttcatattccacatcatgtcagccctggccgagatggagagggagttaatcgtggaacgtaccagggcgggattagcggcagcgcgtgagaaggggcgcataggaggcagacgaccaaagctaacaccggagcaatgggcgcaggctggcaggttgatttcaaacggcctggacagaaagcaggtggcaattatctatgatgttgctgtctgtacgctttataaaaaattccctgcatccaaaccggcttaa

SEQ ID NO: 149569 - DNA, 420 bp, Enterobacter cloacae
atggaatttatcaggcctactgaactgcgagaaattatcgcgatcccactatacagcgatttggtgcaatgtggttttcccagccccgcagctgattatgtagagcagcgtattgatcttaatgagttgcttgtttcccatcccagctcaacgtatttcgttaaagccgcaggggattcgatgatagaagcggggatcagcgacggtgatctgctggtggttgatagctcacggactgctgaacacggagacattgtcattgcggctgtggatggggaatttactgttaaacgccttcaactgcgtccaactgttcagctcaatccgatgaacggtgcttacagtccgattgtggtaggcagcgaagatacgctggacgttttcggcgtagttactttcattgttaaatcggccagctga

SEQ ID NO: 149570 - DNA, 1191 bp, Enterobacter cloacae
gtggttgttctttcgaataatgacggctgcgtcatagcgcgcagcgccgaggccaaagctgctggaattaccatgggagagccattcttcaaacaaaaggagttattccggcgcgctggcgtgatttgcttcagtagcaattacgagctgtacgcagacatgtcgaaccgggtaatgacaacgcttgaggagatgagccctcgcgtcgaaatctacagcatcgatgaagctttttgcgacctgacaggagttcgcaactgccgggacctgacggagtttggcaaagagatccgcgcaacggttctgaagcgtacacatctgacggttggggttggcattgcacagacaaaaacactcgctaagctggcaaatcacgccgccaagaaatggcagcgccagactggtggggtggttgatttgtccaatatcgaccgtcagcgcagattgttggctctggtaccagtagacgacgtatggggcgtcggtaggcgcatcaccaagaaactcaacgccatgggcattaaaacggctctggacctctcagaacaaagcacatggattatccgcaaacactttaacgtggtactcgagcgaaccgtcagagagcttcgcggtgagccatgtctggatctggaggagtttgcgccagcaaagcaggaaattgtttgcagcaggtcgtttggtgaacgcgttacagagtacgaacaaatgcgtcaggctatttgctcatatgctgcacgcggtgctgaaaagcttcgcggtgaacaccagtattgccgttttatctccgcgttcgtgaagacttcaccctttgccctgaatgagccatattacggcaacagtgcgtcaatgaagcttctcacacctacacaggattctcgcgatatcatcaacgctgctgtaaagtgcctggacaaaatctggaaggatggtcaccggtaccagaaggccggaataatgctgggtgacttcttcagccagggtgtggctcaactcaacttgttcgacgctaatgcgccgcgggccgatagcgaaaagttaatgcaggtattggataatctgaacgctaaagaagggaaaggaacgctctactttgccgggcagggcatacagcaacagtggcaaatgaagcgagaaatgctgtcgcctcgatatacgacgagatattcagatctgcttagagtccgataa

SEQ ID NO: 149571 - DNA, 4860 bp, Enterobacter cloacae
atgaatgcgttaaaaagcatactgaattcttaccgccagaatagtcgttcagaaagagagaaaggtacatactttgaggaactggtcctctcctatctgacaaacgaaccaatctacgcagacttgtacagtaatgtctggatgtattctgactgggcacaactgaataaccgtgatgccaaagatgtgggcatcgacttagtagccaaaacccgtgataccgacgagtatcatgcgatccagtgtaagtgttacgacgagtcctatcgccttcaaaaaagtgacattgatagcttttttaccgcatcaggccaggcaccatttggccaccgggttataatctcaaccacaaacaactggagtgataatgcagaagcggccttaattggccaaaaccctcctgtaactaaaatagacctgcatgctcttgaagaaagtgtgattgactggtctaagtatcaacctaaagcagaagtccaatgtaaggttaaaaacaaacccagaccgcatcaacaaaacgctattaatgcggttaaagagggattggccaatgccgaacggggcaccttgctcatggcatgtggcactggtaagaccttcacttcactgaaaattgccgaagaattagctggggctggtaagcgggtgctttttcttgttccaagcctctcactattgtcacagacactgacggagtggactcagcactcggaagtgcctcttcacagctttgctgtctgctctgatagtgatgtaggaaaaaaacgtaaagcaaatgatgatgtagttcaaacatttacccatgagcttcgttatcccgctacaactaatgccaaacggttagctgaagaggtggcaaagcgttccgactcaacacatatgaatgttgtattcagtacctatcattccattgaagtgattggtgatgctcagaatgaacacagtatgcctgcctttgatctgatcatctgcgatgaggcccaccgtactacgggtgctacctttgcgggtgaggatgaaagtgccttcgttagagtccatgatggctgctttattcacgggcaaaagcgcctctatatgacagcaacgccacgtatctacggtgaatccgcaaaagccagcgcagacaaaggagatgttactctcgcgtctatggatgatgaatccctctttggcaagaatctacatatcttgacattctcagaagcagtgagccgtggcctgctgtgtgattacaaagtcattgttctgacaatggatgagcatcacatcaaccgccgtctgcaaaatttattgaaagatgaaagtaatacactaaaggtagacgatgcggcaaaaatcattggctgctggaaagctcttagcaagcatcaaatgaaagaggggctagatatagaccctgatcccatgaagcgggcagtggcattttgccaagtaattgaaccgagtactggaacaaaacataaagtaagttccaaacaaattgcagagatgttccaggcggtagttgaagcctaccaagaacatgaaagcgacgcagatgatttaatttgtgaagtagagcatgtcgatggtggcatgaacgcaacagaaaaagagtcgaaaatcaattggctgaaggctcaaccagaagagggtagctgtaagattttaagtaacgtgcgctgcctttctgaaggggtggatgttcccgcgcttgatgctgtgctttttctgactcctcggaattcccaagtagatgttgtgcagtctgttggccgtgttatgcgtaacgctcccggcaaagttcgtggttacgttattttgccagtagtcatacctacgggtatgtctcctgaagcagcacttgatgataaccaaacctaccgggttgtgtgggaggtacttcaagctctgcgttctcacgatgaccgcttcgacgccatgattaacaagctcgatctaactggccaagctccaaataaaatggagatagtcgccatcaatgataaaactgtggctgcttacaaggggaaacgaaccaaacagctcaagcgtgctgaactgctcgacaaggcccggaaaggtagcagcattggtcagaatatgaaccaagttcaacatcaacccgatctgaatctagagtatgaagtaggtgacattgagagagcgttgattgctaaagttgtcgacaaatgcggtaatcgccaccactgggaagagtgggcgaaagacattgccaaaattgcacagacacatatcagtcgtatcagaactatagtcaccgccccagaaaataaagtagaaaaagcagcatttaaagcatttgtaaccgaattgcgtgatgatctgaacaacgctattagtgaagaagaagtgatcgagatgctggctcaacaccttatcactgagccagtctttgaagcactatttgaggggtatagctttggccaacacaatcctgtatcccaagcaatggataagattataaaactgctgcacgagcataatcttgataatgaagccgatactcttgggagcttctatgccagcgtaaaaatgcgcgccgaaggcatcgataatgccgcaggcaaacagaaaataatcgtagaactttatgataaattcttccgtaacgcctttccccgcttaacagagcgactgggaattgtttacacccctgttgaggtagtggattttatcatccatagcatcaatcatctgttgcaaacccaatttggtgaagagttgggtagcgaaggagttcatattcttgacccctttaccggtacaggtacttttgttacccgcttactacaaagcggcctgattaccccagagaaattgcctcacaaatacatgcacgaaattcacgctaacgaaatggtgttattggcctactatattgcagccatcaatatcgaggcggtttaccacggaattgtcggtggaaactatcagccatttacaggcatttgtcttaccgatactttccagatgtacgagcaggaagatcaaatccaagaacgtttagcagagaatagtcgacgcagaaccctacaacgtaacctgaaagatattcgtgtcattatgggtaatccaccttattcaataggtcaaactagccagaacgacaacaatgctaatatcgattatcctattcttgattccagaatagaaaacacctatgccaagagctcgaatgcggccttatctaaaggactttatgattcatacatccgtgccatacgttgggcttctgatcgtattggggatcgaggtgtcattggctatgtgaccaatgcaggatttattgaagcgaacactgctgatggtatgcgaaagtgtttggcaaaagagttttccaacatctggatttttcatttacgtggcaatcaacgcacccaaggtgaactgtcccgtaaagaaggcggaaaaatctttggaagtggtagccgtgccccgattgccattactcttttagtcaaaaaccctgatgctaaagagcatggacaaatttacgttcacgacattggtgattacctttctcgagatgaaaaattactaaaaattagtgaattgtccgatatttccggtattactgaggctaatggatgggctcatattgttcctaacatccatggcgactggttaaatcaacgtgatgatagttttaatgagttcatcgctatgggtgataaaaaaggtagcaataagaaattatttgataacttctctatgggcgtatcaaccaatagagatgcttggtgttggaatcccagtaggcacaaactggcagcaaatatgggtgcaatgataacattttacaatgaagaggtaattcgttttcaaagatctcatgcagaaaacacccccaaagaaaagggtgaactggtgcaggtttttttaaacacggatccaaagaaaattagctggacagtgaatctaaaaaaagatctatcacaagggaagaattataattttcaatctcattgcttgacagcaagcttatatcgtcctttcacaaaacagtggctttatttcaatcgccgttttaatgaaagagttttgcaaatgccaaaaatatttcctaatcaagaggtaacgaaccttgtaatccagatcaacgcgaaatatatacatgggcaaattgctttgataagtaatgtgataccagacttacattgtaatggagatagtcagtgcttccctctttacctatatgatgaagacggcacaaataagcgcgaagccatcactgatgagggcttgacccacttccagagctactatcccgcacgacagctcactaaggaagatattttctattacatatatggcctgcttcatagtgaagaataccgcagccgttatggtgacaatttgagcaaagagcttccgcgtattcctcgggtgaagagggctgaagacttttccgctttcgttaaggctggacgggcactggctgagttacatttaaactttgaaactgccccttgctataaagtgactttggagagtaccgccagcgaagatagccactatcgagtagttaagatgaagcatccaaaggtaaaagtggatggtaagaatattaacgacaaagcaactattatctataacggacgtataaccattaaaggtattccagaagatgcataccgttatgtggtcaatggtaagcctgccatcgactgggtaatggagcgtcagtgcgttaagacggataaagatagcggtcttgagaacgatgctaacctctgggcaacggaaaccatgaataatcctaaatatccatttgaactgatactacggatgatcaccgtgagcttggaaaccatgaaaatcgtggattctctaccagcactggagcttgagtaa

SEQ ID NO: 149572 - DNA, 909 bp, Enterobacter cloacae
gtgattaatgtttttgggcaccttaaccctgacagtgacgcggtctgcaccgcagccgtaacggcggactggctcaatcggcgggaccgtcccgcccgcgcgtggaggaccggtgaagcgaatcctgaaacacgctatatatttgaagctgccgggctcaacctacctcccatacttgatattcccctgaaagatgaacctgtatggctggtcgattttactgaaccggcacagggtcctgctgacctcattcagagcaatattatcgggattatcgaccatcaccgactgggtgggctggtaacgcaactgccaccagaggtctggataaaaccggcaggcagcagtgcaacagtactctggctgctgatggatgcagaaatgcgacgctctatactccccggccatggcatattgcttcttggcgcgctactcagcgacacagttaacttgcgctctcccaccacgactaaagacgatatccgcacagccacagaactctgcgtactgtcaggagtaaaacgtaaatcttttgcgcagggggtacttgcagccaaaaccgacctcaccgggcagtctgcctggcagctcctgaataaagatcttaaggcctttttgctcgctggcacggatgtgcgtatcgcacagctcgaggtcagttctcccgaccagctcactcccgtaatggatgagctacagaaagcgatggcagagatggttgtgaaaacgggaaccggacttgtcgtgctgatggttacggacatccatgaatgtttttcaacactgtatttcgccgggccggagagtggtaacgcagcgtcattctctgtgccgggtatggtcagccggaagaaacagcttctgccctggctggagcacttcctcagtcacaaccggagacaattatga

SEQ ID NO: 149573 - DNA, 426 bp, Enterobacter cloacae
atgaaaatctacacacacgcacttgtccttgttcaggggaaagaggacggtatccttcttctcgaactggctgcaactctgtccagtatgcttaagatgaaaatcacccttgctcatatctgcaatgattaccgggagatgaactatgtatcggacagtctgatggatgatgccgtatcaaaagacgttgttcaggctaaggcgcttttcagtgaactgacgtcctcaatggcggagcccgttgaagtgcgtgagctggtcaccatgcggcgttctgaagatgtacagaagtacgtcaccgacaccggagtggatctggtgattgcaggccaccggaaccgcttgatgggaacgctgacgtctcgttcggctgactacgttaaccacctgaacgtggacgttctgattaaacacattcatgactga

SEQ ID NO: 149574 - DNA, 375 bp, Enterobacter cloacae
ttgggtcagttatcagcaattatgattggcggagccgtggggtgtgtcatccgctggttttttggcgttaagttcaacagtttctttccttcacttccgccaggaacgcttgtagttaacctgcttggggcttttatcatcggtgccgcaatggcttattttatgcgccacccacaactggatcctgtctggaaattgctgattgttaccggactgtgcggtgggctgaccaccttttcaacgttctcggtggaagtatttacattactacaggcgggaaattacttatgggctctcacttctgtgctggttcacgtgacggggtcgttgctaatgaccgcggcgggtttttacctgataacattgcttaattaa

SEQ ID NO: 149575 - DNA, 1221 bp, Enterobacter cloacae
atggcaggcttccccacaggcgtggaaatccacaacggaaaactgaggatatccttcaaatataaaaacgttcggtgccgggaagtgttgcaaggatgggcgataactaacgccaacatcaaaaaggcgggaaatttaagagcgctgatctgtgctgaaatacagctgggcaccttcaaatatgaagagcgtttcccagagagcaaagcactcaagaaatttttccaaccagtaaagagtgttttaaccttcggtgagctgtgcgacgcttatcatgcagtgaaagaggtggagatcagtcctgcaacgatgatgatcacccgttcagtgagtacgctcttaacgaagattatcggagagaacacttctctcgaggaaatacagctaaacgacatgttgctgtacagaaagaaattactcgagggtgagtttaaggccagaactgatgggcagcgcaccgtcagaacggttaacgcattcatggggcagttgtgcagaatgcttagcttcgctcatcagagtaactacattcagcacaaaccttttgagaacataaaaagtctgaagacatctgaactcgatccggatccattgctgaaagaagaatttcaggagttatcgaagcactggcaaggtcagcatttgaatctctggacgtttgccgtctataccggcttacgccatggtgaactgaccggtttggcctgggaggatgtcgacttagtgagtggtgaggtccatataaagcgtacaatgacgctcacgaagaaatttggacctccaaagacaaagtcagggataaggacagtaaagctgttaaaaccggcgctggaagcgttaacgaggcaattcgagcttactggtaacaaggagcctgccgagatcgacttttatcaccgcgaacgcggaaagattgaaaagcaaaagttaagattctgcttcgtgcccaattatgatgaaggggaaacgagtacgcattattctcagagcacgattaacctgacatggccaggggccatgagaaaatcaggcgtaaggtaccgttccccctatcatacccggcatacatatgcctgctggttgctatcagctggtgcaaacccttcgttcattgccagccagatggggcataaaaatgcgcgtatggtttataccgtctattcaaaatggatcgtgcgtatgaacgatgaccaagtagacatgttgaataggaaaatttag

SEQ ID NO: 149576 - DNA, 1398 bp, Enterobacter cloacae
atgaatagttatgaatcgacctctggtattcgtgatttaaaagtcatgggggccagaacacaattagggggtgcttgggcgagtgcgacgcataagcttgtagcccttgataaagagaccctacagcccgtcagcgttgactggtggtatgaagatgaatccgcaccgcgctttactggacctgttttcaccgatacccgcccaaatgtacgcttgctggcaaattctgatgtttatcggctgggtgatgttattaatatcagtaactttgggggttcgagttccgcgtttgctgtcataaaagatgatggtaccgtagaagcgtgggggaagccaaaacatggtggaacctcaccaaccagcgagcgtaactataatgtcagggctatttatggcggccagtacgcttctgcggctgttaataccaatggccaggtatttacctggtctgtggatgatgataaccctctgcctgataatgttgttgcactggatgatattttagatattaaagttgctggtggtaacgacggtaatgacatctatcttgcgttgcgagctaacaaccaagtcgtacagtggaaagttggggcttctcaaaatgactttcctgctgatattgctgcgcgcagtgatttcatagccatccaatccacggaaactgcctttgcgggaattctacaaaatggtcatgtgctagcttggggaagtgcagcatacggtggcgcgctaccgacacatctgaaagaagtaaatgatgttgtcgcactttacagtaatagcggtgcatttgtggcactcagggcctcaggcagtgtgattgcatggggaagcgccagttgtggcgctatgattccggatcatattgcttgcctcaaggatattgtttccgtacacagcaccaattcaacttttattgctttaagacaaaatggcagtgtggttttttgggggcagaattactatttgaccgaaatgccaccggaaattgccggtctgacaaatattatcgatgttcaggccgctgttaatggcagctatgcttttttaacttcggaggggaaagtgtactgctggggacatgtctcgattttcgatatacaaatgcctgaggatcttacggatgtggtatctctgacaggggggacttacaattcttttgcagcgcttcgccgtgacggtaccgtagtggcatggggattggggtatgaaggtggcgacacctcacctgtcgcacatgaactttataatattcgtgccatctattcctgcgattaccatttttgtgccctgcgtgacgataatcatctcttcgaatggtatgcggaggacggaacggatataacaaagatgccagcagatttgcaggggaatgttacctatagctttgttaaatga

SEQ ID NO: 149577 - DNA, 978 bp, Enterobacter cloacae
atggcaacacacgatcgcaaatcatgcagcgcttttataaatctcgtagcacctccgatacctaattcattagcagttagaattacaaatgacgatgtcgaaattatacaaaggttgcgacaaagtcatttttatatgatttgtggtagatcaaaagcaaaattcgtcagaggcgcaagtgttgatagtgagttaaacatatcggtcgaaatagttcttgattcaggggggtgttctaagggggtgatacatatttctcggatgcgttttcttaatcatgcaccagatgaatttttgcttagaatgaaagcgggtgaggatttcattactctactctgtggtgatgaaatagttatgaatcttactccagatgaattattgatgcggcgcggtagacacgaggattttgtaagtggatttgataattatcgtgagctaatgaattttgatatgttatatgtagggattgctaaagaaaatcaagatagttatagtcgtttgatcgcaaaaggccataaagctaggatggatatattggctggagaagaacagcgttcaaatggtgctagagtgagcgatgaaacatttcttttgctgtttcagattgagcccattacccttaccacttttagtgggtcagatgactttgatgatgaagatttaaatttctcagttgattaccataggataatcgcagatgctgagaaagctgtaattaatacatttaaaccaaagtataataagcaactctatcctagttacccaaagggaaaggatggtttgtaccagcagggatacagcggttatacatattctatttcagagggtatgtcatttaacacggcttatgggacgatagttggggcaaggagtcctgacggttattttcttactaatgaggccgactttatttcggttgttggggatgaggttatgctgaatatttctggtgtggattttgaagttgttgttgattaa

SEQ ID NO: 149578 - DNA, 195 bp, Enterobacter cloacae
gtggttggcggcgtctccttcagcggcggcgtggggaccgtgctgggcgtggtgaccggtgtgatcatcttcaccgttatcaactacggcctgacctacatcggcgtgaacccgtactggcagtacatcatcaagggtgccatcatcatcttcgcggttgcgctggattcactgaagtacgcgcgtaagaagtaa

SEQ ID NO: 149579 - DNA, 1434 bp, Enterobacter cloacae
atgcgtttttcggaattttttagagttaaaaggaatcaatcggaattggatttcgtagatgttcctttagatacagatattgaggtttttttagatcctgcggcaataaagtctctcaactcgccttggggcaatgaattgtcttcacatcttcaaaattattttgaaactgttctgaagctaattaaaaatagtgaggatgttaaagcgcaaaatctgctttcatgtttaaacgaaaggaatgagtatcatttgggatactcaagtggtaaatcaagaggccatggttttggcgagggcgcagcgaaaaccgtttggggagctttaactaagagcaaagctgcgaagtctggtttgttacaagatttagaagatacagctttattaatcgagggcattggaactgatatgatttcagatgcagtttcaaacatattaagaggccctctaataaaatatacgcaagatatttgtaattattatggcattaagttaactgataacgttccatctgggcctatctggaacccaagagaggagaagtgggagcagggatatgtctcgctgccgatgactaacgaaggtaaagtgattcttgttccgaaaattattgtcaggcaccaaataacttatcagcatgatgaatactatagacattttttgctgcctgaaatgcaaaagcaacatttaaaagctggctcagaactggttcagctgctgaagaacggtaagcatagggttacaaaaagaagtttgatggagaaatatggaaaagacaaacttgcgatcgttgagcaaacgcttaattaccctcatgtgcttgatgagtatagagtaaggaaaaatgatgctccttctgagccattacctcattctgactttgcagaaatggaaaatgaatctcctaaggtagattttcaaccttttattgatgagttgaaatccatagttcctggtagggatgatgcagctaaatatgaagatctgattgaaaaactattttcaattttgttttacccttcattttgtcatccgacaaaacagcataagattcatgatggaagaaagagaattgatatttcatattgcaatgaagccacatttggttttttcaaatggattggtttgcactatccctcttcaatgatatacatagaatgtaaaaattatggtaaagaggttggtaatccagaactggaccaattatctgggcgcttctcgattagtagaggaaaagtggggatattggtatgccgaagcatagaaaataaagaaaaactgtatcaaagctgtaaagacacagccaaagacgatcgtggatacattttgccattggacgatgaagatgtcttaatgcttatcgaagagtatcagacaaaaaatgaccaactattcccacacctacgtaagctgtggatgtcattgattggctag

SEQ ID NO: 149580 - DNA, 177 bp, Enterobacter cloacae
atgatgtctgagaatatacgtaaggtaccgattgtccctgttatgcttcgccatggtgagcgcgcggcgattgcaacgaaaatccgtgatgccatgccgcttatcgccagcgcggttgaacggaacatgacctggttcggacagcgctttcccgatgcggcctgccgtaacggttag

SEQ ID NO: 149581 - DNA, 1788 bp, Enterobacter cloacae
atgacaattgtcacagaaatccctcaggcagccaatagtgtcccagcttcagctactgctggtgtccaagcccgtcgtataggacaaaagctcttcgaacgatttgaacctcatcttgatactcgagaatgtgcgccgggaagtagccaatatgtagaaaaaatgactagtcgagcaattgcggcatttgcaatacagtgctacggagctactgatgacgtcgaggctagtcatgcagtatgtgatagttcaaatgatggtggaattgacgcaatatacgtttcacatgttgaaaaaaaacttatttgtgttcaagctaagtataaccaaagcggaaataacacttggtcattaactgattttttaaggtttaaagatgcctgttcatgcttacaaagagaagagtattacagatttgatgagcgtctttcagctatttcacaggatatttcaatagctctggattctatagattataaattttattttgttatggctcataccggcaagactggagccgcaaaccaaatattatctgacatgcaatcttggcagtcagaattgaatgatgatgcatgtgttaatgttagttcaatgccttcatcagattacccttttcaggttcatcttttttctgcagaagatatttccagcgcaatccaagggcagtcattatcagcaattaatcttgaagatgttgagcttatggagtatgggaaaataacagagccacataatgcatattttggggtggttactggcgaacaaatctctgagtggtggtctacacatggaacacaactcttctcgaagaatatacgtaatattcttgggcaaacagatgttaatgactcgataaagaaaactatatcagacgaaccgaataatttttggttttataataacggtataactgtattagttcgtgaggctagcccacatcgaagaaatacatctgataacgcacgaggtctttttacgtttcacgatataagtattattaatggtgctcaaacagttagctctataggtcttatttccaaacagcacgatttatcagaagagtatcttagaagtattaagttgcaagcaagatttatcgtcactgatgataatgatttagtgaaaaatatcactcgagcaaataatcatcaaaaccgtgtgttaggtagggattttgcttcccaagaaagtgaacaagttaggcttaataaggatttaattgttgaaggatacgtttatcagttgttgagaactaatgaaatacaagttagtagtgagaaggttataacgattgatgaagcgctaaatgctttagtttgcgcaaatggtacaccaagtgcagttgtaaccttgaaatcacagcgtggtaaattctttgaaaaccttgatggttcgttatatcgctcaacttttaattcttctgtttctggagtgaaagtaataaatgtggttaatttcaataaaatgatcgagcgaaaagttcatgaaaagctcgccagtataaatagacaaagggataaaaagctctatggaatcctaactcatggtaatagatatttgtctgctatgatgttcaaattagatgatgcatggaagtctagaactattgcaatgtatgatgaagatgagattgaacggaaattcaacgctctcactagtactacggaaatttacctcacgcaatttcatgatggcgcttatctggcgaggttgtttacaaatgtagaaaaaacaacagcaacgatgagttacattcaaaattatttagctcagttagaaagctaa

SEQ ID NO: 149582 - DNA, 486 bp, Enterobacter cloacae
atgaacaatgcagttgatactgtgcttgaacgttattgggatcgcctgctgcctgtcgatccgctgaaaatcgctgaagcatggggagcccgtgtagaagagattgttgactcagagtttgataatgaagggttaagtggtatcgccgtccttaaaaataatgtgccacgcatttatttcaaccctaaggaccatccaaaccgtcagcgtttcacgatcgcacatgaactggcccatcatgttctcggccataccaaagatggtgaaagacaccgtgataacgttgagaactactcaagcggtgcaatggatatccgagaaatccaggccaataaattcgccgcgcagcttttgatgcctgagaaggcgatccggttttatgtcactcgaaaaggcgtaactactactctcggcttggcaaaaatcttcaacgtctctgaagcagctatgcactggagactcagagagattggtttaacccattaa

SEQ ID NO: 149583 - DNA, 612 bp, Enterobacter cloacae
atggataaaccaaaaagtcccagcgtagatttttctgctccgggtccagattctcaagaaagcactcaggctaataaggcggcatcgcaagttgaagataatgaaaagccacgcctcccggtcccagaccaggattacctgaagcaagaacgctggaacgacattgaacgtcgcgttatgcgatattcgttgtttgccgtgatcatgttttttgccatttttttcctaagcagtggcctttactttgccttaaaggtgggcgatggtttgctgactgcaaaaaaagacattgtgaaggctttaactggccacgatgtttcacaatgtattgtcccaatcaaatgcgtgcctgcaccgagtaagggtgtttctgaggctgtagccaacctgaatgctgactggctttccgcaagttccatgatcatgattgtggcgttcattttgggtgtcggccttactttgatccttaccctgttgaaatcttcattccgtcatccaacagataactcacttaagaatgaagaaaatcgaacatcacttgaactggcaacccctttgagtgagcttatttcaggcatcatttcttacttgaaagacaagttttcaaaataa

SEQ ID NO: 149584 - DNA, 450 bp, Enterobacter cloacae
atggtgcgagtgaaccacacagcgttggatggaaaaatagcaggtaatttgtgcactttgattgatgaggcactggcgcaggccagagggcaattggttgcacagggctggctgatagcagatgaaatatccctgttgacggatttcactcctgaacagtttgctaattggaaatgcgagcactgtattttctcggtacataaaaatggtgcaggggaggaatttcctagttatgcgttagatgaaaacctgcggccactaccggtgatgaaatcgattctggatattctgacaaaggtgaaaacgccatggggtatagccgagtgctttgctacttcaaatgatttattggcaggcaagatgccgcaggagatgctatcgcgctatccggccaatgtaattcaggcggccgaagccgaagcatggcaactcatcaatggtgcagaatag

SEQ ID NO: 149585 - DNA, 1488 bp, Enterobacter cloacae
atgaccgccaacagttattttgagtacgtgctcaccctgctcggctggctggtgaacaacggcatgtggcagacgctgaccgccaccgggctattcgccctgcccctgctggcaaaactgattgccctgtggctgaaagcgcgtggtcagggggcggacgaaggcaacgtcgcccgcctgctggtcatctgggtggaacactcgctctacagcgcccttctggtgatcttcttcgcgggcgtgccgtttctgaatgtcgatatcaacaccctcacgtacgacagccagcgcacaaaacagtgcggctggtcggtggtacaacccggcgattccggctatgcacctttgattaatgaactcagcggccagagcgcttccgttccggtgtggtggtacttcacgcatgcgcttggcaaaggcatcaccagcgccgccgtcgccgtattgccctgcaagccggacctgcgccagttgcgctttgaggtgcagcacacccggatcgccgatccggcgctggcgcaggaactacaggatttcgttaacgactgctatggcccgtcgcgcgcacggctcaaacggctgggcagcgatattagcgaggaacagagccgggaagtggactgggtgggatcgtctttttacctctccacgccgggctattacgaccacgatcattcccgttcgccccgcgccgcctggccttatgacgccagccgcgacgacggtctgagcgatacgggtggcggaggctatccagcgtgtaaggagtggtggtccgatggtgaggcggggctgaaaaaccggctactgaagcaggtcgataccacgctctggcagcaactacaaaaactgggacagtcgaaagaggagtatgaagaggcggtactgcgctcgctggtgagcccgcgcaatatgcaggtgtcgcagggaggtctggtgtacaacgggtttggtgggagtgcgggggataacttgaatgcatcgcaagcattaagtcgattgggcagcattgctggaatgtcggtttccagcctcgctttattccccgctttcgacaacgttcgccaggcgctgccgatggtgcaggcattccttggaatggcccttgtaatttgtattcctgtgatcatgctgttctctgcatgggaattcaaaaccgtggttacgctgagcttcgtacagttcgccctgttctttcttaccttctggtgggaactggcccgctggcttgatagctggttgatagagataatttacagcgagaacggagcctcacatttcaacctgtacggcttacagaacacttctgatgatttgatcgtgaatatcgtgatgggaacaatgtttgtggtgctaccggtgttctggcttggggcgttgacgtgggcgggagtgagagttggcggtgctgtggccggggttgtgtctgcgggaagtggagatgttaagggagctggaggacaagtggggaggatgataattaaataa

SEQ ID NO: 149586 - DNA, 954 bp, Enterobacter cloacae
atgaaacttattcgttacattgtggcccttacgagtgtcatcatgttttctctgccagtgatggtctgggcgtcatgcgcctttacgggcggtgcaacctcagaaattagcggctatgtcacatttggcaatgtgtctgttcaacgcgatgcgccgataggtagcgtgcttgctacagcgacaaccgggacttataacggtgggcaggcgattgccggatgttctgaatcctggacttatcgctgggagctgagcaaatggagctcgttgagttcccagggcaacaaagtctataacaccaatattgcaggagtggggctccggctaacaaacactgcatccggaaagttgcttccttatgaccagagtatgggaacgggcagcgtcattattaatgctgatggtattaaagctgaattaatcaaaacgggcgatattacgggcggaaccctggataccggtatgctggcgcgggcctcggtggcaaaccagttttattttgccaatgtcaccctgaatggcacaaataccattacctctgaatcctgctccgttaccactaacccggttaatgtccctctgggcgaccatgataaaagtgagttcagtggtccgggtaccggaacggcctggcagacattcaatatcaatctgagttgtgttcagggcgcgcgaattaatgtgcgtattgacgccacagcagataatgacgcaggcgtacccggcgtcattaaactcgacagcgatcccgttaatgccagcggtgtcggcgttcaggtctggtatcgctatgaagacagcccggtacagttcggccaggagcggtattactacacctcgccatcaggtggtaacgaatatgttcagcttcaggcgcgctattaccagacgacacagagcatcacggccgggaaagcgaacgccacggcgacatttacgctgagttataaatag

SEQ ID NO: 149587 - DNA, 195 bp, Enterobacter cloacae
atgcacactgaaccacaaccatgccccatcacgctgatgaccagagaccgctctaacccagcttcccaggctgaaggcttttgtcactcgttccagaccattcgcaccttctcagtcacgccgccccccagacgtccagccattttgctgacaggcagcgccagcacgcccagcaaacgggagaacgaaccatga

SEQ ID NO: 149588 - DNA, 1017 bp, Enterobacter cloacae
atgagcaaaaaactaggattaaggataaatagtgaaaagagtataaataaatttctcgaaacgattacagaatccattcatgaaatacaaaataataaaaggttaatctatgggaagagaattgaatcgctattcccaattatgttattagctctaggtgaaacgaagctaattaagcaggaggatactggtgatgttatctctaacggagataaaattagagttccagactatagagtagttactaataatggtgaaagtttttatgttgaagttaaaaatcatcatatgcgtgattttaatgatccgtatattttaagggggaggtatataaaagaattgaagagttattgtaatatcggaaagttacctctaaagtttgccatttattattcttcagtgaatcaatgggtattgcttgatattgattcttttgatgaggttaacggtaattacattatagattttgcagatgctctttctagaaatgaaatggggttattaggtgataaatcaattgggatgaaaccaaatttagaactaattttattagcaaatacagatgctacatcgaccgtcagtgaaagtggtgaatgtgaatttgtgattggtgatgttaagtttaaatgtgctggagttgacctaacatcagatctagataaacaaattgcttttttttgtatcttgtatggaaaatggattgagggcagagctgaagcaattattgaagataaaatacttaaagcggttgtgttctcatatgaaccagaacatgaaaaaggacaaggatttgaaataataggatccttaagttcattgattagcaataaatataaggctcttactactgatggggatgaaatcactgctacggagataaatatttctccaaatgatatttgtttttcgttgcctgaaaactatcgtagtgaagaacttcccctatggatttttacattcatgcccaatcctaaaacttataaattacctcgggcgtttattcaaaatagtgattag

SEQ ID NO: 149589 - DNA, 354 bp, Enterobacter cloacae
atggcgacgatcatcttcctccccgaccgcctcaaccgtgaacctgtggtctggcgcggcctgaccaccagcgagttgtttctggcgctggcaagcggtcttggtggcggttgcatatccggcattctgctggccctgctcagcggttactggccgttgatccccggctcggcgctggcaggcgcggcgttgttgattcagggcggcgggcgcattctggcgcgcgccaaacgcggtaagccagacacctggctaccacaggcaatccttgcctggctggaacgccatcatcttcggggtacgcaactgatccagcacagcgctgtctgggtggtgcgcaggagtccgcgatga

SEQ ID NO: 149590 - DNA, 309 bp, Enterobacter cloacae
atgcgacatagtccattatttctgttactaacttttcccatagggtctctggcctatgcctccccggaatccacccagctcgccctcgcgctgaagcaactcgacggcgttaaaacctcgctggagcacgcccggaccagcgccagcaacgatccacagtcgcgctacttcttcgactaccagcaggcgcaacaggacattgccgccgttgaacggggcatccaccgctaccttgccccggcaagagcacagccgcgctccatccaacccctgagcgccagctaccagcgggagcatcccgatgactga

SEQ ID NO: 149591 - DNA, 465 bp, Enterobacter cloacae
atgcgtgacgaagagcgtaataacagcctgctcaggagcatgcggatacatattgctgaatgggaggcgggacgcgccgctccggaaggaagtaggttcatgtttatctggcttgtcatgtaccttgggaccgcgtggccggctctcgcgtactgccaaccactttgggcgctgggttttttggttatctggttttttccgagtcaatggatatgcaggcgaattgtcccccgctacaacgaaacctgggcggatgtattcgacagaatgctttctgagtatgaacccctgaatcttcccgcctgggaacaccttaagtaccaggctgaaacggaggggctgacggtcagcattgtcagcaactggtatcaggaggaagcgaggtccgtctggccagaaaagaaacctgaactgaagtttctccgtaaagccactgacagtaacgagaaaattggagagaaatga

SEQ ID NO: 149592 - DNA, 300 bp, Enterobacter cloacae
atgtctgttcgtaaaacaacagcacagggaggcgactccgaccgtaaagcaaatgacgtgaaccgcgatacaaccagcaccgtaagcgagaaaaggaagctgggcgacaagttatacggaacatttcagttcttgtgtctggtgggggtagcaaccctttttgtctacgggcaaatccacaacgacctctggagcatcgtcgcattagttatcgggggtattttgtggcgtatcgtacccgggcattacaacggacctgacatccaaagcggcagcaaaaaggataaacgtaatgcgtga

SEQ ID NO: 149593 - DNA, 450 bp, Enterobacter cloacae
gtgtactgtgggaaacaggtcaacttcacagacatcccgggctgtgggaaacaggtcaacttcacagacatcccagactgtgggaaacaggtcaactttgcggacggcccgaactgtgggaaacaggtcaactttgtagacagcccggaatgtgggaaacaggtcaacttcacagacagcctggactgtgggaagcaggtcaacttcgcagacggcccgaactgtgggaaacaggtcaatctcgcagacagcctggactgtgggaagcaggtcaacttcgcagacggcccggactgtgggaagcaggtcaacttcgcggacggccgggactgtgggaaacaggtcaacttggcgggcagtcaggactatgggaaagaggtcaactttaaggccagcagggaatgtgggaaacaggtcaacttagagggcagcccaaactgtgggaaatag

SEQ ID NO: 149594 - DNA, 180 bp, Enterobacter cloacae
atgattcatgtgttactgcctctcaagagtgcaccttcccgcaacattacctcatttgggaaggtgttgccgtcctgttctactggctggcgctgtaagcatgaaaatgatgtcaccattgacactatctcatctgatgagattgaagaagtgcttagctgtcaaaccaggtacaactag

SEQ ID NO: 149595 - DNA, 711 bp, Enterobacter cloacae
atggctgactggtttattgcgaccgaaggcgtgaaggtggtgaaagacagcgccagtctgtggccgcagatatttactgccggtgctgcattcggtggtgtgtggttcgggcaatggctgataacgcagcgggaagcaaaagcgaccgcaggtaaacgtgatgaagagtgtctatatatttccacggagctggtttttttgctggagcagtttgccgaaggttgtgcaaggatagcgacagacactgggcataccgatgcgcagggttttacccgctcgaatgaaagcactcctgaaattgacctctcggtggtatccggggactggcgggttctgcctccacgtctgatgtatgccattcgtgaaataccgatgctgcagaaaggagctgacagactgatactggctactgaagagcacgatgatccacctgattacttcaggacattcggagaacgcaggtatcagtacacccggctggggctcagggcgataattcaggcgcgtcgtctgagaaaaaatgctggttttcctgcaacccgcctcgatgccactgaatggtctgcccagcccgtgctctggagtgtgtggcggctggagcgtaacagacgttcggttcaggcaaggctgcggcttcagaccattgcgcagatgaatattgctcttcagcagagtattaaaaataacggtcagtccgggggaagtcagtga

SEQ ID NO: 149596 - DNA, 318 bp, Enterobacter cloacae
atggatgaagaagaaccggtatctcaaaaatttgacagcctgaatgatctcctcaatgaactgaatcgggctggccacccaaatgaccagatctggttttatggcgccaacggagattacagtgaaccggtcgcatttcaggcagtggactcgcgtttaatcgcagaacgccgtgatgatggctcatggtggaccgtcgacggatacgggaatgctaatgatccgcgtatgcctgaaccggaggatgcctgggatgttgaatcgaatcgcggtcaactggatatgtggtttgataacggaatcagagaaaatgaatga

SEQ ID NO: 149597 - DNA, 1425 bp, Enterobacter cloacae
atgagcagaaaatatcaagtaaaagcggtacccgttagttggatcctgcacgaaggaagaaggctagattgcggaccttatatgtcaggagctgttgaagcaagagagttgcttcagagcttacccatgagaaaagacccacttcagtctttaacaaaagatggaatatcaggaatcatcaatccaggccgcatcacaagaaattgggttgatgatccagaacacggttataggtttctatctagcacagagattttgcaatcagacctttcgaatattagcttgattgccaaatcagccgcgcgacaaaacgccaacctacttattgataaagactggatactaattactcgttcggggactgtcggtcgcatggcatactccagatctgatatgagtggtttggcctgtactgaggatgtattaagggtcatccccaatcctgaggttgtaaaaccaggctatatttacgcatacttaacaactcgatttggggttcctttagtagtatctggcacctatggttcaatcatcacgcatttggaaccgcatcatattgcagatttaccagtccctaggttgggtgagattgaagataaggcgcacaatctagttcaacgcgcagctgacctcagggttgtagcagccgcacaaataaatgaatcaacatctcggtatttagcagcggcggggttggataatatttctccctatgaatggattaaaaattctggccggactggatttacagctaaaatatcaaggtcgatacttagagctgttaattatattcctttgaatcaacagcttgttgagcatgtgaagataaaaagtccaaaatggatgccgttgggaaaagtaacagagcaaggtactctaaagcgtggattacgcttcaaacgtgtagatgcagaccaagaatttggtttgcgtcttgttggccaaagagaggggtttcatttttctcctgagggtaggtggattgcaaagtcttatctgcggaatgatccactaattaatttatctgaaggagccattgttgttgcatctcagggaggtataaacgaatcagattcgtttgctcgtgcgcagtttgtttatggaaaaaaacttgaatacgtatactctgagcattttttgaggattatctctaatgaacatatcataccgagaggggcactatttgcttacatccgatcgaatctggcctttaggcttttaagatcttgtgcagttggaagtatgcaacaggatttccatccagatctgcttgcagaattaccggttccactaattgctgaagatgaagcaaaagctattgatattttggtccgagattcttttcaaaaatatgatgaagcgattgactgtgaagatcaagctcgcgctatcgtagaagaggctattgagaagggaggccactaa

SEQ ID NO: 149598 - DNA, 2019 bp, Enterobacter cloacae
atgaacgatcaagatgacattcttgaaaccgcgcaggatgctgccgaagatattggctcgaataactttttcatcgatatcctgaccggcaacaaagagagtgcctccgtcaagaagctattggtacagaaagttttacgccagtttattgaaagctacggattcgaccgggatgatctggaggtgaactataacccccagatccccggccaagggcgcaagcgtatcgacatcgctgttttccgtcccgatgctgagcacaacaacgataatttgcaacggattatcgtctgcaaaaatcagaagaaacgtgacaggctccgttccattaccgaggccgaggcagaccttcgcgagctcaaggagctgctagaactgctccctaccgcgacgctaggtatgtggaccaacggtcaggaggagttctttttccaagtcgaacgcacccgattcgaggtccgctccaagccgctaggtgtctggccggtgccgggagaacgcactgccgatcttgaccgtaccggaggtgtcattcaggtcagtgccgaagcggaagacctggaagatgctctgctgcgttgccgccagtatctgaaccgtaacctggggctcgatcacaaagatgcctttaagcagttggccgtgctgatgctggccaagatcttcgatgaaactctgcccactggagagcacaaattctggatcaagggtgacgagccttttaccgaggcgggtcagcaggccattgcccagcggatcaacgaatccattgccgccgctaaggcttggcagccgaacctgctgactcgtggatgggatttaacgctggcccccaatgagaccgctcgtgtagtcatggaactagctcgttactcactgagtgaaacccagcctagataccgaacagaggccttccgttcggttgcccgaagcgtgatggatggtcgcgagggccgttatcctacgccgctcaacgtggccgaaatggttgtggaaatgctcagtccacaacctgacgaacgaattatggattgctgtagcggcacgggcacttttttggccatgactgcttcgcatatcttcaagaagaaactggctgcgcaaggtactacgccagaggaagccaataaccaacaaatccgccaagcgcaaaatgaaaccgccgcttgggcggccaataatgccttgggatgtgacatcgatcccttcttagccgtggccagccgcatgaatttgttgttcaccaccggcaaccctggccgagtgttccgtatcgatgcccgcacgttcccggatggtgatctggatggtattgaaaccgcccgcccagcgatgccactaggtagtatggatatggttctgctcaatccctggttctcaacccaagatacggtgagcgatacatccatcttagagcgctatgacctaggcaacaactgggaacgcgacgaagaaagtggatttcgcaatactggaaatctaaacactggtggtgtgccacccgaagtgctgtttattgaacgcgctctgcagtgggttaaacctggcaccggtcgaataggtattctgctgcccgatggcttactgggcaattccagcgatgaatatgtgcgctggtggattcttcgccactgtgaggttttggcttcggtcgacctgccagtggaacccttcaaggttaccgtcagggagtatggcttatcaccagccctaccgagtttattaatccttcgccgacgtagtcaggatgaactgatcgctaccgaaaaccttgattacaaagttttcatggccgtggtggatcgggctggtgtcgacgctcgaggtaatctcctatttcagcgagcccctgacggtgaagagttggtttttgatgaagaagtgatcgagcgggttcgtgagggtggcaaagtggaaatccgacggaccacacgccgaaaccgccgcattcatgacgagctgccgatggtggcagctaaatatagggaattccgtgcaactggtgaggtgacgttatga

SEQ ID NO: 149599 - DNA, 213 bp, Enterobacter cloacae
atgagcaatgacgaggttctgaaactaaaggatgtcgccaccctacttaaggtcggtgagaagacagtctattccatggcccagaccggggaactacctgcttttaaggtccgaggccagtggcgattttcccgaaaggatatcgacgcatggatagaacaacagaaacatacaacaaaagatttcggtgagggtaatacaaaatgcccctga

SEQ ID NO: 149600 - DNA, 351 bp, Enterobacter cloacae
atgaaaaactttggtgaaaccatccgcgaccttcgagtcgcccaagaccttgggttgcgcgagactgcgatcaaggtaggcatttcccccgcctatctaagccgcattgagcgtggcaaggagcgtccgccaagaccagaggtaattaaggagctggccaagatactagcggccgaccctgacgtgctgttccgcttgtcttcctccacagacccggaagttgtcgactaccttcatgaccaacccgaggtcatgactttactccgctatgtcaaggaggcctgctttaccgaggatgagctcaagagcctcgttcaagcagccgaaagcatcaaggccaactctcattag

SEQ ID NO: 149601 - DNA, 174 bp, Enterobacter cloacae
atgtcccaactctactggtcatatgatttaacaccaaaattagttctgaagtattttcaatacattttgacgcctacaggcttgtttagacaggtgtatatacattatgacctgtcttatgaagagaatggtttcagtctcattcttggtgtctccaaagaaaaatattgctga

SEQ ID NO: 149602 - DNA, 183 bp, Enterobacter cloacae
atggccaagaataccggagacggttatcgcaaaggctctgttacagaccgtacacaggttcagaatccgcagaatggcaactacaccaaacgcgatacaacgacaggtcgctttatcgaccagaagcaggacggcactccctttaaaggtgtcgccaaagaagtcgatgaccgccggaaataa

SEQ ID NO: 149603 - DNA, 384 bp, Enterobacter cloacae
atgatgaataccgcattgaattcacgtgaagaagcccttaaccggggcaaactgattaaccttgatgacgaagcgctggacgccggcttgccgatggatctggccattacccttccggcccacaagcactgtctcgaaggccgggatgaaaacgccagaaaggagttactgaaaggcgttgaaatggcggtaatagtggcgtttatcgcccgaatgccgccacaacgcacgatccgtatcgattaccgctcggtgttggcgcagaaaaccaacggcagcacgcagcagcagaccgtcaggctgacgttacgcgttcatttttctgagcaaggcatccccatcgccgccacgctggggttgatgggtgaaagattcccttactga

SEQ ID NO: 149604 - DNA, 633 bp, Enterobacter cloacae
atgagtgagcagcgaacgcctccgtcacgcccaccacagggaccgattggctggctgctgtcgctgaccgggcagctcatcgggctggttattggtgcgctggtgctgcgcgtagtactggaactggcggggctctatttctggtggccgcaggaggggagcagacatgtttttcaggtgatgagacaagagcgggcggaactggttattgcgttacaaccgcatccgctggggaatgaaattctggtgctgctggaaaaagggacaactcgtgtacttatggccaacaggctcctgcagaaaccgttcatcaccctggcttatacgctggtgagttttatgcagcgcctagtatggcttgcctccatgctccccctagtctgtctatgtgcagtaataggactgacagacggactggttcggcgggatttaagacggtttggttccgggctggaatccatttttctccatcgctacgtcatcaagtttggcagttcagtagctacaacgctttgggtgatttatctggtgcaaccgctgtttctgcctgtgactctggttttactacctgccgcgttatggtttgggataacgatctggatggctgcagggagttttaagcggtggttataa

SEQ ID NO: 149605 - DNA, 300 bp, Enterobacter cloacae
atgtataacatcacccgcgacggatgcatgatgctagtgatgggattcactggcaaaacagctgccgcagtgaaggagtgttacatcaatgccttcaactggatggccgagcagctaaaccggcgcatggcgatgggcgaagaaatgcagcaccgctacgccatcaaagaaacgcgctcaaagctgaagggaacgatcggcagccggttgatgaacgaacggaagaaggaaaaacgcgtgctgaggctcgaacatgagcacatcatgcaggtaacgcagccggaattacttattggctga

SEQ ID NO: 149606 - DNA, 432 bp, Enterobacter cloacae
atgagctcattaacttttatcggattgtcacaattactttcgaagaaaggtgagttgttacagcaatatacgcatgatttactggatcgtgttaacaccgcatggaataacaaacgagaccttaataagcaaatttccatacagttaaagaatggtgagcttgaagttttaattccccaactacgctttaaatgttttacggaaagcaagctttcacttcacgaaggatcgttaatcggggtcatcactttttacacgcctcgggatggaaaaaatcaggaatttcataaagtttttcttgattgggacaattgcatgcattttggggcgccagattcgactccttcaatcgacaccgaatatgctgaaaatgttgaatatcacttcatgaacgctctgatcgaatctgcctctcgcaataatttaatttag

SEQ ID NO: 149607 - DNA, 252 bp, Enterobacter cloacae
gtgagttgcctccagtctctcagatgtctgattgaactgctcctgactgattttcttagcagccagagcggtattcagatcctcaacatcctgcttatagcttgcgttttcgcgcgcttctggcaggagtttctcggctgcggcttgtgctttgagtgcgttgactgtatcccattttgccgccgcgtactgcccagccagcgcgatctgctcttttgtcgctccttttccgagagactgctgagcatttag

SEQ ID NO: 149608 - DNA, 381 bp, Enterobacter cloacae
atggctgacccaatcacagcggcagacgtgcaggcgttcctcggtgaattgggttattccatcccgggcgctctgctggatccgattctttgcgtagtgaacaagattatcccgtgcctcgatggcgcggggtatgacgagtgcaccgcgaagctgattctgatgtacgctgccgctctcatggctacgtcgtccggtgcgcgtcgcatcaaatcgcagggtgcgccgtctggcgcgtcccgctcgtttgagtacggcgacgatggcatcacctggctgcgcgactcgttggcccggctcgataccagcggttgcaccggagagttaccgatcagcgctggtaatagtgtcggcctgttcatggtggtcgggggttgctga

SEQ ID NO: 149609 - DNA, 201 bp, Enterobacter cloacae
gtgagcaaccctattccgagagaagcgccgagagatatcaaccatggccgcctgttcactgaatcgcaaatcagagccgctttcgtgaagtggtgcgatgactataagcacaaccctgatgcttatcaggatggcgactccaccgacggagaagcttgtgctgattacctgattcaggtgatgaccgaaaactcccactaa

SEQ ID NO: 149610 - DNA, 417 bp, Enterobacter cloacae
atgttgagtaattgcattgaacataaacaaaaacagctttatggacagacctccacgaccgtcaatgggaaaacagtttctatcaagctgcatcgaaaggcctattgcgaagatcgtggcgttagccttgagagcattaaagggatggtaattcttcacaaatgcgataacccacgttgcattaacccaaaacacctagagctaggcactcagctcgacaatgttagggatatggaattgaaaggtcgcgccaagcacgtaactggagagaagaacggcgcagccaagctgacaccagaagatgtattcgcgatacgaagctcaccgcttagtaacagaaaaattgcagctgtctatgggttatcgccttcttacatcagttctattcgattgcggaaaaaatggaagcacctgtag

SEQ ID NO: 149611 - DNA, 309 bp, Enterobacter cloacae
atgaaaatcttaatgatgatcgtggcagtttctgtactggccggctgcacgagtgacacccgctcaatgtggcacagccgttatgcattcaagactgtgggtcaagtctctgcaatgtgtgatgatggcgatcgggacgcttgctatgcagctcgtgatatgggtgcaatgcaggttggtcttaatcaagcaaaccagaccattcaacagcagcaagcccagcaagcagctatcgatgccgcaaacagaccgattataactaattgtaaccccacgataaatggcggaatgagttgttcaacctactaa

SEQ ID NO: 149612 - DNA, 651 bp, Enterobacter cloacae
gtgattattgatgatagctataaagctcgagtttcaagacatctcgcggaaaaaatccatgaagatgctttgaatggaagggggtattttgccagaggagttattgagtctataaggctcctggaaggaatgatggtagcaccttcttccgaggcgatgcggcataaagaacgcgagcttaaaggtagccttgcaggatttcatcatatccacgtttctgaagatactctcactcgcgcgcataattcgcttcgaaagaaaggtgagttacctgaaaagaaccccacccctgaggacttagttcagcgaggtagttccagggcaatcgagaaatatctggtgtcaaaaggcatcaaaacaacaggtgatacctttgaagaaatggttgttaagatgcaagccattgctgacacaattggggttgaaaaatgtcaggctgagctttcagtcattataaaagaattagcttacaagccttttgaagggaatgacgaagtaagtggtgattggttgatttattgggtgaggcaggatggtgtgagattctatctggatagtattgaacatatccctgcaaatgatattagcttgcaacaagctacatcaactcacctaaaaagcatacttcaaagcatggatactgctatttga

SEQ ID NO: 149613 - DNA, 606 bp, Enterobacter cloacae
atgcgtaaaccaacccgtcgaacctgcaaggtctgcaaagagaaattcaccgctaccttcgacaacgtctggtggtgctgtcctgagcatggcgccatctacgcgctggagttgcgggcgaagcagaaggtaaaagaggccgctaagcgcatcaaggagctgaaggaagccgagaaagcagggcgacagcgccgcgcagaacgccgtaatgagctgaagccgatccgtcactgggtgcagatgactcagcgcgccttcaacgactggcgtcgcgaaatgctgcttgctgccggatatggctgcatctcatgcggcactaagagcgcttttgtatggcatgccggacattaccgcaccacagcggctgcacctcagctgcgcttcaacccagataatttgtggttacagtgtccagtctgcaacgttcataaatcagggaatatcgaggcctatcgtgcagccttggtcgagcagatcggtgaagaacgcgtactggccctcgaatccaacaacgaaaaccaccgatatacccgcgaagaactggacggcatccgcgccaaagctagggcagatcttcgcgcactgaaacagcgggaggaagcatga

SEQ ID NO: 149614 - DNA, 387 bp, Enterobacter cloacae
gtgattggcgcgctgctaaggcgttactggtcgcagttgctggtggtggcggtaatcggcgtgctggcgttcttcgtgaaccactaccgagacaacgcaatcaccgacaaaaaccagcgcgataaggcgacggtcagggcagacacatcggaggcgatcaccagcaacgtgatcaccacgatgaacattatccgtgacatctcacaggctacccagaatgcaaagaacgaactggctcaaaagggcgaaacgcgcattgtctacatcaggcagcagcttgaaggcgatccgtgcgctaaccagcctgttcctgctgccgctgctgacagcctgcgggaatacgcagacagtttacgttccagccccggtggtgccgataagcgctga

SEQ ID NO: 149615 - DNA, 306 bp, Enterobacter cloacae
atggaggcaaaagctcagcgatacaggcttgaacagttatgtggcgttaaccgctactcctgcctggttgaaacgtcaggcggttatgcgctttttcagcctgatcttgtgcccgacaacggaacgcgcgtgctggtgcatgcgttcggccagctacagttcgcggtcgttatgggcggtgcgctcatcacagaagacggtgaaagcatagaaggtgatgctttagatgaagttgaagttatgggtgtggtgaccttctttataaatggcgcagcggcgttcacagacgacaatccggtgatgtga

SEQ ID NO: 149616 - DNA, 192 bp, Enterobacter cloacae
atgaccattttcaatttagttaccaacacccaaagtcgcgtaatggcggaaatggaatcgtgggctaaaaatggcgctggcggctcatttcccttggtcaacatgacccctgagcgttcccgggacatttcccgtgagatggcgcaggcaatgcgtgtctcagacggtgattttgttttatccgatgactaa

SEQ ID NO: 149617 - DNA, 600 bp, Enterobacter cloacae
gtgagatggcgcaggcaatgcgtgtctcagacggtgattttgttttatccgatgactaatcaaaaggttacatccattaagtttaaaggccaggtgtatttatccccggccttttctacattaaaagccaaagaaatcgctgaaaatacatcaactacgtatcgtgatctagaggcggcatttaaacactattgggctactggctatcatccagaatttggtaaggatgcagcttacgccaggcctaaggaaatccttgctctaagcgttcggcacgtccaccatgacaatggtgattatgtagtgagttctgcgcctgaggacttttctgcaactaaccaatgttggcatgaatggaaatctggaacatctaaaaagagaccttctagcgacgccttcgttgtttatacagttacagacaaacgggatgccttactcataagttacatggatgcaaatgcgcactcggactcagaaaagagtgagatgatggaagacatcattaaggtcacatataagtttcatgagtggaagcgctcaaaacctatgcctctggatgatcatttatctcttttcgatgataaatggtttgaggattga

SEQ ID NO: 149618 - DNA, 705 bp, Enterobacter cloacae
atgacttctaagaatgtagcaaatgcaagatcagttgtcactaagatgtcgagccgtgagattgcttccgtcactggcaagcttcacaaaaatgtcatggctgactgccgcaacgtgttcgattcgcttaatcttcaatcggctgatttctcagccgattaccaggatgacaaagggcgaacatatcaggagtattggcttgaccaagacctgaccatgacactgatgatgggttatagtattccactgcgtcacaaggttgccaggcgctggagacagcttgaagctggagaggtattaccatcaaaatccgcaagtggccttgttgagttccgccaggctcggaccctgaagatgactgttgaggctgttactaatctctttgatctgatgcccaatcttgcgccagaggctaaacagtgcgcggcagccagtatcatcaatccaatcgttgggttcaatgctatcccattgccggttattgagcagcaccattacacggcagcagaagcgggagaaatcattggagtaagcgcaaacaagattggacgcaccgccaacaaacacgggctgaaaactgaagagttcggcaagtttttcatcgataaatcaaagcactcagacaaacaggttgaggcgttccgctataaccagtctggaattgacgctcttcgctatctgattcttggcgaacaggcagcataa

SEQ ID NO: 149619 - DNA, 213 bp, Enterobacter cloacae; identical to SEQ ID NO: 25793

SEQ ID NO: 149620 - DNA, 858 bp, Enterobacter cloacae; identical to SEQ ID NO: 101532

SEQ ID NO: 149621 - DNA, 789 bp, Enterobacter cloacae; identical to SEQ ID NO: 101531

SEQ ID NO: 149622 - DNA, 195 bp, Enterobacter cloacae; identical to SEQ ID NO: 36234

SEQ ID NO: 149623 - DNA, 1815 bp, Enterobacter cloacae
gtgtcatttcgccctcagccggaaccgaccccagttacagaaattgtgacgagcaaagatcgttttgtggccgcacatggttacgccggtaccggtaaaagctatatgacgatggccgctaaagagctgctggagtcacaagggctgaaggtcacggcgctggccccctatgggacacagaaaaaagcgcttgaagatgatggattaccggcccgcaccgttgccgccttcctcaaagcgaaggataaaaagctggatgaaaaatcagtcgtattcattgatgaagccggggttatacccgcccggcagatgaaacagctgatggaggtgatcgagaagcataacgctcgcgcggtattcctgggggatacgtcacagacgaaagcggtagaagccggtaagccttttgagcagctgattaaagcaggtatgcagaccagctacatgaaagacattcagcgacagaagaatgaagttttgcttgaggcggttaagtatgccgctgaaggtaatgccgcgcgcgccctgaaaaatatcaccggcgtgaacgaactgaaggaagaagcgccccgactcgctcaacttgccgatcgctacctgtctctgtcctcagaacaacaggatgccaccctgataatctctggtacgaacgcctcacgcaaaaccctcaatgactacatccggggcaatctggggcttgccggaaccggcgaaacgttcacgctacttgaccgcgtggattcgacacaggcggaacgccgcgacagccgttatttcagtaaagggcaaatcattatccccgaacaggattacaaaaatggtatgaagcggggcgagtcttaccaggttcttgataccgggccgggcaacaaattgacggttgaaagcagcagcggtgagcagatcgctttcagcccgcgtacacacaccaagctgtctgtataccaggcagtcagcgccgaactggcgccgggcgataaggtcatggtaacgcgtaacgataaaacgctggacgttgccaacggcgaccgcttcacggtgaaaaccgtggagggtgaaaaactgacgcttgaggacaaaaaagggcgcacggttgagctggacaaaaaacaggcttcttatctttcctatgcttatgcaaccaccgtccacaaatcccaggggcttacctgtgatcgcgtgttgttcaacatagataccaaatcgcttaccacttctaaggacgttttttatgttggtatttcgcgtgcgcgtcatgaggtggaaatttttaccgacgataaaaaatctttggcatcgagcgtgagccgcgacagcccgaaaaccacggccgcagaaattgaccgtttctttgggcttgaggccaggtttaaggatattggccgcgataccagtttagaaacccgatcagctgaaaaaggtctgccagaagccacgggggaaagcatggcgtttaaccagaaacccgatgaacataacatgacaaccggcactgattatcagccggtgagcaacgcagaggacgcctttcatcttaagcagaaccctatggatgattccgttggcctgcggcgtcatgaagcacagcaaaatgatgcagaactggcccatgattatgctgctgccgacgatcagcagtggagcgcgcaggagtatgccgattacgagcattatgccgaagcatcagactacgactttgacagcagcatttacgacgattacgccatgccgcagacgtctcaggcggaacagagccataccggaaaagaacacacccatgagcatgagcatgaagaagggggccatgaaatctga

SEQ ID NO: 149624 - DNA, 315 bp, Enterobacter cloacae; identical to SEQ ID NO: 83677

SEQ ID NO: 149625 - DNA, 198 bp, Enterobacter cloacae
atgcagttgctcgtctcgttcgctcagcagcaggacttttgtgccgggcgcgacgttgtaccggccaataggttccgggtcatatgcaatgtcgcgatcgccttcgtcggccaggtaagcaagatattcttcacgggtttgtgcttgtgcaaaacgtccacacatagaaacctccagtcagtcagactgaaagtatag

SEQ ID NO: 149626 - DNA, 276 bp, Enterobacter cloacae
atggtcgccgtgcgccgagtcgtgcagcacaccggcaatgtacggccggtccgggttgccgccctcaaagccaatcgccacctcggtgcctgccagcagcggcaggtgcaggccgtaggtgtcacccgcatacgggcgggactgacggacccacaggctctcgaacccggtctcccagttatcacggtcaaacagcatgttgacgcggtagcggccgtctttatcgatatgcccgtaggtgtcattttcggtggtgctcgtgacgcgggccggtaa

SEQ ID NO: 149627 - DNA, 2397 bp, Enterobacter cloacae
atgagtaagatatcttattatcaacacaattcaaccgagatagttgacttactatcaaattgcttttcaaataataatttaattccaataattggttctggtttcactgttggctgccaaacaaaggcaagaaaaagggttccctcgggaactcagctttcagataaaatgatcgaaatgattgttgaagaaaagaagctaaccgtagacaaaaaagaaaaactaaaacaaaaaaaatttagtgaaattagtgattttttctttaatgacgaatgggttgacaaggaaagaagaaataaatatctcattgagagctttgatggagtagagctggatagtcaaaaaaaagggtttattcgagatattaaatggccatatatttataccctgaacgcggatgatgcgatagaaaactgttctgaatataaagtggcactcccttacgatgcgcatttatcttttgaatcgaaaaatcacccgactttatataaaattcacggtgacattcaatatgaaatgagacacgaagttagcagacttatttttaaaagatcagactacttaacttcgttagagtctaaccgaagaatgctggaattattgcaattagactttaaagaaaaaaatataatctatattggatgcagtctgacggatgaaattgatttagcattcgctatcgctcaacagtcacaatccgaaaggaagcaaactcaaaacataatatttctaaatgaaaaactcgatgaaattgatgaacaagattatatcaacatggggattaacagtataatattgtttgacaaaggtaaatacgagcaaatatacaccttaattaattcagcttatcaaaagtctgccaaaagcactcctgaacttgaagagtttagtcactctattaaagtattatcaaattctccagaagataacagagattattttttaactggcatagctcatattaacaatggagaacgttatagcagtcaagttatcccttatttttatggaaaaagaaaaaatgaagatgatattgcaaaatcactacgcgaaaaggatgttgttataataaaaggtgcccgggtatctggacgcactttgctttgttacaaattgttaagcaacattcaagatagaaaagtcttcgtcataaactcaaacaacaagttaaacaaccactctttaaataaacttattggtcaagataactctgtaatctttttcgattccaatgtccttgatgttgaattattaaaaaaaataagactacaaaaaagattcctcaaaaacaaaaaaacaacaatcttattgtgttctgatcttaacaatagcgacgaggaatattttttagatgctgatgattcaagtattgtttatactttgtcgaacaaactttcagaaccagaggtttcaaaaataaatgaaagtgcaataaaagtacgactcccaactttcaccaaaggaaaatacctcctagataaaatatttaatgtttatcaagtccttggcgagagtaattacttgagtaaaatcgtcgcaagtcaagaattatatatttgtttatgtgttatcgctactaaatatagcattaccgggcaggaaataataactgggggtattaacctcaatcaaacaaaagagatttgtgagaactactcaccctaccttgaaatagaaaaaataaagaacgaagaaaaatatgaccacacaagctttaagataacatcttacgcttcaagctgggttgtagcattgctgagagagttttaccgcagtaaaggtaaagattggtgtgtagataacattattagcttcttaaaaaatacatacccgcgtgataaagttctagccacttcgataagaaagtttgataatttaaaccatatatttacagaggggcacaaaggtgcggctgatttaataatcgatatatataaccgccttcaagatattgaaggtcaggaacctgacttttacgttcagaaggcgaaggcgtactacaacatatatcatggaagtaatttatcagatgaaatcaacaacagaattagagagctaaatacagcattaacctgggcgcagtcatctaaaaacattacagcggaaagaaacatcattcatattactgcattactatggattcaaaaaatgaatttactcgacatcgagtctataactgagcatgaattttcgcagtcattaacctgtattttaagagcagtcgataatgttggtaacaatagttatagcgatacattattaagtagtaaaagtaaatcagcgataaatcttaagcagtatattgataagattgaaaattcacatggccggttatctttcctacttaaatttaaactggaatggaacggattgaagtcaaagacatacttcaattga

SEQ ID NO: 149628 - DNA, 564 bp, Enterobacter cloacae
gtgaacaataacccgatgcgcttcaccgaccgcagcggcggtgtgtcacgtcgccgggtgattattcatttcccggagcagattgccccggaggaacgcgacccgcagctcagggataaaattgcgcgcgagctggccgttatcgtgcgccagcttatgcagaaattcagcgacccgatgaccgcgcgcgcactgctccagtcgcagcagaactccgacgaggcgctcagtatcaagcgcgatgctgacccgacgtttgatttttgcggctatctggaaatgctgccgcagaccagcgggatgtttatgggtaatgccagcattgtcccgcgtaattaccgtaagtatctctatcacgcgtatctggcctatatggaggccaacgggtacaggaacgtgctcagcctgaaaatgttcgggctggggctgcccatgatgctgaaagagtacggcctgaattatgagaagcggcacacaaaacaggggatacagaccaacctgtcgctgaaagaagaaagctacggcgactggctgccgaaatgcgacgaacccgcagcgacataa

SEQ ID NO: 149629 - DNA, 987 bp, Enterobacter cloacae
atgactctgactaaagacgctttacagtttggcattgagcctgttcgtatcaccgacaccgacaaccttcagattaacgaaggtctgccgaccaacgcagacccgcaggtctatgccttccagttagctaagctggtgaagaccatgctcaattcagtgcttaaagacgctcaggaaaacattccgttccctgtagaagtcctgccgacccgtaacagcttaccgacgccaatcattgctcacactctggctgaccgctctgtggtcgttcctgtccgtggtggtaagcgacctgaagtcgtgaccgctccgtctggtactgaaatcaccgtcgagccgattgagcaagctatcctcgtgtcccaccagaccaagttatgggaccagaagtcctctactggtttcactcaggggacgctccagcaggacgctatgaacatctgcgataacgtggtccgtaccattaactctaaaatggttgacgttctggagtcctctaagctgctgaagaccgtcgagcttcctgtcctgaccgggagcctgacggccaaagcagacgctatcatggatgccctgtacgagaacaccgagtcttctttcggttctgaggttactgattacggtatcatcgcccatgagtcacacctcaaggctctctcccgtctggctgctaagcagggctttggtggtgaggacgctatcgtcgatatgctggggacagacatcgcctattacaacggtgaagaccgtggcgtcttcatgatggctaagcgcttcacggctctgagcttcggttgcttccgtcatgatggggagaatgttactgtggtcctatcacgtgatggcgactctcagtctcacgaccttgagattctcggtaaggtattcgtggtcgctgaagctgctacgaccatcaagatggggagtggctcggctactgctgtcctgcctgtggtcaaacgcctgagtttcgctaagacaagctaa

SEQ ID NO: 149630 - DNA, 711 bp, Enterobacter cloacae
atgtctcaacaagtagtcatctttaacgatgagttctctctgtcttcctatgagttcctgaccaaggttatcaatcctgcccgtgaagaggccggggagaatcccgtcagtaataaggacttcatcaatcgcgtgaaggatgagctggatttaaaagaggaaaatttccttttattagacacgggcgcttctggacgtaaagcctctcacactatccttaacggagaccaactactattggtcggtatacgtgagtctaaagctgtgcgtcgcaaagtccttgactacatccgacgaattgagaaggacaagcagttactagaagaccagaagaagcgagtagccattcagtccgctaaccgtcgaggcgtgacttggggcgactactgcaaaacctatggtctacccgctcagaagctaatgaccgcacttctccagcatcgtggcctctttcgtaagaacccaatcagtaacgagtggtctgtaaaaccaaagtattccgactgcttccgtatcattaagccgtctgaccagaagttctcagcaggtggttataacttccggttcaatgctaagggactggaggtcttcggtaagcctgcgacagtcgataaactgcgaggcatccttattgccttcactggcaccgaccagcagaagcaagagtacctcctgaagcaggcccaatccggcaagctggagggactctaa

SEQ ID NO: 149631 - DNA, 660 bp, Enterobacter cloacae
atggcggttccatacacggcgcctgaacatcgtgaaagggcttttaattgtccacactgtgaggcttatgcagagcaaaaatggtattcgttaagctattcaaatggtagctatggctataatgcgcacatggatttaagtatatgctcgcgctgcgaagggttggcctattggtatgatgaaaaactaattatcccgcaaagctcaactatagaaatgcctaacgtagacatgcccgatgagtgtaaggccgactacatggaggccagaagcatcattaatctgtctcctaaaggcgctgccgcactcctccgcctttgcctccagaagcttatggtccacttgggcgagccggggaataacattaatgctgatatccggtcactcgtccagaaagggctacctgtacgcatccagcaggcagcagacatctgccgtattgtcggcaatcaggcggtccatcccggagagattagccttgatgatgacccgcagttggctcatggcctctttaagctgctgaacattattgtcgatgaccgaatcacgagaccgaaagaaattgaggctatgttccagagtatgcctgaaggtccacgccaaggtattgagaatcaggacagacaggcgagggaacagcagcaggccgctaacgaataa

SEQ ID NO: 149632 - DNA, 279 bp, Enterobacter cloacae
atggctaacaatctttttgtaacctatgacttgatcaaaaccaaagattatgccgctgtgcatgatgctatcaaggcattgggcaactgggcaaaagttactgagtcgaactggtacgtaaattcgaattattcggttgaagaggctgccagaaaagttcgggcagcgatggatagcgatgataagttgattgttgttgatgctaagaataactctgcttcttggtataaccttttgccagcagttgagaatcaaattcaaaacgaatggaataaatga

SEQ ID NO: 149633 - DNA, 1884 bp, Enterobacter cloacae
atgcttgagattcacacaagttctatcgtcaacacggtacgttttcaagtttcgaaagaggacattgcagaggctaaggccgcagcggataaccttcaaaagcacttccagaaaatagctgatcccaagattcgcttccaggccatgaagcagcgcagagctaaagcgcgtgaacaagtggcagatgttaaggtggctccttctaaaagcgccagtgatttaaaacaacagcgtcaagctgagaaagcggcaaaagttcaggctcgtgaggccgacaagctacgccgtcgcaatgaaaccgccgacctgaaacgcagatcatccattctccagatgaaaggtgtagctggtaagtatgggattgacccgctcaaacaactggagtttgctcgcttcgccaaacagcaaacagagcttttccgtaataaccagatcagtagcgcgaagttaaactatgaacttcgtgaaagattggccttgatgcggagagaggcagcgttacaagcccgtataaccgccagtacccaacaacaagcggctgcacagcgtcaagctaagagaacggactacaaaggcgcggcggctaacatcaaagagaaggggctgaatgtgatcggcggcggtgctggttttattggcgctacggctgcattagcgggtggggcttccatcctgggacgtgtacgcgagactgctgacgacaatctgaacctaatccgtaaaagtaaagctgtagcggtgaatccaaacgcgattcgcaccattgtcactgcaaaccgtcagcgcgggattgactcaaattatgataccgtcagcgataattttaaagatgtccgtgaaaggttgggcgagtctgtcactaacaccacattcgatcagaagtctgggaaattcaaaggggggaacggggcgattgacaatatcatgaatctgtttggctggaacaagcagcagatcgcccaatatcaggataatcctctcgatttcgtgcaagccgtcaccaacgaagggcagcgtagagggatgagtgatgcgtccattggacacctcctggaagacctcggtaatgatatggcctacctggtgccagtgctgaaaaataacggtgaggcgttcaatagcaccctcaaaatgttagtgaacaccggacaaaccctaaatgatcagcagattcaggaagcctatgcttggggcgacctcagtactacgttgcaagcggtcaacaatggctttaaccagaatctaacttctggcttcctcgaaggatttggtaacgctggcaaaaatctggcagagaatacaaccactctgaacgagacagcaaaatcattaggctcggggcttggaaacctgttagcacaagtgacaggattcacgaaggagatctctgatgatttcagcaagtttaacggctggatgaaagaaacattcccttctctgtactctgatcctaataagaccgcgccagatgctatctatgataaggcagttaacggatctgcgaatgctacagcggattggattcaggataaaacggggtttgatgctcgctctgtggctccggctattaaatcttggttaggcattggtgatcagcctacagggacagcggtagaacaatacggcctgaatggtgattctctgcaagggggagcgcttcgtgattctgctatatcatccctaaccagcaccaatagtgcgccatcgtacaatcttgcacctgtattcaatctcaatcttgaagcgtctgttccgctaactatcgccagcgatagctcaaggctgagcgattacattgatttccaggcgagagcctcacaagccagttttacacagtcgctcaccttgtcagccttgagcggtcagagcagcacaggggggtga

SEQ ID NO: 149634 - DNA, 294 bp, Enterobacter cloacae
atgactaaaaccgatattggcctaatgctacaggaatttcacgagcaactacacattccccttcttgaggcagtgaacgccgtatataaggcaagccctgagaacgcgcctgagagcctctctgacgctgtaaagctgtgtcacctgtcagcggtggcgctggaagggattattctctctgtggaaggtacagactgcctacgggaggatcaggaactgataggagaggttatacagttggcgctgtctctggaagcgtgtaaggatgaattaagcgacctgctctcacagtaa

SEQ ID NO: 149635 - DNA, 282 bp, Enterobacter cloacae
atgaacaaactatacctattgaacgaagccacacatcatcaaatagaatgtaacactgtctgccaacgtctttattatcacctcgcgtctcttaaacgtgaaagcggagcaataaaagccaccgtgaaacacattgctgatggtgtgggaataagcgaaagcggggcgcgttattggatgttattaatgcacgatgcagccgttattactatggaacgccacggcaagtattacgacattaccgtaaacgatgcagtgagttttatcactacaccccactga

SEQ ID NO: 149636 - DNA, 768 bp, Enterobacter cloacae
atgacaaaatcactcgcccaaattagggcggaacaccaatacatcgataaagaaggtgtaacaagagatcgcactctcaacattccccactacttcaaagaaatcccatttatctattctccacttcttgaaaaaggaagggtaaagttcagcgccagaatgcaaaagttatattgctacgttgcagactgggagaaatccggcggtgtttgttacgaagagcaatccgagcttgcaaaggtttgtgatttaactcgaccaaagacaaacgacctgatcgaattgatggaatcaatcggattgttatcagtatccaaaatcgaaggacgacgaaatttagagttacgagcacttccgctaactgatgcgcacattaccccaccagaagcactgacagtacagcctgatatcatctttgacgtagtaacacaccaggcagcgcctgaaccagctaccacagaggaaacgcaggatgatgcgccgaattgggatgaatcagcaccaccagataatgtgcaagaaaagtctgagcctttaggactgcctgagatgattaccgatgaaatgaaaatagacgcagtgtgcgagctgctatcaaaaacggagagtttacggcaacaaagcaggggggacacatttattaactacgctcgccgcgtattacaccgaaagagtatgaaactaccttccagattcgaagagaaattagaaatgcgatttgaacatcgttatccacacttctatggacgattcggaacaccattttaa

SEQ ID NO: 149637 - DNA, 669 bp, Enterobacter cloacae
atgtttaaaattattgtttctgtctctgttttcttaatctttgcttatattggaacactattttcaggatgtagtgacggttggatatctccatcaattgggcacaggggagcatgctcgcatcatggtggcgtgagtggtataccgggtatgtttgcattgttaggtataattgtaggggggattgttttttttaagttatccaggagagagtatagactaaaccatgaagcaaatagcttgaatttaaaacatacgtcaaacctcaataattgctcaaaagcagatagttatgcggaaaagcagttggtcgcctcgattgaaaagtgcattgacgataatcaatttccaatgctgaaaatatatatatattctcattgtctgattcaatgcgaaatcagaaataaaaaaggtgggtatgattgttattccaggacattgaataggtcaaggatggacgaacttttattaacaatgaaaaatactattgcaggtgaaaagtcaatatcaaatattagtgagtacaaacagtaccttatactaatgtcactcagtgaaaacacacaaaactttacagaggctatcattgaaactattaatcatccaagatttttaaagttgagaaatataatgatagatgcattgccagtgttgtcgagaaaattataa

SEQ ID NO: 149638 - DNA, 552 bp, Enterobacter cloacae
atgcgtattaagggattatctctgttcttctgcgccgtttgcgttggttgtagtgggtactcacagcagcaaaagcacttggatgtgccgacctactcggagagctacgatcaggccctgggatggttagtgactgctcattatcgggatgcagaaaatgcagaaatcgtaatgtctttagttggagacttttgcaaaagtaaagggaaggaggcgactctctataagacgacttctggcaacacttccactattcaagaggtttgggcttgtcagacgcctccgacgttgaatgataccgacatacttagcgggatttattgccatttcattgcgaatgcgcctcgctactctgtagatctctcgaaccgtcagaaagaagtagcagagcaaaaatttgttaaggcctttgctatgaaaggcatcgaatatccggttggtggtttttatgagaagtacaaaagtagattttcttcgtgggctttagcaaaacacgaggatagtaacaaaaccgatatagttcttcggtggtttaatgaatactgtcattag

SEQ ID NO: 149639 - DNA, 483 bp, Enterobacter cloacae
atgctgttgtgttcaaggcccgggaaaccgggctttgttttttgtgcattttatcccctcttccctggggagagggttagggtgaggggctcaggccgcaccgagctgcatatagcaccgggggggattgactcgctgcgctcgccctgcgggcagcctgttcgcttcgctctcagtctgtccaactggctgcgccagttgtcgaaccccggtcgggggttctcattccccccaaaggcgtacaacatgcgaaaaaaaagcccgcattttcatgcgagctcttcttcaaatatggcggtgagggggggattgactcgctgcgctcgccctgcgggcagcctgttcgctacgctctcagtctgtccaactggctgcgccagttgtcgaaccccggtcgggggctctcattccccccaaaggcgtacaacatgcgaaaaaaaagcccgtattttcatgcgagctcttcttcaaatatggcggtga

SEQ ID NO: 149640 - DNA, 126 bp, Enterobacter cloacae
atgcgcagactggtgaattaccttatcaataacatccgcgagcatttcatgctctacattgttctttggtcgctactggcgatcattacgttatctatattgtattcttctgaacgttctcgctga

SEQ ID NO: 149641 - DNA, 462 bp, Enterobacter cloacae
atgtacaaattcgatagagaattgcaaaaatttatccttcaaaaatgcattgatatttatccaaactataccttttggaaacagtttcctcctgaaatcatggattatggggatgatgtcctaagtgccaatattatgtatctgtctgaacatggtcttatagctatacgaaataggaccagcgatgacccatactcatttctagataatatgcgagcaacccaaaagggtattgacttcatcctgaacgatggtgggctttcagcaattttgaacgtcacaactataaagtttcatcgcgacgccgtagtcgtacttgaagacctgatcgcaatatccaatatgagcgataaagataaagaggaagcaaaatcaactctgagtgagctatcctcagaggcactgaaaacggtggtacaaaccgcaattaccgctggcttagcaatactttcctctcattag

SEQ ID NO: 149642 - DNA, 201 bp, Enterobacter cloacae
atggctaactatgacgcggtcaggccttatacgccaattaacttcatcgactccgacaactggcagccatataccaaactgatccccgccaatgaagtccatgagagggtatgcaggcgaatagcagaaagagataaagggtacgaacaggcacatcgtcgtggaatagccattacaacgcccacctgctggtgggcttga

SEQ ID NO: 149643 - DNA, 462 bp, Enterobacter cloacae
atgagtcgaataacagccatcatctgcgctgtcgttatctgtctgctggtttctatgacatgggcgattaaccactaccgagacaacgccatcgcttataaagaccagcgcgatatagccactgagaaactcagcctggcgaacgccaccatcaaagacatgcagacccgacagcgagatgtcgctgcgctggatgctaaatacacgaaggaattgtccgatgcgaaatctcagcttgaagatctgcagcgttgcgttagctctggtaagtgtgggctgcacgtcaacgccagatgtcccacgaacggaacggccgacgccagcagcatgggcgatgctcccagcccccgacttactgactccgctgaatgggattatttcatcctcagagagcgaatcgtcacagtgacgaagcaggtcggatatttgcaggactacatcaaagagcagtgcttaaagtga

SEQ ID NO: 149644 - DNA, 801 bp, Enterobacter cloacae
atgataagcaccaaaatgctcatgaaagcagaacgtttcttcatcaaagcacgcacattgattagagaaacgatcttatcagcggaactaaccggtgctgaatttgtgccttatgttcagccggtgtacaaggatgacgtgattgttggaggagaggtattactcagagttctcaaagatggcgttcttcactcttcagaaaaatacctttcagccatggagacctgtgaggtcattaatgatgtcacatgttctctactgtccggggttaaaagcttttttgaaggacatagaggagctttaccaaacgacttctatctttcttttaatatctgtgcaaggcaactgaacgcaccaagggtaattgaagcggtcacagattttaataaaacatttgacggccgtatagctgtagtgctggaaattgtggaacgcggaaccatggacttcgatgattttgctcttgaatctatgcaacaactgactgcgtcaggtgtgcgttttgctattgatgactttggaagaggaagttcatgtctcaaatacattgaacacgctgggttttccacaataaaaatagacagatgccttacagtcatcagcaatggctctctggtttactcaaccgtgctcgatgcaatcttattgctatctaagagtctcggcattcagcttattgctgaaggagtggagaccaaagaacaataccaactgcttaaagagaaaggtgttctcacttttcagggatatttattctctcgtccagtatgtattgaacactttgccattaagtatctttaa

SEQ ID NO: 149645 - DNA, 528 bp, Enterobacter cloacae
atgcgacacagaattttcacaaagaacaactatataaaaattgcattcattcatttgctcagggaaatctttcctaaaacacatgcttgcattgttgacatcgactcctataaatctctttcagaaatactggaagaaatagatggtatcgaactcaaagccaaccagtacatatatttattaaaaggaaataatgttcattcaaaagtgttaaatccattagcaacattcggccgtgatgacaacttgattgacattatacacttgctgaaaaatggagtgcctattgactggtcagatttaaaacaacacttaattatgatgtcggaactatcagtactatccagaaaagataaagaaatcgtctggtcagtagctcaacatacagatgtatcaagcgttgcgaaactagccaatgtcaataacaaaacaatttacactcgcatagcgatcatagccagaaaattaaacttgaggaatttgaatgaagtaagaacgtttgttgccagcgagattaattattcatag

SEQ ID NO: 149646 - DNA, 924 bp, Enterobacter cloacae
atgactattattaattttatttttccccaacatgaaaatcttcctgaaataaatcattatattgcttatttttctatgcaaggtatcgtatgttttaaaaattcgaaggtaatgccacggactatagaaaagacagaaatgtacgttgaatggcatatcatgggtactcatttttacaatagaccgcgatttattaatcaggttaactgtaaaagttatttaatccatgaatacgcctccttatctacgggtaaatataaatttataaaattaataaaagatttaattaagcataattgcagtcaccgccctgattaccagatattccttaacgattttatacaatcaaaaatggcaataaatggtgtgcttggcgagttaagagatatgggggtatccgatgttttcatccagaatcgtagcataaatcctgataaatcagtcgtgaactatgatttcgcctatgtgggtagtatgtcagctgagcggaaactagagaattttcttgattcaaaaataatgaaaggaaagagtatactactcatcggcacgtctccagattatttaatgactagatatgaaaatgattttaatattaaatttgctgggaaagttgagcaatctgaaataccgtctcttctcaccgatgttagagtatgtataaattatgtgcctgacgtttacccatataatcggcagacctccactaaattaattgagtatcttacgttaggtaaagatgttataagtaataaatataaatgggtaatggattttgttattaataataacttaaattataaaatcattggtgatgaatttatttacatcttcaatgatgggagttacgtagcccctgagtggacctctattatatcccatttaaatataacaaaaaaattaactaataatgaatctatttaa

SEQ ID NO: 149647 - DNA, 969 bp, Enterobacter cloacae
atgaacagtattgactctgagaatgaaaaattaagtaaaaaaatgatatcagaatgcatcaatgcattgaataataatcaagaagattttacaagtgatgaatatcatcatatgtaccatcttgctcgtgatgggcacattgaagattttcaaaaaatattcttgaaaagagtctttgataaaaacagtaccgacactaaaacctcgtcatctaaaatcccctctcccaacacttcagaattcctgaaagaaatagaatccaacaaagaagtaattaaaaaatatgcttccttgatcaatagacttgaatctgaaaaaagcgaaacacacaaagaaaacaaaaagttaactaacgaagtagaacttcacaaaaaattaattgaaaagtcattaagtaaaatacatcaattagaaaatgaaaaaagtgaactgcaaagtcaaatccagcaaacaagaattgatgaaaagattccaggttacgtagataatgttaaaagcgaattagatcttgacgatagtcattttatctctatgtcacgaacatgggctatttctggctgtttgtttgcattagccgcagttttttgttcattttacacgctttatctacatatagacttcaccactattaagagtattgaattagtttatgtattcacgcgtggattgatcggtattacaattttatcttggctcgcatacatttgccttagtaatgcaaaaaaatatactcatgagtcaatcagacgaaaagatagaagacatgctttaatgtttggtcaggtatttctgcaaatttacggttctactgccaccaaggaagacgcaatattagtatttaaagattggaatatgtctggtgattcagcattttcagaccgtatggaacaaccgcctggcatccaaactcttttaggaacagctcgagagaaattaaaagcggcggtaattgataaatctagtgaatga

SEQ ID NO: 149648 - DNA, 942 bp, Enterobacter cloacae
atgtcaactcataaaaacacatttcgccatattgaaagcaacctaaaagcttccataatgcagaatcgcggtggacagaaagtcattgaacgcatagtcgatgcttatggttttaaatcgcgccaagctctatgcaaccatctgggtatttcacagagtacgatggcaaatagatatgcccgagatacttttccatcagattggattttgatatgcaacctggaaaccggcgtttccattgaatggctagctttcggtgatgattctaaatcgctgacaggacttaaacctgatgtacatcacaatcctgacgatgtcgtcaaagatacatcacaacaaaagttccaaattgaaaactttacgttgagcacatctggtggtaaggatgctattgaacgtttagttgaggcatacggcttttcaacacggcaagctttggcagatcacttgaacgtctctaaaagtacactagcaaacagatatttgagagacacattcccaagcgactggattataaaatgttcaattgaaacaggcgtttcactcgcatggttaacaactggcgaaggcccaaaattttgtaatgagtcacctaacgttatcgcaattgaaaaccgaacaatcattaatggtgaattgagtaacgcttctcattattatttagactcgtcatggttacctaacgatttagagaaaccgatatcagttactactgaggatcaaatattcatactagaatcaagtttttctgatctaagcgatggatattggctcgttaaggttgaaggtaaagtcagtctaaaacatattacacgggttccagttggaaaattaaaagtcaaagatactaacagtagttttgaatgtttaataagtgacatttcagttttagcaaaatgtcgttgtatttttaaaaaaaactttaaagagacaattttatga

SEQ ID NO: 149649 - DNA, 459 bp, Enterobacter cloacae
atgactaaacaaagctccgaatacttccaactgcattacagttattaccttgaggttatgacggcaacgcttcacggtagagctgacaaattgatgacagccattcaacttattagcggtactgctgtgtttgcggacaccggtctggaatggttgttcgctttgccagttgtcgttatcgcgacaattcaacttgtgtggcaaccggccattatttccgagcgtgctagcgtacaaagccgccattacggggaattgctttatgcagggaatgaactgaccccggagctgattgcacaaaagttgaaaatgctgcatcactctgattccgcacctttcggttctttgttaaatccagcctacaaaagagctgctattgcatgtggtcggcctgatgacactaagctcagcgtccaggaaaagcttttcgcctggtttgcaggttgcctgccacgttaa

SEQ ID NO: 149650 - DNA, 342 bp, Enterobacter cloacae
atggctatagaaggtaacacggcgacagttccgcttagtcccggtcagcgcctgaatgggctgaaccacatagcggagctgagagcaaaagtgtttggtctgaatattgagcacgagctggaatgttttattaatgagatgcgcgatccccgcgacattaatcataaacagaatgcgagggcactggccgccatattcttcatggcaaaaatcccggcagaacgtcacagcgtcaatattaatgagctgaccactgacgaaacgcgggagttgattaaagcaatgaatcattttcgtgcagtagtgagcttatttcccaaacggctaaccatgccgaactaa

SEQ ID NO: 149651 - DNA, 237 bp, Enterobacter cloacae
atgcgaaatagcgaaacacgcactactaaaaccggaccggatgatgccggtttgttccagttgtttaacgagactcgtctggatgagcgtaaaagctgcgcctttgccgtttccatccgcatggaggcactggcgatccacatcctgaaagaggggatgaacggagtggaggctgcagaattactgcgccgtgaagttgcccgttatgaagctgaatcacgcggggactggcactga

SEQ ID NO: 149652 - DNA, 228 bp, Enterobacter cloacae
atggctgattctatggatctcgtacagcagcgcgtcgaagaaaacctgcagcgccatatccacaatgcccgggcacgaaatccgggtatcgctcgcgtgctttgcatcgactgtgaagcaccaatcccagcggcgcgcagacaagctattccgggcgtacagtgctgcgtgacttgccaggaaattgctgagctgaaaggtaaacattgtagcggtcgtgctgtatga

SEQ ID NO: 149653 - DNA, 1011 bp, Enterobacter cloacae
atgaacatcatcgatccgcgttgcttcggtatcagcactattaacagcatcagtatctcagggggcaaggatagccttgctcagtggttacgggccattgaaaacgatgttcctcatatctctgtctttgctgatacgggccatgagcatcctcagacgatggactacctggaatatctggaatcgcggctgggtaaggttattcgtgtgaaagcggatttcactcgccagattgaaggcaagcgtaaattcattgctgaaaaatggcctttttctttggttgaggaatgcggcatgtctcctgatgaggccgcagaacgtatccatcgcgcactagaaattcttaaaccaactggcaatccgtttcttgacttgtgcatgtggaaagggcgattcccgtccacaaaggctcgtttttgcacatttgatttgaagcatgagcctgtccgtactcaggtgattgttcctgcattagatgaatatgacgaggttatcagctggcagggagtgagggcgcaggaatcgccagcgcgtgcattgcttccggactgggaggaagatgcggataacactcctggccttcatgtttatctcccgatccttaactggctgcacgaagatgtgttcgctatagccaaacgtcatggcatcaaacctaacccactttatcaacagggctgcagtcgtgttggatgcatgccctgcattcatgcccgtaaatctgaattggcggaaatcttccagcgctggccagaagaaattcgccgtgtcgcagaatgggaaaggatggttgctgaatgctcacgtcgtggtaattcaacgttcttcccatcgactcacgatccgcgacgggccgaaaagcgtattgaagtcatcaccgtagatggctatggcattgagacttatcgcgactgggcgttaaccacacgaggtggtgcgcaatttgatctgcttgcaggcacaaatgacagcgcggtatgtagcagtgtctatgcgggagtttgtgagtga

SEQ ID NO: 149654 - DNA, 186 bp, Enterobacter cloacae
gtgaacgatttgttcatggagtcacttgcactgcagcggatagaacttatggcccggctggttgccagctcagattgtagcgatgacgacaaggaggttgcgatttcgtggctgtcggagctgacaagcgatctggttaccaggatgaatgattatggagtagggcaggatgagaatacgcattag

SEQ ID NO: 149655 - DNA, 1155 bp, Enterobacter cloacae
atgtttatctgcgaaaaccatatcgtcgaaccaaacgtaaaaaatcatgttcgtctgcaaactgaaaacaacatttgtgtattttgtaatgctattacaaaatgcctagatactgattcaatagaagctcgaaatttgctaaaagcaatcctacgttataactttgatgaagttctctataatacacatattggtggtgactattttacaggttttttattagcggatgattatatattttgcaaagatatccaaagtcaaacggaagagtttactgaccttgatagtgaaatatggggtatggggttcgcaactccaggtgagattgatatacactcagggcatgatcaatatggcatgatgaatatgccgtttatgtcaattattaactcataccatccatttatagaaaaattatctaagaaacttgctgaggtaaattaccatgagtttgaagatgaattgagggatatcattaaagattatgggaattcttttgccaaaataattgagggtagttctgtagtttatcgtgctcgtgtagggactgctggttataaaaaagctcatgaagattttaaccgtgaaggtaagaaaatattcgttccatacagaaataaagaaataggttctgtccctcctcttaaagctacagcaggtagagctaatagggttggggtttcatacttatattgcgccactgatagctataccgcgatcgctgaggttagacctcatcctacagatgtagtttctctaggtaaatttagcgtgtctcgagctttaaaagtattcgatttttcatatccaagtttattagactttatcgaaaatgaagatgctttattgagaatgattccttatgctaaaatggcgggtatttttaataccgctacaccaccctctttagagggaaggtatagtgtttcgcagctcatatctgactgcataagaaaggagggatatgatggcatacagttttcaagcactgttggtgaaggaaagaatttagttgtgtttaatcctaataacatggaatttattgagggtagttcaacggtaattgaaattgataaagtacaatatacatacgaagaaaaacaagtagtgggtatgaatgatcagtgggaaatttattataatgaagttgagtag

SEQ ID NO: 149656 - DNA, 834 bp, Enterobacter cloacae
atgacagtgaaagcaaagcgtttccgcatcggtgtggaaggtgccaccaccgacgggcgcgaaatccagcgcgaatggctggaacagatggcggcgagctacaacccgacggtttacaccgcgctcattaatcttgagcacatcaaatcctattccccggacagcgcctttaaccgctacggccaagtgacggcgctggtcgccgaagaaatcaaggacggtccgctggcaggcaagatggcgctgtacgccgacgtggagccgaccgcctccctggtggagctggtcaaaaaaggccagaagctgttcacctctatggaggtcagcccgaaatttgccgacaccggcaaagcctatcttgtcggacttgccgcaaccgacgatccggcgagtctgggtactgagatgctggcgttcagcgccagtgccgcccataacccgctggcgaaccgcaagcagaaaccggacaacctgttttctgcagctgaagaaacactcattgagttggaagaaatccaggacgacaaaccctccctgtttgcccgcgtcactgcgctattcactaaaaaagagcagaccgacgacgcgcgattctctgacgtgcatcaggccgtggagctggttgccaccgagcagcagaatctgagcgaacgtaccgccaaaaccctgaccgaaaacggcgaacgtctgtccgcgctggaatcctccctgcaggagcagcaggccgcctttgctgagctggaacagaagctgaaccgcgaagacagccgcagggactaccgccagcgcgcgccgggcggtgacgccccggcaggcaccgtgaccaattgctga

SEQ ID NO: 149657 - DNA, 1065 bp, Enterobacter cloacae
atgaaacagaaaacccgctttgcctttaatgcatacctgcagcagctggcgcgcctgaacggtgtggccgtgaccgagcttgccagcaagttcaccgttgagccgtcggtatcgcagacgctggaagatgaaattcagcagtccgccgcatttctgacgctaattaacgtgatgggcgtggccgaacagtccgggcagctgctggggctgggtgtcggcagcaccattgcaggcaccaccgataccaccaccaaagagcgcgagccgaccgatccgacgctgatggccgacgtggaatacaaatgcgagcagaccaacttcgacaccgtgctgacctacgcgaagctggatctgtgggccaaattccaggacttccaggtgcgtattcgcaacgccatcgtcaaacgccaggcgctggaccgcatcatgatcggcttcaacggcgtgaagcgcgccaaaacctctaaccgtggcgagaacgtgctactgcaggacgtgaacaagggctggctgcagaaaatccgcgaagacgcgccggacaacgtgctgggcactaaaacggcagatgacggcaccgtgaccgtcgaaccggtgaaagtcgggaagggcggtctgtacgccaacctggacgcgctggtgatggatgcggtcaacgagcttatcgatccgattttccaggacgatgacgagctggttgtggtctgcggccgcgagctgctgtccgacaagtatttcccgctggtcaacaaggagcaggagaacagcgaaaaaatcgccgccgatctgattatcagccagaaacgcatgggcggcctgcaggccgtgcgcgcgccgtatttcccggcgaacgccgtgctgatcacccgcctggataacctgtccgtctactggcaggaagagacccgccgccgctcggttatcgacaacccgaaacgtgaccgcatcgaaaacttcgaatcggtgaacgaggcctacgtggtggaagactaccgctgcgcggctctggtggaaaacatcgaaatcggtgatttcagcgcatctgccgcaccggacgccggggagtaa

SEQ ID NO: 149658 - DNA, 426 bp, Enterobacter cloacae
atgacgcgcacgctggcggtttttttgctgctactggcagcgctggcctggcagtcgtggcggctgaacaacgcccggcacgccatcgaaacgcaaggcgaacagctggcgactaaagcgcaggcactggcgcagaaaaacagccagctgatcggtctgtccattctgaccgaaactaacagccgggagcagatgcggctttatgctgcggccgagcaaaccaccgcgctgctgcgcaaccgccagcaccggatcgaggaactgaaacgtgagaacgaagatttacgccgctgggctgacactcctttgcctgctgacattatccggctgcaggaacgtccggtcctcgccggaggtgcagcttaccgtgaatggctgtccgagagtgacgccgtgcagcctgaacccgtcagcgccgcgcactaa

SEQ ID NO: 149659 - DNA, 450 bp, Enterobacter cloacae
gtggataaactgcataaggtggacgagtggctggcggccctgctggcgaatctggagcctgccgcacgccagcgcatgatgcgggagctggcgcaggagctgcggcgcaatcagcagcaaaacatccgactgcagcgtaacccagacggcagcggctacgagccgcgaaaagtcacggccaagactaaaaaggggcgcattaagcggcaaatgttctcgaaattgcgcatggcgaaatacctgaaaactgcagccagcgcggactctgccagcgtgcagttttcagaggcggtgcaacggattgcgcgggtgcaccattacggcttacgtgatcgtgttagtcgtaatgggccaaaagtgaattattcagaacgccaattacttgggattaatggtaattaccattacaaaataattgacgttctactaaaacattttagcggattatga

SEQ ID NO: 149660 - DNA, 1287 bp, Enterobacter cloacae
atgaagcaaactcatgaggtgtttgggatatcgccaaccatattggttgactcttatgtagaccgcggtaacttggataaagagatcacacagaaacttaagcgaccaattcatttagctttacgaggggaatctaaatgtgggaagtcttgggttaggcagaaaaatattccaaatgccttagtggttcaatgcagactgaaaactaccattttagatatctacacagatattttgtcacagctcgggatatcacttcttattgagtcctcggataaaagcagcctaaaaggacgaatggaaagtaatgttgagggaggtattggattaattgccaagctgaaagtaactttgggtttcgaaacatcggaagaggaagttgttaagcaagagcgtgtcggtcaagatttaaatgatctacgatatatcgcagaaataatcaaggcatcaaatcgaaaagttgttattgaagactttcactacctcaacacagaggaaagaaagttatttgcttttgatttaaaagcgctttgggactacgaatgtttctttgttatcattggtgtttggactaaaacaaacctattaatttttttaaacccagacctcggaacaagaattgaagaaatcccaatttcatggtcacaacaaaatcttgaatcggttttattcaaaggaagcactgcattaaacattcaaatatctcaagccattaaatccaaactcctcagtgattgctacggaaacgttggaatattacagcagttgacaatgaaccttcttgatgaaaataaagtttatgagcaaacagagaacttaacccctatcactgatcagaatacatttgtagatgcagctatgaagtatgcagatcagttaaacacccgatatacaaaatttgctactgatatttcaggtggaatacgtaaaagagcagaaagcactggaatttatgctcatgcaatggctgtaataatggacactgacgacttaactctaattaacggattaagtttggataaaatctatcaacaagcccataaaaggcaatcgcgaatccaaaaaggtaacttgagaacagttctccaaaaaattgaagaactgcaagttgacgaaggtgatcgaggtctagttattgcattcaatgatgctaacgatgaagtcactgctatagacagaaccgtactattttatagaaaatattcaactgtcaactggccttgggaggacctaattaaggaaactgctgggcaatatggggatgaaggaacaatcataatccgctaa

SEQ ID NO: 149661 - DNA, 594 bp, Enterobacter cloacae
atgcaaaacgccatactggaatatggttttgccacaacagctggtaatgttgtggtgttcaattacgatagtgagacgcgggaaatcctgtcttcaacaacagagtatattcctgttggtgtgggactccccgcaaatgcgtgtactgatgcccctcctgagaggaaagatggttttgttgtatgccgaacgattgcggacgatagctgggaatatttagcggatcatcgtggcgaaactgtatggaatacggaaactggcgaacctgttgaaataacccagccgggtggctatcccgcggggacgtcaacagtcgcacctgaaacaccttacgatgcatgggatggtgagcaatgggtgacgaatgaagctgctaaaattgctgccgatgttaagaatgcagagttaaaaaaggcagagttgcttattatggcaggggcaataatcagtcctttgcaggacgcagttgagctgggtattgctgataatgaagaaagcaatctatatgatgcgtggaggaagtatcgagttttattaaatcgggtcgatcccctcttggtaccaaatcttgactggccggaacaaccgatttaa

SEQ ID NO: 149662 - DNA, 1068 bp, Enterobacter cloacae
atgaaaaaacaaataattaatgcaaatggctccactgaacgaaatggcataattgacacacttagattcttaggtctctcattaataatattagcccatgtaaatcctaacgaatacatcttccaattgcggaattttgatgttccgctgatgttcattgtaatgggaatgtctttcggattaacatcggataaacaacgcacaaaacttacatacatagtttcacgattcaaaaggttgataattccgacatgggtgttcttggtgtttatgtttgttacgagctatctttattatttaacagctaacataagaatattttattttagtgagtatgaaatatacacgtcattttctttatcgcgagggtttgggtttgtatgggttattagactgttttttgcggtatcagtgattgctatattaacaccaagtaacttctaccggattaatgtttttataatatacatactttcaatttctatcatatttatgagcgacaatatacttggtgaatggtataaggagttagatagtgggaatgatatattactactcggctctttcctctctaacgtcataccatatttttttattttcctgttaggaaccaaactattaaacgccacaagcaagcagatgtatagcatattttcgatctcattgttatttttccttggccatgccttatataactatttatactattcggcctactaccaaactcaaatagataaataccctcctggcttatactatctgagctattcactggcaatgtccttactttgtttaatagctctgagaacattacaatcaaaaaacattaacacagccagcgcgctgataatattcatttcctccaattcgatctggatatatttatggcacatagtttttgtgatgttaacagattcagttgatatgtattttttagcaagatatgcgttagtatacgcagctgcaattttatctttcagcgtccagtatagacttataacccaattatcaagtaaattacacaataagaaatataaaaattggatgacttccatattcactggttga

SEQ ID NO: 149663 - DNA, 225 bp, Enterobacter cloacae
atggattttgactcaagctcttcggtgatggaattcaagaagaactttagcattccagataacatctactggaatggtgagcgctttgaaacagtaagcggatcctctgaaagtgaagagacagctgacatgtataccaatttactggctggtttcatcatagggctggaggccagtggtagaactactgacttcgaggtcgagccattcaaccgaaacccatga

SEQ ID NO: 149664 - DNA, 309 bp, Enterobacter cloacae
atgattgaccaaaatacagttgttcacgtaggcaatggtaagcaacaatccataaatcttgaaagactttctctctttgagtacgtggctgaagttggcagcggacaaattaagctggtatttactcgtaaagaggctgaatttgatagggagcaaattagtcgcctaataagcctcagtaaggaaaagctgaaatttactctcatcagcaataaatctgagcactcctatgatgccactcttcaagaagtgaccttaaattcaaacgagttttttgaaagtcttacactcaaagctcttgtagtttaa

SEQ ID NO: 149665 - DNA, 1569 bp, Enterobacter cloacae
atgaattacaaagccgtctggaaacctctgccgggatcgcaatcgctctccctgagctgcccgtgtaacgagatcctctacgagggcacgcgtgggccgggcaagaccgctgctcagctggcgcgctttcgtcgcttggttggtttgggctacggctcgttctggcgcggtgtcattttcgataccgagtataaaaacctcaccgacatcatcacccagtcgaagcgtatgtatcgcctattcaatgacggtgcgcgctatctggcgtcagcatccgagctgcgctgggtatggccgactggagaagaactcctgtttcgcttcggcaaggaggagggcgattactgggattatcacgggcaggaattcccgttcatcggtttcaacgaactgaccaagcagcagtcatctgagttttacgagatgatgttttcctgccggcgctcatcgttccggccagagaattacccgctggaagatggttcattacttaagccgatcccgctggagacattcagcactaccaacccgtttggcatcgggcatacctgggtgaagaagcgcttcattgagccggcgccgcgtggaactgtgcagcgtgacaggcaaatggtattcaacccccagactgagcgagaagaggaaatcacgctgacccgcgtggccatccacggatcgttcaaagagaacccttacctcgacccgcagtacattgcgaccctgatggctattaaagaccctaaccgacgcaaagcgtgggtagagggctcttgggatgtgaccagtggcgggcgattcgaccacttgtggaatgaatcgctgcacgtcattaagccgttccgcataccggatagttggacagtcgaccgctcccatgactggggtgagtcgaagccgttttctaacctctggtgggcgcaggctgatggcactgccgcagagcttccagatggtcgacagttctgcccgccggcagggacgttaatcctgatcggagaatggtacggctgccagcctgacgagctgaacaaaggcctgaatatgtcatccaccaacgtcgcgaaaggcgtggcgtggattgacaagcggctggtgggcgaagacgtcgacgagccggaagagatacaaatcgacggcgtcacgcagggccagctaaacattgttccgggaatatgctcggaagttattccgggcccggctgatagcgccattttcaataccggtgacgatgagttatcgatcggtcagaaaatggaaaatcagggtgtcgaatggcttgaggccaataagaagcctggctcgcgagtaaacggggcctcggtattcgctgacatgcttgaggctgtagttgaaggtaagaagctggaatctggcatccctgagaagcctgcattttacgtgttcgagcattgccgtggctggattagccgcatacccgtgctggttcgcgacagcaaaaacccagatgacgtagatacccagcaggaagaccacgactgggatgctactcgttaccgagtattgcattcaccacagaaaatcaccggcatgttggtgcgctcgcgctga

SEQ ID NO: 149666 - DNA, 573 bp, Enterobacter cloacae
atggcactcaccgacaagcaagaaatgttctgtcgcgagtacctcatcgatttaaacgctactcaagcggctattcgggcggggtacagcgaaaagaccgcgaacgaacagggcgctcaaaacttagcgaaacttagtatccagtccagaatctccgaactcaaagcggagcgcaatgatcgaatcgacattgatgctgattatgtgctgaggcgcttgtttgagattgaccagatggatgtgctcgacatcctccgtgacgatggaacgctaaaacccatatcgctgtggcctaaggtctggcgcatcacgcttcagggaatggatatttcgacgacgattcaggacttcgacgagaagaccaccgagactattctcaaaaagatcaaatggccggataaggtgaagaaccttgaactacttggcaagcacataagcgtgcaggcgttcaaagagcaggtggagcagaaggtcactgcaacccacagcattatgccggtaccgtcctgcgataacgtagacgactgggaagcagcagcgcagaagcaacagagcgaggttctgggtggatga

SEQ ID NO: 149667 - DNA, 459 bp, Enterobacter cloacae
atgtctgggattggtataggtgattatctttctgcaatgagaagtgacaaagagcagcttctctctcgctttcttgacttctggaatgagatttacgtgaaagctagagatagccgtcactacactggtcatatcacagtatcagaccatccaaactgcattattactttggaaggaactggcatcagcctaaccgctcgcaaccgagtggtcttttatggcaagcagcttctcttagagatggaattttacagagaatcaaaagataaagatgaatcgattttaaagatctatctcgccaatgatgggaggctattcttgggccatcctgatgatgttgaatctatagactttttctacgatacaactgatgtaccattttttgagaagctaattcagtcactatcgaatagtggcttcatttcgattgatcgccagccggcacatactccatcttga

SEQ ID NO: 149668 - DNA, 192 bp, Enterobacter cloacae
atgactgacacttaccgaatcacagtaaccacaaaatccggtgaaacgcatgaaggtctgatgaaccgatcacagccggaagtggttaacggcttcattggcgtggcaaaggaagatggcgcttgggtatacctcgcgccggatgacgtgctcaagatggagtatgtgccggctggcgatcaatcgaaatga

SEQ ID NO: 149669 - DNA, 519 bp, Enterobacter cloacae
atgaatcatcaattggctaatctcgatttccgggacatggtggctgtttctggtgatcgcgtgatcacaacctcccgcaaggtggcggcttacttcgacaagcagcatcaccacatcattcagaaaatcgaaaagctagactgttcggatgaatttctaaccagcaacttttcgcgggttacctatgaacacaagggtaatcagtatgttgaatatgaaatctccaaagacggcgcgatgtacatcattatgtcgtttaccggcaaaaaagctgccgccatcaaagaggcgtttatcaaagcatttaattggatgcgtgacaggctgatggagctggctcactcataccaaagagagcacaacgagttaatgctggagttcatgaaggaaaaggatgttgccagtatgtcaggccgcttgctgaaccgctggggcagagtgaagaagccacagctcatagcaagaatcgaaagacttgagcaacaggcacagataacgatccctggcttgccaaagtga

SEQ ID NO: 149670 - DNA, 219 bp, Enterobacter cloacae
atgaaagcaaaatacttggtcacaataacaacagacgataagcaatatgagttcgaaacagttatagagcgaggagataggattagcgatgaggagctaattgcagcactatctcccgaagcagatcgttatcttgaatcccttggtaatgaaggtgcgtatggaaagcgtcggcagttcagaagccttaattacaattttttagagatcgttgattag

SEQ ID NO: 149671 - DNA, 642 bp, Enterobacter cloacae
atgacaaccggcggccatccaccgcccattagcgcagaagtctttagttctgacattcgggaaagaccgggagagaaaatgaattggtcaaaatactttacttacgatccaaagctcggcctgctgcgatggaagcaaagacctgctgatatagatgactcagcagcaaaaatcagatcgtggaataagcgatacgcaggcaaggaagctggaactacgagaaccgatggatatatcgctgttgagatcgttttccttaagcgaaaaataaaggcccacagaattatatgggagatgcactacggtcctattcctgacggactcgtaattgaccatataaaccgtaagcgatctgataacaggcttgaaaatctccgggtggtcacgcgtcgagataactttctgaactcggaaagattcgacggaaagccgctgccgccaatcaaaacagacgaacaccgtaccttcaaaaagcagagaactcacgccaaaggcacgagtaagttgaaggttagccgccccaaaccatggtcagcaaagatatgggttgatggccgcaacgtttccctcggctattacgcgacagaatctgaagcgagcgctgcttatcaagcggcagtcgccaagtatcgaaacaactaa

SEQ ID NO: 149672 - DNA, 219 bp, Enterobacter cloacae
atgtacgtgaaagcgtggattttcccgttcataaaaattaaacgtaaacaagaagttcatcacatcgccatcttcaacaatgtagtcttttccttatgcacgcatcttgcctccttctttcgcgcctggcccttcctgacccagctcttccataaactcttcacggtcggcatcgtccagttcagtattatcggattcaaccgtggcgcaaactactaa

SEQ ID NO: 149673 - DNA, 2115 bp, Enterobacter cloacae
atgacggaggcgaagacaaaaccctacgctccacgggtggtatcagaaggcgatattccggtacacaaaaccctgggcgaagtcgcccagacgcgcaacgtcgggataccgcgcccgatgcccggcattgtgatcctcgtccatggcgtgaacgacgtgggtgaagcctaccagaaccaggagaaaggtatacttgccgggctgggtaagcgacttaaccggcaggatttttacgcccacgaatggaaagactacagaattatcactccagggcgttcccccatcatcccgttttactggggatataaaccggttacgcatgctgattaccgggcggaccagaagcgctaccgggaggaggtcgggaagctgagtgacaaagcgcatcttccctatgatgcgtaccaggaagataacgagacgaataaaaagtcgctgggtaatgacggaaaagggccgtttcagtaccagaacgataactttaagaacgcacttgataagagttttgccaaggggggcgggacctttgccaacgcgacgacgacgatcccggatatgctggggcccggcgccggtggcttcggcgttgccgctgcgggatttgcctcgctgcacttcaatgatggcgattttacccatcccatttatgaaaacccgcaccgcatttaccagttttttgccgctcaacggctggcggatttgattattcagattcgtcagccgttagtaactcaaaacgatgttatcaatatcgtcgctcacagtcagggcacgattattactatgctggcaaatatgctggtgaaacaggccggatacgatccggtaaattgtgtgattcttaatcactcaccatattctcttgagtcgcgcgtggctgaaaatattcagccgggttatcaacagaccgacgacgccagacagcagacatttaaaaatttctgtcgcctgatgcatacgcaatggaaaggtggcgggaaaatggccgagagcgaattacttgctctggaggcctcctgtaccctgcgtaaaccttccgataatccgctgcgaacggatggcagatattgccgaagcaacgacggtaaagtgtataactacttttgcccgaacgatggcgtcgtgtcgctggataatgtgcaggggtttggctggcgaggcattcctcagaatattgccagtgatatacctaatctgtttcagcgcgtgttttaccagcatggtgaagtaggaaacatccctgacgctaacccctttgagctaccaccgcgaaatgagggggatgcaaaatatgcctttctcacgaacgccagttacagcgctcgcgatgtggtgataaacggtgaggagttaccggaaccttttattttcaaacttcagggggaggataatcacccggataacgatcctaaaaccagtgataaaccgtatacctattatgtcgatccggacagcccggacgcctacatttcctattccgccaaagccagcgccattaagcgcacggtaacgacaacctttgcagtgaaccgctatcaaaatattggctggcagccgggtcacgttttatctgcttcagagcttaaagaagagagttttgaacgcaagcatgaggttatttatggtgaggtgtcaggttcgcgtgattttcagttagttacccttacctggaagaaaacaccggaagaactgcaagcggaatggcagaaaatcgacccggtgggctacagccagcactcctctattgtgatgagcgaatttgcgccatcgcacgctatggcgtttgatttggctattgggcagtgcaaatcattcgattatcaggcggggaaattttgggaagggttgttacatcgtgcagactggcgcgatcctcagaatgaaaatccctatgcaagggcatattaccggacgggtaagctagatgaacctacaaccaaatttttcatgaataagccatatgacgtgctgccgaaaggtgagtatggggtggtaaataagttcaataatgcaacgactgtcaagccgtccagtgatcttgtcgcagggaatcaggacgtcgcaaatctgcaatgggacatgccaaagcccataagtgacagtcaactggcttaa

SEQ ID NO: 149674 - DNA, 1014 bp, Enterobacter cloacae
atggaattgcttgaaggcgataaaacatttgattttgttagagatgaaattgttatctacgaagataacttagataatttaagaaataaaaaagccattttaaaatcagagctcaacaaaattcaagccctggtcggggacaactacatagatgaaaatgaggtcatagacttatataacaagctgagggctgggctcggtgacaatattggaaaagaactaaaagatgtattgggcttcaagaaaaaaattgatgattttcaacgagttcttattgatgcacgtaaagactcgatcttaaccgaccttgagaaaattgaaacaaccatatatgaaatatcagtaaagcttaattcaaaaactgcaataattaagcagaacggtcacctccgaaacattaaaacattgtttcttgcatatgagaaaaagctggaggaactttcacaattatcctcgcttattaaaaaatatgatgaatatgaatctaagtctaaagctaaaaaagctgagaaagcagctagagttgtagagttagacatagatatatcacttcaagagccaactatttcagaatttagcgatacagtatctgctattcatgattatgtcatggaaaatagaaagtgctcatttagtatctccgcaaacgagaagagtagtgttattgattttgacttacggatatttgatgacggtagtcatagtaatgaacgcgaaaaagtattcatatatgacatgtcattactgctaacgcatgatactttcgtgagacatcctaaatttctcattcatgataatatctttgatgttgatagagatacattaattaaaagccttaactatatttcatcaaaatctagttgtttggaagatgctcaatatatattgacgctaaacatagataaattaaatgaaataggaaaggatgagttaaaactggatattgagaaatatagaagagcaactttaaccaaatctcatagatttttaggccgtcaatatcaagaaaaatga

SEQ ID NO: 149675 - DNA, 1017 bp, Enterobacter cloacae
atgcaaatattagttactggtggtgcaggttatattggttctcatactgtactcgaattgctgatgcgtggtgttgaggtcgttgttattgataattttgtcaactcttctcaagtgtcactggaaaggattacagaattatgcgggaaatcacctgtgctttataaaggcgatgtcagggataaaaaacttttacaaagagtttttacagagcagaatattaattcaattattcactttgcaggcttgaaatctgtatcagaatccattcaaaaaccattggagtattatgaaaacaatattgttgcaacaatatccttggttgatgaagcaataagatatggagttaataattttatttttagttcatccgctacagtttacggcgatcctgaaactatacctgtctgcgagtccaatagaattggtgggacaactaatccatatggcacatcgaaacttttcgccgagaaaatcttgcaagattatgctaaaagtaataaaaagtttaacgtgactgttttaagatactttaatcccgtaggcgcgcatttcagtgggagaataggtgaagatccaaatgggattccaaataatcttgtcccttatgtttcccaagtcgcagttggaaaacatgaaattgtttctatatatggcagtgattatcctactaaagatggaacaggtgtcagagattatattcatgtcactgatctcgcaaaagggcatttagctgctttagattacattggtaaatatggtaattacaatgtttataatttagggacagggcaaggtcattctgtacttgacgttattagtacttttcaaaagatatctgggatagctattaattataagttttctccgcgtagaagtggtgatatcgctgaatgctggtccgatccatctttagctcaaaaggaactccactggcgcgcagaacttactcttgaggatatgcttcgtgacgcttggaattggcaagttgcaaaccctgatggctataaaaaataa

SEQ ID NO: 149676 - DNA, 1038 bp, Enterobacter cloacae
atggcaaaaaaaatagtatatataataacaaaagcagaagtaggcggtgctcaaaaatggattaaagagcagaaggacttactaagcaactgcttcgatatctatcttataacttcagcacctggctggctatctgaacagtttgaagaggaccatgtgttttatgtcaaagatattttatcttttaaatcacttctcgcgtcttacaaaatatctaaaattttgagagaaattgatgcggctgtagtaattagtaattcagcaagtgcaggtatacatggacgccttgctaaactttattttaatcatcgctcaatatacgtctctcatggctggtcctgtatttacaatggcggtagatattcgaaaatcttctgccttatagaaaaatttttatccctctttactaacaacattctatgcgtgtcaaagaaagaccgtgaaaaagcaattggccaaataggaatttctgattgcaaaataataaccattactaatggtatcatgccactacaatccagagtaagcggtagtatccatgaccaactgaaattggtttttgttgggcggatgatccatccaaaacgacctgatctacttcttaatgtcgtatctcagtttaatagtgtatctattgacatgataggtgatggaccgctgctgccaactctcaaagaaaaatataagtcctttagcaacatacattttctaggagaggttaaaaatttcgagaatttctacaagtatgatgcatttgttctaacttctgatagtgaaggtttgcctatgtccgcacttgaagctgcctcagttgggctaccaatgttactaagtgatgtgggcggttgtagtgaacttattgatgaacataatcctaatggtattttgtatcaaaatacgcctgaatcattaaccgctgctctcaagaccttaatcagggattatagaatgtatgaaaattatgctgaagagaaaaaagaccgctacagtttacttagtaaatatgatgattacgtttatctaattaatggcaattaa

SEQ ID NO: 149677 - DNA, 516 bp, Enterobacter cloacae
atgaaaaagattttctctattgtatctatttctaccgtagtcatgatttctgcgtccgcattcgcagcaaatgaaggtgaaactagttcggttgtatttaatggttcaattaaagaaaatacttgtgtaatcaataatgggtctaaaggacaaacagttgtattaggtgatatcgagaaaagtgtacttgcaaatcaaggaaactattcccaaccggttggcttcacaattgcacttgatcagtgtgatactgccaatgctaccatcactttcaaaggtgagaccccaccaagtattaacaatgcactgaaaacaacggcttcaggtgttggcatccaaattttggatcaaaataccccagtggtcgttgatggttctacccacgcacagtccatcaacgttagttcaactaatcctaatgaattcgatttcacggcgcgctatatagctctggataacaatgtggcagtcgggttggccaattcaactgtagattttaccgtgaaatacaactaa

SEQ ID NO: 149678 - DNA, 696 bp, Enterobacter cloacae
atgttttataattcctttcaaaaaccgctactcgcctcaatattaggcatagtaatgtttttcccccatttggcctcggcgggaggtattgtcttgggtggaacacgccttatatatcctatggatgccaagcaggccactttgtctgttcgtaattcttcgcaagagaccagctaccttgtacaaagttggacggagaatgcgcagggcaataaatccacagattttattattaccccaccgctatatgttagtaacccaggtgaccagaatatgttgcgggtaattttcggtggtccttccctgccacaggacagagaaactctgtactacttcaacgccaaggcaattccttcagtagataaatcaaaaatagaaggaaagaacacacttatgctcgctgccgtaacgcgcattaaaatgtttgtacgcccctctggtctcaatgttcctgtcgaaaaggcaccatcgatgctgacttttaaacggagcgggaaccaggtgcaaattagcaatccttctccctatcacatcactatggttcaggtcgcactcgatggtcgcaaggttgctgacacgatggtggcaccatttagtactgaatccctgtcgacatcaggaagtcctcgtacgctgacctacagcacaataaacgactacggtgcggtttctgctcagcaaaagcaaaatctgtaa

SEQ ID NO: 149679 - DNA, 2601 bp, Enterobacter cloacae
atgaagaagtctactttatcgatagccctgaccggtttatttattcaggccggtttcgccgctaatgccgcagggctctatttcccgccagaatttttgggggcggatgctgatgcagctgccgatctgagtattttccaggcttctggctcgcagaggcctggagaatatctggttgaggtgtttttgaatgacagaagcctgggtcaacaaacgctaacgtttaaaaaacgagaagaacaaactgaacagcagcgcagtagagataatacagggctctcagtatgcctaacacgggaaatgctggcttcattgggggtgaaagtagctctctttacgaagatcgcttctcttggagagactgaatgcgtaacaccggagaaagtcataccggatgcatttactcgctttgatttcactaaaatgcagctttttattagcatcccgcaggcttcactacataaccaagcgcgcggatatattgacccttcactctgggatgaaggcattaatgccgctttactaaattataacttcagtggcgggaatacttttgctggcaaatcggacagtgataattacttccttaacctgaatagcggcctcaatcttggagcctggcgattgcgtgattttcgaacctggagttactaccgcaacaaataccaaacccagcattcatggcaacgcttaaagacttatgtcgaacgttctgtcatccccctgcgcagcaatctggtgattggtgagagttcgacatcaaatcagatttttgactcactgggtttcaaaggcatcagcctgtcgactaatgacaacatgtatccggacaccatgaggggattcgccccagtgatccgcggcgtagctgaaagcaacgcgcaggtactggttcgccagaatggttatagcatttaccagactaacgtatctcctggcgcattcgagataacagatctctaccccatgtatagcagcggcgatctggaagttagcgtaaaagaagccagcggtaatacacacgtgtttactgtgccctattcctctgttccgttactacagcgtgaaggcaggatgacatacagcatgactgcaggccgctttacgggtaatagcgaccgttacgacgatcctgcttttggtgaggcaactctcttatggggacttccacacaatgtaaccctatatggtggcgcacaatattcagataaatacctggcggagcaactggggctgggcatcaacatgggtgcaatcggagcattatctgcagacgtaacgcatgcggacagtactctggcggatggttcgagccacaaagggcaatcggtcagattcctctatgcgcattcatttaatcctactggtacgaatctccgtttaacaggatatcgatattcgacgaagggattccatacccttgacgaaacagcgctgaaaaccatgagtgggcgcttatacgatcacggagagtatgatgaatatggtaaccgtgttcaggacacatattccgactattacaatctgtacaacaccaaacgcgccaggttggaagctaatatctcgcagagtcttggtactgcgggttctatctacataactggtgttaagcagacctattggaattccggtagctctagcacatcgctacaaagtggctatagcagtaccctggggcctgttaactactcgctttcttatagctttaataagcagaagaatgaaggcaatccgtcatggacggataaggttttcaacctttcactgtcggtcccattagaccagctattttcatggaaaaagggatcacgatctgtccacgctactttttatggcagccgggataatcacggcaatctgagtcagcaagccggattgagcggtactgccctggaaggcaatactcttaactggaatgtttcacaaggatatagtcacagcggaaatggtggcagccgcggtggtaccggaaacgcaggattaaatcatcgcggcggttatggcaactcgtcactaggatacagctacagcgatgattaccagcgagtgaactacggcttgagtggtgcccttatagcgcaccgaaatggtctgactcagggacagcaagtgatggaaagtgcagtgctaattgctgcaccgggtgccagcggtgcagacgttaaaggtgcaactggtgtcacaactgactggcgcggatatgccatcaagccttatgccacagcctatcgtgaaaatagcatttctttggataccagtacgctcgatgacaaaactgaaattgacagcggtgtagctcgagttgtgccgactaaaggcgcaattgttcgagcaagttttgatgttcagcgtggtcaccgcgtcatcatgaacattactcgcaacggtaaaccactgccttttggtgccatggtaagcagcgataaggtaagcggaattgtaggagacggtggacaagtatatttgtctggtcttcagaatgaaggctccttaacagcaaaatggggtgaacatcagcatcaacaatgcgtgattacttaccgtattagaggcaaagatcaggatgcagctattgcccaaatcaacgcggtctgctattga

SEQ ID NO: 149680 - DNA, 534 bp, Enterobacter cloacae
atgaatttcattttagaattacgtagagttattatcggactggcgtttggaatgccctttctgaatccgaacttatatgcagccaacattacgtccacgcaatttactattaaaggaaccctcgaggccaagacatgttcttttaatgaaaccgcgcttacggtcgatcttccggaagtagatactcgcacattaaacaacaacaatgctatacaaggaacaactgaatttacattgtcgttaaattgtagcggtagcgttacatcagtgagtattattccttcagggacgccaatttcaaacagcgatgatactttgtattcaaacatcggcacttcacgaaatgtgggactcagaatactagataaaaatggaaactcacttaaaccagatggtcaaagtaaagtttcttttgattattatgaatccgggggtaaatacacctttactgcgggatatgtagcgatcggtaccggacgggtaagcggtggaaattttaaatccattgtaacattctcagtggaatacagctga

SEQ ID NO: 149681 - DNA, 843 bp, Enterobacter cloacae
atgaaaaaaatcatccttttttctttatttttcacattgactagtgaagctgcaactctaacatgtcagccgttcaaagcttcaagagtgactagtggtttgtacgtcaatggtgtgacggacttaggggttaacatggtaataaccggtgcctcaattggtactcctcaaatcaaaaatttttgggtcactatttcatacccagatcctagcataggcgaagctctgaaaggcaactatattcacatattaccgaatgtagattttcaacagagtgcaccaattcatataggtgacaaacttacgggtttatcaggccaagtaatccaaatcccttgcgtctctactgagacgaaccactgcgcgtcaaaaaaacacaattggcttccaatcatctcttccggttctacatccgttagtcctgcttctgtaaataagaacataactgtgccctcaggaacaaatcttgtatcaacagaactaaaagccacgtccaatcacgtacatatgcccgatcttactttaccaggagaaacaactttatttgcgatagaaactacagaagactcagtgacttttcctgatgaaattgacctaggatatttatctccaggcataagcaataacgctcaagatataattaattatagtaaaaacacgaacaatcttaatgtgaggttaagtccaacttattctttatcgaccccgcttaccgtaaatgatatacctcagtatggccctgcaacgtttaaaccaccatttacaataggtctatacgtgcctccatcttctcagcctggtacaaaatcagtccaagtaactgcatcctggacttgtccgtag

SEQ ID NO: 149682 - DNA, 555 bp, Enterobacter cloacae
atgactgaagaaactcaggatccgtcaagaattaaagaaggtggtctcaggctacttacgacgggtgagatacagctggcacactcagtttttttatccactattgattattcgaaagtatggattcacagggaaagttaccttcctttcaatttacaggataagaatacggcgatgacaccggacggggagatctattttcgcgatcaatactgcgatgatttttcccagacgacagacgatcttcaacatatgttcatccatgaaatggggcatgtctggcaacgtgaaaaagggatgaatgtaatcttcagaggattggttagctggatggtgagctatcactatatacttgatggtcgtctcttaagtgaatattcgatggagcaacaggcgcagattattgcagataattttacgttgcaaacgcagggatataatatatggcatcgattatggggcagtaaatatccaactattactctggatggtgatactactgaatcagtaatacgtgaacaatacaaaattgcgttgcgagggttcccatggtaa

SEQ ID NO: 149683 - DNA, 2022 bp, Enterobacter cloacae
atgaccacagctgttacctcactttgccgtaaaaaccctcatgcgccatgcgaagagcaaatgccgtactggattgaaattcagctggttgatgagcagggtgctcccgtggcgaatatgccatggacagctgaaagttctcatccgatttccggttcggcagatgagttcccttattcaggcaaaagtgatgcagaaggactcatcaggatcgatatgcggcatggcctggaactactttttaccgtcgaacctatgccattaattaacgaaatggaaaaacgtcagttgcggataagcagagatgcaccacaggattctcttgttcggccagaggccgaagcgaatggatctgtatggcactatgcggtagtgggagagctttgtcagagttcaccaaacctggaattaaggccaggggaaatgttacccgcataccactttcctgccaaaacggcatttaagggatttaaattccgcacgaatgaatttgaaaaacgtcatgtagtagaaatatgccctttcagagcctgggagctagtgcttcatcatcagaaggactattccattgcgaatggaatcaacctgggagcagcagcaacgcttgcttatgcaaatgacagtaccctagacacagattcaattacgcgtttttttattaaccagtgccaagatctttcccgtttaccacagctatataaagacggttcagcatggaatgccctagtacaggatgttcccttcagtaagagatattatcctccggtgtttatggatacctcacgggatacttcgccaaaagtagatgataagagtccacatggaacagcacaggcaaaggaaaatactgctgcaacaaaggcagacggtgatacgcagctttactatgtttataacgcggataagataatcgttgcctggcgtggaacggccagcttgtttgatgtaggaacggatcttgcgtttaggccggtaaattcagaattatgcgatatagacaaaacgcaatgcactccgttagtaccttctgggaaagtgcatactggtttttggagtggttataatcgagtaggaaagaaatttaatggtgaaattgaaaaattaaaagatttacttgcaaaccgtaagttatttatttgtggtcatagcttagggggggcactggcattaattgatgcggcaagatttaaaaattacaatcctatactttacacttatggaatgccacgcacctttacccgcgatgctataatgcagttatcggatattacccatttccgccatgttaatgataacgatccgataccagccgtacccgcagaagctaacctggataacgagttatataaattatggggatggtttggtgggacgctgggcttcttctggtcagtgggtgaactgattgcataccagttgatttcctggggagattgtttctggcatcacggcaacaccgtagcctttcttacggccacccaaagcagagaatggaaggagtgcaagagagatctgccaactcacgcagggtgtattactatcaggaattcacttcctattaaggctaaactatatttggtgtccactctggcggagcaggagatgcagcaagctgggcagaagcaaaaagagtttaaagcatcattaacggaggcagatctaactgactttttccctaaaggaagcaacccggacagaggcgttagtttaaatatttttgatcactttatgacctcctacatgccctatatgtataacaaggtgttagagttaattgataacgccggtatagtagaaaaacgcacatttactgagcatatgtataacgttgattcattcagggagcagatggcagaaaataaaaatgatataccgattgatgaattatccagaaatgaaatgttccttaatatcgaaagcttgttgggagtgtcgctgactccaacattatctatgccgtctggcaatgatacgcttttgcggtttgctcaatatggagaagaggtaatggaaaatgtataa

SEQ ID NO: 149684 - DNA, 246 bp, Enterobacter cloacae
atgaagacgatgaggatgaacaaagaaattaatatttttaatcattacttcagcgcgcaatgctctccccgccccgcctgcccgcttaaggggtcgcttttaatgcaggtgcatgactggcctcagggcgtgccagtgctggcgctggcggggaattcagtgtcgttaaaacgcatgcaaaaccatgcaccttatgcatgcatggctttaatacgtaaaaatggcgggattttcggggatttttaa

SEQ ID NO: 149685 - DNA, 1806 bp, Enterobacter cloacae
atggacaagtttgtaattggcaatgttactgcggtgcaaggtgtctcagtaagagccaaagtaaagccagatctatatcaaagcacctatttttatgagggaaatgtctatagaggcatttcaatcaacgaatttgttattctaaaaaagggttactatgacattgtaggaaaagttgaaggtgaagaaattgtcgagaaccttcgcccagaccataatagcattgaacaaaacagattcgataggttcattgacataaaaataataggaagtttcttcaattctcaattccagcctggaataaaatttctacctatgattggagactccctacatttaatctcagacaatttaattagtgcaatatataactacagaaacaataaaagtacgtctgtcataaacgttggtaaatcattactcgaaggcctagatatttcaatacctattaatggtgtttataattctcatcttgggatattcggaaacacaggtagcggaaagtctaacactctatcaaaactttatgtttctctttttgaatctgttattgaaagtaaaatatttgacaagtcaaaatttcttttgattgatttcaatggtgagtataattcaattcacggattatttcctgaagttagtgagtatataaaccttagaacaagaggtgagcaaggggataaaataaagcttccaacagactcattttgggatgctgaattgttatctgttttattttcggcgacagaaaaaacacaaaaaccatttttaaatcatttggttagaaacaaagctaggtatccggggaacctaactcaatatctaagaaccacgcttgaaataatgtttggccctaaccaacataaagaaaccgttaaccttttaaaatctattgctaaattactatcaagtaataacagccaagagattatcaatgaactatctgcgttcatgtggcattcaacccaagaacgttttaaaggcaatcatggggcagctcacacaaacactgtccaagaggcaatagatttaattccattcacttattccttacacatagatgacattactatctttgaagaaataattattcgtagcacattacaattgataaactcagtttcaaaaaactatgttcagtatgaacatataaacccactaattagcaaaatttcttcgatgtctgatggtttggaaaaagtgttagaaatttcaaccgagcaagatgagcaatcacctccaatatcaataatatcattaagaaactgcaaccaagaaataaaaaaagccatccctatgatgcttgcgaaatgccatttccaaaaccataaagacaatttgaacaccagctttcactttataatcgatgaagctcacaacatcctatccgatatttcaaccagagaaagtgaagcatggaaagattatcgccttgatttatttgaagaaataataaaggaaggtcggaaatttggcttttttgttaccatttctagtcaaagaccggctgacatatcacaaacgataatatctcaactgcataactattttattcatagattagtcaatgagaatgatttatttttattaaaaaacactataagtaccttagatgctgcctcacgatctttaatacctacactacctccaggagcttgcatactttcaggtacggcatttcatactcctgcattggttcaaatcgataaattggttgaagagaaatcacctgccagcgagacaattaatttagaattaatttgggggctggtagatgaagacgatgaggatgaacaaagaaattaa

SEQ ID NO: 149686 - DNA, 795 bp, Enterobacter cloacae
gtgtggctcctggtattccgaaaggttgatggtgataagggacttctcgccgccgaacagttcatcggccagcgccagggcggtttcggtcttgccggtgccgctcggccccacaagcaggaacacgccctgcgggccgttctccggcgccagaccggttttgctggcgcgcaggcgctgcgcaatggcattcagtgcactgtcctggccgaccacccgtacgccgaggttttgctccagactcagcagttccgtctgctcgtccttcatcagggaagagagcggtacgcccgtccagtcggcgataacggtggcgacggtacgcgcgtccacatccagccccagcagcggggtattctgctgcacggcagtaagctgcatctgaaggtccgcaatctctccctggcgggagatatccgtgcggcaggcaagcagttcctgcgtcagcgccagctcctggccgtaccgggtttcccgttcgtcgagctgcaaaatgatggcgacttcttcctctccgatggcagccagacgttcgccgtgggcggtattgcccaccgcgatatcctccagcagcgcctgcttttccatagccagtgccgtgagctgcgccttcatgcgggtcagcggctccggaatagtgtcgaggctcatacggacacgggcagaggcggtatccagcaaatccaccgccttgtccggaagctggcgtccggtcagatagcgtctggagagcgtgacggcggctttaaccgcttcatcggtaatatgcacgccatggtgctccgcgtagcgtga

SEQ ID NO: 149687 - DNA, 243 bp, Enterobacter cloacae
atgttaaaacttttttcaaaagatgaacaaattgagaaatcagctcctatagtcggctcacatatattaagactacttgaagatagaggctgcattagcattttcgagctagcaaaaaatttgcgcaagaatagactaatcggtgtgcgttctatatactatggaatgatttttttatatgcacttgatttaattgattttaacgaaccttatgtggttttaagaaatgataagaataaataa

SEQ ID NO: 149688 - DNA, 960 bp, Enterobacter cloacae
atgttacaacgaaaagagaatattgataaaatcagcactaaactggcgattttagctcataaagtggagttaaataccagtttgaacttaatggatttaaatatacatgctgaatattttttctgcgaactactaaatatgatatttgatatatcgctggtaaatttaaacagtattagcgcaaatgcaaaatcaatagatcttattgatgaaacaaataggattgccattcaagttacttcaaccccagactttgcaaaaatcaaaaaaacagtcaatgggttcatagaaactgataacgttaagaaaattgatagattaattgttttaattttaacaaaaaagaaaaagtatcatgccaaaacttatggcgaaaaattcacgatatctatctcagacgatgttttagattacaccgatttaataaaaaacataatggctttgccacctgcaaaaatacagaaaatttgtgactatttatcatctcagatttttgatacgccaacacaaaaagcaccaaaagaggtcacaaccattttagaaatgatcaaaatcttgagtacagatgagcatcctcagagcggcaacggctttaaagaagagcctgatcctaatggaaaaatatacaaacgcttctctgcatatgcagattatttaatggaaatatacgttccattaatgacaacttatgcaggcattttgaatgaaataagttattcaagtgactccggaacaataaacataagtaaactttcagcatatttaaaacgcattagcaatacagctttagatgaatgcaatggtgaccctgtaaatgcacttaacaaaatgactgattattatgcatctcgccttctttctaaaggtattgattatgatgactcagcaattcaatactacctcatagataacatgataaaatgcaatgttttccctaataaggtaacagcaccatgttaa

SEQ ID NO: 149689 - DNA, 321 bp, Enterobacter cloacae
atgaaaaagccattaccgcccgtattacgtgccgcgctgtatcgccgcgctgtcgcctgtgcatggctgacggtatgcgaacgccagcaccgctacccgcacctcaccctcgatgcgctggaaagtgccattgccgacgagctggagggcttctacctgcgccagcacggcgaggaaaaaggccgccagattgcctgtgcgctgctggaagatttaatggaagccggaccgctcatggccgtgccgtcgctgtcctttctcgggctggccgtgatggatgaactctgtgcccgtcatatcacatcgcctgtcatgcactga

SEQ ID NO: 149690 - DNA, 363 bp, Enterobacter cloacae
atgacatgcccctttgacctgaccgcccttcagggtgcgtttgagaccctcagaattgatgagctgaaggtttaccagcgcgccggtatcgtcatacagcgggacaaccacatcaccggcgcggaacgtcacgccgccgattttgtgtgtggccgtcagcatgagacattcatgaccggggaatcccttgcggttcagataggcgttgccgctggccgtgcgggttttctccatcagtctgacggccactgcggctgccgctttgcggtcagcctccgtttcagcctctgcggccgcaatcatttccggggcaaccggcggcaggttgccggtcacggcgttcaccttcccggcagcctctga

SEQ ID NO: 149691 - DNA, 744 bp, Enterobacter cloacae
atgaaacctgaaacagtcattaccgccctgcaaaatgttgccgccaagcagtccgcagagaacaaccagcacatcactaataagctgagcgcatttactgcggccagagacacccacgcagccaacatgcaggtactgaaagagattgatacgtccattgaacgctgtaagcaggagcggcagaccgccctcgatgagagtactgaggcggagcaggactggcgcagccgctttcgcaccctgcgcggcagtctcacccctgaaatgaaagctgagcacagcaggcgtatcgccagtcgcgagctggccgacgagttcaccggcctgattgcggagctggaggccgaccggacacgcgccatgctgaatgcctgctccaccgccaataaatacctgtcagcgcatgacgatgcctttaccgcttacgccggtgcggaatgggctcaggctgtcaatgcggttcctgtcgcccttacccgcgctttcctgctgcgtgttcgtgccctcgaaatgaagggagaaagcgccccgcagtccgtggccatcagtgagctgcgcgatgcgctgagccgtcagggcagcctgtatcacttcgatatgaagcaggagccggtgttgtccgtgacgggcatgcacagaccgcagattactgacgttgatacggagctgttacgcagccctgcgaagagaatgatgctcgccagaaagctggctgagaattgcgagacaaaagcggaggtgtaa

SEQ ID NO: 149692 - DNA, 321 bp, Enterobacter cloacae
atgacatgcccctttgacctgaccgcctttcagagtgcgtttgagaccgtcagaactgataagctgaaggtttaccagcgcgccggtatcatcatgcagcgggacgaccacatcaccggcgcggaacgtcacgccaccggttttatgcatggcagtgagcgtcagacattccagagcggggaagcccttgcgggtcaggtaggcgttgccgctggccggtcgggttttctccatgagcctgacggccagcgcggccgccgctttccggtcagtctccgttccggcttctgcggctgcaatcatctccggtgcaaccggtga

SEQ ID NO: 149693 - DNA, 537 bp, Enterobacter cloacae
atgctgggggatagaccagtgaaacttaatattttcccagtcgcgattgtcatcattgctggcctgtcagccgcactcgttaaaagctgttcagacatcaccagccttcagagtgataacgacgttctgagaagtgacaacactttgcaggggcaggtgattgccaatcaggcattcaacttcaatcggttcaatcaggttgcagagcatgccaacaggcttaactccatgattgacaccagcaccgaagaaaccgtaatcgaataccgggagattctccgccgtgaaaagacctgtgatctgcctgttcctgctgatgtcgctggtgggctgctcgaatacgcgcaccgtttacgtgccagcgccatgcacaccgataccagcagacctgacgcagccgatgatcgttccgctgccgccagctcaatgacgtactgccaggctgttttatggattaagccgctgctggccgtcatcgagaaggggaacaatcacttcgctgggataaggcagatagagcaggaaagaaaaaactag

SEQ ID NO: 149694 - DNA, 420 bp, Enterobacter cloacae
atggaattcatcaggccaacagaactgcgagatattatcgctcttccgcttttcagtgacttagtacagtgtggtttcccaagccccgcagctgattacgttgaacagcgtatcgatctcaatgagttacttgtcgctcacccgagctctacatatttcgtcaaagccgcgggggattcaatgatcgaagccgggataagcgacggtgatctgctggtggtggatagttcgcgcacggctgagcacggtgacattgtcatcgccgcggttgaaggggaattcactgttaagcgtttgcagttgcgtccaaatgtccaactcatcccaatgaatagcgcctacagtccgattgttgtaggcagcgaagatacgctggacgttttcggcgttgttactttcatcgtcaaatcggcgagctga

SEQ ID NO: 149695 - DNA, 480 bp, Enterobacter cloacae
atgtctacaccagcacacttatggcttgaagatgagaacggttctccggtaatcggtagctgcatgatgccacttcgcctggggtctatcgagttaaaatccttttctcacggtgtcactatcccggtagatcctagctggggaaaactaacaggaacgcgagtccatcgccctatcacgatagtaaaagagtttgaccaaacaacaccacttttgtaccgcgctgtctgtgaaggccgaaccatgaagaaagccacaattaaaatgtaccgtattctggaatcaggtattgaggccgagtatttcaatatcattctggaaaacgtcaagtttacaacggttgctccctacctgtctcctaacggtataagcagcacacatcttgaaacgctcgaattacgttatgaagcgattacctggaagtatacggagggtaatattatctatcgtgattcatggaacgatcgttgttgtgcatga

SEQ ID NO: 149696 - DNA, 693 bp, Enterobacter cloacae
atgtactataacaatgaagtgataagttatttgcaggcgaataacatccttgcgttaaaactcgagcatgcattaacgggtgtaggaaaagccgtatcaaatcagattgaaacgatcggcgcaggtgcaacgcgcgcgctgtattatacctcctgctttactgatgaatatcaagacgtatgccagaaacaaaagtccgaagacatccgatttgctaaaggtgtttatcatattatatggcatagagatgttgtatgtgaaatgctcaacatctactttgaagaagtattccgacacaaaacctccgatcagctagagcacatcaaacaattgctgatggcagtaaatattcatatcgccgcaagttcacttacaaacgccggatttgctttagcaacagcatcatatgttgctgcatgtatgaatctaagccttgaacttagtgcactggctgggcgaagagctggacaggttgttggaggtattggcctgtacggcattgttcagaaagcagcagatagttcgcatcgccttcatattacttatccagcgtactactcagcgctatacgctaaagagctggaaatgttgtacttcttgatagagccattgtttaaacgggctgaagcttttaaagcacaatgggtatcggatagtgagattgcagatatcataacaaggatggttcagtaa

SEQ ID NO: 149697 - DNA, 963 bp, Enterobacter cloacae
atgagtcataacgtttttattctggcggtgccaggcgttcagatgcttgatgtctgtggtcccatagatgtgtttgctgaggctaaccgggttcttaagcgcagcttttactcgctgcgcgttgtttcggttaccgatcctgtgattcggtcttcgtcaggcgtaaagataacggcagatgcaaccctgtcagactgcggtgggcttacggcagatacattccttgttgccggcgcgccggatattgcttattaccagccggacccccgtgtgctggatggaattaacgcactctgcgagtcaagcaagcggtttggttcagtttgtacgggggcattactcctggcgctcaccggaaagctaaatggaaaaagagtgaccacgcattgggcatgtgcgaaaaccctttccgccaggcatccccaaataatcgtagaggcagatgcgttgtatgttgacgatggccgagtgagaacggcggcgggcgttacttcaggcctggatttggcactgcgacttgttgaagaagatctcggtagggaggttgcggcagaagtcgccgatcaaatggtcatgtttttccggcgtccagttaaccagtctcactttatgaggagcaatacgctttcgcttgatggccgtacagctcttcaggagctccagagatgggcaatcgcgaatattaaagacgtgacaacggttgcagtgatggcagagcatattaacttcagccagaggcaccttacgcggatatttcggcaggaaattggccttaccccggcgcagtggctcgaacgcgagcgcgtatctagagcaaaagtactgattgaaaaggaaaaaatgccagcgaagaaacttgccgttgaatgtggcttttctgggccggatgttatgaggcgagtattttatcgcctgacaggaataacacctaatgattaccagaaaatgacgagccgtgaatag

SEQ ID NO: 149698 - DNA, 678 bp, Enterobacter cloacae
atgctgtatacctacaacagagaagaggagtatttcatgattcgcacaaccgaagatatcagtatcccggacagcaagatggcccgtgaagccaccgagttcattcgtgacacggaatccgatctgctttttaaccattcaagccgcgtttaccaatgggcggctctggccggtcagaaaagagaggttaaagccgatgctgagcttttgtacattggatgtatgttccatgacattggcctgactcgcgaatactgtagctgcgataaacgttttgaagtagatggtgcaaacgaagcacggaagtttctggaaagttatggcatcggaactcaggatattgataaggtctggacagcaattgccctccacaccacgccgggtattccggaattcatggcaccggaaatagcgctacttacggcaggagtagaaatggacgtgctgggaattgattttgaagtattctcacaggaagaaatcagcgcagttacccagcgtttcccacggacaccgcattttaaggaggacataattcaggccttttatgacggcatcaaacacaagccgcacacgacatttggtaacgtaaaagcggatgtacttgcagacaaggacacacttttcaagcctatgaatttctgcagcattatccgacagtctcgctggcaaggctga

SEQ ID NO: 149699 - DNA, 237 bp, Enterobacter cloacae
gtgaaagtggctctctgtaaatacttatttgaagcctggcaaataaatctgaacttcgctcatcatccactcacgagccacatgaagaaattgtttcctaccaccagcttcccaccgggccattttgctggcgcaatgactaacctctttcgtttcggtattaataatatgatcaagcttgttcagccgagaaattgcttcaaaactcaaagagaagacaggcctaccgaacgataa

SEQ ID NO: 149700 - DNA, 207 bp, Enterobacter cloacae
atggccggccttttcaagggggaatccgtcaaaaacatagccagggagatgatgcttacgccaaagacgatctatgcccataagtatgcggttatgcataagtttaacctgagcagtgagcatgagttgctggagctcctgaaccgcttgcttgaaaagcgctgtaaccccaatttgtttcgtgatgcattagatctgtttcattag

SEQ ID NO: 149701 - DNA, 123 bp, Enterobacter cloacae
atgttcgcccttgctgaacgcataaacgattattcccgcccgagcaatattctccacatcatagccattgagaaaattgactttttttgtatattcattgttaaaaaaatcttcaacaaatga

SEQ ID NO: 149702 - DNA, 687 bp, Enterobacter cloacae
atgttgattaattccttgcttgagcatgctatatgtggtgttcggttccagcctatctattcttcacaggaaaagaagataaaggcttgggagatgctaagtaccttacgtcagggaattgattgcgaaacgttttttgaaaagatgtctttaaatgcaagttatcgtttgctgcgctggcagttgcgtataattcctctgtgtgaagaggatggtgactattttattaacgtccccgcaaaattattatgccaatcagaattggtcagtgaaatatttcccagcctgcgttctggtatcgttattgaggtacaagatccgtgcaattttattttgctaacaaatgaagagcgagagagttttgatataatgcatcagagaataaagaaaacaggtgcaaagatatggttggatgatgttagaagtgagcatttagcgccgctgggtgaacgtatttgcatatttgatggtgttaaagtagataaaaagagcttatgggaaaacagattgactccccgggccttacaatcaatgatagcctactgcgctatgatggtagatcaggtgcttattgaaggcatcgaaaataacgaactgtttgctttggctcagaatactggatgcaatttaatgcagggatttctttggcctgaaaaaaggttgagtgtcgattatgtctcggtctga

SEQ ID NO: 149703 - DNA, 510 bp, Enterobacter cloacae
atgtatagaaaaaggtattccgtcgtttttatttttttaacattgccgttaatgggtagagcggactccaatattaatatctccggccaggttattgccagcccatgtgtcgttgacacgggcactgtttctaaagtggtcaatctgggggaagataccaagcagaatctcattaatgccggtgacggtgccgtctggtctgactttgatctgctggtgcaaaactgccctgctggcaccagcagcgtaacggccaaatttaccggtaatgcagatacgcaagatcccacggcatggaaaaacagcgggaccagcaacaatgtggcattacgtattgccagcagggatcatgcgacagcatatagcgtgaacagcacaatgcaggtgaatgtcgacagcagcacgcgcagttcgacattcccgctgtcagcgagaatgtttacgccacaaggaaattccactgccggaacattccaggcagtaatgaatgtagattttacttatcagtaa

SEQ ID NO: 149704 - DNA, 516 bp, Enterobacter cloacae
atgaactttaagcttgtgactattgcagctctggtatctcttacgtctatagccgctatagctgatgcggtaaatattaacgttacgggtaatgttgttgcatcgccctgcgtaataaatggcggaagtgctaacctgaacgtggatttaggttcgactattcaggcctctgctctggccagcgcgggatctacgtctagccccgtggcatttactcttccgataacagcatgccctgtaggaacgagtactgtgcaggtaacattcagcggaacgcccgaccctgtcgctggtgctagctattataagagcacaggcaccgcgactaacgtagcggtgggattgtatcaggccagcaatggcaacctgttggggaacggtacgtctgtgacccaaaccgttcaaggcgatcgcacagcgtcgttagcgatgcaggctaaagcgtattcatcagcgggtagcgttatgccgggaaccattaattccgtgattgttgctacgatgcagtataactga

SEQ ID NO: 149705 - DNA, 927 bp, Enterobacter cloacae
atgaatattcttaagtttatcttattgtttttatttattttgttacctatagagacttttgcagtctgtacaaataatgtggctttacaaaattaccctataaactttggtaacgtaatcgtgcagcgtgacgttcctgctaatacagttgttgcagttatgtccggaaactatacgttgaatttcacatgtcccgatcagaataacgtttatatagatactatgtacacgacttctttagggagtaacttgtatgatattggtgtaagtggctatggagtacgagtttctgaaaatgatacgggtggggggcttcaccattactttcctacttcgtggtataaccagggcacctggaatacaacttatatgtacaaggttgaattggtcagaacctcagcaactgcagcatcggggcaactttttcaaggtcagatcgcatctgacggtgtacagaatcagttcgttattgccaactggacaatatcagggggcagtattaaaacactggcatgtagcattaactcagggccgttaactttcccaattgggaatatacccaccgtgaactttggatctactgtaggtacgattccgacaaatgcacaggttacgcagaatctggggttaacatgcgatgctggtgcgaatattaatgtttcattaagcggcacccaaaaccctgatgtagccgatacgagtgttttatctttatcaggtcagggaggggctggtgttgcaaaaggcgttggcgtgcaaattttatataataacgtcccgctccagctaaacaacaaagtgactctgaaacaatccagtggtggtgtagaaacattcccactcgttgcacgttactatcaaacgaaaaccactgttgctcctggaacggctaatgcaacagcgacgttaaacattacatatcaataa

SEQ ID NO: 149706 - DNA, 618 bp, Enterobacter cloacae
atgaatactaaaatgtcaacgggagaaatcactgaggttactcctgcgcatgcatttaagcccgttgatgatatcaataaaattattgaacaaatcgctccctttgccacgcgttttaatgcgaataaaggcgaagtcctgcgctatcattccggtaaaaaaagaacctgctatatacttcatcaagggggtgtcacgctgaaccgacgaggggatggtatggtgcttaactctgaacaagcgactttcattatgggtatcagtaatcagttctcacagaccgaaaacctgtacgtcagagtgaatgaaaatgctgtgatgagccgcctttctctggaacgtttcaatctgctgattgagagttttggactgtgggagagtttgtgcaagttagtgatttacaccgcttctcgcgtttacgagcactgcacattgatctcacaaatgtcctcatatgagataatccggttccagttgcttgaactgatgaacgaatcggagcgtatccgcagcaatattaccgcagcgaattacatccaaagcagaacgtatctttctcgtagcggcataatgcggatccttgcagaacttcgggatgcgggatgcgggatgcgttga

SEQ ID NO: 149707 - DNA, 468 bp, Enterobacter cloacae
atgatacaccgtagcaaccacgatttagcgatggctacggttcaagggcccgcggtgatcggcctcagcaatttgcatcagacccagatgcgcggctatatcaagacattcaataactgtgacatcgtcatccttaaaatggaatttgttaatgagacggttaagcgtcataacctttgggagcccctggcatatcatctgatgagcctggcaggtaagctctttcacagttatgaagatttaacgggcccttccgcttatgatattgtcatcgcccaactttatgcgctctcaaacgaagaaccctcgttcaggctcagtgttactgctgaaagttatatcagagataaaacccacctgtcccggagtggcgtgatgcgtatactctcggcattaaaagaagggggctatatcgacatgcaaagaggtgtgttacttaatattattaagttgcctgaaaaattttga

SEQ ID NO: 149708 - DNA, 642 bp, Enterobacter cloacae
atgttaaatatcctgattcaggaaacggatctgttttttcaggctgggctacagaactttttagagaatttttttaagcaaaactttaatcgcgtcatcacctttaatcttgacctgacccatgaaaacgtcagtcaggccgatattattgttctgtcattgtgtcagggtgaaacactgacctgttttcccgagttactggcccggaaaaaagggattgtgataggcttcgtcgacgatgagctgcgattttcagcgtcgccctcctgctttcaggacattatttttctctctcgccgtgcatcgcttgatcgtatcagtggtgaactgtttctcgcgtggttcaggacacaactaccgggttacaagtggactaaaaggagctgtttcgactgccagcataaaggtttatcccggcaacaaattcgcattatggtgaatttttacagagggctgtcggttgtgcagatcgcgcacgcgctggagatgagcgagaaaacggtctttacccataaatatatgatgatgcaaaaatttaatctgcgcagcgattacgagctgatcgtattgctgagaaggttgatggagaaaaagagccaacccaaccagcttcgcgacttcctggaaaacgattatgtataa

SEQ ID NO: 149709 - DNA, 513 bp, Enterobacter cloacae
atgaaaatagcgcacaaagaaacgctcctgcttgccctgttgagctggaaggtgttttccgccgatgcggtcaatatcggcgtaacggggaatatcgtggcatcgccctgcatatttaatggcgggaatacgaatctggatattaacctcggcaatattcaggcttccaatatggcgacgccaggatccacgtccgatccggttgcgttcaatctgctctttacaagctgtccgctgggaacccgcagcgtcacggtgacgttcgcaggtaaccaggatcccacagcaggtgcggactattacatgaacagcggaacagccactggcgttgccgtcgccatgagtgacgccgcgaccggctcgcttaaagggacgggctccagtatcacaaaggctattgcggcagacagcactgccacgatgcccatgcaggcctgggtcaaatccgcttcaggcggtgttacgcccggaagcatcagtgcagttgttgtgatgaccatgcagtacaactaa

SEQ ID NO: 149710 - DNA, 2544 bp, Enterobacter cloacae
atgaaaatacagcaatataaagtacgtcctcgacgcctggcgacactcatcgccctggcaatgacggggtcttctcccacgctttatgccagcgaaacgtttaataccgaactggtcgagctggataacccaggaatggggaaagccgatttatccgcatttgaatcaggctctcaggcaccggggacgtaccatgttgatattattcttgacgatcagctcatggagacccgggatattacctttgccgcagcaaaaacacctgatggaaatgacgtattacagccgtgcctgagcattgaacaattaaaacagtggggcattaagacagcgctttttccacagctggcctcagcgaaaagcgactgtgccgatcttaaggccattccactggcctcgacggatttccagttcaacgcgcagcgtctggttatcagtattccgcaggcggctattgatataccggcgcgtggctatgtgccaccagaaatgtgggacgagggcatcaatgccgccatgctcaattacagcctgagcggggccaactcctgggcgaagaccggaggggctgacagaacggacagccagtatgccaacctgcgtccggggatcaacattgggccgtggcgcctgcgcaactacaccacctggttccgggatgcgtcgggtcaggataaatgggacaccgtttacacctatgcgcagcgggccgttattcccctgaaagcgcagctgacgctcggcgacagctcttccccggctgacgtgtttgacagtatcccttttcgcggcggccagctggcgtccgacgatgacatgctgccggattccctgaaaggctacgcgcccgtggttcgcggtattgcgcgcacgaatgcgcaggtggtggtgcgccagaatggctatcagatctaccagagctacgtcgccccgggggcgttcgagataaccgacatgtacccgacgggcggtgccggggatctggatgtgacaatcaaagaagcggatggaagcgaacagcatttcaccttgccttacgcctctctgccggtgctgcagcgcgaagggcgtctgaagtatgccatcacgggcggccagtatcgcgcctataacagcagcgtggaaaagacgcctttcgcgcaactgaccggtatttatggtctcccgcagggtctgacgctatacggcggcgtgcagggatcgggcaagtaccggtcgctcgccgttggggtgggtaaaaacatgggggattttggtgcgatctccaccgacgtaacccaggcctggtctacgccggataacacgcccaaaaccagcggccagtcctggcgcgcgcggtacagcaagaactttattgataccggaacaaacttttcgattgcggggtatcgctattcgaccagcggctactacggaatgcaggaagtgctggactcctggggagacagtaccgcgctgcaggacaggcggcgtaaccgcgccgaattgaccatgagccagacgctgggcggggatttggggtccctgaccctcagcgccgcgcgggaagactactggaattcgggcaaatcaatggcgtcctggagcgtcgggtataacaactactggcataacatcagctatggcgtgacctggacatacagcaaaaacgccagcgcagcctcgtatggcaccgggagcagtaaaacgtacgaccacgaccagcttatggcatttaacgtcagcgtgccgctggagaaattcctcccccagacgtgggcgaactatggcatgaacgccagcaagaataacggcactacgcacagcctgggcatgaacggcgtggccctggaaaacaacgcccttaactggaacgtgcagcagggctacggcacggacggcgtgggatataccggcaacatgaacggggattacaaagggacctacggcgaagtgacggcgggctatggctacgacaggaacagcgagcgtctgaactacggcctgcaggggggcatcctggcccacgcggatggcatcaccttttcccagccgctgggggaaaccaatgccctgattaaggcacccggcgcccacggggtggatattcgaaaccagtccggtatgcgaacggactaccggggctacacggtggtgagcaacctctccgtgtaccgcaaaaacgacctcacgctcgatccagaaaatatgcctgacgacgtggaactggagatcaatacgcgcacggtgacgccaacgcgaggcgcggtggtcagggctgattacctctctaaagtggggcgcaaggtgctgatgaccttgatggacgacggtcgattcgttccatttggggcgatggtgacgctcgccggagacggtcacagtagttttatcgtcggcgatcgcggacaagtctatttaaccggcatgagcgagcaggggacgctgatcgtggcgtggggaaatcagtccggccagcagtgtcgcgcggatttcacgctgccgaaacaggccacctatggtggcgtcaccctcgttaacgccctttgtcgtcgggaacattaa

SEQ ID NO: 149711 - DNA, 678 bp, Enterobacter cloacae
atgcgttttatcacaacaatcggtctggccgcggcagcgttaccgctgacattttcaatcgccaatgccggggtcattattggcggcacccgcgttattttcgacggtgcgaaaaaagaagcaaccattagcgtggacaacgccgatagcgcaccctttttaattcagtcgtggattgatgcgccggagggagaaacagataaagcgccttttatcattacgcctccgctttatcgactggatggtggccagaaaaatatcgaacgcattgttatgactggttcactccctcaggaacaggaaagtttattctggctcaatataaaagccattccttctgcaacgaaacaggctaacgcactgcaaattgcggtgaaaacgcgtatcaagttgatttatcgcccggctaatcttcacgcgtcaacgcctgaagatcaggccggaaaattaacgtggcaacgcaacgggaatgaaattcaggttacgaatccgacaccttatgtcatcaattttaatgaaatatctgtgggcggaaaaaagctggatgatgtttcgtatgtattacctggcgcgtcggcccggttcccgttacctcatggaaccagcggaaatacgttgacgtttaaagttatcaacgattatggaagccccggcgcgttgcatcaagccagtttgtga

SEQ ID NO: 149712 - DNA, 630 bp, Enterobacter cloacae
atgtcctctacagataaatcgtctcgcggctccccttacgcccaggaactgatcgcgcatctggagccttattgcacggtgcgtcgaacgggccgcggtgaacgacttaaccttgaggttaacggtcaggggctctgttatttaatcctcgaggggacgattgccatctaccgcagcagcgatagcatgatgctttctaccgcccgcagccctgccctgtttggtcttgctaacctgacggacatctatttcaatgattacctcgtcacggtgagcccttgcctgattggcagtatccctactgaacaggtggctgacattatcaaagaaaaagggctatggggcctgctctccagacaactgatgtttgtctatagccggctttataacaacgtgatgccgcagggcgcaccgacggcatatgagatgattcgccagcagctcataaagctgatggaggaagatgaaagttatcgcagcagcgtaacggcggaaaggtatattcgggagaaaacccagctctcccgcagcggcgtaatgcgcattctggcggatttaaaaaccggcggatttatcgaaatggaagaaggcaggcttattaaaatcaacaagctccccgctaaatactga

SEQ ID NO: 149713 - DNA, 171 bp, Enterobacter cloacae
atgttcccccatcaggacaaaagccacatatttaccgcgaagcagccagacatcacgaaaaccatccactttcagggcatggtcaggcggcgcgggctcaacgcggggcacatagctaataacctggcggttttgttgacgaagaggtttcataagcgacggattcactaa

SEQ ID NO: 149714 - DNA, 1209 bp, Enterobacter cloacae
atgaattttatgataagcgcacatgaaagcagagttgatgagatcaaatcttcagttggtgcaatctgtacagagtgcaatcaaaaatcatactatttcaacactaaaaatagtgacttctatgaggaaaaaatttgtctaatctgttctaaaacaaaattgagcggtatccttctcgaggattttttatttactttaacgagaaaactaaaaaaccactacgaattaatagatgcttgtcaactaggtacattttcattaaaggatgtcttgaaacgattcacatacgataatgccaatgtgctcgataagctgtcaattttgctatgccaaagagataacactttttttaaacttgacggaaaatacagaagcaccgttgatgaagttttcatcgaaaaatgcaaaaatgaagctatcaaaaagtggaattcagtggctaatgatctaaagcatgcgcggcgttttacgcatattgaagcatcaagattttatgagagtctgattgggtcttgcgtatatagaatggaaaataacgaagttttcaacgctgcactaacaactatcgatgaagggcataccttttttcgcgcacgtttagtaaaaaatgaattccacagaggttcaatcacgtctaatccagagaaagaactttctgctccaccaaatcatttcgcaacgaatagccgaatgagccctccagggatttcgttcatgtatactgctggtgatcatgagacagcaattgcagaacttcgcccctatgtcagtgatattattgcagttggtgtttttataaataccagaaagctgaattttttcgacttcacccttcttgctaacattcagcacatagatgccaacatccttgaaaaccctagaggagataagtatgttcataatagatatatccttcgtgaactccatgaacttatttcaaaaccatttagagcgaccgacactagctatatagagacacaaatgtttgcggaaactatccgtaactacaataaagggatgttcgatggagtcatattcggctcatcgcaattaaaaggcggattgaattatgttatttttggtgagtcttcaaacgatcaagatatcacttcttcggtcaataattaccatgttgcatttgacagcaataagcatgttaccttttatcaagtaaatcagataaatgcaatatcaagtgaaattagttaa

SEQ ID NO: 149715 - DNA, 1197 bp, Enterobacter cloacae
atgcagaaaaacatcatacatccaaaatcaagtgaaaaaatgaaaactgccattagtgaattaatttccataacacgcattgagaaccggatcccccgtttagattttgcacctaaacattttgatgatattgttaccgaactcaataagcgaaaagaaaagaaaaagattaatacttttcaatgcatgataaattacttccacaaaataaattatttttatacgcacatcctaaataaagaccctgactattccattgatgaagtagcaccaagtgaaagggatgaacttatagagttcctttacaatgcatttttaaagtacccatccacttacactgtatcctttgagtttagcgaattagatctccctgaaaacctcaaaaacaaaaacataaaactaagaagaaatcgctcacctcaacttgatttaaaattgttcggaagcaggcagaagactggaagtgaggtggagttttatggtgcgggcttttactctccctataccaaaagtgactttctaaaggaatatatttacgatttaaatacattcttatttttcataaccgaacatggattggtcgctctcaaagaaaacgtggacgaccttccagaactggggcttggtttatcaggggtgtacgacaaacatcttataaaaaaatataacgccactataacagacaataatttcccgcttgagacatttagtgaatctcttccgctctccatttcgaaatatttaagctccttagaattaaaagccaatcaacctgacaaccccgaggagataatagattacattagcactattatcagccaattgatagaagaccagtcaagcgaagccaaacggatcaggatggctataggatggtatatgaactcgtcatataatgaagatgacacgatggccttccttcaaatctgcatgggactggaagctatttttggggatgaccaagatcaaggaggcttaacgaaaatgcttgctgaccgatgcgcgtatctcatcggtaaaaacatgactcaaagaaggaaaataaaagaaggctttggtaaaatttacacaatacggtctaaaatagtacacggtgtaatcaacaggctaaacgaagaagataaatccatgcgtaattatgccaaagggctattacaggcagcgttaaaaagagaaatcgtaaacctaggatattaa

SEQ ID NO: 149716 - DNA, 510 bp, Enterobacter cloacae
atgactcagcatcttctcaataaaaagaacatggcaaaaagctgtaaggtcggtgttactgctttcgacaaatggggcgtagaaccgatagagcgagccgggcgtgaagcattttatgacgtggcaagtgttgttcgtaacagggttgataatgaactcagcaaaattttggtgcaagacggcaatatagatgatgctgaacttttgaaagcccgtatccggcttactaacgctcaagccgatgcgcaggagttaaagaacgcccgtgaaacaggcgaggtgattgacaccgcatttgctatttatgccctgtcgaaattagctggagaagttggggcaattatggatagtctacccttagctatctgtaggcaattcccggggatagaagcacgttaccttaatgcaataaaaaaggaggtgaacaaagctttgaattgtgcatcgagattggcagatggaattccagaaatgacaaaagattatatttctcaaaatcaaaaacactaa

SEQ ID NO: 149717 - DNA, 384 bp, Enterobacter cloacae
atgaaagttaaagacaatagcctgatggcaaccgccgatgctctctatccggatccggtagtgaaggagctgcaggagctcgcagacaaaatgaatatgagtgagcgcctggttgatatgaatcaggtgatagaactcaccacactgagccgccgtacattgctcaacctcgaagctcgaggtgagtttccggtccgtgtacaggtcactgaagggcgtaaagcatggtatctgagcgaagttatcgaatggatcaataacattcctcgcagctctgaaacatgtcaggtccctgtacccgtcaaaccagatgcatcactatgcctcaaggctgagcgagttcgccgacaggcccagaacggcaaaagcaagctgatctgttag

SEQ ID NO: 149718 - DNA, 336 bp, Enterobacter cloacae
atgactgcaaattacattgagctggtggccggcactgaagcgctggtatctacgctggggatctttgctggagggaaaggcataatccctgcgctgacaccactgatgcaggatgcaacaactggtgctctggttgcatgggatggagccaaagcaggtcaagctgtttatgtgtcctgcttcagcgtcgataccgcaagccagacacaggcgcaggtctacaagactggtgtgcttaatgtcgatgcactcaactggcccgaagaggttacaaccctctcggcaaagattgccgcctttgttggttccggtatttctgttcaacctctggcgtaa

SEQ ID NO: 149719 - DNA, 1041 bp, Enterobacter cloacae
atgccaggtttatacacgccagcggcacttgtccgagttgttagtgccgaggatatccagaagcaactcaaaactctattcactgatttattctttacccgcgcagtaacgttcgaaacgcgcgatatcatactagacacgattgacgaccctaatattccgatcgcagcattctgttcgccaatggtaggcagtaaggtggcacgcgatgagggttatgaatcgaaatctatccgtccggggtacatgaaacccaaaagcagcattgatccgaataaactggccgtccgtccggcgggtgtaacccctgagcaatacagctcgctcaatgcccgaaatattaaagttaaacaggccattctgaagcaatccattgctatccgggcgcgtattgaatggctggctgttcaggctgttactaccgggaaaaatatcattgaaggagaagggatcgaacgctacgaactggactggaatatcaaatcccagaacatgatcactcaggctggtggcgttgcatggtcaggtaaagacaaagcgacatttgatccaaatgacgacattgaaacctactcagaactgagcgaaggtgttactaatatcatcattatgggcgggaatgtctggaagaaataccgctcattcaaagctatcaaagatgtactcgatacacgtcgcggctctaatgcccagcttgaaaccgcactgaaagacctgggcgattcagtgagctttaagggctatatgggcgacgtcgcaatcgtcgtttacagcggtcgctataccgacgaagacggcacagagaaatatttccttgatcctgatttgatggtgctgggtaacactgcgctacagggcattgtggcttatggtggaattcaggatcccgaactcatccgcatgggcatcaccaaagcagaacttgcgcccaagaattacatcgtacctggtgacccggcgattgaatatgtccagacgcattccgcaccgcaaccaatcccggcccgcgttaaccgttttgtcaccgttcgtgtggcttaa

SEQ ID NO: 149720 - DNA, 360 bp, Enterobacter cloacae
atgaatcggctaatagagattaaaaaccgcctcgaagttatcgaacaggcgcttaacgaacagtatccgcgctttaaatcagacccagaaatcacagggcagataacagacctgaaggattatgttcaggaggagcgtaagaggattcagaaacagaaggcgcggggagaattgtcagaggttgaatcagccttcattgagccagccattaacgatgtgtatctgtcatcgctagataaaatcagacgaggctcaaaaccaagcagtagcgttaatggctacatttgcgatacctcatctacactgagttactggttacatgcaattaatgattttgagactaaaaaaaagattaaataa

SEQ ID NO: 149721 - DNA, 1419 bp, Enterobacter cloacae
atgaagaacgcaccgaacctgaaacacctgccaaaggaaaaattcactgaagccgttatctttgccgggtctgacgcatacgcccatgccaggggatgggaagaggggcttggtaaacagatcgccgaagacacgactcctcctgtttaccttgggccaaaacagctggcagagctcgataacctgcgcattgtggatgatggccgtcgtgccgcgcgcatatatctggccgggaatattgagcctatccagattaataatattgccgaaaaactggctctggctggtgtgcaggatgccaaattgtacaaaggcattcccgaccaggagccggaggactggagagaatatctttcccgtctgcgcggacatattgatgtctctgtgagggagatgtcattgcggcacagtttaccgttaagcgtgggttctgatgggtacgatcaggagcaggattatacgttaaagaattatctcccctctaacagcctgagcagcatatacggccctagcggttcgtataaaagttttctggcggtgtcctgggcttgccacgttgcagccgggatgaagtgggctggaaagtcagtatcagctggcgccgtgatgtacgtagtgggtgaaggtggtattggcgtcccgcggagaataaaggcgtgggagaaaaagcatggtgtgaaactgaataacctctatctggtcaaccgtccggttttcccggttcgccgtgaggaaatgcaggagatgatcaaagctgcgcgtgatgttaagtccagaacgggccagccaattcgcctgattgttgtagatacactggcgcggtgcttcggtggtaacgatgaaaacgatgctcgtgacatgggggcctttatcgaaggctgcgacgtcatcaagcgtgagactggtgccacgttgctggtggtgcatcattcaggaaaagacgataccaaaggcgcacgaggttccagtgctttcagggcagctttggatgcagaatttaacattcgccgcgaaggtgacggcggagcgataattctgacctgtacgaagatgaaggatgcggaggagcctaaacaggccgcattcgatttgcgcccggtggaactgtttacggatcgtgatggcgaacttatttcttcgctggtggttaatgatgttcctagagaggcaaaaggagtagatcctgagttggtagggatagcgaagttaacaggtaatcatatggctctatggcaagctatccgaagtagaacaatacaaggtgaaccttgtactagggctgttctgcgcgatgatttgaaagcgacgggcactgatactaagcactttagccgctgggttcaaaagttggttgatgatggattaattatccagaatggtgacgtattaacgatacaatcgttaagagaagtgggttaa

SEQ ID NO: 149722 - DNA, 324 bp, Enterobacter cloacae
atggtgaaaaaattaaatcgggcacagcctgagggcatcgctcaaccaaaaatcgagcttaacagccgctggaaagattctcgcggggaaaaaattactgtcacaggcgtaacggatggccgtattacgtatgtccgggatggatactcccatgagtgtgttttttctgagtatcggttccgaaatgaatttatttaccttcctgaggaaagccgggagtggcaggaggccgtaaaagaaattgggcgtaaaaaaatcgctgctctgcgatcttctctaccgctgagtattgggtctgacggatgggataaggggctgaaatga

SEQ ID NO: 149723 - DNA, 180 bp, Enterobacter cloacae
atgtataagtccgacttacctgcagattacgagattcgcgtactgttgacggttaaaaacggtcaagttacagagcgccgccttcgtccgaatgagatcgtggccacaccggaaggttttatccaggctgttcgtcaggctgctgatgcacacggtttaactgctaccgacaaggaataa

SEQ ID NO: 149724 - DNA, 288 bp, Enterobacter cloacae
atggctggaacacagcatacccaaactcaccccaaatttacatggctattccttggcactccaaatggccacgcctgcacacccgtagttctgcgcaccgtcgccgagaccgaagatactgcccgtaaagccttctgcggctggaagttaacctttgccgcaaaaatccgaaccgaaagcccgctttctgtgtcgtttatggaccctgaaaaccaaatcctttggagcattctgggtagcgatccttacagcgcggatgccgtgccaatggaggtgcgtcatgtataa

SEQ ID NO: 149725 - DNA, 831 bp, Enterobacter cloacae
atgacaatgtgcgttatttggaaaggtaattttggcaatatttatgcagcaaccgattcgcgactgagctttgaagaaaagaggttagatcattgcgttaaaatatcacgaattacatgtcttctacatgagccaggtgatgtggatgatattagggatacgagcaagatacttgttgataaacgtgaaattgcaacattgttttgtggcggctttacaaatgcttatattattaaggagagtcttactgaaatcttaaataaaatagttcttatgaaggagtattccaatgtttccttttctgaaattatagatgtggcattctcaatttatgaaaaaacatcaagagatatgtttgagctattaatgagtgaacgatttggttgtattttttatatgataagttactgccctgtatatagagaaatgcaagcttttaagtttgagttcaaaataactgcaaacggaattgattatcgtaaatataagctttttgaagatactaattatgaaattagcggaagtgggctaagttatttaaagcagagcggtaaagttgaggatttagtcgatgaagccagtcagaaaaatccttatacaccacttctagatatacttaattctgtaattaatagcgatgaatgtgactctgttggtggtgcaatgcaatatatttcttgtaagaaagacagtctcacattatgttgtcatctattatttgaagatggtcagaataagtacatgaaagccgggattgacgtaaatgaacttaatgaaaaatttatgccccgtggattgttttttgagactgatgtaattgccaaaagataa

SEQ ID NO: 149726 - DNA, 228 bp, Enterobacter cloacae
atgaaaaaaatggcagttgttgataaaaagggtctcgagtacattcctaacattgaccgtatgattcgtgagaaagagtgtcgggaactgactactcttgcgaacagtacgcgctggaagctggagaaggaaggtaagtttcccaagcgtataaaaattggtgctacagcagtggcataccgcctctcagagattcaagcttggataagaggcgattggataagctga

SEQ ID NO: 149727 - DNA, 642 bp, Enterobacter cloacae
atgaccgatgttggccaggcggcaggtaagcgtgatcgggttcttgatgaggccgagttagggcagctctggaaagctatctttgttgaacctgatatcaagttgatgtccgaatacaccaggaaaatgtttgttctgtgcacggttttcggatgccgcatgagtgaggcccggttatcagaatggaaggaatgggatcgaaaaaactggatatggtccgttccaaaagagcattcaaaaactggggtggaaatcgtaaggccagtacccgaaggtctgaggcagtgggtaacggacgtctacgaggaaacaaagctttccggctatgttctgggtagtctgcgtatcagggaaagcgtaagcaaaattggtggaaaaattggtaagcggctgggccacgaaaagcaatggtctctacatgacctcaggcgaacgctttcaacacatctgaatgatttaggcgttgagtttcatgtcgtggagcagctgttaggccatgtattacctggtgtggcgggtatttacaaccgaagtaaatttatggcgaagaaactggacgcgttagatctctggacgacatacctcaatagcatctcaggtgctgagtcaaaagtgacaatcctcaaacaaaaggctggttaa

SEQ ID NO: 149728 - DNA, 243 bp, Enterobacter cloacae
atgagtttcatttacaggcaaatgcccgataaagggaaaaacatgttttcgaaaacggcccagagttacagcatgggttttgcgacgaaccttgcagtaattttcgtaccagtaacagagagcgtcctgaacagtgactggcctaagacgctcctcggactgaatctttatctgtatgcgtggatctcgtttctctgcaagccacgcccggcactcatcccgcttctccctggcttgttttag

SEQ ID NO: 149729 - DNA, 1218 bp, Enterobacter cloacae
atgtcaaagatcaaatccctagagatcaaaggttttaaatcaatttgggatcaaaaaatagaatttggcagattaaacgtaataattggaactaacggagcgggtaaaagcaaccttcttgaagctatagccatgatttctgcatcggtcgaaggtggcgtagattatgagcgtctgtcacgtagaggctctagattgtcctcacatgaaattttcagaagttcctttagaaataaggatcgtagaaatactttaactctcgaagctgagcttgaagatctttcgtatcgaatgagcctaaacgcaatcaatggctttacttacaatgctgagtcgctaaaaagcaatcttggcgtaactcttgccggacgctcaaataatggaagcaccattttcggaaaaagaattgaaggtgatttaaaaaaaacaaatagtgttttatccatttatcgcgctctattgaaaagcgatagcaaaatttctaaacaattaacggatttggatagctatgctatttactcaccttcaacgcctatattaagaggcgttgcaaccgacaacagcaacaaatcaccacttggcctatatggtggaagactagccgatgcactaagcgaaacattcaaatacgctgacgaaaccaagcaaaatgaaatttttaatttcttcgaactcttagattggttttcgactttgggcgttaccagtcaaattgatagttctttagtatccgaacatgtcagtttaggtagaaaagtcgtcaaatataaagatatgtatatgaaatctaatttcaatgatctttatgcatatgatgttagtgaaggtgctttatttattttatttgttttgattttgattgctcacaaggattctccaaatatatttgcgttagataatgttgatagtgcattgaatcctggcctggtacgcaaactaatggaaaaaattgcatttttcttaagcagcgaaaaacactgccagaagcagatttttttaaccacgcacaacccttgtactctcgatgcgcttgatttgtttaacgacgaacacagattgattgtggcatcaagatcatctgacggacaaagcatttttacgcgaatttctccgcctaaaaacatgaccagggaaatttgggaagaacaatatttcggcatgaaactatcagaaatctggctatcgggggcgtttggcggcatgccaacggaattttga

SEQ ID NO: 149730 - DNA, 741 bp, Enterobacter cloacae
atgaataaaccgctcttatatttacttgtttgtgaaggcccatctgacatcccagtcatccgtcgggttgcagaagagatttgtcgcaagacaaaaaaagatgttgaaatccggcatatctcaccgcaacaagactccacaggaacatgggaaaggcatggttatgttggggtgacgaaatggtgtgcattatatggaaataaagatgagggttcacttagccatttatctgaggcactcaagaaagtggtattgagaaaaaactggcaagcgcttgtcaaaggggctaatgctgatggattaataattcagatggatacggacatcgctgatcaacttaattttttgaagaagcgattcgatgaaaataaagatgatagaagaaaatactgccaagactcgttattaaataaattaggtttaatcaacgttcctgaaaacctaatatttctacttccgtcctactctacagagacatggattgttgcaagctttgacgatacccatgatattttcaaaaacttatcaaaaccgatcgcttatgaagatcttaagaattgtgaaacgttattaattggtgctggtttcaaaaaagaaaggaaagggcccgggaagtacaaactaaaaaaatcgcatgatatatatattccttatgcagagttaatcgcctcgaaattggatcttgtaacttctcgatgtaaagaattaaaactattcgaaacagaattagccaaagcgtaa

SEQ ID NO: 149731 - DNA, 369 bp, Enterobacter cloacae
atgggggtgattgtgactgcctacaacatcctcccgatgggaaagccgcgcatgacgcgtgcagataaatggaagaagcgcccggaagttatgcgttttcgggctttctgcgaccatgtccggctcctgggtgtcactatgcccgaatctaattcacacattaccttcattcttccaatgccaaaaagctggagtaagaagaagcgccagcagttcgatggtaagccacaccagagtaaacctgacttcgataacctggttaaagcactctccgatgccatttatgaagatgacgctcatatctgggatgcacggattacgaagctatggggtgaagtcggtcagataattatcaggaatatcgactga

SEQ ID NO: 149732 - DNA, 201 bp, Enterobacter cloacae
atgaagaaaagctggttcactcacaccgggctgacaaccgaagaagccaatgagctggtggcgcgctataagtctaaaggtgttcctgtcgagaagagtctcgctattgaccctcgcttttggatagtcagcgcacttctgccgcagcaaaaatccgcacctaagacgcagcaaagtatgcgttcacgggcatgggggtga

SEQ ID NO: 149733 - DNA, 903 bp, Enterobacter cloacae
gtgactaaacagaatggtaccaaagttgctacagaagaaaacataaatgctggagataatccagtctgcggtgtgataatgcctattgcgaaaacagaagggtataatgacaaccattgggcagatgtgtatggtattttatgtgaagttgcttcagatgcaggattcagccctaaccttgtgagttttgatgatgatgttggaataattcataaaagaattgtacacaacatatactcaaaccctattgttatttgtgatattagcagccgaaatgctaatgtcatgcttgagctaggtatgagattagcattcgataaaccaacgataatagtcaaggataataaaactccatatagtttcgacattgcagcaattgagcacctcgaatatccgtctgatttgagataccaacttataaatgaatttaaaattaacttaaaaaagaaaattattgagacatataaacgctcaaccaatgacccagattatacaacttttttaaagcatttcgggacgttcaaagttgcaaagcttgatgaaagagaagtgactggcagtgagtttttggttgctgaactaagggatttgaaagagcttgttttaaactcaattgcgatgacaagtaaagtcaattctgaaacagtatcacttaaaaaacgtgcattaggccaatctgcttttgagacatatgcattcactttcgaagataaactcccggagtcgttggatttatacgaaataaacacgctcttaaaaaacctagggctcaatattgcttctcttagaagaggcgtgaatggtaaggcactctttgtagaatttcttccttcactgggaacaccttcatttgcagagatgtctgataaattaaatgaatatttaaataatataaagtcttaa

SEQ ID NO: 149734 - DNA, 429 bp, Enterobacter cloacae
atgctggacaactggttagatttggaactgaaaatgaactttgaagaacgtttgcaaagagctattgatgaggcaggcatttctcaatctgaactggggcgccggataggcgtcaactcgcaaaccgttagccattggtgtaactcagggattttcccgcgcaaggagaaactggttctcttgcctgaagcccttggaaagcctctttattggtttttcatgtctgatgaagaagagcagcacgttgcttctctaacgcagagtaaaacagttttaaccccccaccaatcagcactattagaagtttttgatcaacttccggaagccgagcaggatagattcatttccttagccaaaacccggcttgaagagctcgatgcgtttatggcggaatttttacgtaaaagaaaaatagatcctcagccataa

SEQ ID NO: 149735 - DNA, 618 bp, Enterobacter cloacae
gtgaagcgcattcgaattaaaaaaccaagatggatctttgttgtattgtttattcttttaatgcttgctccattttttatcaagagtatcaattacatcgattactttgaagggaatttgttaccggaattcacaggggtgattttagaatttataatcattctttatattattgatcatctccaaaggaaaaacgaaagacagaataaagtaaaagcagaaaaacgacttcgcgaaatgtttatttttttctttaacacattaaacaaacatgtccccgaaagttacagagtagggaagttttatgggagtgagcacgaaaaaaatagtaaagaattaatatcgttgaaaggttatattgaaactcatggattaactgagagtgcaataaaagatattcgtatacactgcaaaaatgacatagatcttttcaatagctttgttccagtggttgcgactttggaagaaaaacatttaaaggcatggatgagaatttcatattatatgaatgcaataatcacagagcgagaaacaacacaggattcagtcattaaaattattgaaaaaattcaatcatttgatgacgaatcctttagcaaaaagctcattgttgactaa

SEQ ID NO: 149736 - DNA, 1377 bp, Enterobacter cloacae
atgaactggtggctttaccctaagcagaacgaatttaaacatgactttcccactattggtgtgtgtgtcgtctatgtgctcgtggtgattgtttgtactggtattcgggctgtcacctggccgggtaataaacatgtagattcaggttttcttgttgatgccgtggtaatacctgtcgctgtagtaacctttttagtacaggcgttctgtattgcgtataacgcgcacagacactacatagaaacgcggttattgattgcggcacggcaggaatacaaggttgtcagctatgccaggcgtaacatcatcctggctggctggtcgatactgaccccgccaaaggcaacaaaggagctggcgctgaacatgttgaaactggagggggagtttccgctggccgccaaaatgccgttgaagattgacctggataaatcattcgatttcacgcgagccgggcaggcaattatctacttcctggcgccgatgatggaaaaactctcccggtacaggcagattgaagcgcttgtatgggtgcgaggtggggatgaatcctgtagcgatgaactccggcgtgtgcttgaacgttccgggatttcaaccaaaaaaatcacatttttgcctgaatgcccggactatacgttagtcacagagtggataaaacaggcgaacggctacgttgttgaacgcctgcttatctgtgtagatttgcattctgaagaaggggaatgcaagtggatggagaatgctaccgcgcttctcctgacgaattactacgttaaaacggaaggagaaaaacctgtttatttatatcaaccgatgacgggggttattgacgtagaaagtgcagtacctgtttatctgcgtgcggaggctgtcagtaaacccaaacagatctggtataccggtttaacgcgcacagaaaagtatccgctgctggaagtgctggacgaaaaaaaagtcgtaccggatcggctggagcttgaaatgtcgctcggtgagcattctgcagggtatccgtggctggcactggcgctggcatcagatgcagtaacgtatgcacagggtgaccagtttgtggcggcatccgaacagaaaaagttttctattacggcggtatcatccagattaacccatcagcccgattatccggcggaaaaaatgtacactccaccgtggtcttccgccggactatccggaatgatgttatttttcgctgttatattaactatgtttggtttcagcgttaacgagggggaagatatttctggcgggttcctggttattctgtttgtaatatttactggattgtttacggctgcaggggtatttattacctggctacagggtgataaggcttaccagcacatggggatgtaa

SEQ ID NO: 149737 - DNA, 708 bp, Enterobacter cloacae
gtgctgaccgcgctgctgttggtggccgcaggttgcaaggcttcagagccgccaacacaggtagtgtaccgttttgatgatcatcgttatctggagctgaaggggtgggactgcgaaggagagctctggtttacggatacgcaaaaaggcattcattcgcaaatagccagtcagttttatcgaattttcactataaagttcgtccacccttcagaacgttatattgccattccgtggtggggaaatataactggtggtttttcagtatcaaaagactatggaaaaacatgggaaaaaggtggtgcatcaatgtcgccgggaggcaatgagcctgatggaagtaatgccccttattatgacgatgttatttcctttactgttgtgaacgatcagggttttttgcagaccaaacatcgactgtatatgtcgtccaaaccgtttgacgacccgcgccttgccgctggtggtcctgggattgaatataccgttgacgacggaactgggcaaaaggtaagcgggaaactggaaccccgttttcctgggtgggcctggggaatggtgtatatgaccaaacaaggtttagaaggctctactgagcaacttaaaaccaattggcacaatcaacccgataaggttccggaagtgaagggatacaccggctgggaccatatgcgctgcgatatggacgcaggaaggaaaggaaactga

SEQ ID NO: 149738 - DNA, 711 bp, Enterobacter cloacae
atgaagatagaacgtacagcaggtattgccctggtgtcagtgctggtggccgcaggttgcaaggcttcagagccgccaacgcaggtagtgtaccggttcgatgaccatcgttatctggagctgaagggctgggactgcgagggtgaactctggtacacggatacactgcggggtatccacacggagcctgtcagccagttttaccggatatttaccaaaaaatatgtccatccatctgagaaatatattgcaataactggttggggtgttggtggatttagggtttcgaaagattatgggcagacctggcaaattgcacagttttcccctggtgaaaatgatcttaatggaatgaatgccccacagcaggaagatgttctttccttcacggtcgtcaacgatcagggttttttgcagaccaaacatcgactgtatatgtcgtccaaaccgtttgacgacccgcgccttgccgctggtggtcctgggattgaatataccgttgacgacggaactgggcaaaaggtaagcgggaaagtggaacctcgttcacctggctggccttggggaatggtgtatatgaccaaacaaggtttagaaggctctactgagcaacttaaaaccaattggcagaatcaacccgataaggttccggaagtgaagggatacaccggctgggaccatatgcgctgtgatatggatgcggggcgttaa

SEQ ID NO: 149739 - DNA, 2139 bp, Enterobacter cloacae
atgacggaagccagacaaagcccgtatgccccacggatcatatcagaaggggatatcccgatacacaaagatttgggggaggtggcccagacccggcgcgttggcgtgccgcgcccgatgccggggattgtgatcctggttcatggcgtgaacgacgtgggtgaagcgtaccagaatcaggagaagggcattattgcgggcctgagtaagcgtcttaatcgtcaggatttttacgcgcatgaatggggggaatatagaattgcgcaccccggccgttcaccggttatcccgttttactggggatacaagccggtaacgcatgaggattacgttgcagaccagcaacgctacagggaagaggtttacaggcagggaaacaatgcgcacctgtcgtttgatgcttatcaggaggataacgaggagaataaagcggcgctgggtaacgacggcaaaggcgcgtataagtaccagaacgataatttcaaaaacgccctcgatacgaattttgccaaaggtggagggacgtttgccaatgcgacaaccaacatccccgatatgttaggaccgggagctggaggcgcggcgctggccgccgcagggtttgccacattgcacatgaacggcggcgattacacgcaccccatctttccgaacccgcaccgcatctatcaattctttgccgcgcagcggctggcggatttgatccttcagatacatgaaccgctggtgacgcgaaatgatgtgattaacgtggtggcacatagccagggaaccatcatcaccatgctggcaaatatgctggttaaacaggcaggatatgagccggttaactgcgtcattctgaatcactcaccgtattcgctggaaggacgtcttagtgaagacgcccagcccggccatcaccagacggcgtttgcccgccaggagacgtttaaacacttctgcgcactgatggcaacccagtacaaaggcggagagctgtcagaggcagatatgctggcgatggaagccagctgcgcatcacgcaagccttccgataacccattgaggaaggatgctaagtatcgtcgtgacaataacggcaaggtttataactactggtgtccgcaggacggtaccgtctccctgcaaaacatccagggatttggctggcggggtattcccgataatttagctgctggcattcctaacctgcgtcagcgtgtgttctgccagcaccgctgggtagggcgactggagacggaaccgtttaagatggcaccggagcgaaagggggatttcagcactacgccggtgatgaatgcaggatattcgtacagcgatgtggtgattaacggcgaagagctgccggagccgtttattttcaaactcatggggcaggataaccatcccgatgatgatccgaagaccagtgataaaccgtacaccgcgtatatcgatccgaacagcccggatgcctacatttcctattcagctaaagccagtgccatttcgcgcacggcatcggctacctatgcgcttgataactatcagcgtatcagctggcaaccgggtcatgtattaacgccgaatgagctgcaggtggaaagttttgaccgggggcatgaagttattcgcggtgaagtgacgggaacgagagatttttctcagttgacgctgacctggtttaaatcccgtgaggaacttgaaaaggagtggcagaaaaccgatccggtaggttacagccagcactcttctatcgtcgccagtgaatttgcaccgtcgcacgcgatggcgttcgacctggctatcggtcagtgcaagtcctttgactatcaggcgggtaagttctgggaaggcttgttacaccgcgcagactggcgagacccgcagaatgggttcaagtcagctgtagattattacagaaccggaaagttgaatgatgaaacaacaaaatggtttatgaataaacctgaagatgttctgcctaaaggtgagttcggcgtggaaaaccagtttaacaatgccacgtcggttaagccatcccgtgatctggcaacagggaatcaggaagtggcaaatctacaatgggatatgcctaagccaaaatctgacagcgacctgggaatagcgaaacaaaaatcgtggtgggaatcgtga

SEQ ID NO: 149740 - DNA, 2511 bp, Enterobacter cloacae
atggaaagaccatcaggcattgttcagcaacaggatacgttaaaccgttatttactgtattttacacgaggcaaatctgttttaccggatgttcactcttttaccggggaagaactcagtaagccctaccgctacaccatccgctttaccagcccaacatcaaacattgcagtcaacgaagtcctcaatcagagcgcggaatttattctgcgtgccccgaatccgaaagcaggctggtacgatcaggagccctggctgccggtgcgccagattaacggggcgatcacgtcgttttcccgtctgaagtcatctgccgatgaagccctgtacgagtgtgtgctggagcatgagctggcgctgctggaccgaaattaccgctcggccgtgtacatggatgtaaccgtacccgagctcgtcactcagctgatgaaggaaagcagtctgtttgaaggctacaacattgattttgaccagctgagtcgcagctatccccgaagggaaatggtcattcagtggaaggaaaccgatctccagtttatccgccgtctgctggccgaggtagggatctggttccgctttgaaaaccacgacaaggtgcagggcgaaacggtggttatctttggtgacggtggccgccgctatgtcttcagcgataagccgctgccgtacgtccgccattccggcatgaccagtcataaagaatacattaccgagctcgaagaacaatacgaactcattcccgaaagcgtgctggtgcgtacgtataactaccgcaatccattttcgccacaggcggataaaaccattttcgataatgatattcccgacgggataactagcggcaaacagtatcactatgccgatcattatctggagaacggcgatttttacggtgaagaggcggaaacagccacgttctacgcgcgcctgcgctatgagcgcctgctgaacaaacagagtgtgctgggtggaacaaccagtgacccggcactgctgccgggtgtgatgttccacccgacaggggatattcctgacgggtttaagcacggttttcttgtcaccacaatgacgctatccggcagtcgcgcacagcactaccgcgccatcctgaaagggatcccttatctgaacggctacagctatcgtccggaatatctgccgcgaccggtgattgccggtacggtacccggtcgcgtggcggccatcaatcgggataacacttatgccggagtcgatgcccggggccgatatcgcgtgaagtttgattttgacctcgacgagaaacgtgacggttttgaaagtgcgctgatgcgtctgggcagaccgtacggcggggatgtgtttggttttcatttcccgctgctggacggcacagaagtggctgtagcctttgaaggcggcgatccggaccggccctttattgcgcatgtcatgcatgacggcgcgcaccctgatctggttacaaaccgcaacgacacccgcaacgtgatccgcactgctgcttcaaacaaaatccgcctggaggaccgccgcggtcaggaacacatcaagatttccacggagtacggcaagagccaggtcagcgctggacacctcgttgacgcagagggaaagcagcgcggcgaaggtgtggaagcgcgtactgacaatcacatggcgctccgtgcggccaaaggggtgatgatcaccacggaggcgcaaccgcgtgctgtgggtaagcaactggatatgacggccgccattgcgcagctggagaaagcgttgtcgctggcaatgacgttgcaacaaagcgcactgacggccggggccagtaatgtggaaaccgatcagcaaaaccagctgaaccaggtgctgagtaatctggcagggccgggtctgcttacctatgccgacaaagggcaggcacacgtcacgccggacagtctgcaactgtctgccgggaaagatgtgattgtgactgcgggtcaggataccagcgtaaacgtggtgaaaaaattctctctggccgtgggggaaaaactctcgctgtttgcccgcaagctcggcattcagatgattgccggtgccggggatatcacgacgcaggcccagcgcggtgccatgcatatgctctcgcagaatgatttcacgatggcgagcaccgacgggcagctgaacggcatcgccaaacagggcatacagctggtctgtgggggaggcgggatacgcgtcagtccgatcggactggtcaccatcttctcgccgacgggaatcgaactgaaaggacccagtctgaagtatgacggcccggaaagcgcgcaggtcacggtcccgccgttcaatcagggcgcatttaagctccgctaccagctgcacgccggagatgacccggagcaaattctcgcgaacaaaaaattcaggctgaccagctcggccggaaaagtggtggaaggcataacggacagcaacggccattcagcattactcgatgccgatgacctggacacctacaaaatggagttaatggaatga

SEQ ID NO: 149741 - DNA, 957 bp, Enterobacter cloacae
gtgagtaacatcaatttaataacaacttgcacaaatggtaaaaacagtgatggcaaggctatattgagtttagcccactatatctctgggcagacccctccaaatgtattggtgaactcttggtgtaatgctttaaatgaatccctaaaaacatctgctacagtatgtgctgtagatctgtataagggggggcactgggctactgctaaagaaatattaaaatcctatcatgttgatttatgggttgtttctgctggtcttggcctccttcactatactgatcaagtcgtaccctataaagcaacatttgcgattgggtatgatgaatcaataccgctatactcacgtgaatatgtaggcaaatctttccatagaacatggtggaaagaattaacagagagatctccattcatttctgagcatccatcatcaattaaaagtttgatgaaaaaaaacaaggaacactattatattatttgtggttctcctgattacatcaatgccattgaattagatatcattaatggtcttgagtatctggttgattctaaaaagcaattattaattattacatcaaagataattaacgataggctaatgaattatttatttaaaactaaccatgatatggctcaatggttaaagtgcaatatgctcatgctaaatgttagtatggcaaagcatattattcgtgagtttactgaaagaggcttggataatttaagtgatttttctcagaggttagcaactgaattaaacgaattgcctgcgcgagaagtaaaaaaaggaattaggcgtagttctgaagaagttgagttgttcattttgaaaattttgcaacatcaaccacgtatcagtgcaacacaggccctgcgcgagtttcgtgactcagggaattcattcgaggaaaagcggttccgtgtgattttcaagagtttgacgggtagcaaagcttga

SEQ ID NO: 149742 - DNA, 1251 bp, Enterobacter cloacae
ttgtcgaagctaaaatattttttcccggatagtcaggattttatcgatcctagtttcgacttcttccacgaaacgcgaaacgaacatcgtgttcgtcaacgtgacgatcattatccacatgagatattctctcgcccctatgatggtatgttggtttcgaaagcagtagtcgacggtcttggaagcggtgaaagtaaatatacgcgcgcccaacgtttacgctactttcgccatggtatgaaacactttttccgcctaccggttaatatggagactatgggcgactgcggtgcattcacgtatgttaatcaagatgttcccccatatcgggtagaagaggttattgaattttatgaaacctctcgctttaactatggggtttcgctcgaccatattgtgtttggttacgaaaagccaggagagacttttggtggcgaagtcttagcagagtgccgtcgtcgccaggatattactctcacattggcacaggaatttttagtcaaagcacaaaagagttgcttcacgccatttggcgtagcgcatggttggagcaaggcatcttaccgacagtcagtagaagcacttttggctatggggtataaaaatattactatggggggtatggtaccgcttaaaacggtgcagatcctcgaaactcttgaagagattaaacctcttcttaaaagtgatacccgagtgcacttgcttggaatcgctcgtccggaaagctttacggattttattcgtcttggcgttactagtatcgactctactaccccccttcagcaggcgtttaaagatcgcaaaaacaattaccacacgccagaaggtcgtgcctatacagctgtgcgcgtgccacagttcgatgctaacccaagcctcagccgtaagataaaatctggagtgatagaccaggatgtggctcgtcatcttgagaaagatgctatgcatgccctgtttgagtacgataacaacgctttatctctggagaaaacactggaagctgtgttggcttatgagcgtttacactcaggagagaaagaggcagagaaaattcgatctgattacgaacgtactttgggtgatcgcccctggcggaagtgccagtgcaacatttgtaaatccattggtatcaacgtgattattttccgtggcgccgagcgcaatcgtcgccgtgggttccacaatattcaagtgctgtacaatcgcttacagcacacattgtcattacgctcagaggataaatcatga

SEQ ID NO: 149743 - DNA, 1128 bp, Enterobacter cloacae
atgagtgagttccgtgtccccgccttgcgtatccggcagggtgagaagagacaactttttagtttggctattgaaggcaaacaaattaataaaattgccgccatttcacgtattcgacgtggagatgagaacttggttgggtatcagcgtccggaagtacgtagccatattaaggaaatccagcgctacattgaaagctccaatcccatgattcccaatccagtcattattgcttttgaccagcgtgttcgttttgaaccgctgatggaaaacagtgatatggggcatctcattattccgtattctgaagaagcaaacttcgagaaaccagggtttatcgttgatgggcagcaacgtactgctgcgttacgagaagcagatatcagttcttttatgatgccggtatccgcatttatcgctaatgatgcagaagaacaacgtgaacagtttatgctggtgaattccaccaaaccgttgccgaaaacgctgctgtacgaactggccccgcatacgcatggtcgcttgccctccgatctgcaactgcgcaaattcccttcactgctgacacaacgtcttaactttggtgaggggccattggttgggcgcattaagactgcgaccaacccggacggagtgattgctgataactcaatgatcaaaatgatcgactcaagtctacgtgagggagcattgtatcgctttcgtgatccggcaaccgggcttggcgatgaagcaaaaatggtcaagttgctgaataacttctggtctgctgtagaaactgtgttcactgatgattgggataaaaagcctcgttactctcgcttgttacacggtgtgggaattcttgctctcggtagcctgatggatgaaattgatcaggttcatcaggactataaaggtgaacctggctggactgagatcccttcctacactcgttttgtcgaagagctaaaccgaattaagccgctttgtgcatggagcagtggcgtgtggaacttcggaacagatattgatggtcagcctattgttcgtaaatggaatgaactgcaaaatctttcaaaagatatatctttggttactgattatctggtaaccaattatattaaagtagctaatgctgacatttaa

SEQ ID NO: 149744 - DNA, 3057 bp, Enterobacter cloacae
atgactacacatactgtcgcgttttctgaaggtgacctggtaatatcgccattatttgacggtattgctaaaattgtgagtattctctcaactgagcgtgccgagattgcctggttctactctcctttagaggaggagattaaccgtcaggaggtggatatccgcgcactgacggcagcgacgctctatgaggaaagcaccgtttattttcgctctcctgatagcggcatctggtgccgaggccgctatggcgggccccgaccgaataataagcacttactgattattcgctctggcgaacacgcggtcgttgatttggcggagatgtactaccccaactatgggcaagggcaggcaatgaaccccgctcattttctggcggcacgctcaaatgatgccccctatttctaccccctgcgggaaaaatttgtcagtgcgtggatcaaacagcgtgctgcctgtcggtcaatgtcgtcgttaatcagcagtcgtgtagagattgaacctcatcaaatagcggttgttcgccgcattcttcaggaccagaaccctaaatatctgctggcagacgaagtcggattgggcaaaaccatcgaagcgggactggtcatccgcgagcatattctggaatgtaaacgtgaagcccgcgtactagtggtggtgccgcaggtattgcaaggacaatggacgcaggaactggtcgatcgctttgctctacaggaagtaatgagcggagggcgaaacaaccagatccgcttgtgctctccggaagaactttgccagccagaactgatcggctggaagcccacaatgatggtaatcgacgaggcccatcaattagcccgacaggcatgggtcaatgatgaagacgaacaggcacagtatgccgcaatgactgcgttgtgccatcatgcccgcattgtgttgctcctatctggcacgccgatgcacggtaacgaacgtcacttcctggcaatgctgcactgcataaatccacaggcgtggcaacttaatgctgtgggaatcgaaaaatttatgcgccgcgtggcagagcgcgagcgtctggggggaatttacagttccttgacccctgaaacgccaaatggggtactggaagaggttatcgaagagttacgtcagctttttgccgatgatgagcaactgcaggcgcggattgatgtgctgagtcctctggtcgacttttttgctcctgatgaaagcgaagagcgaacagcggccattctggtattacgccagtggatcggcgagcgctaccgtctttttcatcgcttgctacgtaaccggcgtgaagatcccgcgttggaatatctctttcctgggctggccggcctggaaaaatgtgtctggcccgtcgcctcgaccgagctcacgctggatgaaacctttgatgcttggcgtgccgcagccttacgcaatcccgtgcaacaccaacatctagatgccacgacgcttgataaatgggtagatgcgctatttctcaacccgctggtgatgtcccgcctggctaaaaatgcactggcaaacgggactgccagcgaagaagagtccaattttcttgagcagattattgaaacgtcccagcaagagcagaaagccaaagatgcggtgctaatgaaggcgctgacaggttggtttgaaaaatgtcctgatggcaaagcggtcatcttttgcggtgaaagctctgaagccgccttcctatctaccaaactgcaaattcaggccccctgggcggtggttcgtcattcgccggacttgcgtaagcagagcgaacttccggatgacagttggcaggtactgatctgtgacaggcgcggtgaagacggactgaatctgcacggaaaaaatcgtcttgcggtccattatagtctgagccgcgactttaaccgttttgaacagcgattggggcgctttaaccgctattctggaaatctacgcggcgttaagcctgtgaaaagcctgattttactgccggagcgtgatgggctacgtgctgactgggtgaaactactggacgaaggcacgggattgtttcatcgaagcgtcgccagcctgcaatttgttctgtctgaacaattagagatggtatggcgtgattacgtcgggcaggggcttaccgtcttccatgaggcgcaacagcgcctttcgggagaaaacggcttcatcgcccaggaacgtaagcgcgttctggctcaggaaaacttgttatccatggagcaggaggtcatcgctgcacgcgagttttctgagcaactggccgaatctgaagatgaggctgaagcgcaggcaaaagatatgctgacctggatgcgcaaggcattagggtttaagcgagagcaatattctgaaggaggatttcgtctgcgcttcgagcgtggcgaatatcaacggcaaacgctggtggacgtaggaacgtttattgataactgcctgcttggtctggatttttcagaaggataccccccttccacagcgttgatgagcttgtctcgaacggaagccggtaaccacaaacacgtttaccccttgcgctatggacagccttttgccgaaaccgtatggcaactgatgcagagcgatccgcgaggagcaagtatggcgctgcttcgggttctctccccagcggttgcgctgaagcaaccgcgcacctggttccatttccagtggctgagtgaagcgcaggttgaaggtgaaaaccagctagccgcgcagcgtcgtggtgatgagtgctttagcccggaggttcataatttctggctggatgacggtggaaaagaggcggatccgcaggtcgttgtttccctgctggataaaccttacgatgaagatggtaatagcttgttccaggatattaatcttcgggaagaggtttggatgcgaatgccggattggtttgagccgcataactggaaagagaccgtacttgctgccgcggagcaggcccggagaaacgtggatgctcactatggcgatcgtcccgtccgccatcaattgcttgcaatgaaggcgattattctgtgtacccgcgacatgctgtaa

SEQ ID NO: 149745 - DNA, 2451 bp, Enterobacter cloacae
atggaaaatcaatggcaacaacttcgcgcggttctgaatggagaacatagcgaacgcgatgggctgagtggtcagttttttaaccgcctgctttactgtctggatgatgtacaggcgggagaatgcgaccgcctgcacgcattttatgatgcactgcaatgcgcacgggcatttgggctgatgccgttaaggctgccgtaccgacaccttaccgaaggcgcaatgctccagcattttggtttgagacgggatcgtgactacccaggtgaactgtttctgacgcgcgaagcggaagagattgatccctccctcttaccggtctggaaaggcgagcagcgccgttttctggaaaccccaccgctggatgtccttttgccctctgtactcaacgatccgcgttatacgcactacacatctgcagggcaacagcaggcggtacgcacggtgttgaccagcgacagagataaaacgctgctggtgaatctgcccaccggagccggcaaaacctttgtgattcactcccagatgctgacttcaccgcgcaggctcctgacgctggtgattgtgccaaccgtagcgctggcaattgaacaggctctgcgggcgcaagaggtgatgcaacaggccgggcaggatcacggtggcagctacgtctggcatagcggccagtcgattgaagaacggaatatgatgaagttgcggctggcatccggcgagcagcgagcgttattttgctctccggaagcagcgacaggcgggctcttgttacagctgttctcgcttgcggagcgcggactactgggcgccgtgatagtagatgaagctcaccttatcgatcaatggggggcggaattccgtcccgagtttcagctactggcacccttggtgcgaacgttgaaggctacctcttcagacggtgtcaaagtcgttctgctttctgccacgtttagtcaaagcaccctgaatacgctcaaagcgctctttgccggtaaacgacaggcatcagtgattgaagtgaacggcagttttctgcgtccggaacccgtgtggtatgtcagcgaagctgtcagccacgaggattaccttacgcaggtggaaaacgccattgctcgcttgccggcgccaatgatcctctacaccaccgaagtggaacaggccaaattctggtaccagtatctacgtgagcgtggttatcggcgatgtggattattccatggtgcaacgccaatgcaggaacgtgaaggtcttatccacgcttggcgtaacgatgggctggatatcatggtggcgacgtcggcatttggcgtggggatggataaaaataatgtccgttccgttctgcatgtcgcagtgcctgaaaattttgatcgtctttaccaggagagcggtcgtggcggtcgtgatggtaaagcatcggtcgctcatattattttccatcacaaacaactacagatcgcacgcaacattaaccgaaccaaactgatcggggccagcaaaggatatttgcgctgggccaagatgcaccagttgcgcgagcagcatcaaccgggtcagttcaccgtcccgctacgcgcgaagcatgctgacattcgcatggattcgcagagcaatctggactggaatctgcgtaccttactgttaatgcagcgcgccggttttattgatatcacctatccaccgccggatcttagcgcaatcgccccggacgagcgtgatgagtccagggtccatgcgtggtttgaccattatttcaaccatattcagatttctgttctccgtgacggccatatggatgaagcgcagtggcagaaggagattcaggcccaccgttcgcatgaactggcgatgcgaaaacagggatttagcgcgttagaagggtggctcaatgaccccacaatatcgttgtgccagacgttagcgcaattttataccctcgatggctttgtgccggaaatatcctgtggcgggtgtccggcctgtcggagtaaagggtatcctccctttactccgacgctcggtcgtatagcacacgtgacgggcgagacgatgcggaacgtcatgggaaatgagcaacgcgtttattattctactacgctgacgaaccggttactgctgcgtcagtggagtgactggattgcccgactgctggccaatcgccagattcaggctatccgtgccagccagagcgtgctcgcccggcttggtgaggtcctgcccgcaggtttgcctttctggtgttcacttgccgttgatgaagaaaacacctgctgggatgaactggtactagtgttgcccggcgaaacgatgcctgaactggacatcttcgccagcatcaatcgcattattgttgcaccggaacgtttacaagaaccgggctaccgcgggcgtcgctggtgggatgttgataccggtgccgtggcattagaacaatttcagaggaatatcagctag

SEQ ID NO: 149746 - DNA, 900 bp, Enterobacter cloacae
gtggcaattaccaacaacgctgccgcaggaagccagatccgtctgctctgcatgatcgatcgggtgctgaatcggcgactcggagaggccatcccgatggcagatttgattgaattactgcgcccggagatgctgcccgtcagcgatggggcgagaaaacgcctgcctgccgaagtctctttctgggcaaaagaagggttatggaaaaatgagagcgctggcctcagtcaacagtcaccactttccagcgaacgtaatctgcccgcacgggttttgcgtacgctaattgacagtgagaaaacgacgccgctgctgaccggaacgcgcggccagcccttgctgatgtgcgttacctccatgctggcgcaggacaaatatacgatccgcggaaacacgccgctgacaaaagaggcggtgccgttggccgttggcccgatgattaacaataaattagccggtgaggggcgacgtaacctcaacgtctctaacgaagcagagccattcctcgattactcatatttcctcggttttacagaaccttatctggatggctgggtgatggacccgacccgcgccattgaaggggttttggataacctgtcgcttaccgccgcgatgccaattcagacattcctcagccaactggcagagcttctgccaatgctggatggaggggcctaccgccagcaggttgaaccgatgatctccgctgacaactggcaaccgctggagaaacatatgatcagcgccgcgttgagccaggcgctgctccggcttgaactgacaatgcagttggttttcaccactcgttccgatgaccttgacgccatggtcctgcaagctccggatggcagtctacgccgtatcagtaccgtgagcccagggggggcaagaaaatga

SEQ ID NO: 149747 - DNA, 3153 bp, Enterobacter cloacae
atgagaatgatcgattactggccttccctgcaaaatatcaatgaatgtattcgcaccgaggcggaagagttggcggagtacaccttactggcagtgcatcaaccggtgaatttgctgcgtctcgataaagacggcaacaacctcggacatgcgaaagaagaagatttgctcaagcactttctggaaacgccgcgcccaattccgattgtgggcaaagccggagtgggtaaatcacacatcatccgctggctggatgcgaaacttcgactgcgtaaggagtacaaagacaagaagtggcatattgtccgtattccaaaaagtgccagcttgcgtgaggttctcacctctatgctggcgggcctggagggcgagatctttgacgaagcgcgggaagacatcaataaggtgtcggaaaaacgtacgcctcgcgagatcgctgaatggctgctgatgctgatggggcaagagttgcgtaacctgcatgaacgtaacaagcaggatatggaagcgctgaaaaaacagatggcgggtagtacgcctgagcagttaatagctatcaaaccacaggcgacccggctacagaaaatccacgtccacgctgaagataatgcattgccaacgctgattaacgatgcttacttcaagcagtttttgctgaaagaagagcattgtctctatcgccttgccaaccgtctgaccaacggtgcaaccagcagcgatcttgacgagggggaacagcaactccaggccaaagatcttgatttcagctttaatattaacgatctcagtctgcctgcgcgtcagtatattcagaaaagccgcctgaatacgcatgaggacggacgcaaagatgcttcggagattctcaacttggtgctggttaaagcgacgcaggcgctgtttaaccagctcttcaacttccgtggccgcagtttctctgacctgtttacccagatccgtcaggcgctacatgaaaagcagatgacgctgatggtgctggtagaggatatgtcgctcatcaccgcgatcgaggatgtactgatcgacagccttgaaagggaagggatccgcgacgggaaagaagtgctatgcccggtgtgttcagctattgctgttactgacggttatcaggggtatgcccgccgtcgtcaggggatgctggatcgcgcgaagggtgaatgggtgatcgaagaggtagggagcgggcgcgaagagacgcgactgcgtattgtcgatttttgtggtcgatacatcaacgcggcccgctttgggggggaagccttacgccagcgttgggagcaatctgctgataaatcacactggccacctgactgggaagccagcgcaaacggcgacgaaatggctgaagtgtttggtcgcagcgagcaaggcttttcgctgtttcccttcaacacaaatgctatccatgcgttggcagagacattctgccgtgacgatcgcaacgaattaaaattcaacccacgtcagatcatcaaccagattctgttgcgtgtactgcagcactgtcgccgtgatgccgatgagggacgttttccgccgccgcatcttggcgatgttgcggcgccagcagggcttcgaagctggctgttccgtcagggcttcgccgacaccgagcgtgctgaatccgtggtcgcgctgtggggttatcccgccgattccgatggcactctggcaagcactctgccgcctgatgttgcccgcagtttcggtctggacgatctggcgcaggtgttggaaaacacaaaaagtgctccggtccatattcagccggtggtgcctacgcgggtgaccaaagttgagccgcaggttaaaaaaactgttaagccagaacccacaacagttaaaccgaaagtgatagaagataaagatactttggctatccgagcgctggatgcggcggtgggtgactggatgctgaaaggtgcgacgcttgagatcgatcccgcgcgttatatcaaaagctccctggccttcttctttgataagcgcgtcgtggcggaatgggctggcagtacctatcggccaacactttggttaggtaaatccaactttgtcgccgttgagttacctaacgcacagggcaaccgtggcgtgcatgtggtgaaatttattcctcaggccgaatacgataagcgctcggtgcaactaacggatgccgcgatggcgttagcacggtttggctactacagagaaaactccttatctaaaaccgaggactggagctacgcagatggcaaaacggattacctgattattcagagcttctgcgatcgctgggttaactatgcgctgacggaactcgttaagcataagcgcaacgatctgccgctgctgctcagcgagcagattgcgctggccgacgcgctgggcgccattaaaacggcggatggttcgaaagaggtgcttgctcgactgctgcaaaacagcaaaacgctttctgtgcagtttcgttccgggatcacgaaggcaatcactgaactgcgggcagaggcattagcgaagtgggatgatgcccaagacgcatggctcagccttgtggcgctaaacgatcatgcgctggaaggcgatctcctgctaagtgcgatacaaaaggcattgaagaaacgctcaaaaaatacacatgccgccgtggtgaaaaagtcgctcagtgaaatccgccccatactggataccgctgctctgtttgccgattgtgaaaatgcggatgatttttccgaactcgtcaccggtttggctacgttagttaaatctcttggggacagcggcgattatcctgcggatatatccccggacagcagcacgctgacggattcactgaatgcgctaacggagggggggatctggatgacgatcctcaaattgcgaggcattaatcaatctgaagatccgctgcgtcaatggcaactactttgcgaactggacggtgttttaattaaccggctcatgatgacaatgcaaagctggcagcaggtacacaaacgtgtactggcgaatattaccgcctacaaccattcacacggtgggcatcagatcagcgaatttcgcacgcagattgaaagcacgttgcaggaacttcatcaggtcctcgacgccatgcagtccgttgcaggggaacagtatgacaacgcttaa

SEQ ID NO: 149748 - DNA, 735 bp, Enterobacter cloacae
atgacaacgcttaagacccaatttacgcaactgcgggagcagtatcagataaaacagcaggttcagtcgctggaagaggtctacgatcggtaccgcaccatacgtgacggcttgctggatgttgccgaaccgctgcaaaaagcccaaaagaaatttgaggtgatcggcatgctaccggaaccacattccactatcgatttttcgcaagaggcggcgcttttcggcggtgccaaaacgcagttggatgcgttgacggcacgcttcaaagaaagtggcgataaaaccgagcagagcgggttttgggaaacggtgcgggttctgaagagtgtacaggaaagtgttgatgataaggtggatgcaacctggaaagcgtttgttgccgatcttgaagcacgcgcaatgctggatttcgtctttctggaacaacagcgcacgctggggaacgtgttggtgtatgacgattatcgcaaagcgcgcgataactttaatcggcagaagttaagcggaccagacagcctgtcggtggtaaaaaacctgcagaagtatagtgatgagatggtcgcgcttaaacgttcaatggacccggatgcaccagacgatgttctgcgcttttttgaggcgttggacatacataatcatgcctcgcttacgctgctgacgccgggcgtgattgcctggctggaagaaaaaggtatgctgccagcgtttaacgtgacacgtaagagaatgatttaa

SEQ ID NO: 149749 - DNA, 4518 bp, Enterobacter cloacae
atgaagggaatcgagctttcgcttttgcaacgcgtgctggatgcgctggaagaacaagaaaatgcgctcctggtatggggcgacacgggcggtttttttaatctggatgagctgttaagcactatcggacgggtgttacctgaagaagatgctgaaaatgttctggatgagatgctagacgccgccatgttgattcaggtgccgcacaccagtggcacgcctgtctggcgaacccgaatgggggaaacggtccatctcatgcgcaacctacgccagtggatgcatgagcaaaagctggaacagagcaaaacgctggtatcggactatcgctttattcgtcgaccgcgcagctatcccgatcgcgtttacgaaccggcaacgctgattaccggctggaaaaaacagctgaacttaagcgatcgctcctgtgacattatgcgccaggccctggcgtcagataagcccttcttgctggcgggttttcaggttcgcgcgaccgaacgcattatgcagtgctggctggaacataaggtgaaaagcaatacggccagcgggacaatcgtctgtgctggcaccggtagcggtaaaacgttgtcgttttacctgcctgcgctaacccgccttgccgaagagatttgtaacaaccctgagcgcaaggtgcgcattctcgccatctacccgcgaaaagaactgctcaaggatcagtttgccgaaacgttttcacagtgccgcaagcttgacgaatttatgctgatggccgccggacgcaagattcgtatcggtgccttttatggcgatacaccggtgaaggcggaatggtcgaagaaagacgttaaggggaagattggtctaccgttcggcctaatgaaatgccagcagctccacccgcagtatcctaagcagacttgcggaggggcgctcatttggcgtcgtgaagacatctttgacgagcgtgaggtgcttacctgtacgcaatgccagcatcagctggatcagagtgaaatcatgatcacccgtaatgcgcagcaacatcgcggcgacgccccggacattctgtttactacgacggaaatgctgaacctccagatgaactccacttggagcaaccatctgtttggtgtcggtgaaggctatgggccaacgttggttctgctcgacgaggtccatacatacagcggaaccaccggcgcacaaaccgcgctgctgctgcggcgttggatgcagcgtaccgattgtttgccgcattttgttggactatcggcaacgcttgctgacgcgcagcacttctttgccaggctggtgggtgctcctgaagaggaggtagccctgatccagccctacgcggaagagatgatcgaagagggggctgaatacctgctggcactgcgaggcgatcctgtctctgaaacggcattactctccaccaccatccaggctagtatgctaatggcgcgcatgctggatagcaaagcgaacaagtcacaaggtacctgggggaagaaaacgttcatcttcactgataccctcgacggtaacaaccgattataccacgacctcagcgatgccgaaggctgggagacggggccaggacagtcgcgcattgatcattcaccgttggccgtgttacgtagtccttttgataaaatggcatctgagcggtcgaaaactgaactggggcagaactggaaggcggctatggatattggccacgacctcgcggaaaacaaagtcatttcccgaacgtcgagtcaggatgccggtgttgatgcatcagcagatgtcgtggtcgccacttcttctctcgaggtgggatataacgatccgttggttggtgccgttcttcagcataaggcgccgaacgatgtcgcctcctatttgcagcgtaaaggacgtgccggtcgtccaagaggcatgcgcccctggatgctggtggtgctctccgagtttggccgcgatcgtgtcgagttccagcgttatgaagggctgatgagcccggagatcaaacgtcagggtctgccgttgggtaaccagcacgtgcagaaaatgcaggccgcaatggcggccctcgactggatcagcaaagttggtaaattcaaagatctgtggggcatgctgaaaaaagctgagcataatcagctgaaatatgatcgaatgtatgccccgcttatccgactgattgaagaggtactgagcggtggaagacggctaaacgagttgacgcgctaccttcaggacgctctgcaattatctgacggtgcggtgcaaaatatcctttggagctcgccgcgctcaattatgtttgagtttctcccctccctactgcgtaacctcagaacgcgctggtcggttaacggcgtggagtgggccggtctgcgaccgagtcaaccgaatgacgagagcgaacaacatcggagcaattcacccgctccggaatatatcccgcaaaatctgttcagcgagttgaatttgccggaactggacattcgcctgaagcgtggacgtgatgacgaagaacagtgggaaaccctttcgttctggcaggggatgcgtgagtttgcgccagggcgtctgtctaaacgctacgccattaaatcgaacaaaagtacggattggctggttccacaaacctacgagccggtggcaggagaagggcggcaatatgttgattttcagataagcgatgcgttcggcgatagctggcaaaaagagtgtgaagtcgagtatcagggaaaaacgatcaaggttgttaaaccgtcaaaggtcatgaccacccgggctgatattcgtcgtataaatgataaaagtaatgcgcaactgcagtgggtactccacgtcattaaccctgcggttgcgacgcccgacgaggtgccaaagggaccctggaagcaaactctgcaagatatcacgttttacaaccaccagcatatgacgccgctggaactggttcgcttttctaccggatcgcaggcgtcgctccggttcagaaataaggaacgggctcacgttgatttcacttggatgaatggagaggaacaggttggcgtaggaagtcgtcaatgggtggatgcaatgcgtttgcgttttaacctctcgtgtgatgacgtgatgggcctgctgcatcaggcagaaatccagcgaggcatgcgccccgtttattttcaacatcttgtaaggcagtcatctgaatttgaatttgatagctttaacgcggactgggctattgaatgttttatggctcagcttgcggagacgttggcaagcggcgctcacacctcggttgagtcggcgctgcgagaaatggcttccgaaaaagggatgaaaaggctggctgatatcccggccagcctgttccagccggataccgaaaatgaggctggcactgaccaagcgctacagatcggcctccataaactccttgaaagaccggatatacagcaactgctgttgaactgcgcacaggcactctggaaacccttggctgagatcggcggctttgtcgaatgggcgcggcaggtattagcggacaccttggctgcgggtgtgcagcaaacgctgagtacgctacttccggatgttgatgagcgggcggtcgtgacagactcctgctggatgagcgatctccgcacgggagcagaatggctggaaatctggctctgcgagatggagtcaggcggaagcgggattttgatccgtttacagaagaagtgggctgaagaccctgtatccttcctcaatgtgcttgtgcgaaatctttcagccagcgactacgagcagatcgattacgatctgcgcaccgtgttgcagatgctgcaaacagattacgcgcttcgtatggcgatctctgccgttcgtgaagccagtaacatggacgcccggcgggaggcgaacaaaaatcttcatttgctgctttcacagcgcggtttgcgcctttcccacagctttacaacggtgctgtactcgcggatcctgcgggcgggtagcggcgatgacacagacgcccagctttatcagctactgtcggactggtcgtctcttgaaacaagaatgggtattgagttcagtatgaataccatggcgcacgcactggcggtgaatgcgcttggcgtcaaaaccgatgcatccttagtgtttaacgcgcagtgccggaaccaaaacctgctctggccgcgtggttacacggtccggcaggcagaactcggtttttacaatatattttgctcgcgtaaaattacgactgagcgcctgcttgccggcgcgctatttagtgagcagatcgaaaagatctcccttgatgaggctgactggcttgggcaactgcatatggcgttgtgtaaagccggtcgagctgagctacaactcacgcgcgcgcagcgaaatcaattacatcaggtcattaacaccgtgcaaattgaacccgtcgatcatttaggactgctgctatatccacgtcttggtgaagttcgtcgcgaacaggatgtactcattttacgtattgagctggcggaggcgatgcaatga

SEQ ID NO: 149750 - DNA, 546 bp, Enterobacter cloacae
atgatcggacgtgcaaaacagcgccagatttttttacacggtgccgcagggcaacggcaattgcgggaagtactcagcgcccaacttatcgcactgattatgcagccagagccaatctggctagtgtcgccgtgggtgagtaacttctcactgttggacaatcgttcaggcaactgggacagcattgatcccgcgtggggaggcagggaggtagattttattgagctgttggcctgtgcggtgaataacggtgcgccgctttcgctggtgacccgcgacgaaccgatgaaccgtatttttgtaaaagcgctggaaaaacgtctgagcaactttgcaaactttcgtctggaatggcgtaatcatctgcatataaaaggttttctgacgcaaaatgtgttcctcaagggctcaatgaattttacccgcagcggcgttaaacgaaatgaagagtttgtcgaactgaactgcgattcgcatatgatcggtgaagcgataaccgaatttgaacgtcagtatctttttattggatcacaggaagcgttctga

SEQ ID NO: 149751 - DNA, 2172 bp, Enterobacter cloacae
atgtgtgcagactggctgaaaaattattacgctaaagataaatatctggattatgacaaggcgatggtggggggatacggcatcccacaaatgaacacgctgattcaacaggccgcagcgttacggatgccctgcatcgttccttcaacgcgaaagagaaaaacggtgttttatgccctggcagagaatgcaaaaagccttgaagaattacgacgtattctaaccgcggcgctgggttccgctgacactactcccgacattaaatcgatctttcaatctgacgatgacggggaacagttgctgctggagaaatccccggacggaatactggccttcgatttcttaccggtgccggacggctcacctcagcaggtaaaagagtggcagatagcgcgaatgaagcgggtatacgccatgctgcaattggtgatggatctttatcgtcagcgacccattttacattcgctagtaagccggcaaaccggacggattctcagggatttctacacggcatgccacgcgcgcgacggcaagattgcagaacagtatctggaagagttacgcggtaatcaggcactgtcttctcttaatctcctgtttcttgaactacaggggatggcggcttcggcaagatggggcgagattctcaaccatcctcggctggaagtattgttgcgcggtcgtgtgccggagcgtatccagcgcctgttgttgcgatcctctggccatttaatgcttaacgccatccgcgatgcgcatttcccactggacaggcgtgatgacgccaggcgactggtactgggcttattgccactgtacaagcataagccccgctttgctcatcaggcgagtttccggcctgactggcaattgtggaccatgggggccgcgctgctggggatcgacgaatggcaaacggcgacgcctctgttagaaactgactggatacagcaggtcgaggggtgggcgacaggtgcaagttcgctgccagcatcggtagaagcggaagaacaggtgctgatccaggctcctgttatcatgctgataaaccttgaaaatgctaccgatttgttactcgaagccctactggcggacgctgagcgcgaaagtgagatatacgcgcaactggcggcgatgcctgaagcaacacgacaggcattggaaaaaatacccaaactatgggagacgtggcaggcgctgaaaaatcgctgcgaaccgcaggactatggctggagtcgttggcttgaagatttacaacaggctacggaatctgaacggtttgaatcactgcgccagcaggcgactgttcactatatggactggacaccgtcaaccttcagcgaaacgcagtggcaggcgttgcttgagcagcagtccaacgtccagttgagtaaagttttacgagacgtactgccaacccttctgaactggctggaagaatatgacgttcaggtatctgcctccttgtggccggactggcttatgctgctggctgttgaggatattcgctcagaggaggatgtgcgtctcggtgggatgattctggataaattcctttctggtaccttcagtcaccaggaatatgcgtccgcaattgaatcggtagcaatgctgtgttctgaaaacctgtcggtaagaaccttatgctactcgattgatattgctgaacttctttatggtaagatctccgctgacgacgccgccagattaggtttctgggtcacgttgcaggagttgctcaagcagcgctgggagcgtctggatgtcagtatgcaactttccgcgcgcatggtggaaagactctatctcggcgaacatgccggacacgctttcccggcagaggacaatacgccgggcgtagcgtcttcgcttcatcgcgatctcgacggtaaaacgttggcaatatacagcctgatggaaggtgcggcgagacgcggaaaagaggctctacttaagttatatcctgggttgaatgtggaactcaatcacgatcacgtagctactccggcgctgataaatctggcggaaaaagctgactactttatcttcgccagcggtagctcaaagcatcaggcgttctataccgtgactgattatcgcaaagagataatctatccctccggtaaaggggcgtctagtatgatcgcagccttcgtcagtgcgctggattga

SEQ ID NO: 149752 - DNA, 363 bp, Enterobacter cloacae
atgaaaacgactctgtataaagatttcacatttgaagccgcacaccgactacccaatgtacctgatgggcataagtgcggacgtttacacgggcactcgttcgttgttcgccttgagatcaccggagaggtggataagcacacggggtggattatcgatttcgcagaattaaaagcgatcttcaaacctacgctggataggctggaccactactatctcaacgacattcctggacttgagaacccaacaagcgaagttctggctcaatggatctggaatcagattaaaccacaactccccatcctgagcgcagttatcgtgaaagagacatgctctgcaggctgcatctaccgtggtgaataa

SEQ ID NO: 149753 - DNA, 3261 bp, Enterobacter cloacae
atgatcgccgacgtcaccaaagaatcgaacctgcaggccgatatcataaaccagatgtgccagaacggctgggttcccggcacaggcaataagtacgatcgcgaacgcgcgctctatccgcaggatgcgctgacgtttgtccagatcacccagccgcaagagtgggaaaaattcacccgcatctaccccaacgacaccgagcgtcattttctcgatgcgctggtcgcgcagcttaaaaaagccgatgccaacgccaccgatctccagtcccggacctacggtactctgggggtgctgcgccacggcatcaaaagccataatgcgcgcttctcattatgccagttcaagccggatcacaacctcaacccggacacccttgcgcgctatcggcagaacatctgtcgaatcgtccccgaactggtttacagcccccacgcgagcggtaccgatgcggaggccaaagccaaacgctggcgcatcgatctggtgttgtttattaacggcctccccgtcgcaacgcttgagctgaaatccgagttcaagcagacggtcaacagcgccattaaccagtataaaaaaacgcgcctgccaaaagatccggcgaccaacaagcctgagccgctgctgaccttcaagcgcggtgcgctggtgcatttcgccgtcagccagtatgaggtctacatgaccacccggcttgctggcgatgacacgttctttctgccattcaacaaaggcactaaagagggaggtgcgggtaacgatatcccggaggataaccatgaatacgccaccagctatctctggaatgaagtattactccctgacaacctgctaaaaattcttgcctgctttgtccatctgcaaatcgaggagaaagaggactgggacggtaaaaaggtcaaaaaagagagcctgatcttcccgcgttatcatcagtgggacgtggtgaacaagcttattgccgccgcagacgaagaaggcaccggcaacaaataccttatccagcacagcgccggatccggaaaatcgaactccatcgcctggacggcgcatcagctctcctgcctgcataacgaaaagggtgagaaacgcttccactcggtgattgttgtgacggaccgcaccgtgctggacgatcagctccaggacaccatctatcagtttgaacacgcggacggcgtggtcgggcgaatcaacaaccgcgagggggaaggctcgaaatcggagaagcttgccagcgcgctggagcactcgcagcccatcatcatcgtcaccattcagactttcccgttcgtactcaaagcgatcgaaaacagcaccagcctcaaagaacgaacctacgcgatcatcgcagatgaagcgcactcatcccagagcggctccacggcgcgccagctgaaagaagtgctgatgagcgaaggggccgacgacgatgtggtcctgacctctgaagatatcctcgacgccacccttgccgcacgcagcgggagtaccaatctcaacttctacgccttcaccgcgacgccgaaggcgaagaccctggagctttttggccgccgacccaacccgcacgaacccgcatccagaaccaacaaacctgcggcgttccatgtttactccatgcgccaggccattgaggagggctttatcctcgacgtgctgaagaactacaccaattacaaagtcgcctataagctgctgcaaaaaatgggtgataaagaccaggaagtggacagcaatcgggcgaagatcaggctcaacctgtgggtgacgttgcatgaacacaatgtcgcgcaaaaggtaaaagtcatcgttgagcactaccgtcagcatgtgatgcatctgctcggcgggcaggcgaaggcgatggtggtgaccagctcgcgcaaggctgcggtgcgctacaagctggctttcgataaatacatcgctgaaatgggctacggaaaaatcgccgcaatggtggcattctcaggcgaagtcgaattccaggaaaatgacatgaacgacctcgcgctgttgcaccagaaatttactgaaatcagtatgaacccggcgctcaaaggccgcgatatgcgtaaggcgtttgatactgatgactatcaggtgatgctggtggccaacaaattccagaccggcttcgaccagccgaagctgtgcgccatgtacgtggataaagcgcttggcggcgtggagtgcgtacagacgctgtcacggctgaaccgaacctaccccggtaaaaaggaatccggcacttttgtactcgatttttataacgaacctgacgatatcctcgcggccttccagccctactatcagacagcggaattgaccgatgtcagcgatccagatcaggtgttcgatctgtatgagaaacttcgtgccatgggcatatttttatggcatgaagtcgaacagctttgtgaggctttttacagcaagaaaaaatcgaatgcgaagatcagcaatatctgcctgcccgcagtaaaccgctgggcaatgcggtatacctccgcgaaggaggcgtatatcagcgccaggcagatctatgagttaacaaaaagggattcccctaaccccattttgctcgccaacgcggaaaacagttttaaagcctgtaagaaggaaaaagatcgtctggagatttttaaaaaagatctcggcagctttgtacgcttttacgaatttatgtcccagatcgtcgcctacgatgacaagtcgctggagaagttaagcctttattgtcgtcaccttggccccttgctgcgcgaagagtcgatagatgaagatgacgtcgatctttccaatgttgaaatgagccactatcgactttcaaagatccaggaacagcatattaagcttgaggaggatgcagcagagtataagctcaacccggttaatgacgtcggcaccgcaaaagcaaaagataagaaagaggagtttatgtcgcaggtgctgtcgcagctcaacgagctgtttatcaccgaaaacctgaccgacaaagatatgctcaactacgcctttgtagtttacgataagctcgcagaaaacaaacttgtcatgacccaactcgacaacaacactcgtgagcaagcgatgctgggcgactttacgaaagccattgatgatgccgtgatggacagcaacgaagcgcataaggagatgatgatgcagtacttatcgtcccctgacgttgccaaagggtttgctcacctgatgtatgacatcgcaaaaatgcgcagggaaacgattcatgagtga

SEQ ID NO: 149754 - DNA, 1398 bp, Enterobacter cloacae
atggctaagtataaggcgtatccggaatataaggattctggggttgagtggttaaactctacacctgctcattggtcgaaagcaccaatcaagtatctcgcactggctgctagttctgtttttcttgatggtgactggattgaaagcaaggatctctctgatgacggtgttcgctatattactactggtaatataggcgaaggtttctacaaagaacaaggttcaggatttataaccgaaaaaacttttaataaacttgattgcactgagatattagagggggatatattaatatctaggttaaataagccaattggaagagcatgtttagtatctgaactcaattttaaaactgttacatctgttgataatgtgatattccgaacagatgaaccttataacaaaaaatatttagtatatcttttttcaagtaattattacttccagcacactggtaacctggctcgtggcaccactatgcaaagaattagtcgagggcttcttgggaatattagggttcctgtacctctattatcagaacaagtaattattactgctttcctagatcacgaaaccacaaaaatcgataacctgatggagaagcaacaacaactcattgaactactaaaagaaaaacgtcaggcagtgattagccacgctgtaaccaaagggctaaaccctgatgtaccgatgaaaaattctggggttgagtggtcaggagatgtaccttcacattggttaaaaactattattaagcatatcgccaaaattaatcctttaaaaacaaaaatcgcaccagacatcatgaaaaaggagtgtagctttatcccaatggagaatctaaaattaaacaagataattttagatgaacatagagtaattagagatgtttataatagttatacatatttcgaagataaagatatcttgatggcaaaagtcacaccttgctttgagaacaaaaatatagcaatcgccaataatcttctcaatggagtaggttttggaacaacagagatttatgtaattcgttgcaacaataaaatcaataatgagtatcttttttaccgattacaggaagataatttctcagcaattgcagaaggttctatgacgggggcaggtggtttgaaacgagttccctatgaagttgtaaattcatttcaattttatttacccacaatttatgaacaaaatgaaattgcatcatttctcaactctgcaacaactaaaatcgacaccctaatccaaaaacaactccaacaaatcgatctcctcaaagagcgccgcaccgccctgatttccgccgccgtcaccggcaaaatcgatctgcgcgactggacgcctcccgccagcagcaccgaggcatccctcaccgcagaggaggccaccgcatga

SEQ ID NO: 149755 - DNA, 510 bp, Enterobacter cloacae
atgccttcaaatttttatacgatagcatcactgaaaccactctattattatggctatgatatggataccgttgaagagctcaatggaacatacttctataaaggtgtatgtaatatctcggcgtctgagttatttttttggattttccttgatactaccgatgaacaattcggtggattaaaagatgcagtaatgatggctactatgatccttggtttacctatacttgagaccagaacaaagccagaaacggctactataggtacttccgtggcttctaagtatcttcgtgatcttctgaatgtacagctaccacaccgattacctacgattaccctcgcaagctttaaataccgaaaaccaatgtataccaaaaacttaggtgcattcattggtcgatggatccctgcattggggataaccatacttgctgctgatcttgcaacgataagttacaaaacactctcacgatataatacgattgctcaccctaaagatcggatttggtga

SEQ ID NO: 149756 - DNA, 1734 bp, Enterobacter cloacae
gtgcctcagcgtttttcacaatatgcgcttttattagtgccgcttattcctatggctcaggctataggggcgcttccaggccagcaaaacaaacaagaactggatcgtctggaaagacaaaccagtcagacattaattgaggaagccaagcgaactgaacgtttgctgcagcaacaaaatagattgcgcgcagccggagaagaaagcctgaccagcagcgtctccagcaggaagtttcagatcaataaaattatcatcctcgatgatacgcagttcgatgactcaccgcagcgtcaggcgatcgtcaatcgttatgaaggcaagatgctcggcaaaacggaaatatttgagctggttaaagaactgaccgacttttatatttcgcgtggttatgccactacgctgattggtattgaaccaggcaatattaaaacgggcagtctctcactgcgcgtactctggggaaaaataaacgacctgaaggttaacggactcgaaccctctttccgcgagcgtacgcgcctgttcacagcctatccctttgcgaaagacaaagttctgaatatgcaggatatcgatcagatggtcgaaaacctgctgcgcgtgtcatccaaagacaatattgaaattcagccgtcggttctaaacagctattccgatcttaatttactgcatgagcctgaatttccgctttccgtcgctgccggactcaataactccggcattcaggctgacggctggcagcagtattacagcagccttacggccaaaaacattgctggtatcaatgatatttttaacgcgtattactcgtggaataacctgaaaaatcatcaggataatcaggacgcgtggtctatgagttacagcgttccgcttggctactggtcgtttgacgcgttttactataaatccagctatgacaaaacgcttgccggtaataacgccagctacgcatcggacggtgattctgaccgagcgtcgctgcgcgtcagccggatgttgggccgtaatgcgacgggtaaaaccagcctgtgggcaaaagttgaaagacgcagcagcaccaacagtattgagaaccacagcatagacgtcagttcgaaaacgtatacctccctttcaacgggggcgacatgggtgggggccctgatgaacggctggttctatggcgatctgggcgtgacggctgcggttccgtggtttggttccgcctggaagaatgatgacgatctcaacggatttgaccttgattatatcaaatataacggcattgccagctggacgcgccctctgtttcaggtaggccgtttaggtggcgtctatgaacttaatgctggcttccagtatacgccgcacgttctggtgagcgatgccaaattaaccctgggcgatgaatttaccgttcgcggctttaaggacgatagcctgctggttgatagcggtggctggatcgctaatacgctgcagtttccttttgatattggcgtcggcggtatttatcagcttattccctatttaggttatgaccttggttttgccaaagataattgccctaaaggtgtcaacgtctgcgatagccaattcatgatgggtggctcggtcgggattaaagcgaccggtagccatttttcaacttatgtcctcgcaggctggccgattaaaaaaccagattcactggaaaaaaataccgtcgataacacggtcgtttattacaagatggaagtaactttctaa

SEQ ID NO: 149757 - DNA, 1011 bp, Enterobacter cloacae
atgaataaatatattaccgctttactttatctttttttgttatccatcttatggatatttacgtttgaagcaaaggcatctctgtgcaaactggaaggcgcagagaagattctcaatattacggataatattacgcttaaccccgcagataaaggcgcggcgggaacagtattatggtcaaaaacctatactgtaccaaacataaaatacagctgtgacgaagcgacacaaacacagtggcatacggcctacagtcgaaattatattacttcgtctatagataaagtctatacaaccgaaattccaggcatcggcgtgcgcatgaaatggcctgccaatacggggaatacctgggtgccggataactcaggcgcgcctgtcacctgtactcctagctgctcaatagataacagcacggtgctggtggagttcgtgcagaccagcaatctcgatcagggtgaggcggagatccctgcaggcgagatggtaaacgcaaaagttaaacccctgcttgcgccggaggatgagcttcgtattttcaccatcaatttctcagtaccgattaagattaatacgcggtcgtgttcgatttacccttcgacgacaaacgtcgatctgggcacctatagcattgcctcgttccagaacatgacaaactatcagggcgataagaaagacttctctattaccatcacttgtccaaacccggagagcataggtttaacgatatcatcgttgctcaatacgtctttcgcgacaacaagcggtatcctgggtgtggaaaccggcgaaggttatgcaaataatttcgcgattatgctttatgaaaaaaccagcccttatgttagcccgcccgtcaagcttggaaatgaatctgttttttccgtttcgtctcgcgtgaccaaaaactatcaggcgcaaatattcgttcctgcaagcgttgatcgtcaaaattcattaagtgccggcagggtcgtcggcgcaattcaatacaccatggtaataaaataa

SEQ ID NO: 149758 - DNA, 234 bp, Enterobacter cloacae
atgttcgggtgtcacagaatcccaaaccgcttcgcggttaaagctaggaggaatgtcatacatgaggtgggtctgtttcaaggtagactaggctttgagagggcaattgtgttatttgaggaaggctgcgaagaactcagtaatatcaatgtgttaagccaaatgagatttcccataaaaatatatctgcaattttacaagagttacgagaaatacttgagcacgaacatttaa

SEQ ID NO: 149759 - DNA, 384 bp, Enterobacter cloacae
atgaaaaacaatacatataatttgaatcaagtttattctattataagagactattatgttgactcattcccacattctctcagtttcatttcttcagaagccctgagttttcatttaaaaaaacatggcagcacagctagagtcataaagcacgaaactggttatgattttgtaaatgagaaccctaaagttaggagtgatgatatttttgataacggatacgaagattatgtaatcaaccttgagggttttctttctgatagaagaaatacttcatcccttattaatgatattaatgctttagcatcatggttaatggatgggttgtatataaaaaatggcattgctaccgataaaatgttagaagtgaagaagttaatataa

SEQ ID NO: 149760 - DNA, 702 bp, Enterobacter cloacae
gtgtgggatttatttattaagataatactgctgttaccgattcccttgataactgttttatttgctaacattattccttttctgacttacagacaaaatggtgataaaaacaaatccgccctgatggatacactagctcgagaaatggataaacagcaaccctgtgcgtatcttgtggagtcatgcgttgctcgattgcataacatccggccaataccttgggcgtttctgcgggtggtactacattgcagtaattcgatggaaatcattcagctagtatcatctgggaggcggatacttgatttatttgatatatctgtaaaagagggccgccctgtggtgcaatatacagccgcgctatgcaagcgatcacgacggagaaacaccatgattgcatgcttttttcttggcttattttccatagctcttctggtacaggccgaatggcaactactcaaattactctttgaaaacaacttaccaaataatgtcagcgatgccgcgtatggtgaagttttttatctgttattacagatgatattatgggctgtagctaccgtcgtttttaccagacaagcggtgattctcaagcgtgctgacaaacgtctatcactaatttgcgaactaattgccgcaaattttctcattcccacctctagtagtgaacatgaaatactaggtatacaaactgccgactcgtaa

SEQ ID NO: 149761 - DNA, 687 bp, Enterobacter cloacae
atgtcgcctaaaaaaataatcatagactctacatctcttgattttcctgagatattgtatcttttttattccattaatatgattgaagggatagaatcacttactgttctgtacattgaaccgaaagaatacagtaagtcgccttcgactgagggcggggatgaggagtatcaattaagcgatggccgacagccattttcttctcttcccgtattctcactgaatacaatcacatctggcttacaaaaaaccagcctagtttcatttttaggatttgaaagctctcgtctaggtcagattttaagtaatgatgatggggcaagctttaataaattactggcttgtatatcagttccagcttatataccaggctgggagaataaatcactcagaaaacatttattacatttcgacagcatggagacagatctaagaacctgtcctggtgcaaacccttacgcagtatatcagaccttattagatatatatgcagaaaacccaagactggtgctgacatccttaggaacaaagcctacggctatcggtatctgcgttttcttaattaacaatcaccctaataatagcgttgaaaaacaattgggagcaatatacgactaccctataaaatccatcaaccgtacaattggaattggagagatttactcttacgaactatcaataaaataa

SEQ ID NO: 149762 - DNA, 549 bp, Enterobacter cloacae
atgaattatcatctaatttcagatgacagtttttttttacttggaatacgtgaagtaattgagaacttgagcagcaattgttttgtgcacaatgtaaataatgagaatcgactcttttatccaatggccggtgatgtagtcatcatcacagttaatgatttaaagttgcgaagtctcttattacgtaacccaaaactgaaacgatgcagattactagtgatgatggacatacctgtactacccgtaagattgtcctactttccatggctgatacctaaaaatattagcacggaagcacttttaaagatcatcaataaagctgtgcgttcaatgatttatcgcaagaaagtcgatcaaaaaaccataaacatttttgatgagctttgcactggtaaatcaacgacaaatctcgcaatgacaatggaggacaaccttaagtacatatataaaatcaaacgtgacattttccgtgaatatggattactgaaatgtaactcattaggtttgttattatgccgagacatcttgtgcaaaaaacctagttactga

SEQ ID NO: 149763 - DNA, 534 bp, Enterobacter cloacae
atgaaagctaatcgtttactggtttcttttgctgtttcagctgcgttattttcaacgaccgcgatggctgttgacggtcgaatccaattccaaggtgacattgtagatacaccctgcgtagtagcacaaaatagccagtatcagaccattaatcttggtcaagtgaaagtcggcacttttactggtgcaaacgtaaaagctccaccaacgccattccagattgagctcaaggattgtaagcttgatccaacaacgcctgaaaaagcttatatcacctttacaggctcatctgttcaaggtcaatctgacgtgttggtagctggaagtcctcaaggtggtgctactggtgtaggtattcaaatcgtagacaatgtccgaaacgtcattccaattaatacacagcacaatgttggaatgttcctggcaaacggtacaaataagcttaacttcgaagcagcatatatttctacccaagctacggtaactcccggccaagccgatggttttgcagacttcgagttcgaatacaaataa

SEQ ID NO: 149764 - DNA, 615 bp, Enterobacter cloacae
atgggggcaacacgtgttatttataatgcatctgaaaaagaggctacgataacagttaaaagtacgggctctgatcatgggtatcttgttcaatcatggattgaagacaataaaggcaacaaggatggttcattcttagtaacccccccgcttttcacccttccatcaaataaggaaagtgtattgcgaattgttcgcactggagggaatttaccgcatgaccgcgaatcagtttactggttaaacgtcaaagcgatacccccaaaagatgaaaataacgtaaactctcttcaacttgcgattaaaacaagaatgaaacttttttatcgtcccgatggattgcaaggtaacccatctgaatctccaaaaaaattgcgatggggtatcagcgggaacaatctgacagttatcaatgacactccttattcagtaactctgacagatgtgttttatggtggaaaaaaagttcagaagaccgaccttgtcccggcaaaaggtaatgctagttttccgttaccaaaaggtgcaactggaaaaagtgtaacgtttaaagcaatcaatgattttggtggatttagcgatgatatcacgcatccggtagtaaagcaggaatag

SEQ ID NO: 149765 - DNA, 2565 bp, Enterobacter cloacae
atgaataataaaatcattactcgttattcgcggttccaatttaccaaattagcggcagcattatttggtttgtctgcctgtcatgcccaggctgcacagacttttgatcctgcttttcttgaaaatttgggggatggttcatcagtagctgatctgtcaagatttgcaactggtagcgaagaacaattacctgggaaatatcgtgtagatatttttgtaaacgaactacttttagacactaaagatgtcacttttaatgaagtgaacattgataataaacaagtattagaaccttgcataagttactcattacttgaagaaatgggcgtacgcgttggagcatttcctgaattaactgcttataaaaaagaaagaaataatacgtcagcagagcagtgcgtacctttcaaaaaaataattcctgactcagatgcaaaattcgatttctatcagcagcgtcttgatatgagcttccctcaggctgctatggtccgtacaccacgtggctggttgccacctgaacaatgggacgatggtattaatgccttgatggcaaactatagctttagtggctccaatactgaaatgaaaggaagcaacaacgatagttatgatagttattacctaaatcttcgtagcggtctgaatattggaccatggcgtttacgtagctatgcaacaggttcctcagataatgggaaaagccgttggcaacatattaatacttatctgcagcgacctcttagagatctgcagtcaacattaacgcttggtgatagctacacaccctctgatattttcgacagcgttcaattccgtggggcacagattgcttccgatgatgaaatgcttccggatagtctgaaaggatttgcacctgtacttcgtggcgttgccagaactcgcgcccaggtcacggtgcgccagaacgggtatgttatttatcagtcttatgtagctccaggcccatttgtcattgatgatctctatccttcaagttctaacggtgaccttgaagtggtgattaaagaaagtgatggtagcgagcagcgattcattcagcctttttctagcctgccggttatgcaacgtgaaggacgccttaaatatgctctgacggctggccagcttcgtcgtcatggatatcagggcaaagagccgatgtttatgcaaggcaccttgatgcgtggcctttccaaaggaataacgctgtatggcgggattattgctgctagcggctataccgccatttcggctggacttggcaaaaacttaggaaccttaggggcaatatcagcagatataactcaatcttttagccacttaggagcggatcataaagaacacgaagaaggccaatcgctacgtttcttatatgctaaatccttcgctgaaagtggtacggattttcgtcttcttggttaccgatattccacaaagggttatcactccttcccggaagcagcagagttgcagcaggacttttccagcccatatttgctgaaacagaggagtcaaatccagggaactttaaatcagtccttaggagggcatggttcgctatatgcctcaattattcatcgagactattggggaaaatggggctcgcagcttctgacgcaagtaggttacaacaatagctggaaagggatttcatatgggttggcatatagtaaaacccggtccccctactcagggcagaatgatcagattttctccttatcagtttcggtaccgcttgaacgtttcttaccaagtagttgggcgagctataacatgaccagtgaacgacatggttcaacgtcccatttgattggtattcatggcacagcgttgaaggacaaaaatctttcatacagcgtgcagcagaacattcgcaacaatggtggggatgatactggcagcattgatttgagacaccaagggatctatgccaatagtaacttgggttatagctatagccgcaactctaaaacgcttaactacgggcttcaaggcgggattatggcacatgctggaggcgtaaccctatcccaacctcaaggcgataccatggtactcgttgaggcgaaaggcgctgctcacacaccggtgattaacaatactggcgttagcacggatttcagaggatatgcggtcgtaccttacgtccaaccctatcgcgggactcgagttgagctggatgcaaaaggtttaggagagaatgttgatctgcttgatggtgctgtgaatgttgttcctactcgaggagctgttgttaaagctcaatttgaaactcgcgtgggttatagagttctcatgaaccttacgcaacgaaacggtaaacctttgccttttggtgctgtcgttaatgttctcagtgaccgtaaaaacattcaaggcgatggattcattgtcggtgatgaaggtcaagtatatctaaatgggttagaagccaaaggacgcttacaggctaagtggggcgaaggcaaagaccaacaatgtaaagcagaatactctttgcagatagataaagaaaacacgccacctttaagtttaattcagtcaaatgctcaatgcatatga

SEQ ID NO: 149766 - DNA, 1047 bp, Enterobacter cloacae
atgaaaaatttatatctcgctaaagtgatggtaattacttttgcattatttagtatttatcccatgggtgctcaagctgttgacaattcatggatgcctggagaatgtcgcgctaaaaatggaacgcagacttataccttcgacttcaccaaaaatattacagacattaaagagaatgaaggagatcaaatctatgcagacgcttacaactggtctgcaaccggtggcttttatgattcacaatgcaattgcccagtaggatggcaaagtggatatgcatatttcaaaggagaaagcacgcttccagtatataaaattgatcaaaatagaacattttataaaattaatgacaatctagcatttgcaatccaatcatacattcatgggaaaggtagtttttacgttccatttatacaggaaaatgctggggcgggttcaggagtatgtacctcatcgcaatcagaatccgggggcagaggtagcatagacctattaattataaaacctttcataggtcaatattacatccaaaaaacaacactattcaaattatacggaagtgttgttaaaggttccttcggaactttaccgatggcgcaagtagacatgactggttccattactgtgagccagtcatgtctaattaactcaggtaattccatccaagttgattttggggagatgaacaatggaaactttaaaagtaaaggtggcaagcctgaaggagtcaatactaaaactatcaatctaggttatacatgcaacctagtcagtccaggtatggatgtaaagatgcgctttacaggacaaaatgatagtaattatcccgatgcacttgctaccactaaccctgatatcggcgttatcattgaagatggcaatggcaatcctattcaaccaaataccggttcgataccaatgactgttgattacaatactcagaccggctcagttaacatcataacttacccagtaagcacaacaggtaacatacctgtcgttggacaattcaccagcagagcgacagtagtagtcgattttcaatga

SEQ ID NO: 149767 - DNA, 516 bp, Enterobacter cloacae
atgattagaatcaacttgtttgtagctatggttacgtgtttgtttacaaacctatcattctcaaaagatatcgatatcaattttagcggcacagtaaaacaaagcagttgcgttgtagacagtgccagtaagaacctacaagttcaaatgggtcaagttaaggttaatagattcaacggaccaggtagtgtggttaatcaaagacaatttaccatcagtttatccaattgccagaatgttgactcaattgatgtatatctgacaggtcaacctgacaataataatagtaattatttcgcgataacttatgattcagacatggctgatggtgtggcgttgcaaatttccacaaccggtggacaattacacacacctctgggtaatctggtaaatacaccaatcaattatgccagtacaaagcaattacattatattgcttcgtatgtacagacaaaaaacttaattaaaactggtaaagctaatagtacagctgattttacaatagtttataagtag

SEQ ID NO: 149768 - DNA, 1029 bp, Enterobacter cloacae
atgaaaaaaagctgttttttatttgtaatctattttctctccgccatgactgtggcggcggaaaaagatcccgtatcatcatctcatcaaaagccatttaatgatttggatacgggttcgcttgtacagatgcgaattgacgatttgaagcaagaaaactccaggttgtgggaactcattcgaagcattgagaatcaatacaaggccaaatctgatgaacaggctaaaacagcgatagcgaaacaaaatgaattattaaaaaataatgagtacttaactcaaaaacaatcagaactgggttcacaaataacacgactagaggacttacttaaaaacgagaaagagagatcaaccgaggcagaaaaaaataagcaagaggaaatcagtacgcttaaagatgaactgacaaaatacaaaagcaaacatagccataactttaacgacaagaaaacactacaatcatacgttagtggtctgatctattcagatgaaattaaagcaatgctcaaaggctatgcttctctcaatatcgattttgacatagactctttaacatctggtttgaaggatgggttgaatggaacaacacaacttgaatcaaaaatgatagaatctgaaaaagataagcttttggcattagttaaaaaaagggaaggtgaggtttataaaaaatcagtttcagagataaagaaagcgattggcggcaagaaggttgccaaacaaaatcaatctgcattttttgtagttactcatagcgggaaggatgactataagcagggtgatgaggtaacgttcgacttgaggattgaaaaattagacggcgagtcgttacagcatgataaatcggctaagattgtatatcaagattcaatgccatacgttctaaatcaagctttcaaccttgccaagaaaggtggtaagactgaaatttatggtctcgcttcagatttctttgcaattggagaaattccggaaagcgtcacaaacttaactccagttaaaatcattgtagacacggagctaaaataa

SEQ ID NO: 149769 - DNA, 585 bp, Enterobacter cloacae
ttgcaatgccaggtgccgtcgccgcgccgctggtcccgccgcagggattacgactaccgtaagaacctggtgcgggaagagcgggacgatgacccgttcggcttgtaccgctggcagtacgacagcgctgggcgtctgcttgttcaggacggcacgctgcccggacaggagcagaggcgctgggatgctgccggtaacccgcttgaaggctctgctgagaaggtcacgcacaaccgcctgacgcagctgaacggcattcgctggcagtatgacatacacggccgtaccgtggagaaggataacggccagacccgctggcactaccgctacgacggcgaacatcgcctgacggaagtcatcagccaactgcaggatcgcaacaagccgcagacgcaggtcagcttccgctacgatccgctcggtcggcacatcagcaaaacgcaccagcagatgctgggcggtcagccaaccggcaagccggtttgtctgggaagggttccgcctgctgcaggaagtgcacggagatgtgccgttgacctacgtctacagcgatcaggacagctacgatccgctggcgcgtattga

SEQ ID NO: 149770 - DNA, 1188 bp, Enterobacter cloacae
atgaattcatgtgtcgtggcgagagaggccgtcgcgccagccagacccgcctggcgggccgtctattcactggggctgggcgtgtttgggttgataacggctgagttcctgccagccagtttgctgacgccgatggccgcgagcctgggcgtcagcgagggcatggccgggcaggccgtcaccgccaccgcgctggtggcgctggtcaccgggcttctgattacgccggcgaccaaaagtatcgaccgtcgctgggtactgatgtttttctccgtgctgcaaatcatctccagcctgctggtggcctttgcgcccacgctgcacgtcctgctgatggggcgcctgctgttaggggtcgccatcggtggcttctgggcgatgtcgacggccaccacgatgcgcctggttccgacggataaagtaccgaaggcgctggcggtgattttctccagcgtgtcgattgccaccgtggttgctgccccgctggggagctatctgggtagcctgatcggctggcgcaacgtctttgtgctctgcatactgccgagcgtactggcgctgctgtggcagatctgggtactgccgtccatgaagcccgagagcagcggtagcctcagcacgctgttccgcgtgctgcgtcgaccgggcatgatcggcggcatgctggccactgttctgatcttcagcggccatttcgccttctttacctacctgcgcccgttcctggaaacggtggggcaggcgaacgttgagaccatttcactgatcctgctgggctttgggctggcgaactttgtcggtacttccgttgccggacatctgctggcacgtaatctacgcctgacgctggcgctggtgccgttcgccatgggcatactggcgctgacgatggtggcgtttggccatctggcaatgctggacggtttcctggtggcgctgtggggctttgcgtttggtctggttccggtgggctggtcaacctggcttgccaccaccgttccggatgaagccgaaagtgcaggggggctgctggtggcctcaatccagctggcgataagcgccggtgcggccgggggcggggcggtatttgaccttaacggtgccagcggcgtattcgccggaagcgggttcctgctggtgacggcgatggtgattgtgttgatgggcgtgaaagtgaaagcggaatga

SEQ ID NO: 149771 - DNA, 534 bp, Enterobacter cloacae
atgaagataacaatatcaggcgtattactgggtgttttcttactggccggatgtagtcagccaaaggctgaggcgcaaacgcaaagcggtggtacgggaacaataaaagccatcaaccataccagatgggccatcaatcatttcagcgtaaacggtcagtcgggtattgatattattggtccatttcaggggggcggcgggggatgttgtttcggcgtaccctcaaactggaaaccgggaatgacagtcaaaattgactgggaaacaggagttggtgggtcgaaaggttttccgggcttttctgacagagaaaaatataaaaactggaaacggcagattgatttgcaaaaaaaacaacataccgcaattgtttcaatacctgattatacaggacaggaaacctgcggtattacggtacattttttaccctgcgatgacgtaaaggtaacaaccagctgctggtcacctgctaatgctaattatccgatcagacttccgctcgaaatgaaggagccgaaagtatgtccgaagtaa

SEQ ID NO: 149772 - DNA, 489 bp, Enterobacter cloacae
atgaggtcagttagcacgatgtcaataaaatcacagttcttgaaaaaattgcaggccagacaacctgcgccggctttgccttgcagcaagagtcagatagacatagctgagtttcgccagcgaatggagcgacttcagacgcagatggatgagtggctgacaggtaccggactgaacgtggagccgctggcggcatccgtttcggacctgctggtggagggaggggctttcgagatttccggtatcgttctgcgttatgacaaccgggcagtaaaatttatgccggtatttttgtatggtcagggcgtggctggctgtgtcgagataacattctgttccgggaaaaatgttatttctcaaggccgcctgttcatgcgggttaggggagtgagtaactggacttatagtccccctgatacatcgcctgagtctggacaacgatttgatgaagctatttttttcggtctgattttagcgctgttgccatag

SEQ ID NO: 149773 - DNA, 1335 bp, Enterobacter cloacae
atgaatgacatcaccccgcgtaaaataaaaaccggcggcgacccgcgcacgcttccggaatatacctcccttcgtaatgaattgaataaactaagccatccagcgcgcccggatgtgaactgggtatacgttgaaaaacgctgcctttcattattcgagcaaaacggcgttgagttgcagaccgcagcctggtacacccttgcccgtacgcacctgtctggattagctggtctgaatgaagggctcgctatcctggaggcgctgattagtcgtcagtgggatgttctctggccgcagtcgctgcaggttcgtatggaaatccttagcagcctgagccagcgactgcagcagcacatgcgtatgctttcattaaataacggtaatcttcgcgaactttatagcgctgaagcgttgcttacacgcctgggcgaggtgcttcagcgccttgagctcaaacaccttagccagtttgatacgttacgaatggtgatacattcaagcgcagcaaggctggaaaccagtacaggcatgacagacttgaatgggagcgggcccggcagtgaatcgcctccggagaggacagagccgatcgaagcggtgaaatgggtctatgttgcgcagcaggaaaccgagccgaagagtgaggaccgtatggcggctcacgggtctgtcagaccatggaaaccttttgtcgctggggcgtgttctgcgctgctggcctgcgtcgtcgtagcgtggggagggggctttctgtccagacccgatcccttaacgactcaagccattgcctcgctggcgccgttacctgaagtgcttacacctgttcagcaagacgcgttaacgcagcgaggaacgttaccgtctacgtttatctcagatacgcagcagcagcttgcacggctggataaactgtctcctgactggagcattgtttatagtcttcagctgttagaacaactccagacattgcgacctgaagaggctaaatcgctgataatacagtggcaaaaaaagtttaacgcgacggcgttgcctgtcgacgcaatgaatagctggtatcaggggatgatgaagcttcagcaactgaataatcgactgagtagtctggatgagcaaaaaggaaaatatataacagtgagtgagcttaaatccgtggttttttcgactatgcagtcatttaaccatgcgatacccgctgaagagcagctcaggcgtctgtcgcagtatcctgcaggaagtgcgctccctgaagcagaaaagacgcaactggagctgcatcttaaacaactggcaatgcgatatgctcaaattaaacagaatttttctgagcaatga

SEQ ID NO: 149774 - DNA, 807 bp, Enterobacter cloacae
atgaacatcgtagaaaaaaccgttaatagtataaataagatgcatgacggcgacaccttacctatctcggcttataaattccaatcgcatgagttagcccaaaagcaagctcaaatggtattttccaacgaccgtggtgatgtcgaaaaagatgcccaattccgtatgaaccagacgggcaatattttctatgtttcaacttctcctgagcttaccgagaaaaccaagaaattatttgatagcgtaacggttttattcgctgctatgaccgctgcactgaatgaatgtaacaaatcactatttgactacgatgcatggcgctcagtcattggcagatcaggtttctttgtagaagttcagaaaacaagaaacatgatgacgattaagaatagcggggttactgtaaatacgcagatcattcagcagttactgcccggactgacatcgggcagtgcaatggagattgccaagggcgttctcagtgcagtgaatggtgagttcatggcatccgagcgttctgaagatgctaaactcgggcatatcctgttcatctgcgaagaactctttggcgctccaagcgttacagtgcgcctcttctttgcatctaaaaaatcgcacagcgccataacccagtctccatgccataagtctgtatcaactacatttgagcagttgcaagaagccaataccttcttgttcgtatcgccggaaaacatcgctgaatatgcaaaactattcactgagcagccggaagagtatttaaatctcattgagcgcttcaaacaaatgattaatccgaaatcttaa

SEQ ID NO: 149775 - DNA, 249 bp, Enterobacter cloacae
atgaattttgagcataccagacattccggaatggaacgcccggtatcaccttactggtgcaggctacagtttagaggaaagggattgcgctggcgaagtcacgcgccagagaaggcatcagcgtcaggcggtcagtttatcgagaaaagaaaacagcacctggttcatttcgcgataatcatgcgagcggagtttttccgccgtttcgacaaaacggaattcacccgcacggcggaggtcattctgtga

SEQ ID NO: 149776 - DNA, 612 bp, Enterobacter cloacae
atgtcctcagtgagtgcagtatggcatacccgcattttgctggctgcaggcctgctgctggccgggtgcgaccagcccgtaaaatcggaaccagccccgcccggcgggggcggaaccattgaagccattaaccacaccagttgggccatcaaccgcttcagcgttaacgggcagtccggcctcgatattatcggcccgtattcgggtggcggtgggggctgctgctttggcgtgagcgggccgtggaagcccggaatgacggtgaaggttgactgggaagcgggcgtcgcgtttgccagcgatgtgccggagatccctgaacccaaaaggccaaatttaagtaatttaagtgaagaagatgcgaatttaagagctgagcaatatgacgagatgtaccacgaatggttcagcaaaattaaagccatcagtaaaacacattcccgaacggtgcctgtccccgattacaccggacagaaaacctgcggcattaccgttcacttcctgccctgtgagcaggtgaaggtcaccaccagctgtgctgactacggcagcccggattatcccgtcaaagaccccgtgcatatggagaagccgacagtatgtcctcagtga

SEQ ID NO: 149777 - DNA, 612 bp, Enterobacter cloacae
atgtccccagtgagtgcagtatggcgtacccgcattttgctggccgcagccctgctgctggccgggtgcgaccagcccgtaaaatcggaaccagccccgcccggcgggggcggaaccattgaagccattaaccacaccagctgggccatcaaccgcttcagcgttaacgggcagtccggcctcgatattatcggcccgtattcgggtggcggcggaggctgctgctttggcgtgagcgggccgtggaagccaggaatgacggtgcaggttgactgggaaacgggcgtcgcgtttcccagcgatgtgccggagatcccgcagcctgagcggccaaaaaccaaaggaatggacgagcaggattattacaaagcatggcaggcttactcagataaatatcacgactggtacgaaaaaattaaagccatcagtaaaacacattccctaacggtgcctgtccccgattataccggacaaaaaacctgcggtatcaccgttcacttcctgccctgtgagcaggtgaaggtcaccaccagctgtgctgactacggcagcccggattatcccgtcaaagaccccgtgcatatggagaagccgacagtatgtcctcagtga

SEQ ID NO: 149778 - DNA, 597 bp, Enterobacter cloacae
atgaacaagttttacacaatgcttttcgcggctttgcttttactgacagggtgcgaccagcccgtaaaaatggaaccagccccgcccggcggaggcggaaccattgaagccattaaccacaccagctgggccatcaaccgcttcagcgttaacgggcagtccggcctcgatattatcggcccgtattcgggtggcggtgggggatgctgctttggcgtgagcgggccgtggacgcccggaatgacggtgcaggttgactgggaaacgggcgtcgcgtttgccagcgatgtgcctgagatccctcagcctgatgaaccagataccaccgggatgaaccgggatgagcgttatagggcatggcaagcttattcagataaatatcacgaatggtatggcaaaattaaagccatcagtaaaacacattccctaacggtgcctgtccccgattataccggacaaaaaacctgcggtatcaccgttcacttcctgccctgtgaccaggtgaaggtcactaccagctgcgccgactatggcagccctgattatcccatcaaagaacccgtgcatatggagaagccgaaagtatgtccccagtga

SEQ ID NO: 149779 - DNA, 963 bp, Enterobacter cloacae
atgaataaattacagctaaagccacgcgagttaaaaataatctccgtcatcgcagccacccacagcattggtgatgccgccgccctgctgggcatggcgcaggccaacgtcagtaaatatctctcggattttgaaacgcgggttgggcttaaggtttttgagcgcacgacccgccagctcgctctgacgcagttcggtgaagcattactcccttatgtcgacgccacgctggacaaaaacacgcaacttattaatttcattgccgattataagcatgaaaagcgtggaaaagtcacgatttacgccccaacgggcattgtgacctatctcgcgcgccatgtgatccaccagataaaggacatcggggacattcgcatttccctgaaaacctacaacctggaccgcaacgaatattcagaaggtgtgtccttcccggatgactgtgatattttaattacctatgctcagccaaaagatgaaagtctggtcgccagcttgttagcaaaatattccgtcactgcattcgcaacccaggaatatttaaataaacatcctttaaccggacctgaagatttaattaatcactcctgtattctgatcgactccatgctggtcgacgatgctaacatctggcgttttcgcatgcatggcagtgatgatgtgcatgattatcgggtaaccggaaactatatttgcgacaatacccagacggccctggagctggcaagaaataatcttggcattgtgttcgcgccgaaagaaagcctgaagaaggaattaacgcaaggtacgctgatcccctgtttcccgcatcaagaagagtggtggctcgatctgaccgccatcttccgcaagcgcgaatatcagccctggcgtgtacaatatgttctggatggtgtcctcaactgcctgcgccagcaaattgctcaggccgtccatggacggcctgagctgggcgattag

SEQ ID NO: 149780 - DNA, 1077 bp, Enterobacter cloacae
atgttgaaaaaaatgatgatgtttgctggcctgctgggcgggtcggtgctgttttccggccaggcgctggcggcggcagactgggggccatgctcaccaactaatgggacacagaccttcaatgccctcatgaataagacagtgacggacgttgaaaaaaacgctgcaggttcggtcttccctgatttctttacctggagtctgagtacacagtatcctggcgtttgtgaatgtccccctggtgaagagacgagtgagacctatttcaagacggtttcacctctggcgattggacatatctctggcggacgcactttttacgttgttaacaataatatccagatagcatctgaagtttatattggtggatattatgaccattaccaagaagtacctttcgaaaatgtctccaataagtggtcttcgcgagaagtatgtgatgtggacaatccaaacccggcgggaggcttcactacaggagggaagggcaaactgactctgtatatcaatcgacctttcgtaggtgaattggtcatcccaccaacaacaattgtagacgtatatggtacgcgtaagcccggtgtttatggcacaacgcctatttcagaggtgagtttgagtggcacagttatcgtccctcagggctgtgaactcgacagcggtagcacgctggaaatcccctttggtgaatttaaggccagtgattttaaagatcgtaaaggccaaattgccaagaacgcgacgatatttaccaaggaactgcagtttaaatgcaccaatatctccgatggcgtaaagatcttcctacatattgagggaatgccaaacgccaatgattcgaatgctatcgacatgggtaatccggatatcggtgccgtcattaaaggcgaaaacggtaatattttggtgcctaatgatatcaacgcgaatcaggagctgagcgtttcgggtcttgttgacgacacgcaccgtaccgcctcgacgaccatttcggcttaccccatcagcaccaccggcaaattgccggccgccggggagttcgaagggatcgccaccatgcgtattgatgtggagtaa

SEQ ID NO: 149781 - DNA, 702 bp, Enterobacter cloacae
atgtattacagcgaagaaatcattaggaaaattggaaacgataaagagctagcagtgcgattagataaagcgttagctggagttaaagagggggtcgtagattatttaaatggtctggaggatggcgtaacacgattactttattatacttcttgtcttacagacaattatcaagatgtgtgtaataaactaatatctgaggataaaagatttttgttttctctgtatgaactgataaagcatcgggatgttatattccggatgataaaaatatacattgaaacacttctaaaaaataagagtgaagtagaaaaaaaatcaatccttgagaaattaacaccctttacaacacactactctataaaatacatttcaaaaaatggtttaatatatactgtgacatcttatatatgctacgggaataagatgagtttagtagtacaagatgcattaatgaaaaaaattggtagcagagtcggatgggtggtgggaggcgcaaatatttatggcattgttcaacatgctgctgaaagtgcaaataatctaaaatatttttgtccattattttataatgctttatatagagagggattagaaatgctgtatttcttgatcgaaccgattatcctgaaagcaggatatctgaatattagcttagcctcgaatgaggaaattacccaagcattaaagagaatgatgtga

SEQ ID NO: 149782 - DNA, 555 bp, Enterobacter cloacae
atggatcactatcttgagatccgcgtcctgcccgacccggagttcagcgaggagatgctgatggccgcgctgatggctaaactgcatcgtgcgctgggacagcgtgggctgggggatattggtattagcttccctgcacatggcattaagcccggcgcgttgttacgcctgcacggttcgcaacaggcgttaagcgagctcgactccctggcatggcgaaagggactaagcgattactgcctgtgcacggcgatacaacccgttccagaggtaaagcaatggcgatgcgtgtcccgtgtgcaggtgaaaagcagcgcgcagcggcttatgcgccgttcggtaaaaaaaggatggatcactgaggaagaggcgcagcagcgcctattaaaaatggaagaagcgcggactgatttgccctggcttaatttacgtagcctctctacaggtcagtctttcaggctttttattcgtcatggtgagttgcttcccgcacccgtggatggacgcttttcaacctacgggatgagcgcgacagcgacagttccctggttctga

SEQ ID NO: 149783 - DNA, 834 bp, Enterobacter cloacae
atggctagtaaaaatggcgatgatttctcttacgcaaaagatattttcccaatttttttgcgtaatttctctctcgagtcagattctttcaatagattcaatcgcggcgttgaactgcatgcattatcattagaaacctcagaatttgcatcgcagattttgaatttttggatttgcctcgaggctttacttataaccgaaaaagggaaaacccacatttctgcagtgatagatgtcattgaactaattgtaaatagatactgttttagagaaaaactcaatggtttggcaacatgtattaaacattgggataaagattacagagttaaactcgaggactctattcctcagcatctgaaagaattagatgatgaggaatttatagcagcgctttcttgtgtagaagaatataaagaatatgcaagcttgttactgcaaagaatgactaacgcccctcttttacgatttaaattcatgcttatagttaagaatatgcaagatcaaaataacttaaagaaaactttaacacatgaaatagttagagcaacacgtgacgttcgcagaatttatcgcgcaaggaataaaatagttcatcaaggaaatataaatgagcataatgagtttattgctgaaatggctcattattatcttgatctggttttattttgcattatagaaagaaaaatatatttcaacgacattcgctcaattgataatttggttaacgagctcagaatatccaagcaatgtcatgaaaaatacttacgcgaatgtagtgatagaaaactcacaccgagtaattacataggtgtcctatttggatcccaacattaa

SEQ ID NO: 149784 - DNA, 453 bp, Enterobacter cloacae
atgactcgctgggagttctgccagaatcgcgccacaccggaggacatcgtcgtctattttaaccagtgtgacccgctttttattgcctcgatcgccgatgtaatcgcgttacaggactatgcccaaaaaatagtggatcgggcatggagaaccgaagcctggcatgacaacgcgctcatcgggctggttgcagcctattataacgcgcagcgtcagcagggctttattactcatgtttccgttttgcctggcgctcagcattgcggcataggtagccagctattaattcagagcattgaacatctacagtctctgggtgtgactgaaattaatcttgaagtcgatgagaataacgtgtcggcacaacatttatatctaaagcatgggtttatctttggtcgatcaaacgcttcgaagataaccatgactttgcagagtgagataacaacatga

SEQ ID NO: 149785 - DNA, 303 bp, Enterobacter cloacae
atgaaaaactactattctatttataaatcaaatggtaattggtttataaaaacatccagcaacattgagcaactcagcaaaagtcagtttagaacacaaaaagatgctattgccgcagccaaaagccttatcaaaaacggaggtgttattgctgtgcatgcctctaatggagaagtaagagatgtaatttcccaacccagtagctcttggggtataaagaaagccaacacaagtcatagcaaggtaaataaacaggttatttttaagaccttagcaaataaaattgaaaaagataaggcttga

SEQ ID NO: 149786 - DNA, 621 bp, Enterobacter cloacae
atggaatacgataccaatgtttttataaattgcccatttgataatctttacgatcctttttttgatgctgccttatttgcaatatatagatgtaattttaaaccaaggtgtgcattagaaataaatgatgcgggcgatcaacgcattgacaaaataaacaatataatcaaagaatgcaaagttggcattcatgatatatccagaacagaattggatgcgtatagtgatttacctcgattcaatatgccacttgagttgggattgtttttgggtgcgaaaaaattcagctcagctcagaagcaaaaaaacaagcacactatcattgttgatcgtgagagacacagatatcaaagatatatttcagatatctctggccaagacataatgtctcatgaaaacaacccagagcaactaatcaggattattcgaaacgctcttaattcatatggaattgtagccgcattaccttctgcgcaaataattatcgctgattacaatgcatttcttttattaaaaccagaactttgcgcaaactccgagctagatattaacgacctcacatatagcgacaaaactagattaattgagttatatctagagtttaacgcagcagctaattaa

SEQ ID NO: 149787 - DNA, 420 bp, Enterobacter cloacae
atggagttcttcagaccggcagagttacgcgaaattattgctatcccgctttttagcgatttggtgcaatgtgggttccccagcccggctgctgattacgttgagcagcgtattgatctcaatgagttgctggtgtcccatcccagctcgacgtacttcgtaaaagctgccggcgactcgatgattgaggccgggatcagcgacggcgatctgctggtggtggatagttcccggactgctgagcacggtgacattgttattgctgcggtggaaggggagttcactgttaaacgcctgcagttgcgcccgacagtgcaactcattccaatgaacagcgcgtactcaccgatcatagtcggtagcgaggacacgctcgatgtgttcggtgtcgtgactttcatcgttaaatcggcaagctga

SEQ ID NO: 149788 - DNA, 207 bp, Enterobacter cloacae
atgcgtaactataccaaccagacgtacatcatcaagcgcatcgccttcgatggcctcaccgtcatcagtgatgagcgcgtcaccagcccaatatgcatgctgctggcgaccacaaaaccagatgagcaatgtgtcttcacgcttaaacaggatcctactttcaatgacatcatagccttcagacgtttcaacaatgctcgcagatga

SEQ ID NO: 149789 - DNA, 180 bp, Enterobacter cloacae
atgaaaatcgaatttgatgaagttgctgaaggacaggtaagagccacccttacactgaaacgtgtccctggcgaatgtgtacgtagttacggggtattcgcagaggatgaagaaaccagtgcaaaacagttactcgcttggatgaaagaagaaggcaaggtgccggaagatttcgagtaa

SEQ ID NO: 149790 - DNA, 477 bp, Enterobacter cloacae
gtgattggcgcgctggttaaacgttactggttgcagttgctggttatagcggtaatcggcgtgctggcgttcttcgtgaaccactaccgcgacaacgccatcacctacaaagaccagcgcgataaagccactgagaaactcagcctggcgagcgccaccatcaaagacattcagacccgccagcgcgatgtcgctgcattggatgctaaatacacaaaggaattagccgatgcaaaagctgaaaatgatgctctgcagcgcaagcttgataatggtggtcggatgctcgtcaaaggcaagtgtccagtgtcagccgcaacccaaaccaccggcgcccccagcatgggcaatgattccaccgtcgaactctctgcagttgctggacgaaacgttctcggtatccggtccggaatcctcagcgaccaaacagccctgagagcgctgcaggaatacatccgcacgcagtgtttgaaataa

SEQ ID NO: 149791 - DNA, 690 bp, Enterobacter cloacae
atgaaatctcttgcagaacagatgcgtaatcacgaccgcgagcagatgagccgcatagcccacaacctgccagagcagtacgaagagcgcccacggcttgaacaactagcgctgatattcaacaacctgttcaacgagcttcgcgttgcattccctgcaagcatggcgaactttcgcacacaggctgacgtgaacgaattccgacgtcagtggctcatggcgtttcaggagaatggtatttactccatggaccaggttgaggccggcatgcgtgtggcgcgaagccaggagcgaccattcctgccatcgccgggccagttcgtcgcctggtgcaaacagagtggtggggcgctgggcatcaccgttgagcaggtgatcgccgagtactgggactggcgtaatcgttcgttcgaattcacttccagcgagcaattcccctggtcgcagccggttatgtatcacatctgcgtggaacttcgtcaccgcagcacagagcgccagttaacgcatggagagctggcgcgcgaagcgagtgatctgctggacatgtgggagaagcgcgtcatcgcgggtaagccagttccgccggtgcgccgggcgattgcagcaccggttgccgaacacggacctacgccgatccaactgctccaggcgaagtacaaccgcaacaagtcgaacgggatggtgtga

SEQ ID NO: 149792 - DNA, 264 bp, Enterobacter cloacae
atggagattaaagatttagtcaaagaaattgaggttctggaagcaagcataagaagtacagataagctgttggaaggtgctgagttgcatgggatcagtttgattattgttgcagctaacaacactcaatacagaggaattgcagatcaggaatttctaatcgaggcactcaaatcgaaaagaaatgagatgcatgaaagactggtgaagcttgtcgatgcagtcggcgtagttgaaaaggttattgatggattggtcgcttag

SEQ ID NO: 149793 - DNA, 243 bp, Enterobacter cloacae
atgagtaagaaaaacgacggtggctacgccttccctatggaggcgacagatgccacagcttggagggattgcaatcagggaatgacgttgcgcgactacttcgctgcaaaagcattgtctggctggctggcaagttatccggagtcgtgcactcaccctattgttgccggcaatgccgatgaagttgcgaagcactcatacaagcttgccgactcaatgctccgagcacgggaggcatcatga

SEQ ID NO: 149794 - DNA, 267 bp, Enterobacter cloacae
atgaaaatcctcttcgaggcactcaagcgcatcactaaacgagactgcaacaatcttacctcccataaactccataccagcgttaactggcggctctttgccatcttcatactcaaatacaaacgtcacctttcccataatctctccttaggccgcgcgccgggcacgcagcgatttgatgtgctcgctcgtctccagttcggcgcgtatctgcgccgcctcacggtgatcgaggtactcaaaatcattgttaaaacggtcgattga

SEQ ID NO: 149795 - DNA, 612 bp, Enterobacter cloacae
atgtccccagtgagtgcagtatggcgtacccgcattttgctggccgcagccctgctgctggccgggtgcgaccagcccgtaaaaacggaaccagccccgcccggcgggggcggaaccattgaagccattaaccacaccagctgggccatcaacagcttcagcgttaacgggcagtccggcctcgatattatcggcccgtattcgggtggcggtgggggctgctgctttggcgtgagcgggccgtggaagcccggaatgacggtacaggttgactgggaaacgggcgtcgcgtttgccagcgatgtgccggagatccctgagcctgtaagaccagaccttgcaggcttgagcgatgcagaaggatacagggtagcccaagcatatttcgatgaaaaacagaaatggtataagaaaatagagtcgttcaagcagcagcattctcaatcggtgcaaatacccgattacaccggacaaaaaacctgcggtattacccttcatttcctgccctgtgaccaggtgaaggtcaccaccagctgcgccgactacggcagcccggattatcccatcaaagaacccgtgcatatggagaagccgaaagtatgtccaaattga

SEQ ID NO: 149796 - DNA, 2115 bp, Enterobacter cloacae
gtgacgttcacggctgacagcagcacggcaaaagtcagcgcgctggaggtgatcgacaataacgccgtggcagacgggacggacaccacgcgcgtcagggtgacggtgaaggacgcccacgagaatccggttgcaggacaggcagtgagttttgatgccggaaccggcgtcatcattccggcaacggcaacgacggagaaggacggtaccgtcaccgtcagtcagaccagccagaaagccggggagtttcaggtaagcgcgactattggcgataactggttacacgcaaaatctggtctggttaactttgtgccaggaaaggtcaaccgggtgacttttgtcgacgagccgaaaagtgttcaggcggacggtgtcactcatgccacctggcagatagcgatgttcgacagctttaataatcctgtgccaaatacggctgtaaactggattttccctggggcactggcgacaaaaatcgacagccagagcgatacaatgaccaataactctggggtggctaagttgacgctgcaaatgggtacagtaaaagcggaaaatctggtcgtgaccgcgaaatcggaaaacaacgtagaggattcctcctcgattgccctgccgccggttgcaggtagcgttgaacttacgatggcatcgactgcacgcgtggacgaacctgtcacgctcacggtaacggcaaaggataaaggcggagtagtgatgcctggcgctgtggtcacctttagtagcaaccatccggactggatggtgataacgccagaaagcgcaacaacgggcagcaacggtgtagccaccgccgtggctaccatcagaccggaaaaagggtttggtgcaatgggaggctataccctcacagcgaaagtcagcgattcagtgaaggattcgaaaacgttacagctcagtgtagggcaaattgattacgcgaagtcgagtctgacccccgtcagtgacacgatggtcgttggcaatcagttatccatgctgatagcgatgaaggataagtttggtaaccctgtcagtggcctgacgggacgaatcggcgccgtgctggccgatagtcaggggagaaacaatggaggattgatccatactaatagcgggggcattacagagactgaaaaaggaaactatccgttcaatgtaaaaggaacacgtgctgatacctatactgtcacccctattgtagaccgagttgagttaagcgcgcttaaagcgaccgttaaggtgatggcgcaaaaaccctggatcgcgggtacgccacaaataggttacaccctcacgataggcaaaggttccgggtttagtacggcaacagtcaactggaaggttaatggcacaatctaccgttcgagcgccaatacctcggtggacaacgcgtcacttgagttgacagacaccactctgataaaccaaaaggtgagcgtagaaattatcgatagccataactcatcaatgcggcttgaatcagattcggtcacgattcggggtacaccttccgcgagcgatgtgaagattaagggcgatccagtatatggaaaccaaatctcggtggactatgtttatcaagccaacggcggaggcgatgagagcggaacgcagtatcaatggtactggtctcagaacagttacgataaatctccgacacctattcctggtgcaaccggaagaacgctgaagaccgatcgcggtcagtacgggttatatctttatgtctcggtcacgccaaggggcagcgctggcggctcaggtgctaaggtatttaacgacgggtatttcagggttacagatgcgggtactccttctgtcagccaacttcatattgtgaatgaagcccgggtgggtaatacaattgaggccagttatatcttcaatgctaatggcagtggtgaggataactcgttatatcagtgggcttcatgggatgaatttagcggccattatcggaatttagacggagagaccggtaaaacgttatacataaaagaagcctatggatttttgaaagatatccgggtaagtgttaccccacgcggtactctggggtcgcaaagaacgggcggtacagcctattccgacccggttaatatcgtcaaataa

SEQ ID NO: 149797 - DNA, 711 bp, Enterobacter cloacae
atggataggagtttactcttgcaaacatacaatcgtttctatgcaaaactgctttttaagcttgttcaagctcaggcgtttctaacacaatggaaaaatgctcataacagaattttaatcgctggcgcaattatcttttttttatttttttcattcttattcctaatgccgtacaaacaatcagttgaactatatttttctaatgagaatttactttcagctttaaggtctctattgggcggcataggtgctgcgctcataggtgccactgcgatagttttttcactgattgttttttcaatgcagacaaatattgagcgtatgccacatgggctatttagaaaatttggttcagacttactattgctgggttcttttttaggatctttttttatagcaacattggttgcatcaatgtccttgattccaaataataaattagccatgtatgctatattcatttgtgtatggggagtgcttgctgcacttattttatttttatatgcataccgaagagctcttaaattgattaatcccataacccaattaacactaatgtacaattcagtgcacaaagatttagttaaatgggatcgcctggcaacaagggctcaagacataatggaaaataacgatgttgatcaatcaaaaactgaaaaccccaatgaaagactcttagataccaaaagatttattttttttaaaaaataa

SEQ ID NO: 149798 - DNA, 1434 bp, Enterobacter cloacae
atgtatataaatgctacatattgttcagtgaaaaggggaacctatatagaaaacaatccttttttaaatgttatagataataacgatgcttttataaacttatcattagaacaacttagacaaacaatgcagactgcattagcaaggggcgatgagaaacttgctacaagtactctacgtggaatgagtggattatatggtgtttatttgtcaatagagtacataggtcgcagcagaagtaaacatcatgcaatgctagcagcaaattatatatcttcagctgttgagtcagtaatcccccataatatggccgacgtaatgatggaaggtgtaagattgatggggcggaattgtgtcagggctcttggatattcaaatgcatcagatattattggaacggttcaaaagatatcgctattctcagcagtaagtttaaaaaacactcttcttcaacctgttacactcacggctttttctcagttttcagatataaatatacaattaatcatcaaaggggatttgaattcaggatttgcaatggaaagcttgcagaaaagtatcagtcaagcggcaatggtttttttgcacacagatgatactgttatggattctcgtcatagttatacccttgggccttattattcagttgttaataatggagggtttattcaacaatttaaaggcttggtaaattacttaattgatacaaaaattgatgataatagcccggatacaattgttaggaatattgaagcgtgggccagtaaattatctcaatcacaaaaagaggtgttgttggtagcggctcagagacgttcattttttatatatgatttgattcattggaatgtaatggtatgtcagggtttactcattctatctgaaagcgaattgtgcgatgagcatcatagtgaaaaacttaaaaagcattcggtttggttaattgcgacattatcatggcttcctgaagagcaagaagtagtcacttttgttaacaatggttcatttgttgatagtattttcgaggctgcaatgatgggattgactctcaacagtgctgatttttatgccatgtgcaaaaaaatcttggaaggttgggttaagaagaccgcagagcatatgtctaccagaagtgggtttgaagaagcgataaaaagtttggttgctctcactgtaaatgaaggtagcattgatgcagaaaacaaattattagaaaagcttaagaatattttagctgaaataaaatctccatcgaagggattgcaagaacttacagctagacatctgttaaggagtgctaaaacttatcgttatcaagctggattatattcgccggtggatatttttctaagtcaatgtgatcctgacagcactgtttcattatttactaaaattgcggaaattttaaccacagaaatgcctaaagcagaatga

SEQ ID NO: 149799 - DNA, 303 bp, Enterobacter cloacae
atgccgatgctgcccggaggtaaaggcccggttaatcctgcccgggcctacctgctttccctcaactccgcccgtagttggcagaccatggcctcgttccttagcattctcgccgacatgctaggggccgcttccctggagtccaaccgcaggggtagcctgcggcgccattacgtaatggccttcacggaactcctgcgcgagatcggccgtgccactgccgccatctgcggcagcccagggcattccgcaatctcagtaagccgggcaagcgcagaagttgttgacatcggaaaggtataa

SEQ ID NO: 149800 - DNA, 1098 bp, Enterobacter cloacae
atgcttatctcatcattaccatcagacgaagccagaacaatcattgacttaagtgctggtgaaggctcgttgttgatgacagctgcgctcaaatacgacaatgcaaagctctacggaattgatattgatgatgaaaactgcagaaagttagacctcttaaataacacaactagtatatgtttagatgcaacccattcagccagttttgataaaataaaggcacacaacagtacatatgacatagtcattggcaatcctcctttttatacagctgaacatactgtctatacaagggggttatttaaagagtggggactaaatcataaaacaaaatattacagagctgagattttgttcttaatgttgtcactaaagttgcttgatcgagacagtagttgtggaattgttgtacctgatactatattctcaagcgagaaatataaaccactgagagagaaaatagtctcattatttaaatttatagatgttatagagttagataataaggcatttttggggactgaagcaaggactcatattcttactgtaagtaacaaaaaatcaataaacccatcaataacaacaagaagttctaaaaaaattaaagtaataagacttaacaaagaagagtttattgaaagggccgatcatcaatataacacatttaagtataacagcaatgaaaaaaccattgaaaattctggtataaaagttatgagagggaatatcagcaaaacgaaaaaaactcaactacatgatgctattattcactcatcttctttttataatgattattctttatttgaaaataacaatgacagtgcagaaaatggttcagccgtgcaggcggtgaaaggggatgttgttgtacccagggtcggaactagatgtttggggaaagttgggatcatacgaaacggttctttttccattacagattgtgtttttgttatcaaagcttcggagtacgaatgtggtgaaatgattgccgatgcattaaaatctaaatttggagtcgactggattaagagtatttcaaaaggcattggagcgcagtacataacattaaatgacataaaaaaactacccctgcgataa

SEQ ID NO: 149801 - DNA, 1248 bp, Enterobacter cloacae
gtgacggtaccatccttcccggtctctgccgttgccggaatgatgacgccggttccggcatcaaaactcactgcctgcccggcaaccgggttctcatgggcgtctttcaccgttaccctgacgcgcgtggtgtccgtcccgtctgccacggcgctattgtcgatcacctccagcgcgctgacttttgccgttgcaacatcagccgtgaacgtcaccaggccagacttcgcctgcgtccagctgtcgccggtggttgcctccacccggaactccccggccttcaggctggtctggctgacggtgacggtgccgtccttctccgtcgttgccgttgccggaaggacaaccccctctcctgacctgaaattcaccacctgcccggcaacggggttctcgtgggcgtccttcaccgtcaccctgacgcgggtggcatccgtcccgtctgccgcggcgctattgtcgatcacctccagcgcactgacttttgccgtgctgctgtcagccgtgaacgtcaccaggccagacttcgcctgcgtccagttatcgccggtggtggcctccacccggaactccccggccttcaggctggtctggctgacggtgacggtgccgtccttctccgtcgttgccgttgccggaaggatgatcccctccccggccctgaaattcaccgcctgcccggcaaccgggttctcgtgggcgtccttcaccgtcaccctgacgcgcgtggtgtccgtcccgtctgccgcggcgctattgtcgatcacctccagcgcgctgacttttgccgtgctgctgtcagccgtgaacgtcaccaggccagacttcgcctgcgtccagttatcaccggtggtggcctccacccggaactccccggccttcaggctggtctggctgacggtgacggtgccgtcctcctcagtcgttgccgttgccggaaggatgatcccctccccggccctgaaattcaccgcctgcccggcaaccgggttctcgtgggcgtccttcaccgttaccctgacgcgcgtggtgtccgtcccgtctgccgcggcgttattgtcgatcacttccagcgcgctgacttttgccgttgcaacatcagccaccatgggaatttttaccgtcacagggttaccgccttctacggtagcggttacctcccagtctgtccccaccagcgttggagctgtcagcgtaatacttgcttcgccccgatcattggtatggctcagctggtctatcggctga

SEQ ID NO: 149802 - DNA, 342 bp, Enterobacter cloacae
atggctcagctggtctatcggctgaccgttgctttgccaggcgatatcaacactcgttttaaagtcttcgccatcctgatcggtgagtttcaccgtaaatggctgggctgcgcccaccattgcgtgctcaggaggctgaatgaaggtcagtctgtcggctttggcaaaattgacgttcagtttcatatggctgtatctgccattatcttcagtaacgttgccgctatagcctgctaccagcggggagagcgaggccgtgatctgatcctgaccgctgctcataatctcttccacactcaccgacgtttggcctttagggtcggtgtgcgttacgtgttgtga

SEQ ID NO: 149803 - DNA, 255 bp, Enterobacter cloacae
atggtggcgcgtgacatcctgatcgaaaaagaggtttccacccgccatcagatgcgggttaaaggtatgtcgccagcccaggccaacgttaaggatatcgcgctcgttccagcggtgtgcgctcatctgagtgaacagaatgtcgtgttgccagattttaaccggccacagatagtccagcccgaagtcgcggctatcgctcccgcctataccgacgtctgccgtaacgcgggctttcccgccgatattgtttaa

SEQ ID NO: 149804 - DNA, 534 bp, Enterobacter cloacae
atgaagataacaatttcaggcgtattactgggtgtttttttactggccggatgcagtcagccaaaggctgaggcgcaaacgcaaagcggtggtacgggaacaatagaagcgattaaccataccaaattggccatcaatcatttaagcgtaaacggtcagtcgggtattgatattatcgggccttttgatggcggcggcgggggatgttgtttcggcgtaccttcagcctggaaaccgggaatgacagtcaaaattgactgggaaacaggagttggaggaacagacggttttcctggttatgaccattgggatgaatacttaaaatggcagaaaaaaatggactcatttaaacgccaacacagcaaaacagtcccactgcccgattatacaggacaggagacctgcggtattacggtacattttttaccctgcgatgacgtaaaggtaacaaccagctgctggtcacctgctaatgctaattatccaatcaaacttccgctcgaaatgaaggagccgaaagtatgtccgaagtaa

SEQ ID NO: 149805 - DNA, 909 bp, Enterobacter cloacae
atgattgagaccggtttaactaaatcaaagtcaaaattgaaagtgcagtattttattgatgataaattccctgaggcaagcctgataaacggtgcattgctgaacaagaaaagtattagccccgatgaggtattagaacaatacttgcaatataaagtaggacatacaacaaaatataaatcatggatacctaacaacctcgtcggtgtaatactctatctttataataaattaccaaccagaatctgtccactgtacgctggctataaacagtttgtatatttatccagaggaaatatcaggcattttctggagttatgtcaccagtcggtaacaaaaacaaatgtcaggtctgcactgccgccaaaaactataccatccatgacaatcgaggctcaattagaggccaccctgaagacgagtgaactcgaaattgaaaaaattggagattttggtgcccatggaatgcatctaaaaagggtggctaaaagacttggtgcgattttcaactattgccagtctcgacgttctcagagcgaatcagaagtaaaccatttcactttagatttaactgatataaatcttcttgcttataatgttaaggagattctaaatgaatcattggtgtggtccgtgctgattgaacagaaaggaacgaagagtaaatcaactgacaacctggaactcaatgattacgtcttacatccagttcttgctccatattttggcataagccacagaaaaaaaaggaaaataaaatttagcaaaggtgaggttgaaaccatttttgtaggtagtgatgaagatttttcatccttgttaaaaaaatatggaacccggtgggatatagatgactcatcttttgatgtttccagttcagttacatcataccagttgggcctcttatga

SEQ ID NO: 149806 - DNA, 528 bp, Enterobacter cloacae
atgatgacgccggttccggcatcaaaactcactgcctgtcctgcaaccgggttctcgtgggcgtccttcaccgtcaccctgacgcgggtcgtgtccgtcccgtctgccacggcgttattgtcgatcacctccagcgcgctgacttttgccgtgctgttgtcagccgtgaacgtcaccaggccagacttcgcctgcgtccagttatcgccggtagtggcctccacccggaactccccggccttcaggctggtctggctgacggtgacggtgccgtccttctccgtcgttgccgttgccggaaggataaccccctctccggccctgaaattcaccacctgccctgcaaccgggttctcgtgggcgtccttcaccgtcaccctgacgtgcgtggtgtccgtcccgtctgccacggcgctattgtcgatcacctccagcgcgctgacttttgccgtgctgctgtcagccgtgaacgtcaccagaccagattttgcgtgcaaccagttatcgccaatggtcgcgtttacctga

SEQ ID NO: 149807 - DNA, 585 bp, Enterobacter cloacae
atgtttaacaaaacaattctggctactgctgtagctgttatggctatgggctctgtttcagcaatggcggctgacgtcggtgtgatcacctttgacggcgcggttaccgacaccacttgcgttattaccaccaacaacggcgttgacgcgaacaacgttaccgtcaccctgccagtggtaaaaaaagcggacgttgaaacgaccaccgtggataccggcgtaggctctaaagagttcgaactgcatctgagcaagtgcccgggtacgctgaccaaggcatcggcaacctttacctcccagcagttcgctgaactgtctaacggtaccctgaaaggcgacccaaccgttgctggccacgcggacaacgtaagcctggcgctgtacaacaacaccaccactgcaactgaccgtatcaaggttggtcagccagcgaacaacacccaggttgctaccctgactgccggtgaaggtaccctggcttaccgtgttgcttacgttccaagcgctgactgggtgaaaggtactaacgacatcacctccggtaaggtcagcagcaacgtaaccttcaccatgagctacgaataa

SEQ ID NO: 149808 - DNA, 720 bp, Enterobacter cloacae
atgcgcccttttaaactgtgtgtgaccgcactgctgttcagtgccgtatgttctgtttcccactccgcgttcgcggacatcgttatctccgggacccgcgtgatctatccgtcatcggcaaaagacgtcacggtcaacatggaaaaccggggtaataagccattgctggtacagacctggctcgacgacggtcgtgatacgactaacccacaagaattaaagttaccgttcattgtcacaccgccagtatctcgcgttgatccagcgaaagggcaaaccgtacgtatcacctggctggggcaaaccatgccgcaggacagagagaccatgtactggtttaacgtgcttgaagtgccgccaaaagcgaaagaggccgacagccagaatatgctacagctggccttccgcacgcgaatcaaaatgttcttccgcccggacggcctgaaaggcgatccttcagtcgccgccggtcagcttaaatggacgcagcaaggcaacgccctggtcgcccgtaacgactcaccttattacgtttcagtcgccaaaattgacgcgacggtgggtggtaaagccattgacgtcgacccccatgtggttgcgccttttgccagccagtcttacaccatcaaaaatgcaacgaccgggcgcgtcaataaaataacgtatatatcaattaatgattttggcggttcggaaaaacacgacgctgccgttaattaa

SEQ ID NO: 149809 - DNA, 2604 bp, Enterobacter cloacae
atgttatttcgtcgctcatgtctttgtattgccgtatacactgcgcttcagtctgccgctttggcggctgaagccactgctgtcccctcctccggaactgaagaggtcgaatttaacgatcagttcttatttaataccgggacgaatattgacgttagccgcttttctaagggaaaccccgttgttcccggcacgtttaaaacgcaaattgtcctgaacgggcaaaaaaagttgctgacggaatttaccttcaaagataacggcacgccgcgcgcgtccgcctgttttacgccaaaggttttaatgcaggcaggtattaaaacagatgcgctaaacgatgctgtggcaaaaacgtcttctgaagcggatgaagatgcctgtattgatatcagtcgggcgtttcccggcgcgacatgggatttcgatgccggtacgcaagagttaaacctgacctttccgcaaatctttatcgaacgtcggcctaacggctacgtcgaccccaccttgtgggaagacggtattacggcgggcatgttgtcctatgatctcaatgcctggcattcagacagcacggatggcgcgcgcgatacggcttacgctgggctgaaatatggccttaatgtcggtccatggcgtttacgttctcgcggcaccttaaactgggaccaggatagcggtacagactatgcaagccaggatatctacctgcaacgggatatcaccccgctgcgcgcacagctgctgattggcgattcctatacccgtggcgacacctttaactcattaagcctgcgcggcctgcgcatgtacaacgatgaccgcatgctccccggcgggatttccacctacgcgccgaccattcgcggcgttgcgaaaagcaacgcgaaggtgactatctcccagagcggcaacaaaatctatgaaagcaccgtaccaccaggcgcattcgagattaacgacctgagcaccacgggctacggtagcgatctggtggtcacgattgaagagtccgacggcagtacgcgtaccttttccgtgccctactcctccgtcagccaaatgctgcgtccgggctatagccgctgggatatcggcgtgggcgagcttaacgacaacggtctgcgcgataagccgcgtctgggctatgccaccggctattatggtctgaataacaccttcacgggctatgctggtctgcaatacatggatacgggctatgtctccggactgctcggtctcgccatgaacacccaaatcggcgcctttgcgctggatgtcacccattctgatgcggacgtcgacggcatcggcaatctgaccggtcagagctatcgtctttcctggagtaagctcgttgaagataccaacacctctttcaacgtggcggcctatcgcttctccaccgaagactacctgacgcttaacgatgcggcctcgctggcggaagacgtgaagtatcgcgacttctcgcgtaacccggctcataccgacgaagacgtctacaacagcttccagcgtatgaaaaaccagatccagattaacgtcagccagccgctctccacaggcaaaacggactatggctcgctgtacgtcaccggaagctggcaggattactggaacgagtccagctccacctcacaatattccgtgggttacaacaacgcattctggctgggtagctacagcgtttcgctccagcgcagctacgacgaatacggcgagaaagacgacagtatctatctgaacctgaatattccgctggaaaacctgctgggccacaaaaaacgccccggcggtttctcaagcgtaaacatgagtatgaactcggacttcaaagacagtacctcgttcaacaccagtgccaacggcaacagcgatgactatcgcttcagctatagcgtcaatgccagcaccagccatgctgacagcggcaatctcaaccagatcggcggttacggaagttataacagcccgtatggaccgctgagcgtctccgcttcggcttccgatgacagcagccagcaatactccatgagctacagcggcgggatgctggtgcattccggcgggatcacgctggctccgggcagtatcggtgataccgatacgctggcgctggtcagcgcgccgggcgcagaaggggcgaaattagccgtaggcgatggcgtcattggcagctccggctacgccgtcatgccttatctgtcggcataccgtgaaaatacggtgggtattgatatttccaatctgaaaactgacgttgaggtgaaaaacaccagtacggtcgccgtaccgcgcagcggcgctatcgtgcgcgtcgattttgaaaccgaccaggggcgctcgctgctgctggagctgcaccgtaccgataacggctttattccgctgggcgcggatgtgctgaacgagcaaggtcattctgtcggatcggtgggccaggcaggacaagcctacgttcgcggtattgaagagagcgggaagctgcgcgtcatctggggcaacaccgcggatagcgcttgtactgtgacctaccgtatcacgccatcggcgacaaaagtggggctgacaaccatgctcactaaccagctttgtcagatgtaa

SEQ ID NO: 149810 - DNA, 576 bp, Enterobacter cloacae
atgaagaaaacagtagttcttacccgccttgccgccttactggcgctggcggtgagctcgcagtcgatggccattggcacgtccagcctggatgtcacgtttaccgcaacgctgcgtgaaaccacctgcgatatgaaaattgagggtggtacgggtgatggtaaagccaacatgatccctattggcgggggaaacacttcgctggcggatattgttagcggctctagcaatgcaacgaccacgtttaagctgaaaattgttgaatgtcctacaggtctggcagggttaaaaacgaccatttctggtactaaatctggctacgtcgataccgcgatttcgaacggtgtaacgacaaataaggcggattatacaggtgtaaccatcgcccgaaccgctgcaccggatgcaccatttaccattaacgcgacagacgatgcaaagagccttgtgtggagtggccaggagataaccagcaaggaagttgcgttgactgcccgtctcatagaaaccaaatctggcctggcgacaacgggtgattttagcgcgattgccacttttaattttgaataccagtaa

SEQ ID NO: 149811 - DNA, 561 bp, Enterobacter cloacae
atgaatatgaaatcatccacactcattgccctggcggtttccgccggtctttttaccgcttcagccagtgcgattaccggcacaacaagcgttcaggccacgtttaccacgacggttcaggcgggcacctgtacggcacaaattcaaagtgcgggcgggcagccaatcagtacgctggcctttggcgatgtctttaaatctgacctgagtgcgcaaagccgtagcgaaccgttcaagattgtctttagcggctgcgcaggcgtgaagtctgccaccgtacaggcaacggcaggttcaggcggcaattgctcaggcgatgcaaagacgggcgactcttttgatgcgactcatggggctgcgttcgaagtctggaagggcacggcaggctccggcacgctgctgagttgtaataccaaaccgacgcaaaacgtgagcatcagtggtgcgacggctaacctcgatatggctgcgcgcattgtcattgcacagggtaaaacaatcgctgatgtcactaccggtgacgtcagtgcgccagtgacattcgtcgtaacctatcagtaa

SEQ ID NO: 149812 - DNA, 498 bp, Enterobacter cloacae
atggatattacgcttaatgccaatattgtggaaaatacctgccagatatctgttccggacggcggtcaggtgcatctgccgaccgtagggaaaaactggttttataacgatgatggtagttcgcgtctggcccccacggatgcggcgtcgggtacgctattctccgtgaaaatcgacagctgcacggccgccagcgacgtaaaaaaactgaaatttacttttcagccgcaaagtcagcaatggcccgatgtttctcgtcaggtatttattaacgaaagcagccctgccgaagggggcgctgaaaataccggcatcgttatcttttcgaaagaccttaataccaacgtattaaataccgacggaacatccagcgttgaactgaagactaagtccagttgggcaacagagtatgagttctacgcacgtttgcaaaatacaggaacggtgtcagctggcaaagtgacctctcatgttgtggttaatgcaacatatgaatga

SEQ ID NO: 149813 - DNA, 1110 bp, Enterobacter cloacae
atgataaaatggaatttgttaaatatagttaaaaacaaaatagcgctcgcggctacgcttttactgtccgcccaattttgttatgccgatgaatgtcatatgggtattaaaggcacggaaggcggaagttctgaactggtcatgacgtcctattccaacgccattcgctgggcgcgatcttatggtcctggatcgagtacaactatgcgcttaataggtacagccgaaatggacttaaatccctggctggaatcccggtgcgatgcaggtacggatggacaatatctgcgggcaaaaattaatcctgcctattacgataccacactgtcgcctaccgatggcaccgtaacctatcaaaccaatattgaagggatctccttcgccgtgaaaatttactccgacgcgggcgggggttactttcaacacggctatgactgggtaaccattgtccctgataatggtgacgatcgctgggacggcaaacgctggaaagcgcatattgatatttatcagaatgacgtggatttcaagggtaataagaacggagaaacctttttaacccctgcggccagtttcccgctaggacaaatggggctgggttactctaccggaagcgctaccgacgataacaggccatggaccttcacggtaacgccgtcaagctttagaatcccaatcatcaacaccacctgtcagacgatgcagttggatcacggcgggacaaatatcgatctcggcgagtatatgatgtctgaatttaacggctcacctcgtacgaccagctttatggttcagttgctgggttgtgataacgtctgggcggtagattttaagatgagcacgccgaaaatcaccggtccggatgatgatttattagcgaacgtgctgacaagcaatgccgcagaaggtgttggggtaaggatccgatccgtataccgtgatgaaaatattaagccagccagtacaaccattacctattacggcactgacaccagccagggcgcaggtgtaggtatgctgacattcaccgccgaactggttaaagatggcaaaccgatgaaagccggtaactttaaaggccagacaacgtttaccacaacgtattattaa

SEQ ID NO: 149814 - DNA, 498 bp, Enterobacter cloacae
gtgaaacgatacttgctcctgctggcacgtatttgcgtggcacccatggggtttgtgctgattggtattctggctgtgaactctctggattttggcagttacgcatgggggggatatcaactaacgtatgcccggttgcttctggccttttgcataaatctcttcctggcatcactcattctcatagcctgttatctgtgcattctgaaaatatcaggacagtgggtaagaaaagaaatttgtgttggcatcttttacctctgcgtctttcagttattttttgtcgtttttaccatgacggattgcgacgttgctttgaaatcggctgtagagcatttcctttatcatatcgggaagtggggtggggcagaatcccttgattttgataaacaagaagcacaaagagagagccgagatttctggattacgttaatttacctcgcaggtaataccgcgctttcacagatgtcgacgatgatattctccaggcgcatgtag

SEQ ID NO: 149815 - DNA, 507 bp, Enterobacter cloacae
atggtctactgtgagttcaattacaacgagcatttttcagcaaatagcttaatgcttcgttgcgctggtgtaggtacattcccggtattttctggcttgggcgcattcatgaacattcctgaatactctggacaccgtaacggaccgataccgctgggtaaatactggatagttgacagacctatgggagggattggctcaatggaaagaatggtcgagaaatggatcaaaacggggaatcgctattgggaatggtttgccctatatcgtcaggatggtttgatagacgatagtacgtttgtcgatggcatcatgcgaggcaatttccgtcttcacccgctccgccccgacggcagtggcgtatctgatggttgcgtcacgttccgtaatcaggctgattttgaccaactgcgtcaggctcttcttaaaacgactccccaggtactaccttatagcaagctgaaagcctatggagaactcagtgtgattgggatgaggcgagcgtaa

SEQ ID NO: 149816 - DNA, 492 bp, Enterobacter cloacae
atggccgtacccgctcatctctggctttatgatttaaatggttcactcatcataggagggagtgaagttgctggcagagaaggcagtatagaaatacagagttttgttcatggattacatgttccttttgacggtaacactggccgactgacgtctacacgtgtacacaacgtgatgagtattgaaaaggagttcgataaggcctctccatatctgtaccgtgctgtagcgcaagccgagagattacaaaaggcacaaattcggtggtatcgaattgcgccttcaggaacagaagaagaattttttcatatcttgcttgaagacatacgtctcatccatatcaatccttctatgcataatttcaaacagcccattggacagctttcagttccaactgagtctcttggcctgggttatgcacgtatcacctggaaatatctcgacggcaacattcaattcaccgatgaatggaattcgcgcatttgcgcttaa

SEQ ID NO: 149817 - DNA, 1122 bp, Enterobacter cloacae
atggcgtatcaactgaacctgaactggccggaatttcttgaaaaatactggcaaaaacaacccgttgtgctgaaaaatgccttcccgaattttgtcgaccccattacccctgatgagctggcgggtctggcgatggagccggaagtcgatagccgcctggtaagccacgctaacggcaagtggcaggcgagcaatggcccgtttgagcatttcgataacctcggtgaaaccggctggtccctgctggcgcaggcggtgaaccactggcatatgcccgcggcagagctggtgcgtccgttccgcgtcctgccggactggcgtcttgatgacctgatgatctccttctccgtcccgggcggcggcgttgggccgcatatcgatcagtacgatgtgtttatcatccaggggatgggcagccgccgctggcgcgtgggtgacaagctgccgatgcgtcagttctgcccgcatccggccctgctgcacgtcgatccgtttgagccgatcatcgacgaagatctggcgccgggcgatatcctctacattccgcctggattcccgcatgacggcttcacccatgaaacggcgctcaactactctgtcggcttccgcgggccgaacggtcgcgatctgatcagcagctttgccgactacgccctggagaacgatctgggcggcgaacactacagcgatccggatctgacctgtcgcgaacaccctggccgcgtggagcagtacgagcttgatcgcattcgccagatgatgatcgacatgattaacaagccggatgatttcacgaaatggtttggcagcttcgtctccacgccgcgtcacgagctggatattgccgccgccgagccgccgtattccgcagaagaggtgctcgacgcgctgcaagggggcgagacgctctcccgcctgagcgggctgcgcgtgctgaacatcaacggcagcttctttatcaacagcgaacagctggaaacggcggatgtaaacggggcggacgcgctgtgccgctacaccgagctcggccaggctgagctgggcgaggcgctgaataatccggcgtttgtggaagagctgaccggtttgattaaccagggctactggtacttcgacgagtaa

SEQ ID NO: 149818 - DNA, 387 bp, Enterobacter cloacae
atgcaaaaaatatcatcacacccgatacgggcgaatcagccctgcctgtcacccattgaaatctggcagcgattgctgactcatctgttatcgcagcattatggcctgacgctgaatgacacaccgttcagtaatgactccaccatccaggagcatattgatgccggagtatcgctcagcgatgcggtgaactttcttgtcgaaaaatatgaactggaaagaattgaccgcgatggttgcactgtcatggaaaagtcaccgtttattaccagtatcgatattctacgtgcccgtaaggcttcaggcctaatgaaacgcagcagtcacaaaactgttacccgggtaacggcaggccatcagcagctaaaaatcactaagggtacttaa

SEQ ID NO: 149819 - DNA, 399 bp, Enterobacter cloacae
atgaacaatcactccaaatccggtactgagccggagaatcccgcctgccagcagtggggactaaagcgcacgatcacaccctgttttggcgctcgtctggtgcaggaaggcaaccgactgcactatctggctgaccgagcaggatttagcggggcgttaaccgacgatttttcaatgcgcctcgaccaggcatttccactcatgatgaagcaacttgagctgatgctcaccagcggagaactcaatccccgccatcagcactgcgtcacgctataccacaacggactcacctgcgatgccgacacactcggttcctgtggctatgtctacattgctatctatcctgagcagactgagccgcagcaaatccccgcttattcccttaacattacagagtaa

SEQ ID NO: 149820 - DNA, 231 bp, Enterobacter cloacae
atgactgaactcactgaattgcctgatggaccgtttactcgccagcaggcagaggcggttgcggctcaatattccaacattgctttagaggacgaccagggtacgcatttccgtctggttatccgtcatgagcattgcatggtctggcgaacctggaactttgagccggatgccggttactggctgaaccggtatatcactcgttatggcatccgcaaatttcctgcataa

SEQ ID NO: 149821 - DNA, 570 bp, Enterobacter cloacae
atgaagaaattactgaccacaacggcgctggccgtcagtctctgcgctggcgctgtctttccggcgtctgccgaaactgtcgtgggtaccgtaaaattctggcagtacatgcaggcggatggctggaaatcggccgatggcatggataacgacacgctaaacaatacgctctatcaggccagtgtcattggcaattatccctggactaaacaatttctgctgcgtcagcggggaggtggagcttattttctcgccgataagaaaacgcataccgtgcgaaagctgaatctgaaacctgccagcggttattactccgacctgacatcggtctatcagggcgaagacctggggaaagggtgctacttcactatcatcgacacccagtatcagctggagctggctgacgaacctcacagcaaccaggtacttgctgcattcccggaaaactgtgtcaacaaacagcagcaggcggccctggcggcgaagcgttctgcctcagagcagaaactgcagcagtgggtagcccaacagagtctggcagagttgtgcagacgcaccggcaattgctga

SEQ ID NO: 149822 - DNA, 705 bp, Enterobacter cloacae
atgttccagactgagcgtcgccatgagcggctggcggttcggctgtccctcattatcagtcgccttgttgctggcgaaacactggatatgggccttcttgccgcagagtttggtgtatcgatccgcaccctccgccgggattttcgtgagcgactgatgtacctggatctggaatatcgcgatggcacctgtcgtctgctttctggtagccatcaacgcgaactggctgtactgacttttgcccgtcagtcaggtgtggaggccctgtttcctgacatggataaccacatggtcagctcactgctgagtgggcccggtgagtctccgtgtctcatatgggcagagtcagagcctttgtcgccaccccgacccggcatatttacacggctggtcagggccatctcagagcatcgccgtgtgacgctgctggctgaaggttgtcgctgttcagggattgcaccctaccgcctcgtgctctgcggcggacactggtacctgacgggagagcatcatcatcgcgtggcggtatttccgctgaacgatatccatgcggttaccctgcacccggaactgttcgtgcccgaccttcagatgcgcaacgttctcaccgaaccgaaattcctcagagctcttccccattttcacgtttttcactcactgctcgccagaaccggcgacggtcttttacctcataaggaatcatga

SEQ ID NO: 149823 - DNA, 906 bp, Enterobacter cloacae
atggcagaagaaaaaaaacttattgctgtgtttggagcaaccggacatcagggaaaaggcgtggtgcaagcgctaaaacaaaccggtatcttcagaattcgggctttgtcgcgtaaccctcagtcttatatcggtgaggctgatgaagcagagtatgcagatcttgaaaaaactgaaacgctgagtgacgcgctgaaggaggcgcacggtgtgtttctggtaacggattactggcaagaaggtgctgatgagactaagcaggcaaaatcagcgatcgacgcggcaaaagcggcgggcgtgaaccattttatctggtctacacttcccaacgttgaatctatcactcagggtgaattcattctgcctcagtttacgaataaagccagagtaaacaatctggtaaaagcggccaatttctcttactacacctttgtcgtcccacctgcctattatcagaacttcactggcccctttggtccgcagccacagcaggacgggagttatggatgggtcctgccgattgatcccgacgttcgctgcattcatatgggtgatataaatgagctaggcaaaattgtggccggtgcgtttgcacatcctgataaagcaggaaaaggtgacaccctgccgcttgtgggcgatttcctcagcttcaatgagattgtagaaacgctaaatcagcctggacatcccgtaacctttaaacaggttccacgtgacgtctatgccagttttttccccggagctgaagcgctgggtgatacgctggcgtattacgaaaaatatacttatcttggtccaggccagcacgaggcagccattgcacaggcaaataaagtggcagaatttcacccgacttcttttgaatcctgggttagagagaattttgcacttaatacaaaataa

SEQ ID NO: 149824 - DNA, 915 bp, Enterobacter cloacae
atgtcgcctgttgcagaaacctctgagctcattgcgtttactaaaacggtcagcgcaaaatccctttcccgcgccgctgctgaacttggtattccccgaacaaccctgagccgtcgaattgcgcagcttgaggaaaaactgggggcacggctgctcctgcgtacaacccggagtctgatgctgacagatctgggaaacatcttttataaagaagcaatcatcgcgcttgaggcgataaaacaggcggagcagagcgtgtcccgttccggggactgcttacgcggagacttgcgcgtatcacttcctcctggtatgaaaaaaagcttccgggtgatgctgtgtaaatttatgacgcagcatcctttcttgcgtgtacatattcacacttccagtcatcatattgatttccggagcggagcatacgacgttgcactgagagccagtattcaaatgcagccagggctgatagcccgcacgctttttcgtgacccggtaattgcagtcgcctcaccaggctatctctcgggcaagggtatccccgtcgcttcggatgaccttataaaacatcaatgcctggtggggttcgcccgtggggagttgcctgatatgtactggccgttactttctggagacagagtaaaggtggacggttcgtttttctctgacgatatttccctgctttctgaggctgcaataaacggccttggaattgcctttttgcctgaagacttgattcgtgaacatctgcagcagggctcacttgtccaggtactgaaaaatataattggtacagaaatgcaaattgcagtggtatatccggatcgtcactttttattgcctcaggtgcgtgcttttattgatgcagtggttgactggatagctacagagcgggagggaaaacggagcagtatttga

SEQ ID NO: 149825 - DNA, 504 bp, Enterobacter cloacae
atgagaatcgctattgtttatggcagcacaacgcgttatacagagcgggttgcttgcaaaattgccgcccagccgggatttgaagaggcggaactgctggatattgaagatacagcgcttagcgacttacttggatttgatttcatcatctttggtatccctacctgggactatggagaagtgcagtcttcctggcagaccgtatgggatgaaatcgataatcttgacttttcgaacaagctttgcgcattttttggtttgggcgatcagcagggttatccgcagtggttcgtggatgctatggggctactgcatgataaaattgtcaggcagggcgggatcgcgattggtgactggtccacagaaggatatcgcttcaatacacagctctccctctccggtaaccggtttgtcggtttaccgctggatgaagtgaatcaagacgatctgactgacgaacgcatcagcgcctggtgcatgcagttgtgtgagatcatcggataa

SEQ ID NO: 149826 - DNA, 2076 bp, Enterobacter cloacae
atgagtctgattgatcagaaaattcttgatggcctgacccaggtttcctttcccaaaggattccgttcagcggaagccagcgattacctcaatttaggtgccgaagtttacccagtctaccgtgcggatgcagtcgttgttggtaccggagcagcaggtttacgtgccgccgtcgagatgaaacgtcgtggtctgaatgtgcttatcgcaactgccggtctttatatgggcacatccgcctgttcaggctcagacaaacagactctctttacagcctcaacttccggttgtggtgacaatttcctgcgtctggccgaagcgctgggtagcggcggtggaatggatgctgatacggcttacgtagaagctgtaggctctatccatacccttgcaggactgcaatatctgggacttgagctacccgaggaccgccttggtgccattctgcgttaccagacggaccatgatgaagctggtagagctacctcatgcgggccacgtacttcgagattgatggtaaaggtactgctgcaggaggtcctgcaactgggcatccccctgatcaatggagccacagcattacgcttgctacgccaaagtgatgagcagggaagcgaacgatgtgcaggactggtagtttccactggcgtgcgtagtcataacacaaatggtcttgccgttatcctcgcgccaaatgtagtactggcaaccggtggccctggtgaattgtatcgggacagcgtgtacccaaagaaatgttttggttccctgggactggcccttgaggaaggtctgtccctttccaatatcattgaaagccagtttggtatcggcacgccgcggacggcgtttccgtggaacttgtccggcacctatgtccaggtcatgccatacatttactctgtcagtgacgatggccaggaacacaacttcctggcggaatactaccggacaacgcaggagttggtgtccaatgttttccgtaagggttatcagtggcctttccacgccacccgcacgcttgacttcggttcaagtctggtcgatatggcgattgcgaaagaacagaaactgggcagaaaagtgtatatggattttctgcgcaatccggcaccggtaccgggtgacttacctttcgacctgacccgactggatgacgacgtccgggcttatctggaaaacaatgaggctctggccgccctgcccattgaccgtctgcgccagatgaacccactgtctatatcactctataacatgcacggtcacgatctggaaagcgccccgctgcagtttgccatgaacaaccagcatatgaacggcggcattgaggttgatatctggggccagacatcacttaacggttgccatgctgttggtgaagtatccggcacacatggtgttacacgtccgggaggggcggcgcttaatgcagggcaagtttttggcgttcgcgccgcacagtatatcgccggtgcgggaaaacgtgcatctgctgacgatctttcatctctcgccttacccattcttgagcaggtgaatgaagtcatttctcaggcgctcaaaagtaaagaaggaatgaccctccgcgaggttcgcgatcagattcagtcacgcatgtctgattatgctggttttttgtgttcagctgatgaagtctccagagcgtgtgaggaagctgtcgtgcttaaaaaaaatgtttatggcggaggactatcaatcagccacgttgctgagattagtgagctgtttatgtggcgccatctggcgctgacctctgctgcagtcctgaccatgcttgaacaatatgttagtgacggcagtggaagccgcggtgcgcgcatcattctcgattcacatggtgaatgcgtaccgcagatccgatcaggaccttgtgaagcgtggcgcttccgcccggagagggatgaggacaaacactgcaaattcaccatccgctatcaggatgagcgcttcattcttaaaaagaaaccacttcgaaaattacctgacctgagcaaaatttatttcgagcggaactggcctgatttcctgaacggtaagatattccgtcagctctga

SEQ ID NO: 149827 - DNA, 1422 bp, Enterobacter cloacae
atgaataacagcacacagaacaatacagcagaacagattaacgcccagtcacatgatgaagtcaccacgaaagatctgcgacgtgcggcctggacctgttcactgggaagtgctctcgaatattacgactttgcactatatagccttgcatcggccatcatttttgggcctctctttttcccgaatcaggagccgggtatagcactaattgcaagttttggaacctattttctcggttttgctatccgcccggtaggcgggctgttgttcggctctcttggcgatcgtctggggcgtaaatttgtattgctggcaacagtattactgatgggcatagcgagtactttgatcggcgtattacctacttacgaaaccgccggcatctgggcgccagttatgcttgtagcgcttcgtcttttgcagggtctcggtgcaggcgcagagcaggcaggcgcagccgtcctgatgacagagtatgctcctaaaggtaaacgcggcttctatgcgtctttgcctttcctgggtattcagattggtaccttcattgccgctgccgtttacttcctgttgttgaacatggagacgaatgtcgcagacagctggctgtggcgcattccgttcctggcaagcgtagtcatcatcgccattgccgtgtatatccgcctgcatctgaaggaatccccttcatttgcaaagcttgaggctaaaaaacaggttaccgataagccgctgcgtaatcttctgaaaacttcgcgtcgtaacgtactcatcggtattggtcttcgtctgggtgaaaacgggggatcgtcaatttatcaggcgctggcggtcagctatctggttggcgtaatcggcatggaaaaagttgttggcacgctttgtcttatttcagcagttgttgtcggcgcaattgtagtgccaatcgccggatggctgacggatcgctttggacgtgtcattgtatatcgctcgtttgctatcttccagctggccatggccttcccggtctggtggacattcagccacggtgatgtgaccagcacgattgtgatgttgtcaatcgctctgggagtgggggcatgggggatgtttggcgctcagggtgcatatatgccagaactcttcggcgcccgtcatcgctacattggtgtggctttggcaagagaagtttccgctgtgattgccggtggtcttgctccactggtgggttccgcactaattgcatgggcagtcaccgacagcgatccgactggtcgttcagcatgggtattcattgcctcatatctggcgctacttactctggggacggttatcgccacatttgtttcgcctgagacacgcgatcgtgatctcgacgatgtcaatgatgcaagtaaagcggataaccggcttcctgccggagcaacccatccttctgcctga

SEQ ID NO: 149828 - DNA, 780 bp, Enterobacter cloacae
atgaataacggaagtgtggatcttgatatcagcggtcacattgccactctgctgatcaaccgtcctgaaaaactgaacgcacttacccctgagatgctggaggaactggcagggcactgccgtctgctggaaaccaacacggacgtacgcgttgtcgtgctaaaaagcgcgagtccaaaggtattttgtgtgggcgcagacatcacgcgctggaatgcactgacgccgctggacatgtggcgtacctggatacgtcgagggcatcagatatttgatgcgctggcaggtctgccgcagccggtcattgcccttatgaacgggctttcctacggtggtggtctggagctggccgccgcggccgatatccgcatttgtactcagagcgcaaaaatggcgctgccggaaaccggtctggctacagtgcccgggtggtcgggctcacagcgcctgacccgactgattggcgctccgcttgttaaggaaatggcgtttaccggtgaaccggtggatgctctcagagcgcgtgaagccggtctggtaaaccgggttgttgatgatgctgcactttcagatgccggccaggaaatggcactgcagatagcatcgcgtgcgccagttgcagtgcaaatggtgaaacagatcatcgatgcggccgacggagtagaagtcagccgcacgcttgaagcactggctggtgcatgtacagccactacagaagatgcccgcgagggtggagaggcattcagggaaaaacgtaaacctgaatttaaggctcgctga

SEQ ID NO: 149829 - DNA, 1572 bp, Enterobacter cloacae
atgtcgcatacacgccacatcagcgctgaagaagctgctgaactgatttcagacgattcggtagtaaccatttcttcatcgagcgggatgggttgtcctgatgtcgtacttgcagccatcggtgaacgcttcaggaattcaggaagtccggcgcatctgaccactattcatccaattgcagcgggtgacatgtatggagtgaaaggtattgatcacattgctgttcccggcctgctttcaaaagttattgcgggttcatatccgtcaggtccttcctcagcaacccccccggcgatctggcagatgattaccggcaatgagatccctgcctggaatattccatctggcattctcttcgacatgcaccgcgaagcagcagctcaccgccctggggttctgacaaaaaccggcatggatacttttgttgatccggtacgtcagggcggcgcaatgaacgacaaagcgaaggaaatttcgctggtagagcgtacgcagtttgccggagatgaatggcttttcttcccgtccatcgtacctgacgtggctattattcgcgccaccaccgctgatgagcgtggcaacctttcctatgaacatgagggagcttatctcggcccacttgagcaggctttagccgtacgaaacaacgggggaatagtcatcgcgcaggttaagcgtcgcgtggcatcaggaagcattaaaccgaaagatgttcgcgtacctggcgtccttgttgactatgtcgtggtggcgccagaacagactcagaccacgcaaacggtatatgaccaggccatttcaggtgaaatgatacgtccgctggaagaattcagcctgatggaaaatggcccttctaaagtaattgctcgccgcgtcgctcgggaacttagtgacggtcaggcagtgaatcttggttttggtatttccgccaacgtaccgcgaatattcctggaagaaaaccggcatagtgaagtgacgtggttactggaacaaggggccgtgggtggcgtaccgttgcttgaattccagtttggttgcgcatccaacgcggaggccatcatgccctccccgcagcagtttacctattttcagggcgggggatttgacgtgacgctaatgtccttcctgcaaattggatctgacggctctgtaaacgtctctctgcttcctgcacgtccgcatgttactgctggttgcggcggttttatcgacattacctcacacgcgaaacgtattgtgttttctggtttctataacgcgggagcacaactggcccttgaaaacggtgagctgaaaattctgcgtgaaggcaaagctaaaaaagtggttaacgaagtggctcatgtcacattctccggcaaacgtgcaattgagcagggtcagcaggttatgtatgtgactgaacgttgtgtactggagctcaccgctgacggccttgtggttaccgaagttgcccctggtattgatatcgaccgcgatatcctgcagcagagcgagacgccactacttatttccccgaatctgaaagttatggaccgcagtctttttgctgaaggagcagaccatgaataa

SEQ ID NO: 149830 - DNA, 1032 bp, Enterobacter cloacae
atgacacagtccaaaactgagaagcgccgagtgacgctttctgatgtggcccgcgaagcgggagtttcaaaatcgacagtatctttggtacttaaccagagtgaactcattaaggctgaaacgcgcgataaagtgcttgccgccatggaagtacttggctatgtctataaccgttctgcggccagccttcgatcgcgccactccaaaacggtaggcgtagtcattgacgatttgactaaccccttttttgctgaattcactatggggcttgaaaggactcttgccggacatggtttcattaccatgatggcaaacacctcacaggaaaaagaacgtcaaaaagtggtgcttgataccttgcttgagcatcacgttgcaggcctggtacttttccccgtgccaggtacgaaggaagaagagctgatgcgctatatcaaaagccagaccccattgctcatcgctatgaggcccatggactggaaacaaatctctgttgattatgtcggtgtggataataaagcaggtgtacttgaagccactgaatacctgatttcaaacggacactcccgtatcgcttttattggaggcatttccagtcatacaaggtttactggctacctcgacgccatgcgtctgcacgggatcgaaccctgggacagtgatgaagatcattaccgatgtgaacctacccgagccaatggctacaaaatgatgctgaatattatggcgtcagaaaatccgccaacagcagtgctgttttacaatgatttgatggcattcggggcgatgtctgctctgggcgagctcaacttacgagcaggacaggatatttcaatcattggtcatgatggtgtaacggcaggagcattcagtaatcctccactcactacgataggaatggagccgctttctctgggcgagcaggctgcaaaacagatccttcaacgaattgaatatccggatacgccggtgaagcattacgtgttcagaccaaccttgcatatcagggcttctacaggaaaaattggctga

SEQ ID NO: 149831 - DNA, 609 bp, Enterobacter cloacae
atgaaagttacatggaccgtcacgcctgtggggtatcagcgcatcgcgaaacgatgcccttcatgcaacattaaacgggacttcacgccgtcaggtgcatttcgggttaattcgcaaaagaaggtgctggacgtgtggagtatctataaatgcacccactgtgattacacctggaatatctccctgttttcgcgtctgcacgtcagcaaaattgaccgccagctttatcatcggctaatgacaaacgatgccgccacggttcaacattttgcctgtgatatcgcgacgctgaagcggaacaacgctgagctatcgggtcggcctgattttaccgttcaggagcgctggccgttaagcatcaccgcccaccagcgggttcgcgttagtgtcaggatctcccgttcatttcaggtaagtctactgtcgattttgaagcaacagctcatgctgagtgcaggtgaaattctgagtgggttggagtcagggcagatcagcggcgttacgatgaagatgcttaaatcgagaaagctaaaggcagcggaatatgaattccagctgtctgtggaaacgttatatgccaggcgcaggattgttctgacacgtcgttaa

SEQ ID NO: 149832 - DNA, 150 bp, Enterobacter cloacae
atgccactcaataaaatgaagcgtcatgccatactccacacgctctctatacctgaacgtaaactacgccccttaaaatggcttgctcttatctcatccctgctcgttatattacaactggcaattgagagcctggtcataagcgaataa

SEQ ID NO: 149833 - DNA, 435 bp, Enterobacter cloacae
atggataactatacgctgcatcgtggcagacttatcgaccatatccagctcgtggtaaacgactttgccgcaagcaaagcgttttacactgctgttctggcggaacttaagatccccatggttattaccgatgacgattatatctgggctgacgaactggtcatttcgtcagtaacaagttcggagtctggcggagtgcctacaggacggcaccatctggcctttcaggccgcagaccgtgaatcggtgaacgcgttttaccacgcagcactaaatcatggcggacgtgataacggcgcacctgccgaacgaacctatcatcccggatactatgccgcttttgttctggatccggacggtaacaacatcgaagctgtttaccatggtgagggcgatcgcagtgcccgctctgtagaaatcagcttcactgtctga

SEQ ID NO: 149834 - DNA, 819 bp, Enterobacter cloacae
atgaccgttattccggtatcagcccttgaatgcagcattactgagctgtgccgtattcttgcagacagctttaatgaatcattgacaccgtttgcgttgccaccggaaatgtttgcctcacgtttcatttccgaaggactcagccttgaagactcgtttgtctggctggtcaatgataacccggcggcaatagccatcgtaacccgcagaatggacaaagcgcgtctggcagcatttggtgtgttgcctgagtaccggagccagggactggcaaaacagatgcttactcctctatttacctccttaaaagagaaaaagttatccagcgtgaggctggaagtgatgcgcgaaaatacccgggcaatcgctctctatcacgcgctcggttttcaggttcgccgacatctgtgcaaataccggggagatccacagtctcgtccggaaataccttcaggggatatggaatccaagactgctgatgacttcctgcgtaccgtctggtctgcaccagatgatgatcttccctggctggccagccccctgcagctcttgtctattccctgcgacatcctcagggataacgaacatgcatggtgtgctgtcgcggagttcatgggacaacctcagctccgctgtttgtttgtggaaccggtgtatcgttaccagggacgggctaaaagaatgcttcagaaaatcaatgccagatggcctggcataggtacatcagccgcgatcccagaaacgctggcaccattatttactgcggcgggttatcaggctgaaccgttatgccagtatgagatggaactgacattttaa

SEQ ID NO: 149835 - DNA, 573 bp, Enterobacter cloacae
atgagttgcaagtttgaatggatcaatgagcccgccgtatggtgctacgaaaataacgccctgtcggtaatcacagatgagcatactgatttctggtaccgtacttggtacgggtttgagcgttttaccggccacatctacgctactgatgtaaccggtgattttacttttcaggtcaggatccgctcagacttcaccacactctatgaccaggccggaattatgatgctctctgacgaacagcactggctcaaagctggcatcgaattcaacgatggcacacctgcaatcgggagtgtactcacgcagggatattccgactgggctacaggactctttcctggggatccgaaggaattctggctgcgtctgacccgtaaaaaagatgcgttacgactgcagtactcctcagatggacagcactggccattacttcgcttatgccatttccctacgggccctgtaaaaacgggcatcatgtgttgtacacctcagcgcatggggttggaggtagaatttcttgatctcagactgactcctgcgatggataaggaactgcacgatctaagttga

SEQ ID NO: 149836 - DNA, 1257 bp, Enterobacter cloacae
atgaagccattttcgggacgcattggcaggtatggcagcgtgctattatttccactggcgatgatcatctacgatttttcagcctacctgacaacggaccttattcagccgggcgtcattaacattataaatgagttacaggcggatgttacgctggctccagcatcagtcagtttgtatatggcagggggactggcgctacagtggctcttggggccactctccgacaggattggccgccgcccggtcctgctcacgggggcaatgatctttgccttagcctgcctgagcatgctgtttgtcacctcgatcgaacaatacttcgtcgcccgctttattcagggcaccagcatctgttttatctccaccgttggttatgtatcaatacaggaggcctttgatgaaaaagattccatcaggatcatggctgcgctgacctccattgttctgctcgccccagttatcgggccggtggccggcgctgcgctgatggcgttcattcactggaaactgctctttgccataatcggtgtgtttggtctggtagcatggttcttactactgttcaaaatgccggaaacagttatatctcagggaagagaattcaaaccgggtgaagtgctgtcagatttcaccgcggcatttcgccatccagtggtgctgaccggctcactggcagtcgcttttggtaacctgcctatcatcacctgggtagcgctctcccccgtgatcctgattgagcacgggggtatgtctcccggtacctatgcctggacacaggtgcccgtgtttagtgggatcattatcgccagtgcgatcgtagtgaattttatcaaagacccgacttcaccgcgttttatctggggtacagtcccgatactgtttgctggcttgctggctttgctggttggtaacctgctatggccacacgtctggctatggtcagtactgggaacgagcttttatgccctgggtattggactgctctatccggtgctgtttcgctttacgctcttttctcataacctgccaaaaggcaccgtttctgccatgctgaatattctggcgctcggcataattgcccttagcattgaaataacccgctgggtttacttccatgctggcggcaggattgctttccacggcgcggcgctgctggccggtatagccgtcatcatatcagtttcccgcctgcttaaactgcgtgggcagcatcagagccagtcagaatcaccggtaggctgtcagaaacaataa

SEQ ID NO: 149837 - DNA, 405 bp, Enterobacter cloacae
atgttttcttatgtgatgctgggtactaacgatctaccacgcgccatccgattctacgatccgttgatggaattgcttgggcatcctaaggcaggccggaatgaagaaggcgcatcctgggggacgttcagcgataaccataccatcggattgtgcgtcggcaagccctttaaccaacaaccagcgggcgttggtaatggcacgatggtggcgctgaacgcccgttctattgaacatatcagacagttgcatgcgcttgcccttagtctggggggcgcggatgaaggtgcgccggagcacaggccgcaatacggacagggattccatagtgcttatgtacgcgatccggacgggaataaactggcgtttgtgttctatgccaatgaggggggaacttcaaactga

SEQ ID NO: 149838 - DNA, 477 bp, Enterobacter cloacae
atgcaaataatttcggcagggtgcattattcggccatttcagccacacgaaatcgatagttttatggtgtatcgcaatgatgcggagtggatgaaatatcaggggtttaaggggctaacaaaagaggactatgaatcagcattgctgggcgttcttacgcttactcagggaattcaattggccatcgtcaacaagctgacgcaggttttaattggtgatatctatttacgtcagcaatgcgatgtattttggctcggctataccatcagccccgctcatgctcgccagggatatgcatttgaagccattaccgccaccatcggctggataaaagagaacggtttttcactcatcaaagccggtgtggatccggaaaatacctcttcaataaaattacttatcaggactggctttcatttttcaggcatcgaagagggtgagcatatttatgttctggatttaacaaaaggagaataa

SEQ ID NO: 149839 - DNA, 552 bp, Enterobacter cloacae
atgacagcacaccacttcacttttcaaatcacagatgaaagtgatgccagtgatatccgggaagtcgaaacccgcgcatttggcttcagcaaagaagccgatttaacggtctctttacttgaggatgaaagcgcgcaccctgcgttatcgctgctggcccgacatgaaggcaaagccgtcgggcatattttatttacccgggcaaccttcaaaggggaaatggattcaccgctgatgcatatcctcgctcccctggcggtcataccggaataccaggggatgggcgtgggaggacggttgatacgcactggcatcgagcacctaaaatcgatgggctgccagacagtatttgttctcggccacgccacctattaccccagacatgggttcgaaccctttgccggagacaaaggctatccggcaccttatcccatcccggaggagcacaaagcctgctggatgatgcaatcactcaccgctcagcccatgaacgtgaccggccacatccagtgcgcgcaggccctgatgaaaccggagcactggcgtgaataa

SEQ ID NO: 149840 - DNA, 252 bp, Enterobacter cloacae
atgtcacaacatgaacagttctgtcaggcttgcggaatgccgatgtcggcacccgatgcacacagtgccagcgatcaatattgcgcgtactgcagcgatagcaacggcaatctcaaaccctgggaagaagcggtatccggcttagccagcttccttgattcctggcaaaaagtcggccctgaagaagctaagaaacgtgcaaaacgttatctcacagcgatgcccgcctgggctcataaagcggacgagtga

SEQ ID NO: 149841 - DNA, 393 bp, Enterobacter cloacae
atgttttcttacattatgcttggaaccaacgaccttcagcgcgctatcagattctatgatccattgatggagcttcttggacacccaaaggtagattggggcgaggaaggggcgttctggggtacattcagtaataaccatgccacgggattatgcgttggcaggccttttgatgagcagcgtgccggagtcggtaatggcactatggtcgcgcttaatgcccgctcgtttgaacatatccagcaactctactcgctcgctctcgccctcggcggcacggatgaaggggaacctggccaccgaccgcattacggacaaggatttcacagcgcctatgtgcgcgatccggatggtaataagctggctttcgtgtattacgcttcacaatcctga

SEQ ID NO: 149842 - DNA, 315 bp, Enterobacter cloacae
atgtacgccaaatcctatatcgctttcgacgggagcggtcgtctgaccggtgcccgtactgcgcagcccccttacgatcgttatacctgccacagcagtagcgtgctgcaataccatcctgaatacatcaccgaacgcccgtggtttgaacactggcacggagatctaacagagaacgggcgacagcactgcccgtatgtaaatcctgattcgggtgaaaggcaattagccagacggctacagcacttcctccccaatgctatcctcagggtcagtaaagccgtctggctctgcgcaccatgcgagaccagttag

SEQ ID NO: 149843 - DNA, 2256 bp, Enterobacter cloacae
atgaacagcgctgatagcgaaaagttcctgcgagcctttttccatagagaaaacaatattatctcttgggaaaaaatcgcgggtggcctgctagaagcatcaacccaacagcggttgaccccctggcttgacgatgtccgcaacggatgtttcccggtgatcctgccgcgcgtagtaaagggcagcaatgacaaagtcacctggtatgcaatggccgatgaggaacgagactatgcggagttgcgcgaattattagacgcgcacgtcggtacctcgtggtcagactttaaccgccagcgcacgatgctggatccgagcgacccggtggaaaaagcgttgatagaccactatagcgatagagtatataaatttagctctctttctctgtcgaggatcccggagattttcaatggcatagagcgcttacgccaacaactcgccagccgcccgagttaccagctcacacttctgcgcccgcgtggccgtattctgcgtgatattcgtgccgccttgcgccgtcgtgatgtgccgcagactcgcctctatctgcaggaactacgtgaagctggtggcataggccatattaacgaactgtttatcgaattgcgctgtatggctctggaaggtgacgccaaaagcctgctggattcgactcagttgcgacaggtcttggatatgccgcacccgttggtgttggctgaagaagtaatgacagtcttctatcagcagtttctgctgaagtatgagcagttgagcgacctcgccgcccaacgacaagcatttaataatttgctggtgaagaacgtaccgcgcctgttccaagtgacgcagggtatcaacacgccatcggcaatcaaaaatatcctactgtggttactatctgacacacaaagtgatccggcaagactgagggaacaggcacagcaagtggttgccggtatgaagggggcaacagacgatgacctgcactggatccgccggttgctggaagcattcccgaccgttgcagtggcctccctaccgatggcgagcatcgatgaattgcttgccagagccgatgaatatcctgaaagcgttctgaaagagttactgttgctaccggtcagcgctcgcggcgcagccattgctttgcaatgtgcctgggtcgtaggcagtgcagaagctgctgtgagtgctgtcagttatctgcaacaactggctcaacaagagcgcgacttgttactggcgaaaccggccttccagcgttattacactgccttacagttgatgctgccatccaaacgaacagaacatgatactgcaggtatcaataactggcaggactggttgaaggaagtcttaaataaccctcgatggtcgggggcgatagaagcggtagaacaggcctgcggccaatggaacgcagcggctttccagcccgaggcatttgtttcgttgctggataaaaccaacaactgcgccagcatggtgttgcgcgatgccattccagtactgctcgagtggctggataaccatcaaacaagtgcttcctggcagtctgtccggttagcattgctgcaacaattggcgctggacgacaatagttctcgcgaagatatctttactgcctgtgatctaacacgcggttatttagagggcgatagtaatgcgcacgattaccgcgaactaatagaaaacctgcagatgatgatcgagagttcaggtaccaccagcgctagcgcctggctggatttgctggaactgttcttggtctacccaactgctgaccaacttgccagagaacaattattcaatctggtactcaacatgttttaccgcaacccagcccgctatagtaaattgcagtggaacctattggctcagtttgctggtgagtgcggacttgtctgtgaaattcccccacaaattttagaggacagtggggagaaaaatgatgaggttcgtgtcggatcaacattgaatgacaaggtagtgggcatttatacattgactgagtcggtagcacagcgtgtgaaaaaacaactactagccgattatcctcaggccgatattcgcctcaacaacgataaaggcggctcaaccatgctgcgttcattggctagagaagcggatgtatttatttttgcttggcttagttctaaacattctgcttattacgcgataaaggaagagcgaggggataaaccattattgcaaccttccggaaaaggcagtacgagtatgctggactgcatacgtagttatcttaaattgtag

SEQ ID NO: 149844 - DNA, 543 bp, Enterobacter cloacae
atgaatacccgtcgtatttttaaatccagaacctcacgccagagtgaagttcttgatgtactcagctccttgttggtagcggagatcgctcagcccagcgcggaattgtggatagtctcgccgtggatcaccgacctcgacctgctggataatcgcaccggccgtttcgactacctcgaaccagcctggggacagcgtcaggtgcagacctcagaactgctggcgcgtgcggtagccaacggcggtacgcttaaagtgatgaccaacgagacccagcataatgcacgctttatccgccagttaaccgaacgcgtcgccaactacggcatgctggataacctgtacattggccagaaagaggtactgcataccaaagggttcctcggagatcatttcttcctaagcggttcaatgaatctgacgatcggcgggatcgtgatcaatgatgaacagattaacttgaccacagacaaaacagccatcgtgcaggcgttgttagcatttaacgacttttaccaaccggcacagggaggtgtgcaatga

SEQ ID NO: 149845 - DNA, 4530 bp, Enterobacter cloacae
atggaacagattattcgcgcagtacttgatgggctggagtcgcaggaggcggtactcctcacttggggtaacacacaaggttttttcactgagaccgagctccgtaatactatttctcaagtcttacagaaccacccgctcgaggccaacggcctaactagttttggcatagcgaaagttatgatcgatcgtggattgctactgcgtcaccagcaaaatggtgtttcggtgtttcgtacccgcatggcggaggcagtgcgcctttacagccagttgcgccagatgtttcctaagcacggccttaataataactggcgtaccgcatcgacgttggtgtccgactatcgcttcttacgccgccaacgcaaatacccgaagcgtaaccaacaggctgctgaagttttgcagcaacttgatgaaataactggttttacctctacgcaccgccagttactgtcggccctgctcagccattcgagcggaatgtacaacctcgcctactttcaacaagaagcctgcaaaaacgtactgcgcggattgcagcagagccagcaccgctcgactgctaccattgtctgcgccggaactgggactggtaaaactttggcgttctatctgcctgctctgacctttatcggcagtgaactggtcgccaaaagaaaagatgcggtaaaggcgctagcaatttaccctcgcaatgaactgctgaaagatcagtttatcgaaacgctgcgtcaggtacgtaaactgaacggtttgctggaagaaaaaggcgtgcgcaaagtacgtatcgccgctcttttcggcatggtgccgctagataaagacgcgatttatcgtgactacatgaaaacggcttggagccggcatcgtgacggcatgtcctgccagtatattccctgcccgacggatagctgtcgtggcaaaatggtctggcgcaccgctgatcttgaaaacagctttgaacgtctgcattgcgatagctgtacgcagaccatcgagcctgatgaagtgatcctgacgcgtaagcgtatgaagatcgaactgccagatattttgtttaccagcaccgaaatgctgaataagcagatgggcaacccgtttctggcatcgctgtttggcatcggcaaaaatgtcgtcccgccatcgatgatgctgcttgatgaggtgcatacctattccggcgtcagcggtgcacagaacggcatgctgatccgccgctggcggcatctgtccggtgctacaccgcactttgttggactgtccgcaacgttggagcaggcgacgcgctttatggcttcgttaaccggcttggaagagtacctagtggcggaagttagtccgatcgaagacgatatggagacagagggcgcggagtatatgctggctctacgtggcgacccggcgtcccgctctagccttttgtccaccaccattcaggcctccatgctaaccaggcgtatgctcgacaacgccgcagtgccggtcagcaacggtatgtacggcacgcgcagttttgtatttacagatgatattgacgtcattaaccgcctctatttccagctactggatgccgagggtcgttactcgaatggcaatatcaatgccaaaaaagaaccgctggcgatgctgcgcggcgatgcgccaaatgaagagaaatttacctttggtcagcaatggccgttggctaaaatgattggccatacactcgattctgctgaccgcagcaacgttaagcgcacctcttcgcaggatgctggcgtcgaccatgctgcggatctgattgtcgctaccgcgtcacttgaggtcggatttaacgacccgaacgtcggtgccgttatccagcataaagccccgcgcgataatgcccaattcctgcagcgtaaagggcgtgctggacgtcaacgaaccatgcgcccgtggaccgtggttgtgctgtccgactatggccgtgatcgcatggcatttcagtgctacgaaaacctgtttgagccggtactaaaggcgcgccaactgccggtcggcaacagttacgtactgcgtatgcaggcggcctttgccactatggactggctctccagccgtaacgagtatcttaatcagtggaatcgtggtatctgggatgacctatccgtcccgcaggacaaaggtaagccatctgaagctcagtcaaagctggccgatctgattgaagaccttctgaacagccagaaaatccagcaggagtttaactcatggttggctgaagcactggggattaaggacgaaaaactgctgcagtcattgctgtggcaacccccacgcgcgattatgaccgcgtttcttcctacggtacttagaagactgcgttccaactggtcgcgccttggcattgagcaggccgataactgccgcaaaagcacgccgatgcctgattttataccgtccgcgttgtttaacgacctctgcctgccggagttacagattaacctgctaggtgaagttggtcaggaacccgatgcgcacagcatgccgattttgcaggggatgaaagattttgccccggggcgtatcagcaagcgctttgccatcaaaaacattcgcgaatgccactggctagtgccgaaaaaactcgagctgaaagatggttcgcatccattcccgattgatgattactgcccgccagacaaacgggagtccatgcccgattgtcacattaccactcgcactggcatgcaggttatcccttgcttccgcgcctgggaagtgactgccagcacgccaccagatgaccttaaactgagtgaaacctcaaacgcgtttcttaactggcacagcgagatccgtccacctcagaacggcatccctgcggaagtgccatccaacaatgcctggcaggatattttccagcaggtggagttttacagccaccagcagcactgtccgatcgaagccgtgcgctttgccaccggatcacgtgccaatattaaattcagcgaccaacgtgaagacctgcagattgacttcaaatttgaacaccaaggcgaacccgctgcgtttggcttctcgctgtgggtagatgcgataaaattccagtgtcggttacctaattttgatctcgctagcatcagcaacaaccgtgaactggtggccggattgcgcacagcgcgcttcctgtatgaagtcagccacgacgaggcaatcagtgttaatactttcctcggcggttggctggcagaaactgtcctggcaggtattggcagcgaagcagtattgaaaaactgcaccccggagcaggcgttccgcgcaatggaacacaacagcgcagggatcgccttgattgacgttcctgctcgaatcttccagacgttgtatgatgcgcagaccggtgaagagatagagcaggatctacagcaaagcttgcgtgaactgttgtcccaggctccggtgatggcaagaattgccgactgggtggaactgctgtggcaaccgctggataacacctggttggagtggttgaccctcaacttcaccaacacactgggtgcggcgctgctgcaaaccgctatgcagttgtgcccagatgccgacgacaacgacctaatccttgacctcaacggtgggccggtgcgcacttcgctgctcgcgcctgaccagcgcgaaatctggctgtcggaaaccaccgtgggcggtggcggtatcattgagaagatccaacagatttaccgtgaagatccgcgcagtttcttcgagttgctagactttaacctcagtccaggcgactacgaaacaatggacaataatgtctggcacctgctgcaaaccatggtaaacccgacatcatccctgcctgcgtgtatgaacgaaatgcgccttgccaacgatcatgccagccaggttcaggcgcagcgcaacttgctgggagaattgcagcgcagcggctttatgaccagccacagcttcctgtcggcgatcaacacccgcctattacggccggggaccgatgccagcagcgatgtctttttactgcaactgcaacaggattggcgacagcaggagcagcgactgggtattgaactaccacagcgtgtctatgcctttacctgtagtcagtccagcgcgcttgaccagcaactacaacaagctagccaagggcagcacaacttggagagttggcgtttaaatacctgtaatggcctactgtggccacgtggccataccattcgtgatagctggctaacttggtacaacccttacagctttgccgggccaaccgagcgcctcctactggcccatgtggtgcagcacagttgtgctcaggtggcgctcagccaaccagactggatgcagcagtgtcaccagcatctggaaaataatggtaaatgcgaattactagccgaaccgggcgatgcaataaatgaggccatcgctactcttttagtcaccccagtagaaatgtatgggttgttcttctacccgcgcgtcagtgccctgcgccgccacaacaatgacaccttcgccatgattgaaattccggaggcgatccaatga

SEQ ID NO: 149846 - DNA, 792 bp, Enterobacter cloacae
atgagtgaagtaaacatcaatgacgtggtaactcccgtagccagcgtaccggaagaacgcggtatttttgcacggcgcagcggtgattttaaagcacgccttcaacgctaccaacaaatggagaaagctcaggatatccgcgataacctgctgcggatagcaaaaaaaatcgatactccgactcaaacactagcacaggccctttgtagctatagggtgttaaggcaggtccacgacgatgaaacgggtaagccgattgttggtccgtttgaccgtgcgactttcggcaatccacaaatcctgctgacggccttttgccagcagtacgcgacgcataaacatgatgttgagcaagagggtgaacttgccctgcttactcaagaaattaggcgcttagccagcgaactcagcacgcacaccaccgcggcgtgggttaactatattcgcggattaaaagcgcagtgggaagtggatcagagactgttcagtaacttggcgcatcaggaaggacaacgaaaagtacaacagcactacagtgatctcgtggaaaagttcaccagcagtagccgggggctgccgaaaaccattgaagaatttgagacggtgagagacctgcatgagaaactctgccagcaacgcggagcacttaagctggatgtgccagaagaggtcaatctcttcctcaaagccgtagccgggcaaggtgccacgctcgatatgttgacgcctaatgtactcagttggctgacggaagaagacgacccgacgcgctatcgcataagacgcctgtaa

SEQ ID NO: 149847 - DNA, 3057 bp, Enterobacter cloacae
atgccacaactacagagctactggcccagcgagcagaacgttactgcctgcatcctaaccgaggctgagtcactggctgacagccagttgctggcggtgcatgaaccgatgcgtctcgaccgcattgagtttcaaagtggtaaggtcacgcaggtgggagagggggcgttgctggactttctgcttgaacataaccgcccgctgccgctaattggcgcttccggcgtggggaaatcccacttggtacgctgggttcatgctcagctcaaacgtcgtgaagatcatgcgaaataccacattatccgcatccccaaaaatgcttctctgccacgtgtacttgccgccattctggaaggtcttgacggcgaggagtatcagagtattcgtgaaaaggttaacggagttggaaagcaattaatccccgaaaacgttgccgaacatattgctcttaaattgcgtcaagcgctaaacgcagcatatacagatgccattgaagagcttcgccaagaaaaaatgggaaaaattcagctggaagaaagcagaaaaaagcagctggaagagattcaacaacacgcagcatcatcccgactgcccgcgctgttttttgacagcgtgatgacgcagtatttcactgctcctggcgcctgtcttcacaatatagcgcagcgcttctgccagggagctaatgacgacagtattgccaacttgcggtatgaaatgtctgcggaagacttcaccttcaacggactggacttcaggcaggtttcaccaacagtgcttccttacctgcgcaaccaacagttgcttaccagtgatgaaaaaaagcaagcagcggctcgcgttgtcaacgtggtgcgcagccaggcgttagaagacaccttcgtcgaactatttagctttaaccgggccaatttccaagatctgatgcgtatgatccgccgacagctgctggcagaaggtcgcgacctgatccttcttgtggaagatcttaccgccacctcggcgattgaagatgtcctgatcgcctgtctgatagaggaagatgagtacgacggcaaaaaggttttatgtactctaagatcgattattgcggttactgagggtcacgatagctttaagcgcctacgtaatacactaggcacccgcgcccgctacgaatgggtgatccagcagcataccagcgaaaacgatgtcgcactgaaaaaacgcgttattgacttttgcggccgctatctcaacgctgctcgtcacggcgctgctgctctggaaacttatcacctccagcaggacgcgcagtgttatcaggagattcctgtatggcaggatcaggaggtgctggagaacgaatctgctgcgccagcgctggccagttttggcagcactagcattggtcatccgctgtttcccttcaacccagcagccattgggcagttggtagaacgacactgcaaagttaaagaacaaggcctagtgtttatcccgcgtaatattttgcatgaaattttgcgcgagccactgaaaaagtatcgccagaattatctggacgggcagttcccgccatcacaatttgctgagattgtatgtaacccggcattacagcagagggtacgcctggaaggcctcagccagcctgagcggattaattcactgctggctgtttgggggggaaatagtacaaacctggcaggtcttacgcccgccatctgtaaagagtttggtctgccggatgcggcagtactgttggggggcggtggaacgccaccggaaccagcaccggaaccagtaccggaacctgtaccagtaccggaatcagtaccggcaccaccatcaccacttgatgaatggaaactcgtgctggataaatggcaccagagcaagacgctcgagcaaaccagagcccgcgacattcgtaaatggctcctggaagcgctgaatgcccgtatcgactggtcaactgagcttatccagacctctctcatggccagctcagcaaaaactcagggtaggatccacttgcccggcgtgcttgtagggaatcagtcacatccgctggtgaagcttgaagatactcctgagttgcgtagcgcctgtctggcgatggcgcacttcaaccattatcagagttgggattatgacggcagtgagatcgactacgccgcctttcatagtttcatggattgcattgagcacgaagtaaaactcaaggtgttgcaggaagaacgcgatgagctttctagtatcattaacgatctgcagttaagtggttcattccttgggttggatggattatcagcatcccatccgaccacgctggtgcaggcactgttaacggaaccgcaagtcgcaaacagcaaccatccactgctggatgagttcttaacccaagcgcgcgacaccgtgattgatgagcatctgaaacgtcgcgagcgtttaatcgcgcttacggcggcgaaaaaaccgggtgctcagccgtatgctattaacggcttaatgctggtggaggcgtctaagaaacaactgccagacgctgggaaacaaccgggcaagatccatgaagtcaaaagtaagctcggtggctaccgcaccctgctattgaagacccaagagagcatcactgaacgcctgagcgacggcaacagcgccagcctggctgcggtgaacctctgcgacaccatgaaggagatagtcgaactggcgaatagcgcggacgtcgcccgtccaatgggtgaaactgtaccggtactgctgaagttgctgaagaactggaaagatccagagctgaaaaaactgatcagacaactggaaaaactgacgttgccagccgataactcgcacatgttgatgagagagatccttgccatcaatggcgagcagtttgaggcgtttcgacagttattagagatttggggcaagttcgaagacgccaccgacaagtatgtgcaacagcgtataagcgataagggcggagaccaagttgaggatgcagaaaaccaagttacagataccctggcaaacctggctgaacagttaacgctgctggaggcggacttatcatga

SEQ ID NO: 149848 - DNA, 906 bp, Enterobacter cloacae
gtgtcgattatcaataatgcccatggtggcagccagtatgccgtgctggccgcattttatcaggtgctgaaagccagcccgaagaaccaactaccgcgtgaaaagctgatggcgctctgtgcaccggaaacattgcaaaccggcgactcacaaaatgcacgtggtaaagcgtctcaggaattaagagcatggctggacttggggttactgacggaagaaaaagtagaagagacaacacaaatcagtttcaacgcgaactatttcagcacaaaaagtatgccgctgcgccaggctgcgcgccgctgtttacaggctcaggaaaataacagtgacctgagctcacgcgatgaacgcgccgtcgaccttacccttttggctgcgttgctgctggcgctggatgtctatcagaacgcagaaatcaaatcgggcaaccttgaagtgctggtgaacacgtttatacctgattttcgtatcaacagtaatgaaattgctgtcgttccggggtatctcagttggctgggctttgctcaacaactcactcgcgacagttacgccattgaccccaccgattctattcgtgaagagttaccgttcctgatgcgtgttggcgaacaactttccatcggcgaagtgctgcaacgtcttaatcgggcgctcccggtgctagatggtggcagttatcgccagcaggtcgaggagcgtatcagtctgtatggctggcactctcttagccctaaccgcctttccacctcgctgtcgcgtgcgctgctgcggcttcagctttccggagtaatcaacatgaaggctgagtctgacgccagcggcgcaatgcagttaaccggccggaatggcagcgtgctgcgtaccgtaacccatctgaccttaaatgatgtgggagtccactaa

SEQ ID NO: 149849 - DNA, 2568 bp, Enterobacter cloacae
atgaatctggcgcaactgattgataatgattttatttcatcaaggttgagtgagtgcctgctgccagaggcgactgccggacacctcgaccgccgggcgttgatccgtgactggctgtaccgggaaaaacatgcccaccacaacgataacgagctgaccgtccctgatgatagtcaacctggttggccaagacaggaggagtgggaagccagcggtattaactgtcaacgactaggtcagacctttctgctcagcgctggccctgcttggtgtccgcagtggctggagcagggaaacggcatgccttttctcgccagcgatcagcaccaattctgccgccaggacactcgagtaccgatggactatgtcctgcgccgttacttcaagaaggacaactatatcagctatcaggcaccgggccagcgcgatgcggtacgccgggctctgttcgccccaccgggcagtacgctgttggtcaatttgcccacaggcaccgggaaaacactggtagcgcaagcattagctctgacagcctcagctcccggggcactttgtgtactgatcgccccgaccacggcgctggtgttggagctggctagccgtttccggaagttactgattgaagcagggaacaaagcagaatctgtcaccggctggtatagcggcttaccggcgcaggataaatatgatacgtacatgcgtatccgtgtgggtgagcagcggctgatcgtcacctctcctgaagcgacctgcagttccctgcagttcgccttatttgaagcagcaaaacagggagggctgcgccatgttattgttgatgaagcgcatattgtcgccagctgggggaacgactttcgcccgcatttccagcaacttggtggcttaattcgtgggctgaagcgcatcagccgtgaagcgaatcttacaccgtgctcaacactgctgatgagtgcgactatcaccgaagccagccgtaaaatcctgcgcgataccttcgatcaggagatgagcgaactccatgcctgccatctgcgcccggaacctgcttactggtgttatcgggcaaaagaccacagcgacaaacgggataaggtgctgcaatcgctggctcatgcgccacgcccgctgatcctctacgtgacgcgaccgaaagaagctgaagagtgggcgcaacagttgcgtttgcaggggtatcagcgtttggcaacatttaccggtgatacaccgagtgaagtacgccgaagcctgctggaaaaatgggataaaaaccagctggatatcatgattgcgacctcagcatttggcgtaggtatggataaaaacgacgtgcgcacagtgatccatgccacagtgccggaaaacatggaccgcttctaccaggaagtgggacgtggtgggcgcgatggctatgcctgcacctcactgctaatttacaatcatcaggatgtcaaacaggcagaacatctgtcctcacaaaagttgattggtcttgagttgggcctggaacgctggaaaaagttatggggcagtgccgaatcggtgggcgacaacctgtatcgtattgatatagagaggatccatagcggccttaatttccgcagcaaacaaaataaattatggaacttgcgtaccgtactgatgatggtgcgtgcaggagtgctggaactggatgccgatctacaaaacccgccagacaaaaaagactttgccgatgttaatcgctacgaagcggcaaaagagcaaatcatccgacagaacggaaattcactggtagtacgcatcctgcgtagtcaccacaccggagaagaattgtggaaaacacgtattatcccttcccgtgaagagacgctgcaagctgcaagggctaaccataatgcattaatcaactggctgcatacaccactgagcagaccgctgtgcgaggcacttgtggatctctactccatggcggaatttattccgggtcacgcctgtggtggttgccctgcctgtcgcgataatcaggtgcttactagtaattatccgagcccaccgacgctgttgcttaacccgccagcgtcggtggcacagcaggcgttaagccgctggcaggcgctcagcggcctatcttactccagttgctttatcacctatccgccagttaacgacgatgagtgggaacgtgagaactggtatcaccgcatcgcgacgctactggtgcaactgtatcatagaggcattgtccagcgcgtctgggcagatcctgccttgttgcatagtatatttagcgccattccgcgcggtgagcgcctgatcttgttgagtgacgaattgcctgcacgtgatgagccagcgccggataacgatgtaatggccgagttggcagagttggtacttcccactcaagagtcctgcgccaatggttacctgccgtctttcaacccagcaccattacaactgacgctgatcccgcatgatatgcccgatcctcaccatcctggcggggcgcattacgttcttctcgataatcacaattggatcaccatcgaacaacttcaaaggaaactagacagtgtcgattatcaataa

SEQ ID NO: 149850 - DNA, 3156 bp, Enterobacter cloacae
atgccccttgaagttggcgacctcgttgactcgccttatggaatcggcaaacttattcgcattaacaataatgatgctctaattaagtatttcgattctcccgtaaattatgaaggcatagagcaaactgtcgaagtaaaacacctaaaaaaagccgaactccacgcggaaagtctggtttatcgctacgactacgaggttgcacactggcagattgcacgtgttgttggtgccgtgcctggaggggtacgtttgcattttcctaacaagcagcaggaagacgtcagcttaaatgatatctttgtgcgctgggatcgccctatcagcgatgctgcggcccttctcgccgagcgcattacctatacccccttctggcaagatgcccgtctagcttatcagcatcagatgctgaaacaacgcaacgcttgtgctgggattacctcttcgctgtcgtccagtattgaactcgaaccttaccagttggccgtcgcgcgtcgggtgttatctgaccctattcaacgctatctgttggctgatgaagtcggcctcgggaaaaccatcgaagctgggctgatcgtgcgtcaacacgtcacggaaaatccgctcgcccactgcgtggtgattgtggcgcctggagttctgcaccggcagtggcagcaggaactttctgcacgttttcacctggaggaactgcttaataagtcgatccatatcattgatatggccgccttcagcacagcggaccccctgtcgttccgccccgatatgctggtgattgacgaagctcatcaggtcggtgcctgggcatgggatgcagagtacgagcagcgctacgctagtgtgaactacttggcgcaacaaagtgaaaaattgctattactatcagcgacacccgtaactggcaatgaaaagaacttcctggccatgctgcatctactggatgctaaaaattacccactgactgacactggcttacagaaatttcagcagcgtatccagcagcgcgaagaaataggttcactgttctacgcgtttaactgtgataacgacaacatgacgctggaagagaacctggaagcgttgactaggatgtttcctgaggatgaagtactaaacgggatggcttcacagttgcttccccatttagatatgatgcaaccgctgcggagtgaggcgcgtgatctgctgatcaataaaatccgccactacattggtaaccgttaccgtctgcaccaccgcctgctacgcaaccgccgtagcaaccccgccattagtgtcctgatgcctggcttgtccggcctatcactaaaaaaatatgccacgacgaacgccagcaacgacatgatgatcgcctggcgcgaatcggcaataatgatgcacccacaagaccccacgttggcggcaatttatcagttactgtttgaagccgctatcgctacgccggaactactggcccggcttgcaaactatcgcttacagcaggagtcacttggtgccgcgcagggctttctctatagtgattcacagctcgcgctgttgcagcatccgctgtttgatggcgagaaggagatcctgcttgagctgatagaccgctgcaaaatggagtgtgacagcaagcgccagcgcttaattgatgtattggaaaaacttctggatagtaacgtcagagaactcccttatattgtggtgttctgtgaccagccatgggtagccgaccaggtatttaccgacctgatgataccatttattggcaaaatccagcggcataaccccgacaaagaagtgcgctttggcaagggaagcaaatgccagatcttagtgtgcgatcgccgggctgaagaaggtgtcaatctgcacggcgggcgcaagattgcgctgcattacgacttgttgctgtcgcctaaccgtatggaacagcgtcttggccgcttgaatcgctactgcgcgactgagagtgcgactactatcctcagcatggcgctggtgagtgaagcagagggtctgcaaaatcagtggctgactattctcaatgaagtgttcgatgtcttcgaagagtcgattgcaagcctacaatacttgattgatgaggaattacagcggcttatttccaatctttacccgctgggtgaagagagcatgatgcaactcagtgcgcgtctggctggtgaggatggccgccttacggtggaaaagcagcgcatcgaaatgcaggaagtcctgctgcaaattgatggcgatatcatcgaagccagagagtatgccgatgcactggcggaaatagatgagaatgaagaggaattccgccgctgcgctcgtaatctgataggtaatgtactgaaattcgattttattccagatgagaaagatccatcgatattccgctatcgcttcaaccctggtgatagagggacgggcaccttagtcagcccacagcgcctacaaaaacactgcctgctgggctttgatctcaaccaatctagcggaagttcgcccatgacttggccacttagctactaccgggctgatacctctcagggtaaaatccgcccggctcgcttgggtgaacctttccatgatgccatcctacaaatgctggattttgaagaacgcggtgttgctagcgcgattatccgtatcacaccaggcatgggcgatgaaaatatttttttccgctacgattttctgattgaagctgatgtccatacaccagcactgcaacgactggcggaccatctgatgcctcctgaaaccattaccttgtggctggaccaggccggccagcaggtcaccaacgcagaggtgttgatgatacttaatgaagactataaaccgaaggataagggcggacgccacctaaatctcaatgaggaacgctgggcgcagatctcccattgcatcagcgctaaagattggcgcacctggtgtaacgatagctatagcatagcccagcgcctggcggtggaacagttcgccacacaacaggctctcagcctgagccgactggaacattatctaagcagcgccgcgctgcatcatgctaaccggcaggagacagggcagacgctgcgccagggtattgcacagccgaaaatgacctgcctggcgacgcgtgccttaatcattgcatcagaagctatattggatgaggactcataa

SEQ ID NO: 149851 - DNA, 306 bp, Enterobacter cloacae
atgctcatgcttaatatcagtgtggcaaaatacattgtgaaggaatttacgtcaaaacaactcaatgatttaaatgagttatctcaaaagttaaaagaagaactcaaggagttacctgagcgtgaagtgaaaaaaggaattcgtcgtagtccggaggaagttaagtctttcattttaaagattatggaaaaaaatcctggtatcagtgcaacacacgcgttgcgtgaatttcgtgactcggggaattcatttgaggaaaaacgttttcgggctgagtttatggccctgagagaggctaaaccttaa

SEQ ID NO: 149852 - DNA, 612 bp, Enterobacter cloacae
atgccgttaaatacctggattttatttttattcacctccgctgggatatctcttttcccaggaccaaataatcttttagtgttaacacatggtgcgatgcatggtatccgaaaaactcttgcgaccatcctggggggattgataggtttttcgcttttaattggtttatgtatgtttggaattggcaccctgctagaggcatcggagaaatggcttactatattgcatgttgtcggtggcctttatctggtatttctgggctataaactgtggcgttctccgccattaaacaatgaagtaaaacagcagaaccgggtaactggccgttcacaaatgttccggcaagggtttatttctgcggctactaacccgaaagcattgctttttttcacagccgttattccaccattcattacgcctgaaagaagcatagtaattcagtttgttgtcatagcactcacatatgcttttaccgaattttgtgcagaatatgcctgtgcaactgccgctaatataattcgtccatggcttgcccgcacaggccgacgatttaaccgcatctgcggttgtttatttatagctgcgggcgcggcgatgcagttcaggagataa

SEQ ID NO: 149853 - DNA, 900 bp, Enterobacter cloacae
atgtttgatcgcctccccccattgcagactctgcgtgcttttgaagccacggctcgcctctccagcatgacgctggcggcagcggagttgcacgtaacgcatggcgcgataagccggcaaatccgtaagctcgaagaacaccttggattaaagctatttttcagactgacgcggcagattattttgactgaggaaggtgctgaatttcaccatgcggttacccgtattctgggtgagttaatgagtgaatccgagcggctgcgggtaagtaaccctgccatgagtttgcgaatcagtacaagtgtttcctttgccagtaagtggctggcgccgcgcctcaatcggttcaggcagcgataccctgaacttgatattcatctggacgttactgacattaacgtggatctcaacaatggtcaggttgacgcggctattcgatacggccttggtcattatcgggacgcttcgtctgaacgtatcctcaatgaaactgtcaccccagtctgtagtccaggcttccttgatgcacataatggtctaagggaaattaaagaacttgcagagtgcgttcttcttcatgaggacagaatgctggcgaactgggagtcatggtttgcattggccggagtgaaaaatttccgcagctatcaaggaccgttatggactctcggtagtatggcgactgaagctgctatacgtggcgaaggcgtggcgctgggacgcagtgtgctgattgccgatgatgtagctgcgggaaggcttgttactccgttcccgcagtacaaactaatggctgagcggggatatgatttggtttaccgttcaggttatcgggatacatttaaagtaggaattctaagacaatggctttctgaagaaatgagcttactaaaagaatga

SEQ ID NO: 149854 - DNA, 222 bp, Enterobacter cloacae
atgcaagacattgactatgatgcagagtgtaagatctcatatgaatttcctgagtattcaactaagaaatcagaagttgctgagcttgttattgattttaaagcgtttaatggtaaaggtgcttccgtttctaaaattaatgaaattaaagccagcattatgaaaactattgaagcgaaaaaagtaaaagcctatgatttatataagcttattcctgattaa

SEQ ID NO: 149855 - DNA, 885 bp, Enterobacter cloacae
atgaacctggtagacggtattgaggcgttcgtgaaaattgctgacctgggcagcttcgcggccgcggcgcgcgagctgaatatttccccctctgccgtaagtaagctggtcagcaaaacagaagaagagctgggtacgcgtctgcttaaccgcaacacgcgcggtttaagcctgacgcaggaaggcgaaatgtttcttgagcgcagccgggtaatacttgatgagctgacagcagcgaaggaggagctttcgtctgtatcaggcgagcccagaggcaagctgcgcgtgagtatgccctatataccgtcctttttcctgccagtaattagccgctttatggagcagtatccggcagtaactcttgaggtagatctcagcgacaggctggttgatgtggtggaagagggatttgatgcggtgatacgcgtcggccaattgtcagactcccgactaacggcccgctcgctcggtaactgtgccatgaatctggtggcatcgccggactacctcaggcgatacgggattcctgcctgcgtggaggatctcagttcccatatctgtatccagtaccgctatcccacaagtgggcgcacggagccctggccgcttctggattcagcatccgtagtgcagggcgttatcccatcgcttgtctgtaacagtacggacattcgccttgggctgacacttgacggcaaaggtattgcttttatgccggggctgctcacggaaaaatatattgaatcaggtgagctggaaattgtgctgggaaacatcgtcggacaaatctatgaaatcaatctggtctggcccacgaacaaatatgcgccccccaggctcaaagccttcactgattttatggtaaattattttaccgtaagttaa

SEQ ID NO: 149856 - DNA, 222 bp, Enterobacter cloacae
atggcagcacgccgcacctccggtgaagtatccgcgctggtctgtcacgctgcgagtgaaccgggcgaagcgctactgaggaagccggagaaacagtgtccgttcctgagtctgcgatgctttaaaaccatggtggatataaaacgctttggcttcctcagtgagtgcatgaaccatgatcgcccgcaccccgatattctctgctactcgataacagcgtaa

SEQ ID NO: 149857 - DNA, 549 bp, Enterobacter cloacae
atgcggattggaataaataaaaatataaattcacttaatagtaaattactgatcggcttgctagcctctatgatctatagaattataaccattttaatttctttattttatgccaaattttttaatccacacaaaatccacatatcaactaacctatatggcttttatgtgtatttgcttcttgtgtttttcatattcatatcagcagttattcctaggcgagtaataagtgtcacagtagcaataagttcaactctgctattggggatggatatcttcagagctgatttgccatatagggcgttattgtttattttctcttcttcattgtcttatctatttgttttcttctcaaatagtcagttgagaaaagtatcttctgggtcatacgcaaccaaggtagtaaggcgacttaaatacattctgctaattgtttatcctgcatatctcttctttgaagtggcaatgtttaggaatgtgtcattattcattgcctgcgttatatctttaactttctttatatcttttttaaatagaaagttaaaataa

SEQ ID NO: 149858 - DNA, 795 bp, Enterobacter cloacae
atgaaaaaaatcagtattgaagtcgatggaaaatcttatctaatcgttacaaaagatgaaaagactgaattgggaataaaaggtaatactacgcctgaaaaagatgaggaaacacatgaaatctacgtgccaaatatcttaataattacaaggaaaaatgctgatgtattatttgttttgcgaggtgggggaaatgattcttttgcaataatgacagctcaagatctgtatgataaatttcagtatcaatggtttgaaccgttagctgataactatcgggaattgttatatgttaacgaagctgattacgcaaaaaaatcctacaaaatattcaattgggataatattgcggaattttccgttattgacagaacgcctttggcgtttcgtccaaaaggcgagggtgactggaaaaataatcgcctgggtggtgacagttatctcctcgtaatgataaataaaattccatattggacagatgcggttgggcaaatacctttcgccatagacacatatagaatgtcaaaaaatataccatcaacaattgaaacaggtatgatatggggaactggtaaacgtactgatgttgccgatagaactaatacatatgataatttctttgtgctccgaggggctttatatgcaagccaaagatttacatatagcattaaatctgggggcggcacttaccctgcggtgaatgttgttgagcaagacaatagaacatcagctgatgcactaggtaacccaataacctctgaagagtatgctaaatatgcggattggaataaataa

SEQ ID NO: 149859 - DNA, 852 bp, Enterobacter cloacae
atgcggcgtaaatctattatgaataaatttatattagttctaccattggtgtttgcttcattttttttaaatgctaaaaccgttcctgtcgtgacggatatattatcaccgaataattctacgtcttgggtgagttatctgatctccgagcctattattcctggaggagaagatgttactaaggattcaattgatgttatttttaaagggaacaacattgttattgataacactaatgtctctatcggcaatatttgcaaatatgaatacagtaaggaaagtatatctcctctggaatactggcatagtgaaaaaacagttgacttatataaaaagttcctttctgcttataacattaagctaggaggtaaattaaacttaattactccgataaatccttctgttaaatgtgattatccgttttcttattttattgaggttgatggttcattagtttttattcttaagaatagagcaattatttattctcacaataataaaaatgatgatgttcccaattctgtatgtatgcataaagaacaatcactggagcaaatatttgaaaatggcgatattgaagagtgtttttataaaaataaaaatattttgagttcttatcaaaaatatagggatagtttaactaatgataacaaaaaatatctgcggaaaaatatagagttaaataaaagtttctccatgaaatgtgataacggatgtattaccgttatttataaatgggatgggccagatcatcttaccatttcgcagcagtttgatggtggtgaaacagagatttccttcagtaaagaagttcagggttgtcgagtcgtgactaagtcgcttcccgattaa

SEQ ID NO: 149860 - DNA, 255 bp, Enterobacter cloacae
atgaagaacatatataccattgatatttacagcaaacagacggaagatttacttttcgaaatagaagtctcgtctgaaaaagcagatgaaatggtagatattttagggttaaaggctaaagagcgagaggagtttatgcgtgttattggggtttataatctaagcaaaaatcaggcgcctcggttcgaattgttagtcggaaaatattttgtttcagatgatgcaaccttgcagatctctggaggaggaatttaa

SEQ ID NO: 149861 - DNA, 504 bp, Enterobacter cloacae
atgttaattatatttaatggtttacctggtagcggtaaaagtacagttgcaaaattgttatcccaaaaacttaatgctgtgtatctacgtgttgatacggttgagcaggcgattcgttcagtatctgaacagaacaaaaaaattggtcctgagggttattttgttctttatgagttggcgcgtgaaaatcttcagttaggctctactgttgtcaccgattcggttaatgatatcaatctgatacgcaatactttccgcgatatagcgatttcgttaaatgttccgttcttagaagttgaaatactctgttcagataaaactcaacatcgttatcgtgtggagaacagaatcttagatatcccggggttaaccccccctgactgggaacaagtacaacgccgtaactatgagccatgggaacgagagcatctgcaattagatacagcaattttatcagcaccagaatgtgttgatgtaattctcagaagaatatcggccgtttga

SEQ ID NO: 149862 - DNA, 1368 bp, Enterobacter cloacae
atggaagaaaagaaatatcaggtttttgtgagttcaacgtatttggatttatttgaggctcgaaagaaagtcattgaaacggttttgagtttatatcattttccagttggtatggaaatgtttagtgctgatgattcagatcagtgggagataatcagagaaaccattgaaggtagtgattattatgtgataattattgggcaaaaatatgggtctgtttctgataagggattaagctacaccgagatggaatatgactatgctaagtctctcggcattcctgttttggcttttatacgcaaccctgatgtggatacgaaaccacacgagcgtgaaaaagatcccacaaaaatagagaagcttgaactctttatagaaaaagctaaagcaaataaaatgtgtgatttttggtattcaattgatgaccttgcaactaaagtagcaattgcattacccaaaataatgagaaggaatccaagggttggttgggtaagaggtgaccaagctacctctaaagaaatatcaactgagcttgccgaactttcaaccgaaaacagattattgagagagaaagttagggcatatgaaagccttgttctcgctgatgctcctgtattagagttgtcgatgattgatgaggatttggagttatcacttcctgttaatacagtagcgaagccgtactctgaaaagcttagtatgataaatgtgccagaggcgtatcgtaatgaagtgacagaagatatcttgcagaaatataatgcaagtttacccagcaatgagaaagttgactcgtacaacaaaagaatgttccttcattcctgttataaggaatgttctcttaaactctctcctgttttgaaaaatgtagggaagaaaatagctacggatatttatattcacatcgacttgccaagtttcgttatcgctcttaataatgagaatgaaaagatatttatggagagtcctaccttaagtatgccggtgactcctatggaagagattgatagacggcgtgcggcgcgtgaacatataaacttcatccgaggtagattagttgttgagaaaggtgatgttaaagaaaaggaatttattgatgaatctgaattaaagtttcagaacatttatggtaattctatgttggcgcgtataaataacattaggccactgaatgcaaatgaatgggttgattatgaaaaaggccgaattgttttgagggttaagaggttaatacaaagtctatcaataatttttgatgatgttacattaatcccaataagaaaaggggaagggaagattagctttaagataatatgtgaagagctaaaagaaccagtaacatttatcagaaagattaaggtcttataa

SEQ ID NO: 149863 - DNA, 303 bp, Enterobacter cloacae
atggaaagtcaggtgcgaaagcgccagccgctgagagccaaaaaaggtcaaattaaacgggcgatgtttcaaaagctgcgcactaaccggtacatgaaagccagtggccgtgaaaacagcgccgttgtggagttttccggcaaagtgcagcgcattacacggatacatcagtttggcttgatggacagaccgagtcagtttagcagtgaagtggaatatccagagcgacaattattaggtatcaatagcaaagatgcgaaatcaattgaatttctgatttttgataagcttaataaaatttga

SEQ ID NO: 149864 - DNA, 183 bp, Enterobacter cloacae
gtgaacaacgccgggtggcgcttcgcttacccggcctacaaaatcaacaccccccgtacccgtaggcccggtaagcgcagcgccaccgggcaaagccgctactccggcaacaacccgacaaaactgcgttttttgcgcggctccgacatcaattcctcaagcttgtccacgcatgccagatag

SEQ ID NO: 149865 - DNA, 600 bp, Enterobacter cloacae
atgcccgctgttgagctgcgtcttgccgtactccgtggcgagtttgacgtgctcctcaccgcgcttatcctccatccgcagcttgttgttcgccggagtgcgcagcacgttgcgggtgtggttgtcgcgggttacggggtcggggtgttccgagtcgtgcagcgcatacgcgatgtacggcaggtcgatgtcgccgttgctgtacgcaatcgccacttcggtcccgtcggtcagtggcgtatgccagccgtacgtctctccggcatacggcttcgccatccgcagccacaggtatgcgaagccctgttcagcatcgtcccggtcaaagtccagcctgacgcggtagcggccctggtcgtccaggtgggcgtagatatcgttcttttcccggctctcaatccgcgccggaagcgtgccgtgaatttccgggcgcgaaacttccgtcgggcggaaacagtaccgttcggtgtaaggcatgccccacaccgatacgtgcaggcgggaatcccgcgctccccggaaggtcaccagcgtgaggatggccccctctttcagggcatcaatgacatcgccctgcggctccagcacctgaccaggtga

SEQ ID NO: 149866 - DNA, 1404 bp, Enterobacter cloacae
atgggaaagaagatgccttactggtggctctcgtgctgcctgatatctgtgcccgctatcgcggcaaaccctgcggcgatgattaataccggacaattaagcgaaacgcaggaactcccctctttaaatggccgcgtggcgcccgtagccagcaaagccgcccccggcacgctacagctgaatgaagcggttaaccgcgccgtgacctggcatccggccatcagtgaagccgtcggcaaactctatcagcagagcgaaaatgtggacgtcgccaaatcaaaatattatccgcaaattaacgccggcatggataacggctatagccacgacggcgacgataatggctttaccccctcgctggtgctttctctttcgcaaatgctgtacgacttcggcaaagtcgcaagccaggtgcgcgccgaaaacgcgggcgtcgcccagcagcaggccaacgtgctggtgagcatcgacaccatcgcccacgataccgccatcgccatggtgcaggtgcagacctggcagcagatggtcgagaccgccaaagaacagctggatgccctgtcctccatcggcaccctgacgaaacaacgtaatgatgaaggcgcaacgtcactctctgacgtggtgcagaccgacgcccgcatcgaaggggcgcgtgcgcagctgatgcagtatcaggcgagcctcgacagctcgcgcgccacgctgatgagcctgctgggctgggacagcctgaacgcggtcagcaatgactttccgcagagtctggcccgcagctgcgacatcgccgagccggacgatcgtctggtgccctcggtattagcggcctgggcgcaggccaacgtcgcgcaggctaatctcgactatgccaacgcgcagatgacccctaccgtttcgctggagccggaagttcgtcactacctgaacgaccgctacgcgggcaacgaaacgcgggaccgcacccagtactccgcgtgggtaaaagtgcagatgccgctctatcagggcggcggactcaccgcccggcgtaacgccgccggacacgcggtggaatccgcccagtccaccattcagcgcacccgtcttgaggtgcggcaaaagctgcttgaggcgcgcagccaggtgatgagcctgatgagcacgcttcagatccagggccgtcaggaagcgctcagcgcccgcacccgcgagctgtatcagcagcagtatctcgatctcggttcccgcccgctgctcgacgtgctcaacgccgagcaggaggtgtatcaggcgcgctttacccaacagcaaaccgccggacagctgcatcagcttcagttgaactgtctgtacaacaccgggcgcctgcgtcacgcgttcgatcttgaaaaccgcaccatccagaccgtggagatccagccatga

SEQ ID NO: 149867 - DNA, 2172 bp, Enterobacter cloacae
atgatcagggaaacttcctttgcactcaccctgtgtgccttgctggtgagtgtgtctcaggctaatgcctcattcgatatgaccaattgccactggggcgaggagacgtgtctgcttgcaggtgatccggtgcttacgccgtataatgattcgcgtgataacttgttgaggctgctcagcgaagcgaaatcatttgtcttgcccgtacaagctttgccttccgatataacacgttcgcgtgagttctattttgctattcaccctcagtggggggcagaacaatcctccccaacagcagcaaatgcgcaacctgagatccaaacgctcgaccaacaaatgatcgaattgaaaatcgatccccttcagtttacctcttcagagaaccccgaaaggctggggatatcagattatgaaggtgagaatcgtttcgtcagttatacgcttgatgctgtaagccagtttaacgcggccctgctggccgataccgcattgactccggatcagcgtcatatgcttgcccttatgcgcattaaactgttttataccaacgatatacaaaagctgtcagaagagcttaatagctttccggttggctcaaacgccagtttatttagtcgctatatcacgggtgtcgctcacttttatgatggtaattatgacgccgcaacgcaggacttcaccccccttctgaaggccgggcagccctggctggccgaaacagcgcaatatatgctgatgcgcacagcgttaaacaaaagcagccagaacagcgttggacagttcggtgaatttgatattgcgcggataaatcgtgaagacgcgcttctcgcccaaaaagaggcacagacctatctgcactcctggcctgaggggctttatgtcgattctgcacgtggcatgttgcgccgtattaactggtatctaaaggagtggcagcagcttgcagagttgtatgaagaagccttcatgcgaacgaacagtgcgcaggaattacgtgggctgataaccgagtatgataatgtcattggtgcgctgtttctggagcaacccgcgcgggaatcgttccccggtgcaccgttagtcagttatgttgaactgttgcgctccctgcgcacagataatgacgataagacagcgttagatcagacactactggatgccagcaaaccggtgttcgaggagagtgggaaactgtcgctatggcgcaatcttcagttaaatctttggcaactaacaggcaacgaaaccgccattcttcaggctgtggtgccagcgaaaacacttcctccacacgatattatcgcttttagtgaacaagtgctttatggcgaagcgttgatggggcaaaaacaatggcctcaggcacgtgatttttggctgaacttgttgaaaatcagccaggaccctgagcagcagcaatatctccaggcgaaactcgcggccacactcgtatatagtggcgatcttgctgcaatttttgccccggatagtgcggtaactaatctgcgttttcgatcgagggtattgaaaacgcaggcttcacttgatctgttacgtcagcaagcggtgcagggtccaaatagcgaagaacgcacgattgcgttgcatactttgttgataagagatttaacagagaaccgatttgctgactggttaaatgacaaaaaactgatcgacacgattacttcgccagtgattggtgatgcttttaatgatgttgatcttagcgtttttggatggaacggcgatgatgcagaggctggttatatatgccgtagcttagatgacaccgtcaccgtattaagtaaaaacgccggggatgctcacgccctcaattgcctcggtgagtttttccgcgatacacgggcgcgagtaaatctatggaaggacaatgctggtaatgatgctctggaagacgccattagtcttgagcatccccgtggacaatatgaccgccagcagtattaccagcagatcattacctcgtcgaaagctgaacctgaagacaaaagctacgcgctataccgggcaatcatgtgttatgccccgtctggcatgaacgattgtggtggcgagtcggtagataagctacagcgtaaaggctggttcacgctcttgaaaacacaatttccgggaagtccatgggcgcaagatttaaaatattactggtaa

SEQ ID NO: 149868 - DNA, 708 bp, Enterobacter cloacae
atgggcgcaagatttaaaatattactggtaattgtgctactgactggacagacgtatgcggaagaaaacgtcgaccctcgtcaacaccaggctttctggctatggtcgggtgtgaaggctagtaacgcgctgcaaaacgcacaaacagtttatcttcatcaaggtgaagttctggaacgttcaggtgaagcggtttttatgcggctcgggctacccgttagtcgtctgacgtttccgtccatctggcttacagtgcgctttaccacgcttaacgtgcctgaagatattcaggcacggatcgtacgcttaatgcagcgttgggatgtggcgggaaataaagtggtgggcctacaggtagattttgatgcgggaacgtatcatctggccgattacgcgttttttttgcgacagttacgtcaacagttgccgcaaaggttcgctctgggtgtgacgggactgcttgattgggcaaaaaatggggatgttgcgacactgaacgcgctcccgattgacgaactggtcgtgcagagctatcaaggccgccaaaccgtaaagaactatcaagactatcttcctgctcttatgcgtttgaatattccattcaaactcggtctggtgcaagcaggcaactgggatagtgagtcagaagctctactggaaaaatcactttggtatcgtggtactgtcgtgtttatgctcaacttatga

SEQ ID NO: 149869 - DNA, 678 bp, Enterobacter cloacae
atgaaaaaagttattcttgcgactgcgctgtctctttgtgttgcgtcagcgtttgctgctgataccgcagtgttgaaggtaaccggtaagctgacaaatgctgcatgtacgccagtattaagtaaaggtggcattgtagattatggctctatccatttaggcgatctttccccaactgctgtgaaccagctgggtcagaaaaatatcgacctgactatcaactgcaccgctgcaacgaaagtggcgtggaatatggttgacgatcgcgctgcttccaacgcaggtatcaccgttgaaaagggtctgtataatggcggggacattgtcagtacagataccgatcagacctatggcgtaggtacaacaacgggcggtgtgaagattggcaactactctatgtttgttgatctggataccgttgttgctgacggcaaaaatgtcgataccattttcctggaaaagggcgcgactgcctggggtaaaagccagggcgcaacccgtggtgctagctatcgtgacctgagcgttgcgacaactggcaccctggagccgctggcattcatcactgcaaccttcccactggttactgcgttggctattcaggataccaccaaactggctattactgacgatacccaacttgatggtcagctgactatcagcctgaaatatttataa

SEQ ID NO: 149870 - DNA, 672 bp, Enterobacter cloacae
atgaaaaaagttgtattggcttctatgctcgccatgtgtgtatcatctgcttttgccgcagacaccgccgtactgaaagttacgggcgttctgacaaatggcggttgcacccctgaaatcagcggcggcggcgtggtggattacggtacgatccacctctcaaacctgagcgccacggctattaaccagctgggccagaaagatttctctctttctattacctgccctgcgctgaccaaagcgggctttagcgtttctgacgatcgcagtggcactgcgccgaacattacggttcagaatggcgccggtaacggagctgatatcgttcagccgctcaatatgtttggtctgaacaaaactgaaggcgatgttaacattggtaactacaccattttcgtgaaaaacagtacgattactgcggatggtgctaccgtagcggcgatctttagttctgacaatggcacctcctggtctaataccggtgctctgatggataataacggtactcagattgtctctgttgctaccacaggtaacacttctccagttgcgtttaaaaacctggtcattccgatgggggtttccactgcgattcagagtaccagtacgctggctattactgatgataccaacatggatggtcaggcaacgtttaccatcaagtatctgtaa

SEQ ID NO: 149871 - DNA, 147 bp, Enterobacter cloacae
atggtggaagggctggtgacagaactaccgatacctaacaacaaccccataaaggccaacagcgagaccgggaacataaacgtctttcccaggctctggaaaaactcccacgctttcgatttaaacgacttttcctgtgtcatgtag

SEQ ID NO: 149872 - DNA, 597 bp, Enterobacter cloacae
atgggtgagttttctaaactagtaggggattatggtgaggatatagtctcacattttcttaatatatttggatgggagaaccatgcaacaaacaaatatgttgattgtcacactcgtaaacatgaaaaaaatacacatggcattgatgcattatttgtctataattcaccgttagaatcaaagactatagaaaatgtaatagtgtcatcaaagtattcttcaaatccttattctaaagtggcttcaacctttaaaagtcattttgaagatattgctacagctattgagtgttatgcaaaatcctcgctaaaaaaagaaatcaatcagcaggtgatttctgctggtcgatataatggttgtaaaaaagttgatacgggtgttcttttttatataaacaatgacagtaatccggataaacaagatattattagttctattaagacctcacaaattagcagtgatcttaaatatagaactatacatgttgtggataataaaagagcatcttttttatatgagagtattacttatataaagaataaatacgggtatgataaagttaattttttctaccctaaaccttaccattactggtaa

SEQ ID NO: 149873 - DNA, 1359 bp, Enterobacter cloacae
atggcgatttttcatctggattttaaaattgtgaaacgaagcgaaggcatgacttccgttgcgaaagcggcctaccatgcccgtacacgtattacagatgatcgcattggacagattttcgatttcagccacagaacagatctacatggtcatattatattggcacctgtttccgcaccttctcatattgttgaaagctcctcagcactatggaacgaagttgaaagagtggaacgccagaacaacggtcaaacagcccgttattttgatgtcgccattcctgtagaacttaacaatgatgataagaaaaaattggttgccgaatactgccagaaaaactttgtcgataaggggatgattgctgatatcgcatttcatgatttagacggtaagaatccccttgcgcatgttatgttaaccctgaaaactatcaccgctgctggcttcggtaaaaaagacaggagctggaatgataagaagatggttgttcagtggcgtgagtcgtgggccaccaagtcaaacaactaccttgaagccgcaggcagtgaagaacgtatcgatcatcgttctctcaggacacaatgtgctgatgcccttacccaagcagaagaatcattcagcgctgaagagaaagcattctggcttgccaaggcaacagaaaccaatcgtccagcaatgcagcgtgttcatcgtgccaagtggaatgataaggaatctcaggaacaacgagcagctgaacaagccctacgcaatcttcaaattgtagaggctaagaaggtttatacaacatttagtgagttaccattggagatcgtggttgatgtcagaagctttacgatatctgttcttccagaacccgaagaaattattattcctgacgactcgacagtagaagaacagcaaccgattgtggcaacaccagctacaagcaggagaccagcagtaaaatcttaccgtaaccctaataagatgagtaaggttggtatggcaggagaaggaacacccgttctggttgctcctgaatcgaataaatccactatattgaaaaccccatctcttcaaaacaccagagcgatgaaccgtgctcctatgaggagtaggaaacagaccaagccccgccagaatggtttgtttaaacgtttcacgctactcatcgtggatttcttgaaagagagatttgtatgggccaaaaggaagatcgggggttttgtaggtcgggtaagcgcagcgccacccgacatcacgcccgcacaaaaaacaaagcccggtttcccgggccttgaacgcaacttcacactcagtaatacgcttgtagcgtgcgctggcagagcgccgagcgcacacagtcatctttggtga

SEQ ID NO: 149874 - DNA, 720 bp, Enterobacter cloacae
atgaacattgatacttcagttaatttggattttagaactggcttggataatttgtcgtttaacaatattgtaacccaatttttatttttgattcgcgtatcgaatgagcttttaagagagcaactggagtggtatgaaacaggatattcaaagaagcaagccttatctcattcggtatttaaagatggcagggttagtgatgatactttattaaaatgggggaaaagatataaaaaagatttcccattatttgttgagggagtttgggatggtaaaggtgattatagtaatggtattagctacagaaagatgtattacaatgaaactgaccgagttagtgctgagttgaatttagtatctcaggatgaaaatattgatgtaagcgattttgtcgatttgctttcaaagttggcttgctatttcgattgttcatatataaatgtcgatagtaaaggataccgtttcttgggtaataatgttttccccgatagagtgagtgtcgggtggatgctctactctcctactattattttccctgagttaatccccgaagccgccaaggttgtaccgatcatggatggcaataaacaaaaaggaacaataatagtttcaactgaagaaatatttgatggtaacaacaaaaaccacataggcaaagctaatgatattgaaataaagcttctggatcttggattgttaccactgatgactgagctttaa

SEQ ID NO: 149875 - DNA, 603 bp, Enterobacter cloacae
atggtcatgatcccaccagtaataacagggggaatgggcggggccgcaacaggaagtatcggtgtggctggcggtgcgaccggggcaccaacctttcccggagcaggaggcagccatggcggctgggaagaggaggatatatcttatcctggttcaggtagtggggcccgccagggtaacggaggttttgactatcagggaaagcagtatgatccgatgctgaatgaaccgatggccgtcagcgcggagacgcacggtgatttctgggaagatgatatggattactccgaaacggtcagttatgagggcgtcgaaaccagagcaggagcacaggcgaagacggatgaaaagacctgtgagaactgcccgcctgagggcaaggtgatgccgatggtgagacgctgttcgcgctggagtaaggtaacaatcagctaccagacaagaatctgtggcacgttttataacccggaaaccaaacagatacaggagtttaaatactgcggtgtatcgtttgatggctggaaagataagctgtgtcagttctgggaggccaaggcgcgatatgaacagttttttagcatagatggaaagaaaaaaaggtga

SEQ ID NO: 149876 - DNA, 345 bp, Enterobacter cloacae
atgctgaaactgtctgaagagcagtgtgccggtgtggacaaaatggaagatgatgattttattcgcgataccgcacaaagactgaagaataaatttccggggattaacgaaccggatgacacgttccatgctcgcctgagaaatgcactggattatgccaatacccttccgctgaaagaaaagaatgtgaagcgagattttttgttcctggaagcgttctggcctggtttttatctgaaacccgaagtggataaatggctgagaacgccgaatggctattcagctgaccaacgggtggaagactatatgcatgtgatgataaacagggaaaggagaggactctga

SEQ ID NO: 149877 - DNA, 504 bp, Enterobacter cloacae
atgagcagtgtcagcttaatcctcgcaatgcagttcctgattcattcatcagatgtttcagtgtttgctttagttgatggcctgcaatatgagcgcttcaccggttctgaactgaaaataaagcaggacgtttgtttgcccttatttgatacctggccggattcgcgtatttcctttgccggatcgtggctaatcagaatgaatgaaacaatggaaatgagggagcaactggaagtcctggaaatcgcattacccggcatctcctggatagtgtcaggctccacgccggaggagctggttgcgcatttacagagatatatgaacgcagtgcttccggacggacgggctgctttactgcgttttcaggacccgcgggttcaggttcgtctggggacgatgctgaacagccagcagcaccgggaaatgacaggtttaatgcgtgaatggctgacaacggtggacgggaaagtctggtcatttaaacaaagggaatttatatgctga

SEQ ID NO: 149878 - DNA, 675 bp, Enterobacter cloacae
atggaatttattaaatatattaaaatattgggttgtgcattgtttgttgtgtcctgtggttcttcaccaaaaaagtatgaactagatggttctgatataccaggatactccaaaaatgaatattacggtttcattgaattttcaagaccaaaaggttttacctcctatacaataaataatattgatttatattataacgttccaggaacctataccaccgtaggtgcaaaagacttgacgtcaaatcttggggtggcaacattgctaccatttttagtcaggccaacagtgcaatctcacaaacagatggattcccttgttcaagagacaggggttagagaaacaaggacgattacttttaaaattcgtaagtttaacgatgataggcaactaaagaaaatagaccactatttcaataatgattatttcaatgtaaaaggtgatttatgggctgcaacaacattccctgaactgttttgggttaattgcggtaaaaaacatagaaacgataccattaaaattatcccttatgatgtccatttcgtagaacactacgttacggcaaaaaatgtaccggaaacgtttcgagatgaagtgctgaaaaatattttgtttattaagtttatagacttcgaagggtgtataaaagcaggggaagatggtcaggttttataa

SEQ ID NO: 149879 - DNA, 900 bp, Enterobacter cloacae
atggccagacgcaatcttaacgacttactctctttcgtcaccgtggcgcgtgagggcagctttacgcgcgctgccgcccagctcggcgtgacccagcccgcactgagccaggcgatttccggactggaagaacggatgcaaatccgcctgctgacaaggaccacgcgcagtgtgtcagtgacggctgccggggagcgcctgctgcagtctgtgggacatcgtattgatgagattgaagccgagctggacatgctgacggcactgcgtgataaacctgccgggaccgtccgtattacatgtggacctaatgttctgaagaccacactgctgccaaagctgacaccactgttacgcgaatatcctgatattcatattgagtttgatgccaaccacggcttccgggatatcgttgcggatcgttttgatgccggcgtgcggctcggagacactatcgacaaagatatgatagccgtacccattggcccgaaactgcgcatggcggctgtagcttcccctgagtatttctcccggtgcgccgcccctcagacgccacgcgatctgatgcaacactgctgtattaatgagcgcatggttcaatcggggaaaatttacgcctgggagtttgagcaggaaaacggtaaatttcacgttcgggttgaagggcaactgacgtttaacacatcggaacacgtcgttgacgcagctcttgccggactgggcattgcctttttacctgaagaggagttcggcacacatctgcaggaaggaaaactgatccgcgtgcttgaagaatggtgccgtccttttcccggctactatctttattatcccagccgtaaacagccttccccagcgttttcactcgttgtggatgcgttgcgtattaaccggaaaatttaa

SEQ ID NO: 149880 - DNA, 462 bp, Enterobacter cloacae
atgcaaaacgcttaccgcagaacatcactgctgctccttgccggcctgcttttcatcacgcagtccgctatggcgggtgacaacgaacggggagtggcgcaggagacgcttatgaaaattgagatcattgtggagggagaaaccgccaccgccaccctctttgatacgccgacaggccgggactttgcgtctttgcttcccctcagcctgacgctggaagactatgacgatattgagcgtataagcgacctgccgcgcaggctttccacggtgcaggcaccggacggcatgacgccggaagccggagatatcacttactacgcgccctggggcaacctggcgatttttgcccggggcagggcttacgcccgttcactgatcccgttagggaaagtggattccggactgccggtcctgcagcgccacggacctcttgcggtgcagatcagggtcgccaactga

SEQ ID NO: 149881 - DNA, 1218 bp, Enterobacter cloacae
atgagtaataagacagacgaaaacagaaaaaaaaacaccggaagcgggaaacagcctgcgcactggagtggtgtctttgccatgacgctgtgcgtcttcgccctgatcgcctccgaattcatgccggtcagcctgctgacaccgatggcgcagacccttcgtgtcaccgaaggcatggccggacagggcatcgctatttccggggcatttgcagtggtaaccagcctgtttatttccgtgctggcaggcacgcttaaccggaaaacgttgctgctcggcctgacctgcattatggcaatttccggtgctgttattgcgatggcacccaattacctgacctatatggcgggcagggccctgattggcattgtggtcggcgggttctggtcgatgtcggccgcgacggcaatgcgtctggtcccggtgcatcgtgttccgctggcgctggctattttcaacagcggcaatgctctggctaccgtcgtggctgcccctctgggcagctggctcggatcggttgttggctggcggggcgccttcttctgcctggtgccggtcgccatcatcgcgtttgtctggcaattactcagtctgccttccatgtcggtcacccgtcaggcggcggcttcccgcaacgttttcatgctgtttcgtcgccgggtggtcacgctgggcatgctgggtgtggggatcttctttatggggcaattcacgctctttacctacatcaggcctttccttgagacggtgacgcgggtggatgtcgcaacagtgaccctggtcctgctggttattggtgtcgcgggtttcatcggcactacgctgattggccgggtgttaaaacgcgggttctacccgaccctgatggccatcccggtactgatggccatcactgcgctggcactgattgccttcggcagtcaggtagccatcgtgacggcgctgcttgggctgtgggggctgatttccacagccgcaccggtgggatggtgggcatgggttccgcgtaccttccctcagaatgccgaagcgggcggcggactgatggtggcgatggtgcagctgtccattgctctcggttcgacggtgggcggcctgcttttcgaccatcacggctaccagagcaccttcctggccagcgccgcgatgctgattatcgcaaccgtactgatcttcctgacctcgcgggcagacacttctgccgcagaccattcataa

SEQ ID NO: 149882 - DNA, 1047 bp, Enterobacter cloacae
atgacagttaaagcttacggtgcccatgcgggcacactgccgctggagccgatggatatcacgcgtcgcgcccccggtgcccatgatgtgcagattaatatcgtgtactgcggagtctgccattcggatatccaccaggtacgcgctgaatgggctggaacgctctatccctgcgtaccgggacatgaaattgtcggtcgtgtcgtggccgttggcgatcacgtctccggtttttgtgcaggggacctggtgggggtcggctgcattgtcgacagctgccggcactgcagtgactgtgacgacggactggagaactactgcgaccatatgacagggacatacaatttcccgacgccggatgcgccgggccacacgctgggcggatattcgcagcagattgtggtgcatgagcgctatgtcctgcgcgtcactcacccagaagcgcaactagccgccgtggctccgctgctgtgcgcagggatcacaacgtactcaccgctgcgtcactggcaggcgggccccggcaaaaaggtcggcgtggtcggtatcggtggactggggcatatggggatcaagcttgcgcacgccatgggcgcgcatgtcgtggcctttaccacgtctgagtccaaacgtgacgccgccagagcgcttggtgcagatgaggtggtggtctcccgtcatgccagcgaaatggaagcccatgcaaagagcttcgattttatcctcaacaccgttgctgcgccgcataacctcgacgtgttcactgcgctgctgaaacgcgatggcacgatgaccctggtgggtgcgccggccacgccgcatggctcgccagaagtgttcagcctcatcatgaagcgcagatcgattgccgggtcgatgattggcggcattcctgaaacgcaggagatgctcgatttctgcgcccaacacggcattgtcgccgacattgagcttatccgcgccgaccagattaacgatgcctatgagcgcatgctcaggggcgatgtgcattaccggtttgtcattgataacgccaccctggcttaa

SEQ ID NO: 149883 - DNA, 1029 bp, Enterobacter cloacae
atgaaaaaatttacgttagcgctggggctgttgatcagtgcatttgcttcctctgcggcggatatgtcccgtggggccgataatttttataaaagcgataaggtgacgcagcaaaaagtcacctttaaaaaccagtatcagatggccgtggtcggcaacctgtttatcccgaaaaagatgaaccagaatacccgacacccggcgatcgtcgttggtcacccgatgggagccgttaaggaacagagttcgaatctctatgcgcagaagctggcggagcaggggtttgtcacgctggctatcgatctctctttctggggagaaagcgagggcaaaccggggcacctgatttcaccggaaatctacacagatgatttcagcgcggcggttgattatctaagcacacagccgtttgtcgatccggataacgtcggtgtgctgggtatctgcggcagcggaagttttgttatcagtgccgccaagattgacccgcgtatgaaagccattgccacggtcagcatgtatgacatggggagcgcgttccgtaatggccttaatcattcccagacgggagaacaacgtaaggcctttatccagtcagccactgagcaacggttagccgagtttaagggcggcgagacggcttatatccctggcaccgtgaacaaactggatgactccacaccggatattcagtgtgagttctttgatttctaccgcacagaacgcggcggctacaccccgcagggtcagaaagaagaactgacgacgaaaccgatgctgagcagtattggcaagtttatgaacttctatcctttcaacgatattgaaaccatctctccgcgcccgatgctgtttattaccggcgatcaggcacactcaaaagagttcagcgaggacgctttcaaacgcgccggtcagcctaaagaactgtatgtcgtaccgggcgcagggcatgtcgatctgtatgaccgtaccgacgtcatcccttttgacaagctgaaagactttttccgtaaaaatctgcaataa

SEQ ID NO: 149884 - DNA, 987 bp, Enterobacter cloacae
atgaactacaaacatctggggcgtaccggtctgcgggtgagccgcatcggtcttggtaccatgaatttcggtgagctgacggatgagtctgccagcttcaggatcatggatgaagccgtggatgcaggtatcaactttttcgataccgctgacgtctatggcgggccgcagtcaccggatatggcaaagggttacggaacatccgaagaaatcatcggtaactggctggcgcgtagtggtcagcgtgaccggatagtgctggccacgaaagtttaccagccgatggacacggggccgaacgacaaatacctgtctgcctaccatatccgccgggcctgtgaggccagcctgaaaaggctgaaaacggaccatatcgatctctatcagatgcaccatatcgaccggaacacgccctgggaggagatctggcaggcgatggaacagctgatccgtgagggtaaaatcagctacgtgggcagtagtaactttgctggctgggatattgccacggcacagtgcaaggctgacgcgcgcaacctgctggggctggcatcggaacagagcctgtacaatctgacccagcgcacagttgagctggaggtcattccggcgctgcgtcattacggcattggcctgatcccctggagcccggtcgggatggggatgctgggcggtgttctgaagaaaattgccggtggccgccgggcatcaccgcagttgcaggcacaaatcaaccgcctgcggccacaactggaggcctgggaaacactgtgtgatgagctgggggaaacaccatcagacgtcgcgctggcttggctactgcagaactcggtggttagcgccgtgctcagtggtccgcgtacagttgaacagctccgtcagaatctcaatgccctgacgctgtctctttcagacgatacgctcaaaaggctggataccatctggcctgggccaggcggagaggcacctgaagcttacgcgtggtaa

SEQ ID NO: 149885 - DNA, 426 bp, Enterobacter cloacae
atgcagacgccggagcaggctgaatttccggcggcgttcgattccctgacgccgctgtccggctggatggaagacaggttgagcgcacttcccgtagacgatgagtggcgtttcgccttcgatctcgccgtctgtgaagcggcgacgaatatcatccgctacgcgcttcatgaggataactcgcgcgtctttagcgtacagttcgacgtccgtggcgatgatgcgtgcgttatttttaccgacgcgggtgatgcgttcccgctggagcggcttgaggccgccaggcgagaccgtttcagcgaaatgtcgccgctactggagagcggcagggggctgatgctcattttgctgagcgtcgatcgtttctctgtggaacgaaaggcgggtgaaaatattgctacgcttgagaagaaaatcagcgtatga

SEQ ID NO: 149886 - DNA, 471 bp, Enterobacter cloacae
atgacagaaaaagaaattatgacttggattcataacgattcaccaaccattgaacagcagttgaggcgctggctggatgagattattgagaagggtcataactcatcggagtacactcatggcgtggttctgtatgacagcgatcttgcggttcgattaaggccatacaccaataaataccatggtttttgtctttcgatctgcgcggtgcagttgcctactgagattcagcgaaagggctggtttaaaagttttcttaaactttgttgtgagataaatccttggcacgatgtaattttagaagacgtagaaaatgaacatttattatctttctgcaaacgcaataattttcaagtattagatccattttatgatacaacttatgttgttaataaagaaactgtgatgaatttagccactacgcccctcggacgttataccgattacttaactatcagcaaatcagagtaa

SEQ ID NO: 149887 - DNA, 147 bp, Enterobacter cloacae
atgggcggcgtgtccgggctcgactataacgttttgccctgggtgatgcgtctgcacaacgtcgacgacgaggcaaccgcgctttcggacatccgggtgatggaaagtgctgcgctaaaaattatgcataaagagagggcggaatga

SEQ ID NO: 149888 - DNA, 273 bp, Enterobacter cloacae
gtggataaaacctccgcaaccgctgacagcaccgatgcggtcaccatttccctgaagtacacgctaaacggcgcaggtgtttccggcaaaaccgttgcctggaattcaaccggcggcacgctcagcactgccagttctcaaaccggctctgctggtggggcgacggtcaaacttacctctgatacggcaggtactttcacagtctctggtactgttgatggtattgctaaatcgagtgaggaaatcaccttcaccgcacctgctgcaggctaa

SEQ ID NO: 149889 - DNA, 228 bp, Enterobacter cloacae
atgaatcaagagttggataatgctatctacactgcgctaagaagtttcgagggttcctctggtgtcggttcatccccaacagcaaatgaaatcatcagagttgttaagccatattattctcagggtagcgagcaacagaagcgcgatatcctggcaaggctcgagaaactccgtaaagagcctggtgtgccgttcccaatgaaccttcagcagatgctcgacagttaa

SEQ ID NO: 149890 - DNA, 354 bp, Enterobacter cloacae
atgaagagcaacgagctgaccaagcttcaacatgatctcgcagaatttgcttctgaacgagactgggacaagtttcattctcccaaaaacttatcgatggctatgtctgtagaggccggagagttagttgaaatttttcagtggctaactgaggaagagagtcgatctttaactcaaaagcagcagttaagagctgaagaggagatagcggacgtgttcctctacttgctccgaattgcagataaactgaatgttgatctgattcagattgctaaaaataagattgcaattaatgcggagaagtacccagtagtagcatgttacagcagcgctgcgaaatattcagacctgtag

SEQ ID NO: 149891 - DNA, 390 bp, Enterobacter cloacae
atgatttcactcaccgggtcgcaactttgtcgacgtgaaagacgtttagaccataagttttttgaaaaaatcgagagattgctagcagaaataatggaagatcactccactttcttcgaattcattgacgaaaaaggtgggaaaaagatctcgaggaatttttcagtaaaaaatgaaaaattcaaaattagcataccacttgttctgcttatctccctcattaaacaactaatagttttcaaacttgcaatcgaattcaagcttattaaacttaatatgcttgaagtaaaagctcgctctgaaaaaaacaaatatcaacacacaaacctagtatttattagcacaacttcaagtctctcatatccaaaggaaagcttatgtctaatgtaa

SEQ ID NO: 149892 - DNA, 276 bp, Enterobacter cloacae
atgtctaatgtaaaaaagcctgatagctttctcttgagattcaaagaagaagatggagttaatggtattagctctgaaacctttgaaaatctaatgaatgctaccggcatgagtaaaactgacctcgttcattttgctttagtaaatctggttgagaaatttatcccagcttatgaacaagatgacggacctttaacagaggctcaacaccggatgctacatgaaatctcccaagttcagcaggtaccggatgagagctttgatttgctattctag

SEQ ID NO: 149893 - DNA, 1077 bp, Enterobacter cloacae
atgcgcggtgttaaaatatttaatagagcaattaacgtcattgcaagtgaatacttcaaaaaacgaggtaattcccacgagttacatcagttttcgtcccttttcaatcctaattatctttctaatcttgcggatctttttttaaagatagataaaaaaaatacagatggtctttattcgcattattatgaaattgatttggggtggattgataaaaaaccattagttgagtattctcaagcatttggtctaaaaaaagtagaagtgggcgatgctctattagtatacaataatcatcttttggatgatactggtaagtatataaaaacaattggtgagcgggctgtaattattcaagctaaagtgacgagaaacaagaaaaagttgccgagtgttacagtaacctatgatgattcttcaaaaaaagaatatgcactttatagtaactggccatttttttgtctaaaaatgaagaatagatatccaatatattttaaccttcctcatccacttataaaaaatctcccatccccctatgcattttatcttgcagccagaaaatcatattctaaggatcgacaatggcggagtcactggatgggagcaccttcacagcgctcgaatatgtgtaacatttcagcaggggaaatattgcttgctttgaaggctggtacgcccattggtaactatcatgttggggcggattttaaggcaaatccggagtggaaaagactgattagaacaattctaatgcaggtttcactcaatcatacaaataaaggttggtgtggagtaataatgccaaccagaataaaagggagaaataagctaaatagtaaatcaagatcaatatctcttacctgcttgatgcattatagtttgtatgaatcctttaatttgaaaggagcaacatctttgcttcagcaatctccgaataattcatttaaagaatgggtgggggttatcaatgctcatactgaaaggtctgatagtgaaattcctgagaggtttcctgttttaattatttctagatttagttcggaatccgcaacgctcttagataatgaagtgggttga

SEQ ID NO: 149894 - DNA, 3543 bp, Enterobacter cloacae
atggcaaatacaaaaaatctgagcaatcctttttctacaggcggtggcggtgttcattttgaggcacatgttcaggcgtcgtttgttgcactgatgctcacttgcggcaatgccccatgtcttccttgctggcctattgtagaaatcaaacttcagggaaaaattgaaggttttgataccgacgatctcattgtcgttgttgagaatcccaccagtaaagaaaagcagaaacttcttgggcaaatcaagcattctatttcaattacgcaaggtagcgcgatatttggggaggtgatacaggccgcctggaatgatttcaataatcctgaggtgttcaacaggaagaatgatgtcattgcgctgatcaccggtcctctaagttcgaccgatacccacaatgtgaaatggctgcttagtcaagctaggcataccaaaaatgtggatgaatttcttaggaatgtgcggcaagctaagtttagcccagccaaaagcaatgaaaaactggaggtcttccagtatcacctgaaggtagcaaatgacggtaccgatctaacagatgatgaactgtatgaatttttgaaccatttccacttgctcggctacgatctcggtaatgaattcggtgttgttctgtctctgctgcattcccacatcgcgcaatttcatcagcaatatcctcaatgggtctggtcgcggatagtcgatattgtgcaaacgtggaatcaggatgcaggaactatcacacccagcaagatcccagacgatcttttagatgtgttcaaacaaagagttgttgctacgattcctgaagaattaagggtggtaccgcaggcggtaaaaaccgactgggcccaccatcctgatgcttcctgtttagccatcgcagtattagtcgggagatggaatgaaaaaaatgaatatgatttggaagtgctgacccaattacttggtattagttatgacgaatggttaaggaaggcgcgagaaatattacatgcaccagacagccctttgactgtcagaaatggcgtctggaaagtagctaatcgaattgaactgtggagtattctggggtcccgtatacttgaccagaatctcgatttgttcaagtctctcacaatatcagtacttaaagagccagaccctgtttttgaattacccgctgaagagcgttacgctgcgaacatttatggaaaggtactccatttttcacctatgttgcgacaaggtatagccgagggtatggctatcctggggagccaaccagaggcttgcattaactgttctcaaggaaaggctgaagcttgcagtaatgtggcaatttgtgaaattttaaatgaagcggactgggttttatggggtagcctgaacggcttattacccacgctcgctgaagctgctcccgcaaaatttcttgatgcagttgagaaggcaatgcaccagacaccttgtgcattcgatgagctattctcccaagagggaaatggcattactggtgggaattatctaactggactgctatgggccctggaagggttagcctgggatgaacaacatttggtcagggtctgtgctgtgcttgctgaactctccagttacgacccgggggggaagtggtctaaccggccatccaattcgctttccactatattattaccgtggttgccgcgaacactcgcatcaattgaaaagcgacaggttgctgtaaaagtcatttttaaagaatggcctgatattgcctggaatttgcttgttcggcttttacctggccaacaacaaacctcttttggaacacacaaaccttcttggcgtcgaaccattcccgatgactgggaaaacgaagtatcgaatcaggagtactggcagcagacattgttttatgccgagcttgccgtagcgagcgccggagaagatatcggtcgcctgatcgtattaattgaccattttgatcatctgccagcccctgcttccgagcaacttcttgaggttctctcctctaaacctattatcgggctgcatgaagaaaaacgtgttttgatatgggagcatctcaatcagttatcaaataaacacaggcgatactctgatgccaagtgggcgttgcctgataatctgatcaacaacatcgaaaatgttgccgagcaattggctcctaccaatccatttaacttataccagcatcttttctcaaaccgggattttgatctctacgatgaaaatggtgactgggaagaacagcaaaagaaaatcgaagcgaggcgcgaaaccgcaatttcggaaatttttcggcttaatggggctgagggtgttatgcgatttgctgacaacgtttctgcacccaaccaggtcggcagtgtacttggaacgttcagcaatgatgtgttcgaaactatcctgttacctcatttcttggacacaacagaaaataagcacaaggcattggtaagtgcctttatctggaagcgtttttggctcaaaggctgggagtggttcgacaatctaagcaaatctgactggactcctaaacaggtaggccagttccttgcctatttacctttctccggagagacatggggacgagcttctcaataccttcaagctttcgaatgcgaatactggacccgtaccgatgccaatgcttatcagtctgaaggagagctggctgttgccattgataaactgattgaacatggcagaccccatgcggcaatccactgtctgtacagaatgcatcagaacaagcagcccatcgatgcaaatcagtgtgttcgtgcgttgctggcggccctttcaactgatgaaacaagctccaatatggacgcataccacataacgactttaatcaaatatcttcagactaaatctgatgtagatcaggatgatctctttagcgttgagtgggcatatattcctctactggatggtcatagaggtactgtgcccaagttactggaaaacaggatggctactgatcccgagtttttctgcgagataattcgacttgttttccgttcagaaaaagaggattcttcagccagtgaacccactgagcaatcgaaagcaattgcaagaaatgcatggcggctcttggataaatgggagactccaccgggaagccaacaaaatggttcatttagcgcagataactttactaaatggcttgagaaggttaaggaatatgcaacagaatcaggtcatttagagattgcactaagcaaaatcggcgaagttttaattactgctccctccgattcagatggcttgtggataaaccgagcaatcgcttctgcactgaatgaccgggatgctgaaagcatgcgtgaaggctatagacgaggaacctacaattctcgaggtgcacactgggtcgatccatctgggaagcctgagagagaactggcggatcagttccggacaaaagcagacgaaatagaaaacgcaggttatcagcgattcgccgttaccttaagagttttagcggatggttatgaccaggaagctgagcgaataataagtgatcaaaaaaatcgtgaagattattaa

SEQ ID NO: 149895 - DNA, 396 bp, Enterobacter cloacae
gtgaaaatcgcgtttttctccctgcgcggcgctcatctgatcgccatgttcgccagaacgccagtcgccaaggaattccgtaaatgggtattagacatcatcgataaagaagttctggagcctgtccatcaagtgagtcaggttgcggctcgtcaaaattatgctgtgatcaccaacttcgaaaacggtctgcctgtagcttgccaccctcttatgcctggcgaagtgatcatgaatccagattcatgccttgagcatgtgatccgttcaggctatgtggtgatgccatgcgacgaagcagagaaatttactttgggccagcttcaccatagcacggcgtgcacgagatcggtgggtgcaaccctaagcttcttagggcgccccgctattgcatag

SEQ ID NO: 149896 - DNA, 897 bp, Enterobacter cloacae
atgatttatgattgtttcttatattatgatgaagatatgcttctggaaattagattgaatacattagcagatgttgttgatcgctttgtcatcgtcgaatctactcataccttcactggtataaaaagagatttaaattttaatataaataagtttagtaatttcaaagacaaaatcatctatgttgtttacgacaaagaaccaattttgaaaccttctgaggatttcaatcagaaccgagaaactgattcatggcagccagaagtgtttgtggttgatgcatgggcaaatgaggcggcgcaaagaaatgccattatgcaaggtctaaccaatgccaaagaagatgacttaatttttatttctgatgttgatgaaatcttctcacctgaggttatacagtcagtaaaccccaacaaactttgtacaaccatttatcagaatttttataactatcaattcaacttgcaggttttcaacactgatggctatcctcgtaaatgcaaattgccacgggctacaaaatataaaaacctcgttaacttctttggaggcgaaccggaatcatttagaaatatcaaacgcacaagaagagtaaagaagtggtcatggtttaaatggaactggtttaaactcaataataaaacaattgataatggcggatggcacttctcttgggttatgactcctgagcgcatttcagaaaaaatgtcaactatttcgcatacggaatatgatctccctgaatttaataacccagagcatattatgaaggtaattaaaaatgctgaggatatatggggaagagacaggaagttaatccgacaagagctgtcgaatgacaacttcccaagttacattgttaacaacaaagaaaaattcagtgattttattatataa

SEQ ID NO: 149897 - DNA, 312 bp, Enterobacter cloacae
atgaaaagttttttagatgtgaaaataaccagcgaagtgatgataaatgaaggtccttactcagggaagaaggttattatattctctgacaaaaatggtaacgattggtatgaggaaagaaaagagtgggaagctgtggtaatggttgatcctaagacaaatatcgtttgcgctgtagaaaaagatgttgaatgcttaaccattgcacctggtatgaatctttttgaaattaaagagacaaccattcctgatgatatggtgcttggtaactataaatttattgatggggttttcactacgatcacaaaataa

SEQ ID NO: 149898 - DNA, 1290 bp, Enterobacter cloacae
atgcatcgaattgatacacccacggctcaggccgataaatttggtcagggcaaaaatggttttacaaatggtgacccggccaccggccgccgcgctacggacctcaacagtgacatgtgggatgccgtacaggaggagatttgtaccgctatcgagaaatcaggtgcggtgctgaacaaagggcaacacgatcaattatatcaggccatcgtaaagctcatcactgaccgtgtgccggatgctcttttacgcagccagaatcttgctgatgtggttgataaagcgctggcacgcacgaatctggagttaaaatctgctgcgactgctgacgttcaaaaatctcgcgacgacgtaacgccggggtgtgtactgcttaacggtggagcgctggcgctgcgaacggtagctgccaaatctggtacagccatcgctgatgccagtgccctgccagctaactctgtgagcttctgctatgcggatgcagcatattcacctggctatgaagctactattcttgatgttggagggcggactggggattacagggtgcaatacgccgcgtcttatgctgacggtgggaagcgtctcaaattccgtaccttaaatgccgacaacggtaattggggcggatggcaggaggtttatcataccggcaataaaccgaacgcatcagatgttggcgcagtttctgcaaatggagggaattataacggtacgttcagattgggaagagttgaaacgttaccatcagaatcgaacatgtcagcactatataatgtgcaagcaggtgctggtggtattgtgtcaggtgttgaattcaactggtatggtcaaaaatttactgtcggtattacccgtgacgctggaactggtacaaacggtttagtattccagcacaatggattcactcgattaaggattgataaagatggaaatttaatatctgccggagcggtatcttcaggtggggcaattgttgctggagcagggctatacgatacaccaggggtaagagcttactcttctaacaatccaccgccacagcaggatttaagcccttatgcaacaactgtatgggttaacggaaatttcatctcgtcaggccgcaggggggggcaagcatatcaggccggatcaggttcagggcaaggtatggcatatgaagcacccgcaggatgtttcctgactggtataaatacattagtgaatgatgggcgaggtatgggtgtctattatcgagcattgcaagtatatataccatctaggggatatgttcaaattggagattaa

SEQ ID NO: 149899 - DNA, 186 bp, Enterobacter cloacae
atgaacaaaaggacgttactgagtgttctcgttgccggcgcatgcgtagcaccgtttatggcgcaggctgcctcgctgcaagcgaccaccagtgaaccatacaccatgaacgccagcgatctggcgaagaaagagaaagagctgaccagcttcccgctgatggatgccgtaaaggaaaccatttag

SEQ ID NO: 149900 - DNA, 1059 bp, Enterobacter cloacae
atggcatttgagaaaagacacactatggtcctgccactaacccttgatgctgaaaaactttatgaaaacgcggtgctttctattcagctgggcatagaagattttgaactttcccaaaaagcagttgttgagggaggtaaccctgcacgttctttatcttctgtacgcaatctcttcgccggggtaatgttgcttttcaagttcaaacttgccagctctgttaaaaaacctgaagacgcctatcagcttatccatgttccctcaaaagatattctaccgaacccagatggaatgggaggtatgacatgggagccagatggacggttccataaaaataaaacaatcgatgtccaccacataaaggctcgctttcgtacatttaacattcatgtagattgggttgccgtagatgaactgcatcactgtcgcaatcatttagagcatcttcatcccagaaacacgtttggcgaactagctgattttgtttccaatttattccctgtcctggccgactttatcgaaaaagagttacatcgatttccacacgatgtattaggttctgcttgggacacaatgttagagcatagaactttctatcttaagcaattggctgaatgcgagcaaagttggctggaagcaggagtaccagatggaatggctcaatttgttcaagattgtacatgtgctcaatgcggttccaagttgctgaaagcttctgtacttagtcttgaagatggtttaactgttgaaaacgatgaagatcagtttgaatacctttgtgtttcatgtgggtttatcgattattttgctccacgtttaattgattcattcgagactgcttttttttattggccgcctgacggtgaagaaccgacttacgaacactgctatagctgcgatcaccatacatttgttataagagaacaaaaatgccgttggtgtaatcaagaacttgactatttacagtgcaaactttgcaacatctatctttatcaggatgatcagattaatgatggatattgcggtgactgtaattacagaatgagcaaagatgattaa

SEQ ID NO: 149901 - DNA, 1428 bp, Enterobacter cloacae
atgatagcgaattttttagaacgaatagaatcgctgggttttagcgtaactgcaaaagattgcggggatattcatataagattagagtgttgccctcaatggttaattgttcttctagatgctaattatgataaatatattccatatttttattttcgccagaggcgagttgaagaagttacagatctgcatgagattatccctagtgttcttgcagcaataactaaatcctatgggaatagttcatttcgttttctccaagaggaaaatggatttagtggaatagaggacgagttgtatgccatgtattggtttcctgctcagccactaaatgagcaaattaggaaaaacaaagatgaagactttgagtgcttgttttccatattaatggatctttacatgtttcataaatatcaaggtgatatcttaggtgtctgcgccatcgagtatgaagactatttttgggactcgccagaactcaatgcttgggtaggtaatatacactcttttattggtaagggggagtcttacatagctaatgggcgagtcaatcctaactggttttatttcagaagtataacgtctggattttcgatagtttctagctcacacattgctagaatactaaaaaaacatgcatctgctattcaagaagataatttaattcatggggtgacggcaaaggttgaaatatataaaaacattcaaacctcaatacctcacgataaagaagagtttgtaaaacagttgttaactaaactaggcgatgtaactggtttaaaggtcattagtcaagaaaatcaacttgtttttattagtgaccatcatattatatttacctactgtaactctggtgttaactctgtttttttagagaagaaacgtatacttcatcgacaaggtaaagaaaatttatttttattttctgaccgtaagtttagatggaatattaaagaccgtcaatcgagtgcagaatttgaggacttaatattagagttattagaccgagaaccatgggtcttctctgtcagaaaggttgctccgacaaatcaaggtgataatggtagggatttgatttgtgagtacaatatgtcttatgatgaacgtggaataacaagaggtgatgagtcatttaaaataggaaaaatgattgttcagtgtaaaaccaatttaaattcatctaaaaaaacatcagttggtaaatcagatgttgatatggtaaatacaattttcgattatcgtcctaatggatatatgttagtagtaaatactcaggctactcgtgatttaaccgagatgttggagaggcaaaaagatagaaatgaacaggataaaatcctctggtggaattcaaatgaagttgaggataggttacgtaaacatcctgacatacaggcgagatatagaaatatcgttgactatgaatga

SEQ ID NO: 149902 - DNA, 702 bp, Enterobacter cloacae
atgtaccattctgaagagatcatccgcgagtttcagaaccaaaagatactggcaatgaagctagagcgggcggtacgcgccgtaggtgacgaggtaaagagccatctgaataatatcggtgccggtgctcaacgcctgctgtactacacctcatgcttttccgatgaatattacgatgtatgcaccagacaaaatcttgaagacgctcgctttagtaaggggattttccatcttgtttcccgctggagcatcgtgttcgacatgattaacacgtacatcgaggatctggttaagaattattctccggctgaattagcagcgatacgggatgctctaatgcgggccaacgtctacttatccaccagcacgctaacctcatattcattctctaccgccgttgcgaccacggtttgcctgtatgtcacccttccaccttcagggatcaaggccgtttcagggttaacgggagcagcgattggcgggctggggttgtacggtattgtgcaaaaggctgctgacagcgctcaccgcctacaggtgatgcatcccacctactatcaggcgctttacctgcgagagttggagatgatgtatttcctcgtggaacctgcgtttattcgctcgggcgtgctaacccaacagtggaccgacagcccttacagcgcagctgacaagatactgaagctaatgggtagacactga

SEQ ID NO: 149903 - DNA, 603 bp, Enterobacter cloacae
atgctaaagattttgataaatgattcggacctcatgtttcgaagaggtatgaagtactttctaagcgattttttctgtaaacggtttgatcgtcacgttgaatttaccaccgactatacatcggataatattgctaccgcggatgtgattattctttcgctttacaagggtgaacgttacatctgtctgccggaactccgcgcgcggcaaaagggtataataattggtttagtagatgaggaagatgattccagaatttcgccatcctgctttgccgatatagtctatatcctgcggcgcgaaccgctgcgtgaaatcacgcgaaaacttaatgttgcctggcaaacatggatagagattcaggaatttcaaggatataaatcatgcctcggatgtaaacatgtttcgttatctctcacccagcttgagataattaccagtttgaatgagggatattcgtttcaggaggtcgcgacgaaaatgaatatcacctataaaacagttacagttcataaatatttgattatgcgtaaatttagcttgagaaatgattatgacctgtttcgcttttttggcaggctgagccaaaaaagcgcaatctaa

SEQ ID NO: 149904 - DNA, 954 bp, Enterobacter cloacae
atgaaaaagattacattttatattaaatcaataatgatcatattttttatttgcatgtcaaataatgtgtttgcggcctgtggttggggggatagtggttaccccggaatgaatgctgtatttaacttcggtgatgttattgttcagcgtgatcagccaattggtactgttttgaaatctgtaagtgttacctatcctggagggacggggcctggttgtgatactaactatacgcgagtaggtagaatggtttcctttcaaacgagcagttcactccctaatgttttccaaacaaatataaatggtattggaattagggttagcaggaatgggatatattttaatttttcatcagctcaaactgcgaatgtttattatgctaataacataccagttattgcagaattgataaaactatcttccggggcatcaggggcagggacgttaacctcaggaacgttaaccaatatctatatagctgagcagccaaatttatcagttaccacctcaattggctcaagtaatataattccggtggcatgtacagtttcttctgtaaatttgacattcccaatcggtgatattttagcgtcaaaattcgggagcgttataggtactgttccgactggaggacagaacactcaaaatttaggtcttaactgcgatgccggagcaaatataaacgccacacttaagggaacacaaaaccctgacgttggtactaccagcgtattagctttgactgggcagggaaacactgatgtggcaaaaggtgtcggtgtacagttgttatataatggcacgccgttagtattaaaccaacgtattgtgctgaaacaatcgactggcgggcaggaaactttcccaattaccgcccgctattatcaaaccaaaactgccgttaccaccggtaaggcaaatgcttcagccacgttagatctcacttatcagtga

SEQ ID NO: 149905 - DNA, 423 bp, Enterobacter cloacae
atgagttatatctattctcctgtaaatggggctttttataatgatgatctggaggctgattatcgtgctgccgaaacgtggccggataattatgtcagcgtgcttgatgaagactatatgtcgctaatggaggggcagtcagatgggaaaattattatttcagatgaaaaaggttatcccgttttagcggaacctcccgcaccaacctatgaagagcgcgtgagccaggcaacgatgcgaaaaaatgccctcatgaaaacggcaaatgacattatcactccgcttgaagatgcagccgaactcggtattgctaccgacgaagaggccgcctcgctactgggctggaagcgataccgggtcatgcttaaccgggtggatgtgagcaccgccccggacattcaatggcccgaacgcccagcctga

SEQ ID NO: 149906 - DNA, 1155 bp, Enterobacter cloacae
atgatcaccgaaatgcatatccgggcgggcgggaaaattgcccctgattttatgcttaagcttgacgatcgtgatatcacgcagactttcagccatcgtcttatcagtttgaccatgaccgacaaacgtggactggaagccgatcagctggatatccaactggatgattctgacggtctattagacttgcctgcccggggagcgacgctctccttatggttgggatgggagggaaccccgctcaagaagaaagggagcttcacgatcgatacgattgaattccggggtgcgccggatatgttggccattcggggatgcagcgcagattttcgaggaagactcaatgtgcggcgcgaacagtcgtggcatgacacgacgatcggcgcgatagtgaataccattgctcagcgtaaccagttgagcgccagcgtcgcggcgggactttcatctattgccatctctcatattgatcagtctcaggagacggacgcggcgtttcttacccgcctggccgaacgtaatggggcatttgtttcaatcaaagccggcaaggttatttttatgaaagcgggccaggccgtgacggccagcggtacaccgattcccttgatggtgattgaacgtggggatggcgatcggcaccttttttccgttgctgatcgtgaaagttattccggtgtgacggccaaatggctgcaaacgcgcgatccgaaacaacaaaatccccaattgagtattaatcgtctgcctgaggggcaggtgaaagaggtatcaacgcacccggatgccgctgcgccgatagcaggagcaggtggtaacgagcaacagccgcaagatttgctggtgggatcggcggagaacgtgtttgagctcaccacggtgtatgcctctgaagagcaggcactcagggctgcggaggccaggtggcgcgcgcttcagcgtgggaccgtgaatttttccatccaactggcattgggacgagccgatctgttcccggaaacgccggtgcgggtaagcggctttaaacgcgtcatcgacgagcaagcgtggatcatcagcgaggtgattcattccctcagcgaaaagggatttaccacgcagcttaagcttgagctaaacgtcaccgacgaaaatttttctgtcgatagtgagtaa

SEQ ID NO: 149907 - DNA, 165 bp, Enterobacter cloacae
atgaggttcaaccaaaattcactaactgtaaacagtgggaaaggtgaactaggcaagattgtcattggtgagaattttttttggggagtgaaaaacagcatttttggcaacgaagaaaaaacagaaattattcacgcgtatgctcaagagcaagaggttgcgtaa

SEQ ID NO: 149908 - DNA, 573 bp, Enterobacter cloacae
atggataaacaaaccagatcaaaccatttgcgtacatgcttgcgccacgaagtaatgatgagttcaaagaagttttcgtggttcatggtgctgcataaagctatcaaatgccccaatcgccgtttccacttctggtggcgtattgcgtcgtactggcatcattcagacagtaaatttctgaaaaaacgagcagcaaagataaacagaaacctcatgttcaaatatgggactgagattcagttgggggcacacattggacccggcatggtgatttcccatcatcaaggaattgtaataaatggttcagctgtaataggtcattctctccggataaggcaaaataccacgattggcattaccggtgcgaatgttaataaagagccgatattcatccatattggcaataatgtaagtattggtgcgaattcctgtatcatcgcagataatattcgcattggtgataatgttgttattggcgctatgtcatttgtgaacaaagacatccctggcaataccactgtctactgcaaaaagactttgcatgttatatcgaacgaattgcactccgaatga

SEQ ID NO: 149909 - DNA, 474 bp, Enterobacter cloacae
atgaagcagtacatcgacgagctaacggaagaaattataaaatcatatgctcaaccaccattcgcaccagcagagatcgccacatttgacgaaagcacgcagcaggaagtattaaatctgaccatgcgattagccacctgccccgtcaagctaatattcaggatagcgacagtcggaagcctcagccgcaatggcggtattattcaaaaagtatcaggaaatagcactgccggtagcttacgtgttgcgctagttggcgataaggttgtgtatgctgatggtaataaagccactactatctcagatgctggcaaggctcgcgatatgcagggagcatctgcggcacttgttgggaatatgcttgataatggcgacgaaataatttcaaccccacagtcaagtaacaaattcgtgttccgtgaaggtgacacgctcccgaacggatttctgacaatgccggggagtaaacactga

SEQ ID NO: 149910 - DNA, 279 bp, Enterobacter cloacae
atgctgttgttcgtcttcaaagataaagctatgacgttcaagtccttctactacttcctcaaaagacaatctgatcatttatcttccccgttgcagcctcgcatccatgcacgacagaagatccagccgatgacgagccatagcactgacagcgccactatttctaaaaagattttcattttgttttgttgtgtgattattgctctggtaacgtttctgggcggtattattactggtgagatcgggtggggcaagtcactaattttaatcgggtattag

SEQ ID NO: 149911 - DNA, 1956 bp, Enterobacter cloacae
ttgataaaaattattccctctgttgattctgatttaactgaggagcatatttcagaaattgagtcaattttaagaaaggggctgatttatagttctattccttatgtttatagtgagtataaacaatttgaagaagcacttgtggtaaacgttagaaacagtttgctgaatggagatgagtggtcgttagattttggggtgcgtattttttatgaattaacctcaagcgaaaactatatctatacattaaaaaatatagatttatcaataacatcttcaaatgctaaggacattataaagacatcattgttagcgaagttttttgaaaaaatgatctctgagtctattaatcaatatgaccttgagaaagcagctaatattatgcggtcgttaatcgatctcgcaaggtatatttatagtaaaaataactttttcgatttctacaaaagaatttttagatcttttgaccaccgggtgaggtatcgcgccgaagagtcaaattatgtctttttagatttatatacatccactgttttgcgaaacttagtttataacaattatgcggcattcaaagttgatactgagtttgtgaccaaaaggctgcaatatttagatcttcgtaacgagacagatcatgactcactgaatgaaatgcagcgtaaaatgttacgctgcttatttgaagtgataactttgttgattatgcggatagaacatgtggagaaaaagggaagtgaatatgaagaggagcttaatgatttaatttcattattgaaatcttgggttaatgctaaatttttgcatgaattatattataaaaaagaactatatgatgtgttattttctatacctcaagagttttctgtatttgatgcggaaactaagattcgagaaattccggatggagaggcgacgtggcgttcggtttcgaacgatacttacaagatgatcgcatttactcttacacaaagccccttcaacaataatcaattcaaccttttatttgttagagatgcgtttcaattcaaagatgcaacttctatattaacgcatcaattaagctctattgtggcgtacatgaatggagaatcgttttctaacttatataaacttattactaaaaatgatgattcaaatgaaaataataaaaatcaagttgtggcgaaattggaatcaattatttcagcattaaatgccttagtgctgcgtaacgtaattgaagcagagttagagccttcattagttatgaaatacagtaacgaattaaaactttccgttgagaaactctttgaattaatcttgcctttagatgcagtccctttggaggttgatgtaaatggaattgaaagatacctcttaatcaataaacgggaggtaattccctcaatagatggggtttcttatgagatgaacattcacaatcatagccagtggttgatatatgaatggattcgggatgtattgaataatattgatgtaaatgttgcaagtgttattaatgttagtgattctcaggacttgataacggaaaaattaatcacgattgaatataaggttgaaaatagggttaatacatttaggcattctagaggtttaaagatcactgataaagaagggcatttgaatttaaatggctctggattgtattatttggatttgttaaataattttgagttagagaaaacaaaagaaatactatctgtaaatattgaaaggatttgtgatggcaacattgggttcattaaggaacgatatgattttgaaaatgacaatccttatttatattcaattttaaatgccacatttaacatcgttgcgaaaccaaatcatacttgtaacctctacttcttatcagaggagacatgtcaattaatcaatgaaaggcaggaaagggagatggaacagttagttagagtgaacagaacggataatactgataacagcaatgtgtcttaa

SEQ ID NO: 149912 - DNA, 243 bp, Enterobacter cloacae
atggcaatgcgctgtcctcgctgccgtgcagtagcaaaaaccagaaccagcgttgagctgagtttgcttgtacggcgcagctatcaccagtgtcaaaatatgttgtgcgggtactgtttcaccagcaagacggaaataggcggatcactaaaccagactcaacccgcccccgccgctctggtgccacaagaggctttcccacgaagtcaccacggcgacgatcagttatcgctgaatttatga

SEQ ID NO: 149913 - DNA, 765 bp, Enterobacter cloacae
gtgaaatcattgattactggctggatagcgctttgtttaatgtttatggttcaggggtgcaagcaaaatatggatttaaaaccagacaactacttcagcggacagcagctcaccttagcgcgtgccattgaagccggtgaagtgaatgaggtaactcagttagcttcgcaaacggatcttaatacacccggtaaagaggacatgacgctgctgttttgggcggtgatgaactcaattaacgataagaaaacacccgagcagttaaaaattattaccgcgctggtcaaagcgggggcagatccgctgcagccaaggcctaagggagagagcagtccggccgaatatgtgctgaaagcggacagtggagtctggataaaggcgatgctggagggcggattatcgccggatgccagggataaaacgtttggagagcctattctcttcgaaaccctcgaagcaaaaaacaccgataccctgcaggcgatgcttgatgatggcgcggatatcaatattaccaattcactgggtaatacgttgctgatcgctgcgctcgattttcactcttacgatcatgtcatgcttctgctggagcgtggtgccaacgcagagatcaaggcggataatggctggacaatggctaatcagctgcagcggtatctgaaccgggcgaaagagggcagcgacgaatatcaaaaactcactgaaattaaagacgcgcttattcagcatggcggtaaatggcctcctgcgccggtgaataagtga

SEQ ID NO: 149914 - DNA, 135 bp, Enterobacter cloacae
atgagcttcctgatcttctccggtgcgtttgtcacgcgttatctgaaaaccaaaaagaaactggcaaagctgggcaacgggctgatagggctgctgtttgttgggtttgcggcgcggttagcgtccctgcattga

SEQ ID NO: 149915 - DNA, 186 bp, Enterobacter cloacae
atgaaacatcaaatacgtgaggtggagctggtatgtaaaccgctttatcagaatggcgcacacatggggaatttttactaccacatagatatttggggaatgaacagcctcaaaaatgaggctgaagtagaacgtcgcttagaagattttatttcccagctgcaagctgattggaaagagtcttga

SEQ ID NO: 149916 - DNA, 276 bp, Enterobacter cloacae
atggaaaagcaaaaaatcgaaactttcctcaatcaggcgaaagattcacgtactaagcattcagctgaagatcgccttttcgcactcgaagttatggcttgcgctcttggtgcatcccttgagggagaaagcagagataactttctggcgatgatgaattcaatctcagaaaacattaatccgatgtctgataccgcgattaaagcaatcgccgatctgaacgtactcagcgctaacttcaagactctttccaatcagcttgcagctgggaaataa

SEQ ID NO: 149917 - DNA, 1332 bp, Enterobacter cloacae
atgaattgcaatgaacttttttattcgcctgaaaaaaatgaattaacacttcatgaaagaataaaattgtcaactctggttttagacaagggcgtcacaaaaaagaatgagttgatagagtttttgagagaagagttaaaagaatcattcgattgcgacgtcaggttctggttgcaaggctcatacaaaagtcacactctaattaaacctgtagataaattttcaacatatgacattgatgttggtatttatttgttttttgatgcagaggcagaagatattgaatcaaagaatgtgaaggatacattaagagatgccttgttggcatattgcgcaataaacaacgaggcaaagattcaagaatctaaaaatgcgtgtgaaggtttgatattctcttcctttctaacaattgacactcctatctattataaaacggacgcaagattaaaacttgcaacagataatggctggagtgatagcgatccaaaggcaatacaagattggttaactaattcatatgctactaaagaagatagagcattaatgaaacgccttgtccgttatttaaaagcatgggttaatgtacaatggaacggaacctcgtttaaaaaaataccctccttagcaataaatgttctagttgctaataacttaagtattgacgaacgagaggatgatagtttcataaatacggtgttgaatatatgtcagcaattagagcaatcgatggaagtcgaaaatcctctaaatggttctaatttacttacaatgccagaagacgctttaactttcgcacgtcaaaagcttcaacaattgaaaaaagtttgcatggcttgtgttgaagctaatgaaaatgagcgaaacataaatttctctaatttgttccagcattatttccctcaggttaccattgtatcaaacgaaggtggagcaggattaccagcgcttactacaatcccagagatttctgtctgccgctacaataaaaatggggaacacattgaaaccgttatgacagatcgattaacggttgataaaggtgacacattaacattcactatttgtaattcagcctcctttaatgcgtttgcccagacacagtggacggttcgaaatgttggacatcaagcaaatgatgccaatgatatcgggcatgttgaatatggaaaaccatacgaaagtcataaacggggaacttcttatactggcactcacacaatggaatgtatgataacttataatggagctattttaggcctgaaggttattcacgttgtagtgcgtcctgcgctttcggttaacaggcctattagaaaatggtggaggcgctaa

SEQ ID NO: 149918 - DNA, 579 bp, Enterobacter cloacae
atgtgggaattaatgccaactaaagttaaatatggtttgcctatagctatttccattcttatttatataggctgtaccaaggggcttggaatgcctcttgccagatcaatttcatttacaatcagttccgttacaatccttgccttcctgtttggaaagtatttatggaaatatttttatttcgatatcttcaagcataaattttgtccagactttaatggtacgtggattgcaagtataaaatcaaattttagcccggatgcgcaggttgaatttccgttgcatattgaggctgattttttctctattaagatgacaggcaataccacaatcggaagaacttacacaaacttatgcaaggttgttcgtgcggaagatgatagtttcgagttggtttatatgtttagagttatgaatgattctccttccgcatctgatggtatgttttatgaaggggccgcgaggttgcgtgtaattgatatcaactccatgcacatgaaaggcgttttttggacaaatagatgttggcaaaataatttaaatacagcaggctcaataactttaacgaaacgaaattag

SEQ ID NO: 149919 - DNA, 462 bp, Enterobacter cloacae
atgagtgaatttaaaccttttgacgataagctggccgggctgattggtgctctgtcaccggtaggacggcgaaagcttgctgctgagatagcaaaggaactgcgcagatcgcaacagcaacgcattaagcagcaaaaagcgccagatggcacgccgtatcaggccagaaagcgccaaccgctaagggcaaagaatgggcgcattaaacgggcaatgtttcagaagttgcgaaccagtcgatacatgaaagccagtggtagcaatgatgcagctgtggtggagttcaccggcaaggtgcaacgtattgcgagcatacaccagtgggggcttaaggaaaaactcggccgcaacaatactttggttgaatatccagcgagggagttactaggctttgattttagctctatacaaatgattgaaaaggaggtatttatgatgcttgcaagaataatcaaggattga

SEQ ID NO: 149920 - DNA, 561 bp, Enterobacter cloacae
atggatattattagttttatagctgaggccattaaagcattggcatggccaataactattattgtcatagtattaatgctgaaaagacctattctagagttgctgccgtctttacgtcatctaaagtataaagagcttgagctgaagttcagcgatgaaattagagagttggagactaaaatctctgatacggtgggcgaggaagagttgagtggttcggtgttgtctgaaaaaatgttaaatttattcaatctcgtatcctattctccccgagcggcaataatggaggcgtggattgaagttgagtcagttgcagcatcagttgctagttcattttggggaggttcatcaactgaagtattcaaaaacatgccaaaacttggtgagtatctcctccagtgcaaggtgattgatgagggtcaacttgaagtttttaacaaactacgccaattgagaaatctggcagttcatgctggtgagtttaacttaactgaaaaggatgcgaaatcgtatgtgaagcttgcatcctttctggctgaacatcttaaggaagttcagtga

SEQ ID NO: 149921 - DNA, 666 bp, Enterobacter cloacae
atggatgagactaaatacaacaaagcattttccattaagaaaattcaagcaaaatctacccggcgtgataaaaatcaacttgcacttgaaagagcacatgaaataagaaagtttgaaatagaattgtattggaaaagaaccgcttatatctggacgttaattgccgcaatgtttgcaggctattgcgttttggcatcaaaacaaacgctaagcggaacaaacaacaccgacctttacttgatattcattgcatccactgggtttgtcttttcttacagttggtttttaatcaacaaagggagtaagttttggcaagaaaattgggagtttcacatcgaccgccttgaggacaatgttacaggcccattatataagacggttttgcaacgagatgaatccatgaaatataaacaagagtggaaaaacaacatcctggcgccgcaagcgttttcggtttcaaaaataaatcaattcatagcaatttacaccatgtttacatgggttgttttaatgttcataccaaagacaacattcataaactcaatttttgtcattctgtttgtttttagtgtcattgctgtattacacaaaaacagcataagcgaaataaaagacaatgcagaaccaatgaaagtcaagtccattaacagaaagactgaattttag

SEQ ID NO: 149922 - DNA, 426 bp, Enterobacter cloacae
atgcacagtcagttattcagcaataagacacgcggattttatccggttaaaagtcttcgctattacaagtcagttgatgcgctacccgatgaccttgtcagggtcagtgattcagaacacgaaaaatttgtcggcgctgcccccgttaacagcgctccattttacaacaccgagagcaagcagatggaatgggtcagtgtaaccgcgccgaccagaacaccagaggaaatcatcgctgataatcgcgaggcgctgttgagccgacagcgcgaggcggcgattagcgcctttcccctgcagtctgcagttgatttagggattgccagcgaggcagaaaaagcgcaactggaagcgctgaaaaaatacgttgtcaagctgatggacgttgacctgagcgcgccagaatggcctgcggtgcctgagtaa

SEQ ID NO: 149923 - DNA, 123 bp, Enterobacter cloacae
atgacaattttattctggataacaggcggcctgacagcatggggaatttttggttttttctggctcaaattatttattggtgatgaaaccgaaaaagattacgaggaatgcccctacgaataa

SEQ ID NO: 149924 - DNA, 651 bp, Enterobacter cloacae
atgcctacaaattttgagcagttagaaactcagattccagccattaaaaccttgacactaaaaacagatgaaacaggtttcttcatccaagaattactgcgattttattcaattgcaggtactttattgggaatcaagataaatcttggtaaaacctctaatgttgatgaaaggtactttactcacatcttgtcgcgctctttgctggaaccatttttcatcatactttatatctttgaagacccatcaaagatgactagtaggtatgaagagcatataaattcattcaaaaaccaatataaaaagctgatggatgatctgcagggaccagagtggcagtattttatgcaaggtgatggaagcacacttgaggcagctgatcctaattggaacaaactaccgtcgcttcccgacatgagaactcttttaagtaggctgaaaaacagcagcaataagagtcttgattatctgtatccactctacaggatcactagctttgatacccatggtcgaagcttggcaaccatatttgaggcagctttccaaaagcagtgcaattttcccgttcttgatgtcggcgcagcaattgaactgatagcaagtcaataccttgctatcttaagtgaacttcgtgcgaacaaattaatataa

SEQ ID NO: 149925 - DNA, 2217 bp, Enterobacter cloacae
atggattatattcttttagttttattattagcagtttgttttgctaatgcctctttcctgagaaccaaatcaatagtagttgttattacactattgatcttttccttttggttcatatcaaacatgtttactggcaatggtgtgaacgatgctgtgtattatcatatgaaaagcaatattcatggaacatctatcgatgatatattgccaaaaatttatgccggtagcagtttcattttaatatcttttgttataatcctttctgcattcaagttacgaaaaaaattaccccaacgctatactttgacacttaattcattgtttattcttattttatccatctttctatttcaatcaaatgcgacaaaaaacatctttaattctttccagaatttatcttatgggaatgggataaacgttgcagatcagtataaaaacacagactttaatctgaaagataagtataattacgtttttatttatgcagaaagccttgagcgctcattgagaaacattgctggcactaattacattccgcacctgagtgaaatagccgataattacattgacttcactaatatccaacaaattccagggatgggatggacgatggcaggaattgttaatacacaatgtgcaattccgctagtccttccacagggcaattcagggaataatatatcacactttttaagtggagctgattgcattgcaacccatttgcaaaaaagaggttacaccacagaatttatacgcggtagtgataaagagtttgctggaggagacaagtttttttctcagcatggatggctgtcccaacacgataaacaatacttaataaatcatcatgttgcagaggataaagatataagtggatggggcgtgcacgatgatattctgattgagcatgcatataatgaatatgagaaattgtccacaacaaaaaaaaatttcttactttcttttttaacagtcaacacgcacccaccagaagggacttatttatccacttgtgatgggcatatcaacccttcaattaataattcgatgctcagagcagcgagttgctctgattatcttctcagtacgtttatcaaaaaaatcatcaactcagaacatttcgataatacgattattgtacttgtctcagatcaccttatgatggctaacgctgccagcaaagagcttgaagatattcaggacaagcgtagaaacaactttataattatcaaaaaaggaattagccccactaaaattgacaaaccaggaacattacttgatgtctggccaactatacttgatacttcctcaactgagaatcctgattttggatttggtcacagcttacttggcaataatgaaagtaatatactaagtgcttgggagaaatctaaaagtattggtgattatcttgggttttcatcccaattgtggaattacccttcactaaatgacaaaatttttctcaaagatggcatattgaccattggtcaacaacagtataaatggccagtttatggcattgctgataagaataaaaacataaaaaacatatattttgatgcctttgcattgaatgctcaaaagatcattagcaaagatggcatagccttctatatcaatgattgctcggtgatcaccgataataaaaaaggactatgtgcatatgaattgacaagcaaggggacaatacagtatcaaattgacgacaagggtatcttcaatcgcagaaaaaaccatatcgtatccccattattttttgcagaacttataggtatttcttctggccccctcaatgtccagacaggaataagtgattatattaatgtacaagacatgcccacaggagttaatctatttggattaaacaaaataaatggtgaagtagaaattgttgcaaatttcaatacatgctcaaacacccccgtggacattaatgttgtaaaaaaacttgttgaaaaagacaattcaccgctaattattgcttcaaatgattcagtattttgtattcctcatgaaaccagaccatcagtaaataaactgttacgttctgatgcggccacccaccttgcttcaaggcagcaaattataggcatatttaataccaatgacacaaaatacattatcgggaaacctgaaattcctttggacgtatttataaacaaaaaaacttttaagctttacaagttatgtgatattttcacagattgtaaatga

SEQ ID NO: 149926 - DNA, 171 bp, Enterobacter cloacae
atgaaaaagaatatcgccattagcaaacgggatcatttcggtgtcacccgcgcgcttgtgccctgcgccagtttcaaactggccgcgccaccgttcctgcgtatggtcgtaaacgtgcagaataacctcgacaagtcctctttccggacagtcaaggcggaggaaggttga

SEQ ID NO: 149927 - DNA, 264 bp, Enterobacter cloacae
atgagtgaacaaagtctgataccgctgcgggattggaaagctcgcaggttgcacttccccataacagtcacatgcctggtgaaacacgggaaactgggatacatacaaccgaggccgattaaaattggaaatcgctggtgtatcgacgaacaggcaatttatatcggaccaggagcgacgggagtcgaaccagaaatttacagtgacgacgacgaaattttgcgggagatccttagcgatgtcaccaaggccacgaaaaaataa

SEQ ID NO: 149928 - DNA, 186 bp, Enterobacter cloacae
atggataagacacaattaacaccggaacaacaaattgcctgggcacaaggaaaactcgttacttcagtatttcttcgcgatgttgcgggatgccatgccgcctggaaagtattacggaaatatagaaattttattgtgcatcgccagccttatcaggaatggcgtaataatctaaaagttatttaa

SEQ ID NO: 149929 - DNA, 231 bp, Enterobacter cloacae
atgactaatttaccgaaatgccctcaatgcggcatggccccttcactgagggttcgcagccggggaatgaactggggttcagcagaggtccgctgttcgaacggttgccctggcatccgagcgggattttcgttcccgcctgatggtgaggcagcggcccggcagttgcttcaggaaaaatggaaagagcttgtgggaggaatcaacgatgccacgaccaaaaactcatga

SEQ ID NO: 149930 - DNA, 213 bp, Enterobacter cloacae
atgattaccatgtcaacaaaaatgtttacttggtgtcaggggcaggatattgtacgcggcgatatgacaggggtactggtgcaatgcaccttcgcgaatacccctgtcgtatcgccggataacaaaaaaccccggcaggcggggtttaaagttttttcaaattgtcgctttacatcgctgccatcgtggcgcagctctgccaatcatgaataa

SEQ ID NO: 149931 - DNA, 279 bp, Enterobacter cloacae
atgagcatcatcaaaatgattcttggtggtcttggtgcgctggtggccgtcgcgctcagtggttttgtggttggcaatattcgcggcagcggaaaggcaaaggcaaaagccaaacagcagcgcactgaagaaaatgcagcggcgaacattgctgcggcagaacgaaaagcggaagtcacgaaagaggccagcaatgtacagcagactgttaaccatatgcctgatgacgatgttgatcgcgagttgcgcgaaaacttcacccgccccggtggtagttga

SEQ ID NO: 149932 - DNA, 975 bp, Enterobacter cloacae
atgcaatacaagctggcagagatattaattacaagcctaatatgggtgataaaaatgagtttcattgataaaaccaaccaaagcatcggggataattccaatgcaattcaagcagcaggcaatgtcattattaatggtaactcaacgggcgaagttatatccatatgcgaatatataatagcccaaaaaatggcagcgttaaaagaagaagccaaaatggtggcgcttggatgggcgcgagaatttgggcaaaatattgcagttcgccttgataatactttagatgaaaagttacatgagaaactaaaaagtcctgatgtgcaattcgctataaatgaagcggttatgcaagttgctacaaaaggcccttcagctaaagctgaattgttgcaagaattaatcgtgagcaagatcaaaaatgatgatgaagaacgtgatcttataatcgatcatgcaatagaggtcactaaaagaacaaccaataatgaattaaaactcatggctctaatctacagcattagaaataattcgaatactataaacaacataaatttcaatgccatccttgaaaacccagacccacactattccataaatggattcgataaatttttttgctgggcgctctttcatgatatttatacaaacccagcaaagttattcaattcaatcattggaaaccctgaagaccttcgacctataaacaatgacatgatgaaagtcaaagggttagttgatcttgagcacccttatgacattaattatttcgaaatacttgaacttcaaacaaactataagcttgaaaatagccaagagttatttgagagcgaattcccatatttcgacagtatattaaagaagtttgggatatctaaactagagcattttaatttttttagactaactactctaggggagataatagctcatagttatctcttatcaaaaggctttaatgaagtcggaactgattaa

SEQ ID NO: 149933 - DNA, 543 bp, Enterobacter cloacae
atgcccaaaacattcttatgcattgctagcgggccgtcgctgagaccagatgactgcttgcgcgctaacgattcaggtttgccagtaatcgcaattaacaatagctgggcactggtgccaaattgtcagcatatttacgccgcagattgttgctggtgggaagaatacggggcagggataacatcagaggcgccccggtggtgtggtgatgagttcacggcccagcgttttggcattaactggctatcctctgtaatccccggttcgtttaattccggtcagcgggcgattgaactggcaatccaccttggcgccagccgcgttctgttgctgggctatgactgttcagtacgtcacggcacccactggcacggcaaccatgctctgttgtccaacccggacaaattcagcgtagcgcgctggcaggatgaattttcccgccttcgcgctgttgctggtggtgtcgagataatcaactgctcccgctttacgcggcttacctgcttcccccgacagtctcttgagactgcactttctctgtag

SEQ ID NO: 149934 - DNA, 648 bp, Enterobacter cloacae
atgtcgtcttctaaatcagacaaatttggtgctgcgacaccgcagaataatgaaatcgatctcattcagttgcttgctgagatgtttgatcaccggatcatgattgcgtgtatcacactcctgttcacggtatgtgcggggatttatgcattcagcgccacgccagtttatcaggctgatgccctggtgcaggtcgaggcgaagcaggataactcgctacttaaaagcttaagccagttcgggtccgatctctcccccgatgtcgccccagaacttctgctccttaaatcaaggatgattctgggagagaccgttgatcaactcgggctaacataccacgttaagcggcgcgtactccctgttatcggtcctgtgtgggaacagattcggggacgaaaatctgatgaaataacgattggcgcactgactattccgcttctggaaggtgagccacaaacgcttttactcaccgtacaggaccaggggcgatttcatcttgagggaaagacgctggctgtagacggcgttgtgggaaaagcgctggttaaagatggggtatctctgctggtgacatccctcgattcggttccgggtacccaatttatcctcaaaaccgtcacgaaacttgaagcgatcaacgccatttaa

SEQ ID NO: 149935 - DNA, 1128 bp, Enterobacter cloacae
gtgaggaaggcgccggaatatcctgtctgggaaacagccagcgcacccaacaaccgtcgctggctgcaggcaggggcattgattagtttacttgtcggcggtgccggagcgctgaccggagaggcaaaccgcagcgctgcggcttttgcagtaatggggcttgctctggtcttcatcggttttctctggctttgccgactgctttatttccgcttctctttgcaccatgccatagcctggcagcgcaacgtcagatatgagcagaacctgtggtgggaagaacatcagagcttgattgggctgaaagacatcctgctccttggcccggcaggtgcggaaacgatggactggcagcgggtgcttcgtcgtattcagcggccccccgttgaacgtcatgagacgggggggaaaacattgcgtattgcccgtaccttctctgctgatagtcaggaacgggaacagcagcttgttcgcgctctggtaatgcaatggaaaacgacctctcgcgatatgccgcaggcgatctcgcggtgtttttttctgggagacgccgccgtctggtctgcttttcgcgcacaaatgtatgacgcttttcctggagtcaacttacctgaccagcccgaaccctgggagggagaggcaacgcttgcgaggctgacagccctgcttcgtgaggacgcgaaaagccagcaccttgtggtgggatgcgtttcttgtcccgcatcacctgatagcctgcttcccgcgggggaatctgcagcattgtggctggtcggtgcggatgcaccagtggtaatgcctcggggagaattttatgacgcctctgcttcagacccattaagaaacatctgcgaacgggccgtgactcaatgcgaacttgatgaggatccggctacctgtattttgttttcgcatcctcaaattccccaggtgaacgaatgtggctggaataccacccataacctgcaggataactattgggggataccgggaagtatggaacctcttattgttatttctcttgccgctctttatgcccaaaacgaagcacagccttgcggctggattagtaccgatcctcaacacactctcgctcttggaatagtaaagccacatggaaaaggataa

SEQ ID NO: 149936 - DNA, 336 bp, Enterobacter cloacae
gtgaagataatcatctgtggggtattactgggtgttttattcctggccggacgcagtcagccgaaggctgaggcacaaacgcaaagcggtggtacaggaacaatagaagcgattaatcataccaaatgggccatcaatcatttcagtgttaacggtcagtccggaatagatattatcggcccttttgatggtggcggcggatgttgttatggcgtaccggccgtctggaaacccggaatgacggtgcgtatagactgggaaaccggacggggggataccgatggttttcccgggtttggtgatgatgctaaatatctcgcatgggaaaaaaaatga

SEQ ID NO: 149937 - DNA, 693 bp, Enterobacter cloacae
atgaatttcagccgttctcaaccgttgcgcatcattatccttgacgatcaaccaatttttttacggggcgttcataatctcttccagcatgagtttgatattaaattgttgggtagtgtaagtgattgcacagatctggatatgttcattaatgatgctgatattttgcttatggattttgcgcttttgccgcagaaaaaaaacggaatcaacttaattaattatttgcataagcaccatccaaatttatatattttagtgatgtcttcgttttattctgccagcagcgtctccatggcattgcgcaatggcgcacgagggttcattcacaagcaggcgtcagaagctgaaatgattaatgcggtaaaggtggtcggtagcggcaatgtgtatctggagctggaaatggcggtactgctggcgcaattacattacgctgaaatgcaggcttcttccagacatgcgccgccaacgcaagaagcttcgcgggtttcgctcagcagtttgtcgcccaaagtgcaggaagtcatacacggcttgctggagggaatgactgtgaaagagattgcacaaaaatatggacgcagtattaagactatcagcggacagaaacagaccggtatgcgcaaactggggcttaaatcgaatagagaactttatttactgcgccataatctggactacagcgcataa

SEQ ID NO: 149938 - DNA, 2463 bp, Enterobacter cloacae
atgacgttattctcaaaaaaaactctgaccattgcggtaatgatgtcgttgatgtcgctgccggtcactgcattcgccatggaagatttgaacacacaggcagaaaatttgcctgcagattttagtagtcatttcttcgatgcgccattgctgaccaaagttgagctggatggagagtatttaggtgacgccatggttttattatcaaggaataacaccgtacaacttattaatttctcccaattctcggaaagcaaattatcatcacaagtccgtaatcgttgggcaaatacacttaaacagtcgaacaagctagggaaatgcgataaaaattgtgcagacggcttaattagccttgattacagcttgatcaacgcggcgctatatatcaccaccgatgcagataaaaatgcccggggcggcgtgcgtcacattgctctgcctgaaaccggcagtagtggattgatactgcgtaaccagatgaatttagttgggggtgaaatgcagccttggtctggttatcaaagcttacaggcgcaaggcagtattgggaactggacggcacaggccagtagccagctcagccgtagtgatgttgagaatagtcatactgaggcacgtgtaagttcgctttttttacaacgtgaactaccggggaaatcagttagagcaggtctctttatgcctgatagccagggaattttgcgccagccgcaaatgcccggcagccaaagtagccaaacattggttggcgtgatggttggaagttcagacacgttattagaaacgtcggggcaggccagcgtctatccgctttacgtcactgccaatcgagacgcaatcgctgaaatttatcgcgatggtgtgttgatcaatagccagccggttaaaccgggtatgcaacaactcgacactacggtattgccctccggcatttacagtgttgaggtgcgtatacttgaattgggtaaagaaattagccgcagcgaagaaacaatttacaagcccaatagctggcgcaatcccgaaagtcgctggcaatacaatatatatggaggtgtcgaacaacagctgggcaacaatcgtcttaacgataacagtggcaaagaggcattgggtgctagcgctaactatttgttgcatccgcgtgtgattgtaggtgctgcaggacaacgtaatgccaacgggaaccaggtgggcgcttcaaccgatattcaggctgggcagaatgtccgcctttatggcagcgtcggcgtgagcgacagtctggggtcgcgattcgacacgcagttcaactggcaaatgcgaccacaaaccagcttaatgctgaatcatagccagagctggtacggcgaggaaaactccttttgcggtaacaaaaagtgccaaaccactaagcatcaatccagcggggcgacactaaaccatcgactcgataatggcgactcgctttcactacgcggcacgcattatgaacgtgaaaagagcgttgggatagatgctaactggcgtactcgtttcaccgttaaagacacgccaatctcattaacgctaaacggctttgatcgtccttatcgccaaagtgggagcacaagaaatcgtggagcgaaccttaatctcagcttcgccctgggcgggagtggacgcagcataaacgcgacattgggcagtcgtaatgataaccggggtgaacgagaaatgttcgcttccgcgggtataagccagtcctttgaacaagggagcattaaaagcttttcggctggggtcaccggcgatcgatatggtctgagcggcaatatttatagcgacttcgcgcatcgctacgccagcggttcgatatatgcgcaaagtaccagcaataacagcaaattgagtggcggtatcaacatgagtaatacgcttgccgttggtggcggtaaggtctcagccagccatacccctgaatcatgggccagtcacaccggcatgatcattgatgttgagagtgacgatgcagatgtcatcctcaaagcctgggatagcatgggaaccaccagcactttacgtgccggtcgtaatttcattcccgtgaatgcgtggaaatcaggtcagatgcaaattgatttcattggtaaagatgcgccagcactcaaagtctggccaacggaactgccttatcacttgaataaagggggggtagcaaccgctaaagtacgcgtaatgaaaaccgtcacggtgattggtcgcgtggtagatattaacggaaatcctttgtccggtgccaaattagtgaatcatgccggacatggtatctctgaaggggatggtttttttgtcactgatatgcatgaacatacgccggaactgatcattcattcacgtaacgatcagcaatgcaaagtacatctggatgtcaatgcattcaagcgtgaaaataatacgctgatggtcggcgatctgagttgtaaaaagcaaaagagttaa

SEQ ID NO: 149939 - DNA, 483 bp, Enterobacter cloacae
atgttcaagaaaattctccttaccgcactgattagcacctctgctacggcaattgcagatgataccactacactacagtttgatttagaagctacggttccaacaacgcgttatttcgttgaatttaacgaccctacttttggcacgaatacacaggagatggtgtggaaccaaagtgctcagaaactggataatgtttctactcaactgaaagcgctaaataatagtggaaaaattgaggcttatattgcttccgctgcagagttagttcacgaaactgatatcagtaagaagatcccgctgacagtaaccattgacggaaaaacgttacctgttggggctgcttcagccgttgagattgtggatgatgcgactaccacagtacagacgttgccgctggtggttagcccaacaggagcaccaacctatgatgatgggaaatataacggcaccgtcaccatgaattttgatcacagtttttaa

SEQ ID NO: 149940 - DNA, 732 bp, Enterobacter cloacae
atgttaaaaactttattaggtattgcactattcaccgcttcaggtattgcagccgcaacgccacaaatctctatcggctctatgtatgaatttatagatgcggataaaagcaccttattgaaacgtattcgtaacaacggtgatcaaacggcttatatccgcacggaagtcagtgagataatttatcaacacgatggaaaaaaaatcgaacgaaaaatggattcaagcgaggtagcacgcggaaacattaatggcctggtgtttaccccattgcgcatgattattcctgctaaggctatgcagtccggacgattagtgttttctggtaagcgtgaacaggagcgctatttccgagtacgcttctcaccagtattacctaaagatcagtatgaatttaatcaatctaagcaggagtatgaggcttatcgtcaaaaacttagtgcaggtattaatatcctgacaggatttggcgcaatgattattgtacgccccgaaaatgtcagatacagcacgcaaatcgaacgtgtcggacaaatcatttcatttaagaacaatggcaatagcacagttttaattgacggaattaaagaatgcataaataaaaagtgcgcgccagaaaattcggttttcttgttacctggtaaaacacaccagatacaccagaaaaccaatcattctctgcaatttattttgcaggaaggaagtaaaagtacaccgaaatcattcggttaa

SEQ ID NO: 149941 - DNA, 1221 bp, Enterobacter cloacae
atgatgaaccctgttataaaaatttttatcctattactgcttacgcttgccactaatcgctttgtctatgcagacgaagttattattactacagagtttactccttcagccgtaaatcctggtaataatgaatttgtgaacactacgcctatttcagggttttgtcagaccaatgcaaacacggcatattgcagagcggggaatgtcacgattgcaactaatttgagtgcaagaaatcgcgtattaaatttcaatagcaccagtttaagagaccagctttatcagcgcatcgacaacgggtggcgaattgtgacgttatatgatcgaggcagccgcaaacaaatcaccgcaacatttagaataacggctgtgttcaccaggtttgtgacccgaacaggatgggataaggacaagttttccgtgggtgggctatcgcctgttggcggttgtgagcgggccacttctctaagcagttcaacagtttatgattttgggtggatacatcctagacctggtctggaatgctataaaaaagtcccggatgtaaatgtaagtgatattaccataagtccgatttccatcggttatgagttgagatcgttaagtcccatgtcattacccaatggtaattatgagggttcaattagctattttgtaggtaataacaatgcgatagatttgggtaacgccacttacagtgatgatgagttaaaaattacgattcggaccacaatcaaacatgatttcaaggttgaacacaccagctctcaaaaagtgatgctggaacctcaagggggctgggacaccgtaatcggttcaggttcatatgaggttccattaagagcacaatcaacctttgctttaaccgcttcggcaccatttagcttatatcttgaatgcgaacataaccagcttggcaactgtgcattacaaaaggaggggtcagatgaaacggttcccgttattatctccgtaacgatgccccaaatgcgaaatataataacgggtgaatccgtgacagatatggtgctaccgatgcgacaaaatcatatgccaagctttaatcttgaacctacacaatttaataatgccgcttcatcaacagttcagtttaagattaatgggcctgatagtcgtaaaatgatcacccaacccggtaccacctggaaaggggcagtaacgctcatatttgatgccgatttgcctttcgccagccaataa

SEQ ID NO: 149942 - DNA, 2337 bp, Enterobacter cloacae
atgaaaaagtggataacacttctgctctgtcttatcactttatctgccgctcaggcgaagccgacagcgcttagcccggaacaactggagtggattaagcaccatccggacgtcacctacaccgtcagcgaccgctggccgcaggactttcgcgtcaacggtcatccggtcgggctcagtcagagtgttctgcaggaaatcagcgcacggacggggctgcatttcaggtatatcgcccctgaagacgcggtagtatcaccgcctatgcttgttgcggcgctcagcgtgcaattacttagcgataacgataaatcccgctggctgatgactcatgcatgggctaacaccatgcccatgctgatcggtaaaaataccgcgacaggcatccggactctgggtcaaatgtccggtaaaacgctggcgatcgagaaaaacagtgaatatgccagttggatccgccagcataaccctgcaatacggttggttgaagttagcgatgtaaaggctgcactgcagaaggttgaagacggtgacagcgatgctgctattggctcagggctggtgattctaccgcttctccagcgttattatgcacgtgatatggccatatccggacaggttcctgaaatggccagcagcatcaatatggccgttgatcctcactatccgatactgcgcgatattatcaacgtcacccttgaaagcatcagcgcccttgaggcacagcaggtttttgagcactgggtaggtattgtagattttggttcgccctcgataagcgtggttatataccattatcgctatgaactttttgtttttggcattctgttaatgctgttaatgctgactctgttttacgcccttaaggctcgccgacgggcgcagagaagcgaaaaacaaaaagaagagtttctcgccatcatgagtcatgaaattcgcacgccgatgaacgccattgttgccgctctggagctccaacagcagccagcgggccagcataaatcggaggaatatcaggcgctcgcgctctctgcagccaatgatttactggaattactcaataatgtgctcgaccacagcaaactcacccatcagcctgtgccgcttcagatggctccctgcgatattcgtcagttactcatggtggtatgtgacagccagcggccgtcagcagaacgcaaaggattaaagctatattctgcgctggacgctttaccctccgatttatggattgacgcagatgcacaccgtgtaaggcagattgttaataatcttctttcaaacgcggtcaaattcactgacgtcggtagcattgcattagagtgcacctggacgtcagaggaaagtgtatgcggagtactctccatcagggtaacggacagtggtatcggtatcagtgaagtcgatcagcagcgcctttttcaggcgtggcaccaggctgaaagcagtggtacaggccttcgcagcggcagtggtttagggctctacctgtcccgccagcttgcaaaacaaatgggaggtgatatttcgcttaaaagtgaacaaggtaagggcagcatctttacctgcacactgtcggcgcaacgcgtacatccccccgaaacggatacgcccaccgcggataacctgcccgtgctttctctgggcttaagtgtgctgattgttgaggatcatcccgctaatcaacgcgtgatatctgcgcagcttgatctgttgggttgcgaatgggaagtcgctcaaagtgcggaggatgcgtttcagttgcttgaagatgaaaattattacgaccttatgctgctggattgtaatctgccgggtaaagatggctactggctggccggtgaaatcaggcaatatgaacgcctgcaccaacatgaacgcatgcctataatagctatttctgctgtcagtagtcaggaacaccataaacggtgccagctaagcggtatggacgatgtactggtcaaacctatccgtttaaacccactcgcagaaatgcttaggcggtattgtctcccctctcatcaggggcttaattttggacagctcaacgacgatacctcattcgcaggcagatcctcgccggtgattaatgacgaagtgcagcagttgctcagacaggacatagatcaatttcaccaggcatgcgagagccgtgacaatattcagatgatttattacagccaccggatacgcggcgtggcgcagatgtataatctttccgagctcgcgttactttcggaagaaattgaacaatccttgcgacggcaaggagtgcccgatctgctcataattgatgcgtggagaaatagactggatcacatcaaaatcaaatga

SEQ ID NO: 149943 - DNA, 2313 bp, Enterobacter cloacae
atgcatttcatcatcagcctgttgatgacactcacaggtctgttttatcacctgccatctgcggcatcagagccgcttttttccccggaagaacgacgatggatcgcagaacatcagcaggtcatttataacgtcatccccagctggcctctggactatgaagaaaaaggacaacatttcggtctgagtcgtgattacctcgacgtgataagcaaaataagcgggctgaattttattctgactgacggagccaaagccccgcagcttatttccgcaatatcccctgaatttttacccgaaagcgagcttaaagaatggcgcttcagccagcgatggatgaccacacacgccctgattatcagtgataatgacgcggccacaatacagtcactgcaacaactcagtgggaaacgcgttgcggttcgccgtggcacttattatgaaagctggcttcgcgaacaccacccggagattagcctggtcccccaggatcatactcgtggattattcgaagcgatctatagtggggatgcggatgtcggacttggcgctgatttggtcatcaggcctctttattacaggtattactcgcataagctcgccattgcagggcagatccctgaattacgcgcgggtattaatatcgctattcggcaggatcagcctctgctattgagcataataaataagtcgctaggatcgattccagcacaaatgagtaatactatttttaaccgctgggtgagtgatatgaaactcggctatcccagcactggggttattttttctttgtacagtctggaaatttcggcttttttattgctgctgatattgctgggatggatgctgcaacgcaccgtaaaactgtggcgaaaagccatggccagtgaaaaacataagacgcagtttttggcaatgatgagccatgaaattcgcacgcctatgaatgcgatgattgcctcccttgaactgctgaatcgcccggtgacggatgagcaacgggaacagtatctcgcacttgccagttcttccgcccgcagtctgctggacctgctaaacgatatacttgatcacagcaaaataagccagaaaggtatccgccttgagtcgcgcccgtttgtacttgcagagctcatccgtgcggtatgtgacagctatcgtccacttgccgcgcaaaaaggactgatgctgtccgtatgtatcaatcccgacctcgataaccagatgatggaaggtgatccgcaccggatcagacaagtcgtcaacaatctgctgtccaatgcaataaagttcaccgcgagtggttctgtttcagtaacgctaaagggtgagtttttggccaataaaacgtgcatgatttcgctagacgtcgccgatacgggtataggcatttcacctgaaatccaacataacctgtttaaagcctggatgcaggcggacgacgcacccgatcgccattatggaggtagcgggctgggtttatggatttgctggcagttgatgcgtctgatgaagggtgagctgatatgtcagagcgaaccggacaagggaagcctatttagcataaagctaccccttcgtttaactgaaccggagagaatgcctgccgagccagatcttccgctttttaagtccgatacaatacttcttgtcgtggaagatcaccctgctgcacaacgaatattgaaggatcagctggcggtgctgggttgccaggccgatatagtcgagactggagcacaagccttaagtaaaatcgccgatgaaaactattatgacgtgatactgcttgacattaatcttcccgacttgagcggttacgatgttgcgcgtaggcttcgggaaattgagcagcaacgtggcagtgaagctatgcccttgattgcaatttctgctatgagtgacgaaacgcatctttcaagttgccagcaaagcggaattaacgtggtgctcagcaaacctatcgtactgagctcgctggcgcataatctgcgtcgctggtgccatctttccccatcaacagcacgcttaaaacgtcagcaaaatccccagcaggaggaggaactggcgcggtggttgcgggaagacctgcagggattttccgctgcaagctcggatggcaatgtcaggctgatgcagtatcacgtccatcgtcttcgcggcgcggcccagacgtataacctcaataacctggcatacgtcgccacccggattgaagcggcactgcgggaaggtgctgaactcagcagcagccagaaggaatcctggctgcaaacgcttaaaaatgaagtatcttcattaactcatctttga

SEQ ID NO: 149944 - DNA, 705 bp, Enterobacter cloacae
atgaaaagtacagcgcgaaatcaggtttccattgccttgttagacgatcatcttctggtgctacgagggcttgctgatgtattgcgcgaaaaccctgattttaatgtcacaggtacttttactgacagcaaagaattactgaaagcgctgaaggcatttaaagctgatgtgataattgtggattatgaacttgcgccgtctgatatcgacggcctcagccttattcagatggttcgtcggcagtatgaggatgttgccattctggtactttcagcgcattacaacacagccactgtagcgcaggcactgcgcggtggggccaacggatttattggtaaaaatcgaccttttgaagaaattcaaaatgcagtacttgaggtcagccgtggtagaacgttcattgaaagccgaatggcacaggagttggcccaatatcagcagcagggggaagtgctgctgacaggaaacttcagcaaggtaaatgttgaacgggcattaagtctggcggttctttcacctaaagagcaggaggttatccgatgttttattaccggtatgacagtcacagagattgccgagaaatttaaccgcagcctgaagaccgttagcggccagaaacagagtgctttgcgcaagctgggtttgaaagctgaccacgagctttttattatcaaagatgagttaatgaagatacttcatttttaa

SEQ ID NO: 149945 - DNA, 651 bp, Enterobacter cloacae
atgatgaatgacaaccctatcttcgataatccccttatgcctgacacaaaaagagcccctctccggcgcgttcttatcggaacggcatgccattttacgtcgcaggggctttatacggttttatcggcagacgcacaggcatgcggtaggctgctcgtaacaaaaatctcgtcaactacgctcccgcacacccactgcaacgcagatatggtgattctcgacgaggtcgccttaagggaggacaaactgaatattttgtcggcatgtattacgacggacacgacgatagtggtcatgacagaccgtatttttcgcgatacttacagccttgagcacaataagaaaatcatttttattgagaaatcggctcccgtaaacaggttaaagcgcagtctgtttcatcttctgctgtctgctatccccgtccgtagatcttctcgtccggagggacatcagcgcgccagaatggttgaacgcgaagtgttatacgccttaatgaagggggaaaaacccggcgatgttgcccggaggatgggcatcagctacaacgcggtaagtcgatacaaaatgctggccctaaaacgagccgggttgaaaagcctgaatgcactgttagtaagaaaaaacagacatctttatcaaaacctgtag

SEQ ID NO: 149946 - DNA, 3273 bp, Enterobacter cloacae
atgtcaacgttatggaataagtcaggttgtcttattgcgttgatttgtctgctgggacctgcttttgctatttcggccaaacccgtttcgctaaatcttctggcccatacgcatttttctgagccccttcccgaacttaatcctgacgataaaggctggcttcaacagcatccagcaatccgcgttggggtgagcgcatccgcacatccaccctatcaggtgagcattgccgatcgggattttgaggggattacggcggactacctcgaacgtttgtcccgcacgctgggagtagatttccaggtattacgttactctgacagttctgcagcattggaagccttaaccgcgtcacaggtggacatgatcgtcgacgatcgttcccttaccgatacagaacgtcatcccgacctgcttctgaccgaccgttatctgtccgatcgtgctgttctggtgagccaaaaaccggttcgggaagcggacggattacgtggaaaagtgctgttttatattggtggagatgcgttacgcgaacagctaagaaacgcgtttccgaaggcttcattgactgccgctacagatgattaccgcgcaatggcgtctgtggccaatgatgacaatgccgtattctggaccaactttgtgacggctgccgagattaatcgtcagaatttcaatagccagttaacgctgtcccccagtacgtttttgccagaacagggacccagatttatcatccgtccggacatgatgctccttaaggatgccatcaacacggcactcagagatcgtcgccgccacatttacaatgaagtagcccagacgtggggtttgacgcgcctgtcggaagagggaaaaaagacccttaaaaacgctcttacttctgaggaaagaaattggattgcgcatcatcctaagattgcggtgtatgtggtaaacacgcatgttccggtaacttacattaatgatggcggtcagcagagtgggtatgccgtatcattactccagaacatcgccaaagagacgggattaacgttcagttgggttccgttttcaaatgtgccggagatgcgtgatgcgctgaaacgcgcgcctgactcgttaatagcggctgcagatgcatcggcaactcacgaacctggcattatctactcccggccctatcaaatatctaactgggtgctggtgacccgtagcgcattccccgccattcgctctctgtctgatatgaagggaaaacgcgtggcggtatttaccggcatttattatttacctgagctgcgcgaacgctttcctcaggtggaatttgttgaagatgatttttcgctggaaacggcgctttcactttttacccaccgactcgatggggtcattgtgccgcagaccgcggccagttttgtactgaaaagctatttgaacgatcgtttccggatcgccttaaccctgccaatcgccccccttcggcttgccatggcgaccagcgcagaaaataaagatctgatttctatcattaacaaaacgctcagtgaacagacatccagtgaaatgggcgcagaactcacgggctggcaaatgcgctatgcccttgagcgctttgaagtctgggggcgctaccgaaccgctatattaattgccagcgccgtgatgtttgtcatcgcggtgatgctggctttttacttctggcgcaaccgctggctcaaaaagaacctggccatacagcaagcactgcaaaatgaactcaccgtagcaaagcaacaggttgaaaaggcgagtgaatccaagagcgtgtttctttcgcaaatgagccatgaaatacgcacgccgctaaatgccattatcggcctgcttgaacttgagcatctcggccactcctccccggcgcaacggcgtaataatattgctgttgcctatgaatcatcgaaattcctgctcatgctcgtgggcgatattctggatatggcgaaaatcgagtccggtacctatgccgtacgctccgtaccggtttctctcaacgctattgttaatcaggtcagtacgttatttcatcatacggcagaaaaaaaaggtttgacgctgctgacgcaggtggacgtcgaggttgatcgggtcatgagcgatcccctgatgctgagccagatcgcctccaatttactgagtaacgccatcaaatttaccgctcacggtgaagtggagattgtaatctatcagaccccctcaacccctgaacgcggtaatagctatgtgctggaagtgagtgattcaggtcccggattaacggaagcccagcaagccgctattttcgaaccttttgtgcaggttcacagtgcccactctgcgcggcaggggaccgggttgggattgacgatttgccggcagctcgccgaattactggacgggcagctggcggtagagagcgtaccgggtgaaggtaccacctttatttttcgtttttctgcaccagtggtcattgatgaagccgatttgccaccggctacgaacgtgggggcggtttccacgccctgtaacatactggtggtggacgatcatgctcccagcagaatgctactgtcgcagcagctgacggtcgccgggcatacgtgcgttgtggcagaagatggcgttcaggctctgcagttatggggtgaggaaacgccgccgtttgatatggtgattacagattgcaatatgcccggtatgagcggctttgaactcatccggcaactacgtgaaaaggaaaaacagctgaatcgggctcccgggccgatgctgggattgactgccatggccgagcagaaagtcgtcgcgctggctgaggaggccgggatgacggcctgcttgtttaagcccgtcgaacttgcgcggctccttgagcatatccccgaaacgacgcgactggcatccccctccggggagcgtcatactcgtctcggtttgagggagatggcgcaatcgcagcccgaaatattcgacaggctgatcgacgcggcgatatcgcaaaatacgcaggactgggcggcatttaaacgggggatcgcggacgctgattttacggccattcgacgcgcggcgcacagtctgaccggaggggcgagactgcttgaagcgcacgaacttgccggagtatgcgagaggctggaaaacgcagcggaagaagaagacttgcctcacattctgtctctggtcaccgcactggaggcccatctgctgcaactgaataatcgccttaaagaccaacagttttctcaccaggggaagaaggcggatgacgaataa

SEQ ID NO: 149947 - DNA, 624 bp, Enterobacter cloacae
atgagcacaatctttattgttgatgaccatcctgtttctcaacttgccgtgcaggtcgtggcgaacgggaagggatatgacgttgtgggcacctgcgacaacgggcacgatgcattagtctatttgcgtaaccatcgtcccgatctggtggtgattgatattgatatccctccgcctgacggacttgaggtcataaaacggctgcgcgaagagaattatccaggcggaattattgttctgacgacgcacagcgatcagcattttgtagacagggtcagggccgcaggcgccaatggttttatcagtaagaacaaccagcttgacgccctggcagatgcgttcagggccgtgttaaacggatacgagttttttccccagcgccagtcatcgtcaggccgaccggatgggatacagccggagaaggacctgctgagccgcctgtctaatcgggagctgcaggttcttggctatatcgcgcggggcgaactgctggtggagattgctgagaaactgcatgtcagcaacaaatccgtcagtacctataagcgacgtattatggaaaagctgggcctgagtaaaacgctggagctggtcgaattcgctaaacgtaatcatctggcgtga

SEQ ID NO: 149948 - DNA, 1005 bp, Enterobacter cloacae
gtgaacatacgaattttattctgcggcgtactgctcctgacctctaaaatggcggtgggtgcctgcagctttatggataaccggtttacggccagcgacaatattaacctcaattttggtcagataatcgttcagcgcgacacccccatcggtagcgtggttgcaaccgccagttctgccacactcgctaaccggaacgattttatcgaatgcaccacctccaggttcgtcacccagtgggcgccaggaagcggtaattttcagccagtacagcataatgctgaaactctctatcagtcaggcgtggcgggtcttgccttcagggttgtgaccccgggagcagggtcaacggccgggcgctatggaacggggcctctgcccagacgcgtcagtaatatctggtgtcgcctctcccccacctggtggaggctctgtggcggctcctgggggaactatcagctccagctgatcaaaattgctcccgtaacggggtcaggccgtctgcagaccggatctatcacgcgggcaggcgttgtgggtgaaatggatgtcatgaacgtgaatatcgcgagtggagaagtacatacggtggcctgttccgtaaccactccaaacatctttgtgaacatgggaagcataaaaaataccgagttttcgggggctggaagcacctcgcgcgacgtgagctttaacgtcaatttgaactgcgacgcgtctgctaatatttacctgacgctggaggcgggacgtgcgggcgtagcggataccagtaagggtattttgaatattgacacaacaggctcgggtgaaacagccagcggagtggggatacaggtgctgtttaaccacacgccagttataccgggagaacggcttaaaattaccaccaccgcgtcagacggtctgtatgccctcccgcttgcggcacgctactatcagactggcaccatcctgacgccgggtacggctaacgccacggcaacgtttacgacaacgtaccagtaa

SEQ ID NO: 149949 - DNA, 1026 bp, Enterobacter cloacae
atgaaaacgttaatcaaacacatatttcgaaaccgcctgctctcggccatcctgctgatgggggtttcaaacggcgcattcgccacctgtagctttatggacagtcgctttacaccgaatgatgccgttcagctgaatctggggtcagtgatcgttcaacgcgacacgcccgtcgggaccgtcgtctggagcgccacgaacaatactctgggcgggcggaataatttcatcgaatgcaacgccacgggataccgtacacagtgggctgcaggttccgggtatgcgccggtagcctatagcggccagacgctgtaccagtccggcgtcccgggtctggctttcaggatcgtcactccaggggcaggaacgaccagcggccggtatggaaccggccctcttccccgtcaaatttccaacgtcccctgcaccagctcgtcgacctggtggcggttatgcgggggaacctggggaagctaccagcttcagctcgtcaaaattgcccccactaccggatcgggccccatcacgaccggcacgattacccgggcgctgatcgtcggagagaccactatttttgactatgccatcgccagcggcacggttcagacggtggcctgctcggtaaccaatcctaatattacggtcaacatgggaacggccaaaaacaccgatttccgggggacgggaagcaccagcggcaataccgattttgcgatcgcccttaactgcgatgcctccaccaatatcaatatgacgctgacagcgggaagtgcaggtgcggccgactcaacacagggcgtgctgaacctcgacaatgccggggcggcagacaacgcaaccggagtgggtgttcaggtgctctataacagcagaccggtttcactgggcacgcgcataaacgtagccagaaccacggcgaatggcacctattccataccgttgcaggcgcgctattaccagacacagtcgacggtaacaccgggaaaagcggatgctaatgccacgtttaccatgacttatcagtga

SEQ ID NO: 149950 - DNA, 2541 bp, Enterobacter cloacae
atgtccccattatcacacgctgcacaaaaacgtccggagtttcggccatcccttatggccgtgctagtcgccctccttctgccttccgttcacgctgaagccagggactactttaatcctgcgcttttacagcagacaggtacaggcggcaccgtacctgatctgtcggcttttgagaatggcgggcagttaccgggtcgttaccctgttgatatctatcttaatgacgaacaggtagacagcagagaggtcacctttttccagacctccgagaacggccttcagccgtgcctggatgcggaaaccctggcgggatatggcgttcgtacagagttatttccgggattacagcctgaaggcgagcagtgcgtggatttttcagcgattccggacagcgcagctgtcttcgtattcggcgcacatcgtctgaacatttcgatcccgcaggcggcggttaacccgcgcattcgtggctatgtttcacccacgcagtgggatgacggtattaacgccgcacttctgcattacagcttcagcggcgtgagccctctgaccggcgagggcagcagtcagtatctcaatctgcgtccgggtctgaatctgggtgcctggcgttttcgtaactacaccacctggaaccgccccgccagcagtgatagtggcggcgacaagtggaacaccgtctatacctatgctcagcgcagcatcgttccgctgaaaagccagttaacgctgggggacagcctgtccccgtctgacgtgtttgacagcgtgcctttcagaggtgcgcagctggcatctgatgacgaaatgatccccgacagtcagcgcggctacgcgccggtcgtgcgcggcattgcacgcggtaacagtgcacaagtcaccattcgccagaacggttacgtcatttaccagacaaccgtaccggccggggcattcgaaatcacggatatgtaccctaccggcggcagcggcgatttgtacgtcaccattaaagaggccgacggcagtgagcagtcgatggtcgtgccttacgcctctcttcctgtcctccagcgtgagggcagactgcagttcagcctgacggccggtcagtatcgtgcctatgacagcagtattgaaaaaacgcccttttcacagggaacccttctgtacggcgtgggtaaagggatgacgttatatggcggcgcacagctggcacaaccttatcgcgctttcgcggcgggcgtgggtcagaacctgggggggctaggggcgttatcggtagacgttacgcaggcgtggagtacgccacaaaacgataaagaacaacagggacaatcctggcgtctgcgttacagcaaaagtctggcggaaacgggaacccaccttgcggttgcagggtatcgctattccaccgaggggttttacgatctggctgatgtcctggaaagctatcgcgataaaccctcttccatgcgcaccgaacgcaagcgtaatcgcgcggaactgaccctgagccaggatttaggcggcgaacgcggttatctgtccgttggggcaatcagtgaagactactgggataaccgtcgtaaaacgacctcgtggaatatgagttacaacaacagctggaacggcatcagctacagccttaactacgccatgaatcgtaacactgcgggcgggggtcaatacacaggtggaaaaaacagcgaacgcgatgatgtcctgtccctcaacctgagcattcctctggataagtggctgggtaaatcctttgccagctacaacgtcagcagcagtcccgcacgagggaccgtcaataccgtgggacttaacggtacggcactggaggataacagccttaactggaacctgacgcaaagccatgcatcgcaggagcagtctaacagcggctacgggagcgttaactatcggggaacttatggcgaggtgaatggtgcctacagccagagcgccggtcagcgcaatctcagctacggcctccagggcagtattgtcgctcacgccgggggcataaccgccggtcaacccatgggcgaaacgtttgggctggtcaaagtgccgggcgcatcgaacgtagctatccagaatcaaaccggtatcagaacggattatcgcggttatgccctcgtaccaaacctgatgccgtaccgccgcaatgacgtcacgctgaacacgtcaacgctggatgaggatgtcgatctgaaacaaaccagccgtagcgtcgttccgacccggggagcgctggtgcgggcagaataccgagcgcaggtagggcagcgcgtgatgatgacgcttatccgctctgacggcaaaccggtgccctttggcgcaaccgttgtgaacgacgccgatccggatgccggcagcagtattgtcggcgatggtggacaggtgtacctcgccggcctgtcttctgaaggcacgctgaaggtgcagtggggaaatgacgcgcagcgtcaatgtcgggtgtcctatcgcctgagtaaaccgaaaacgggcgaaagcatcccggtcatccagggacagtgtcgctga

SEQ ID NO: 149951 - DNA, 684 bp, Enterobacter cloacae
gtgacattcaaactctcatccttactggttgcgggcatgctcatcgggtgcgaaatggctcacgccggcgtagtcgtgggcggcacgcgcattatctatgatggtgacaaaaaagaggcgtcaatcagcgtagacaatcccgacgccaccccttatctcattcagtcctggatagaaaatgaacgcggtcagagcgataaacagagctttatcgtgacgcctccgctttttcgcctggatggaagccagaaaaataccctgcgtattctgaaaatggccccaaatttcgctgcagatcgggagacgatgttctggatgaatattaaatccatccccgcagccgatcccagccgttcggacaatacccttcaactggccgtcaatacgcgcctgaagttgatttatcgcccgtcagccctgaaggcttcctcaccggatcaggccagcaacagcctgaaatggacgcgtcagggacagcgcctgtcggtaaataacccgaccccctactacatcaactttcagtcaatcagcctgaacggacgtcagcttgagaatgtgacctacgttgcccctcgcgcaacggccttctttgaccttccgtctggtgctcagggcaatcaggtcgaatggaaggtgatcagtgattacggcgcaactggcgctgctcacaaagcctccctttaa

SEQ ID NO: 149952 - DNA, 528 bp, Enterobacter cloacae
atgaaaaagcaacttcactttatcgccatcgcgtcaatcatcagcggtgcatcactgactgccgcccacgctgctgacggcaccattcagtttaacggcgaaatcattgatgccgcctgtacggtatcggcatccagcgccaaccagacggtcaccttaggccagatcagcgaaaacgccttctcggccgcgggtgataccgccggtgcgaccgctttccagattgatctgacgagctgcccggcaagcgtgacctccgcagcggtgaaattcgacggaacgccttatcagggagacaacagcgcgctcgcactgacgccggtgaatggcgtcgcaaccggtgtcggcatccagatccgtaatgcggacaacaccgtgctgcctctgttcaccgaatctcagcgcgtcacgctttcccaggcggggaccaatacgctgaaatttaacgctgcttacgtagcaaaagccgccacagtgaccgcaggtccagcgaacgcaaccgccaccttcagcgttgtttacaactga

SEQ ID NO: 149953 - DNA, 624 bp, Enterobacter cloacae
atggctaatatcctcattgtcgacgaccatcctatggttcgtctggctatacgtatgctgctcgaaaaagataaccatatcatcattgctgaaagtggtgatgggacggacgcatttaaggtgatacagaaaataaagcccgaaatcgtggtggtcgatcttgatattcccggtttgagcggcgtggagttaatagaaaaactgcgtaaaacagaatttccgggcaggttactggtactgacgagtcgggatgatgaacattaccttaaccgatgtattcagtttggtgcggatggatttgtcggaaaagggaataatctggatgaacttcgaaatgccgtcaacgcggtagaacgcggctacgcctattttcctctgcgtcgtcaggccaaccggttacccgccagctttgtccgcgagagtgatgtgatcaaaaccctgtcaaaccgcgagcttcaggttctgcgctatgtcgcgcgcggtatgaaaatcaatgatatcgccaacaaaatgttcatcagcaacaaaaccgtcagcacctataaaacccggttgatgcacaagcttgagataacgcacaccattggattggttgattttgcgcgtcgccatcatctggactaa

SEQ ID NO: 149954 - DNA, 3315 bp, Enterobacter cloacae
ttgcgcgtcgccatcatctggactaacgcattgaaaaaatttctttttacccttggcttattgtatctggtgcttgcccctctgcgcagccttgcgctggaaccagcggatgtgcagattattagccgggagagctacgcgccaaaagaatttacgctcaccaacgatgactggcgctggttagggaaaaaacgagtgctgacgatggcggtctggcagcctgagatccctccgctgtcactgtttccggaagacggtcggctggaaggcatgattgcagactatattgcgcttcttggcgagtatctggccgtgcggatccacgtcgttgcatttgaggatcgcgattcggcttatgctgcactggcccagaaaaaggtggatatcgtggtggatccctcggcaaaggtccgtggggttcatgctgcactggtagcgtcagcgaatttcattcgggatcatcctgtcctggtccaccgaaaacaatcccctgaaaaaccgtttcactatcaacccgggatgcggttggccatcgcgcgctggtatgttgacgacagctggatagaggcccatttccccggcgccaggctgattcattttgacaccgacgatcgggccatggcctccgtggcgttcggtgaaaacgacttttatattggtaacctggtgacaggatcatatttacttgaacgccactacccgcattttctggtgcttcagcaggtctatccggaacgtgataccggaagccatttcgtcatgcgcaaggaagaccatgcgttgatacggtccgtgggacgggtgcttgattcgataccccgtacccagaaggaggtcattctgcagcagtggagtgaaggctcgtcacgctggcgcgtcagggaacaagtggcgtttaccgcagcagagaaaaagtggttagcagacaatcccacggtgccggtttccgttaatgccctctatgcccccttcaccatgattgatgcaaaggggaatttttacggggttaccgccgatattttacgtctggtccggctgcgtaccggcctgcattttgatccggttccggcggattcaatccgtcggatggaggaccagatcgccggtaaaaaggcgctcttcatgggcgcggtcagccagagcgaggaacgaacgaagcagctgcggttttcccgaccctattttacgtcgccatttgtgtgggtagaggcctcggacaaacattacaccgcagccctgccgccgggaacgcgcgtggcaatcgtgacgaaaaatgccctcatccctgaactcaggcgcacccgcccggggatcgtgctgatcgaaaccgaaaacgccgcgattgcgatgcaaaatgtcgccgatggtaaggcagacgtggcgatacatacgctgtttggggccagctatatgatcgatcgttattttcgcgatcgtctcaaaattggcggtcatataggtgatctgacagcaaaagttgcgtttgcagtttcgcgggatcagcccgaacttctgagcatccttaacaagtcactggagaatatctccccggcggatatcactcatgtgatcgataaatggcagacgcgacccgatgtcagactcaatacgtgggagctgtacagaacccgcttctggctggtttccggggtggccgggattgtcattctgacctcacttatctggatctattacctgcggcgcgaaattggcgcccgtcagctggctcagcaggatcttcagtctcagctggcctataacgaaacgctgacccgtgcgctttcagaagaaacggaacgcgccgaacaggctaaccgcgcaaaaagtacgtttctggcaaccatgagtcatgaaatacggacgccagtaagcgccatcattgggctgcttgaactgacggtcaacgccgcagataaaacatgggaagatgacgatcccgtcagggttgcctgtgaatctgcccgctccttaatggggcttatcggggatattctggatatggcccggattgaatcaggtcgacttgaattaactccgcagtgggtccgaacggcggatcttctgccgccggtggtgcgggtcttcgagggcctggcgaggcagaaagcgttacgtctgcaatatgtggtgcctccagagttgccagaggagatttttctcgatccgctgcggttcagacaggtgctctcaaacctggtgagtaacgccattaaattcaccgagaaaggttgcatcaccgttgaaatgaccctttttaacggtgaaacggcaccggcaaactatcttctgcacattagcgtttcggatacggggcgcgggatttccgcggaagagcaaaagaatatcttcgatccctgggtccaggcgagggatggtgccgtacagagtggttccgggctgggactggcgatttgcgcgcagctggtcacgatgatgggcggcagtattaccatcgcgagtgagaaaggtaagggaacgcaggtcagttttacggtgtcagtccagcagcgggacaaccccgtcagtccaacggaggcagatgtcgaaccaatagcggttcctcatcgtcctctgagcattctggcggtggacgatcatcctgcgaaccgaatgctgttacgccgccagctcatgcatcttggccaccatgtcaaggaggcgcagaatggcctggaggcctgggaattgtttcaggagacgcgatttgatgtggttattaccgattgcagtatgccggggatggatggtctggcattgacgcgtctgctgcgggaacgtgccggtgacgccttgatcatcctcgggctaacggccaatgcctggcctgaagagcgggccagatgcctcgcagccggaatggacgactgcctgttcaaacctcttccgatgtcccagctcaaaacgttgttgaatgacgtgatgaaaaacattgctgcgcccaggggggaggccgtttctctctcccgagtggtggattacccgaagctggaggcgctcagcagctttgatgagcagatgctgggagagttgctgcgggtaaccgttcaaacgaataatgacgatctgcgctatgcggcagacctggttgagctgcaggactggccggagctggccgcttgcatgcatcgtctgtcgggagccgcgaaaatttgtggcgcgagacggattgaacgggcgagtcgtgaacttgagatggcctgtctttgtccggaacaggctctggaacacctgcatgccctgtggtcagcgctttgtgacgcggtggaggagtttaaccttgctgtgggaggctggttggctgaagtggaaccctga

SEQ ID NO: 149955 - DNA, 1083 bp, Enterobacter cloacae
atgcgttattatttatttttattattaatggtttgtgtgaatgtattttcagaggaaataaaaccactgccgcagggagattcctggcgaaaatacattgctcagtcgctgcgtgatgaagaaggattacgggatggattgtttaatctgcggcggattgaagcaaataccgatattgcgtatgtctgtggcctgataaaagataaaaacgataattttctccctgacgcgcaaggtcaatatcacctttacgatcgcgtgatggtgaaagattataaagggaactgggtaagcgccgttcgctttgataaaaccattgactcactgcaggatgtgcattgccattatggcaaagacgtcccgttaacctccgcattgctggagactcagatcgcctcccagggacgcaaagatatttgccagccggtaaacgctaacgatccgctcagaggggatatcctcaatggcctgcgcgccagctatgttggcgacagcaatagcgtaacgctcaatggcccattacccacggtgaaatttattgtcaacgatctttgcgcgacgaatgattatgcctggtttttcgggaagccgacgggagaccgggccagcctctttatacatgatgatgctgataaccatctgcgggtagtattgaaaaaattcgctgatggcgtgtggcgccctatgccggaaaatagcgtgctgacgcaacaatcaaaagtgggcgacagatattatggcatgctgcgggaacgcgatttagcgcaactggcgcaggcgtgcagcgtggagggggacacggtaatggttacgggaaaactccaccagttgggttctggggaaaaagcgtactgggtagtgacgcccgaaaagccgttaacctgcgtgcgtgatgccgatgactctcaaccaggctggaaccaggcaatgcagttagcgctcactactgacgatcaagagtcgttcaaaaaactggcagggaaaaaagtaaccgtcgggggcgatgtttccctggcactgagcgctgaccatcatacgccgctggtgttggagaatctttttcgtctgactgagaataaatag

SEQ ID NO: 149956 - DNA, 969 bp, Enterobacter cloacae
atggcaaattttaagtggctcgccgcgctactctttattatcaccagtaacactgtttccgcgaatgattcggcagtgggtgaaaccaatggctcaattgaattcctgaagcaaaatgagatcagcatggcgaaagaacggctgctgattgccagcgatcgtatcaatgtcgattatgtatttatcaatcattcggcacaggatattaccgtcccggtggcctttcctatgcctgcaatcagcaaagacgccggccaggatcattcacccggcattgccaactttaagattagcgttgatggcaaaccggtcaacagtacttcccgctggcgggttatgcgcacaaatgagaattttgaagaggtggaggatgttaccgccaaagtgctgcaaagcggctggactatcccacagcttattgagctgctggtgaacgattcaccttttgagaataatgatgaacaagggaaaccccgtttaccgccagagtggttaaatgacggttacccgcacatcgccgtgcaacaatattttatctggcagcagcgtttcccggcaggaaaagagattatgattcgacattcctatacgccaagtttttccggtggcgtgccacagaacctgaccgggatccttggtgatgagtacggtgatgaatgcctgacgcctgcaacgcgtaaagcgttaaaacagcttgatgcgggaataaaagagagaaatgaagatggcagcgccaatataggctgggggatattgagttatattctgaaaaccggcgctaactggaaagatggcgtcattggcgatttcactctgcgtatccacaaaagccaggaaaatgaggtggtcgttccctgtttcagctacccgctaaaacagattgatccgttaacgatggagtttaaacagaaaaactttaaaccggataacaatctggatatccacttttattacgattccttgcgataa

SEQ ID NO: 149957 - DNA, 1017 bp, Enterobacter cloacae
atgaagagtgaaaagaaggacttacctcttaatcttgaggaagttgataaaacgtccggtgaagttgttaacctggatgtcaacagcaccagcacggttcagcccgtggcgctcatgcgtctcggcctctttgttccaaccctcaagtccacagggaaaagtaaagctaaccgcaaaaacgtcacggacgcgaccgatgaactgatccagctttccgttgcccgcagcgaagggtacaccgacgtgaagatcaccggatcccgtctggacatggataccgacttcaaggtgtggctcgggatcatccgttccatgtccgagtatggcgtcaaaaaagatacccttgagctttcctttgttgagttcgtcaaaatgtgcggcttcgattcgcgacgctcgaacaagaagatgcgcgatcgtatcagcaattcacttttcaaactcgcctccgttaccctcaaatttcagagtgagacgaaagggtggaccacccacctggtccagtcggcgttctatgatattaatgaagacgtcatcgagataaaagcagaacctaagctctttgagctctaccacatggacagacgcgttctgctgcgtctgaaggccatagatgccctccagcgtaaagaatccgcccaggcgctttacacgttcattgagagccttccacagaaccctgcgccgatttcaatgaagcgcatgcgggatcgccttaacctcacttccaacgtctacacgcagaaccataccgtgcgcaaagcgatggagcagctcaaggatataggctatctcgattacacggagttcaagcgcggccggtcctcctacttcagcgttcactaccgtaatccgaagctcatcagcagccctgctaaggtcgtgaaaaaagaagaggtcccggcaggccaggaacccgagcagaattacgaagacgtcattaaggccctgcaggcggccggtatcgatccgaagaagctcgcggatgtgcttgccagcatgaagccggaaggatga

SEQ ID NO: 149958 - DNA, 765 bp, Enterobacter cloacae
atgaggcgaattcgtcatgtctgtcaggccggaacggccgctgagcgggtgcacgccctgacgggaggggaggtgcttgcgattgcggacgatgcctctgtgggaccgcttcaggatattgatttacccgatccccgtctgcgagccgctttctgggaggccgtctttgacggtgatcctgatatggcgggtatggactggtaccgtgagctgggtgagatccggtttcagctgtcgaccctgctcagggaggctgatgagattgtgatctgggccggacatcatccgacagagcagctccttcgtcgacggatccacggatggcttcaggacaccagtatccccgtatacgaagtgccgcccggacgggatgacagacagcctgaaccgggtgaggcaaccggcgttatgccgattgccacgatcccgcctgatattcttcgtcagcgctatcaggggcgacgtcttgtctcggcggggttacaacgccagctggcgcgcgagtgggaagactggcgggagaacgggaaaggcatccgtacgctgaaaaatggcgtcctctccgaatccgccattgacagcgtcgatccggcgattttatccctgttcggacagagaccgctggcattgcaccgtggtattggtcatgcgatggcgataaccgggctgacggatgcgctgtgccgctggcgcataaacatcttgctctccgcaggcttgctgaaactggaagagggcgtgatcagcctctcctcacccgcctga

SEQ ID NO: 149959 - DNA, 591 bp, Enterobacter cloacae
gtgaaactcatttttgtgcgacatgccgaaacagaatggaaccggcacggaattatccagggccacaaggacagcccgctgacggccttaacggatgccggttatcccgtggaacgtgtctttacgtcaccccttgggcgtgcccggcacatggggcaggcgctggcgggccattttcagtgcccgctggcgatcgaggcggcactgaaagaacagtcattcggtcagtatgacggcatgacgcaggtgcgcctggcgcgtgaacaccccgatcactttctcgcgttattttcacaggatgccgcgttttgccctcccggcggcgagtcgcttgcctgtgcttctcagcgtattctccagttcgtgcacgagaaaatggcactagcaacgcatcagatggtttgtgtggtctcgcacaggcaggtcatgcagggcatgcttgcgctgctcagggacggaaacctggagcatttcaaccgcttcgcacagccgaacgccagctataccgtgctggaggggggcggagggcaggacatcaccctccgatgggggatcgccacccacctgcttaagttgcctgagatggggtga

SEQ ID NO: 149960 - DNA, 393 bp, Enterobacter cloacae
atgaacaatggaaaaagcctgtgcgtccaggcactcatccttgcctgcttttgcgcgcagggaagcgatgccgggcggctgcaacaggcgctgcgtcccttgcatccgcttgccgtcacgcgccgtcacgacaccgtgaccgtcattctcaatgaggaccgggtgaccccggcacggtatgaggaggtgatcggcaacggcgtctgcgccggtatctggcacaggcgggcaccgtcacgctatctcgcctccgtcagccaggtccaggtgctcaacaggttccatacccggggttatgttctggtggggcccggcgcgctgtgcaacaggctgcggcaggcaaccgggcagcgtgcgttgctgatattacagtcgcacacgctcctctattga

SEQ ID NO: 149961 - DNA, 720 bp, Enterobacter cloacae
atgatcacaggtccctggattaacgggtccgccgtgataatcggtggactggccggtgccattatcagcgcccgcctgcccgagcggctgcgcgtctccatgcccctgatttttggggccgcctcgctgtgcatggggatcgtgctggtcacccacgtcagccacatgccggtgatggtgctgtctgtcctgctcggcacgctgctgggcgaactctgttacctggagaaaggcatcggccatctgggcgagaaagcccgcgggctggtcgcactcgtggtcagagaagatccgggtgacgccgacgcccgggccgagtttctgcaaaaatacgtggcgctcatcgtgctcttctgcgccagtggcaccgggatttttggggccatgcatgaaggcatgacgggcgacaacagcgtgctgatcgccaaagcgtttctggatttgctcacggccctgatcttcgcgaccaccctcggctatgccgtggcgctggttgcggttccgcagctcattattcagctggtactggcctggagtgcggtgttcattctcccgctgacgaccccggaaatgcaggctgatttctcggccgtggggggtgtcctgatggtggcaaccggcctgcgcatcgccgggatcaaggtttttccggtggcgggcatgctgccttccctggtgctcgccatgccggtctcctgcttctggaccgcatatttctga

SEQ ID NO: 149962 - DNA, 633 bp, Enterobacter cloacae
atgtccagtacagcggtatcgccgccagcacgcatcatcgttggcatcagcggcgcatccgggtttggctacggcgtggcggccctgcgggcgctcagggcacttcaggtggagagccacctggtcatctcccccgccgcgcagctgaaccgccgtcatgaaaccaccctgacggaagaggcggtcgcggcgctcgcggaggtgacatatgacattgacgatgtgggggctgccattgccagcggctcatttccggtgatcggcatgctgatcgccccctgctccatgcacaccctggcggccgtggcgacaggccttggcagtaacctgctgacgcgggcggcagacgtgaccctgaaagagcgccgcaggctggtgctgatggtccgcgagacgccgctgcatgccggacacctgcgcaacatgctccaggtgacggaaagtggcggcattatttttcccccggtcccggcctggtatgcccgacccaccggctgcgaggcgattatcgcgcacagcgtggcgcgggcgctcagcctgctgggcctgccctgtcagaatctgccacgcaggggtgaaacacatcaactgataacaggagaacatgagtatgatcacaggtccctggattaa

SEQ ID NO: 149963 - DNA, 1485 bp, Enterobacter cloacae
atgccccatattcacaaggtcaccgacctgcgcagtgcgctggcgctactgagccagtacgaaaatgaactcatcgaaaccgatgaacctgtcgacccgagcgcggaactctcgggcgtctatcgctatatcggcgcacacggcacggtcatgcgccccacccgtgtcggcccggcgatgttattcaacaccattaaagggtataccgatatgcgggtgctgattggtctgctggcctcccgcaaacgcgtggcccgactgctgcacagcacgccggagaagctggcctttttactccgggacgccgtgagccatcctgtcccgccggtcgtcattccccccgaaaatgccgtctgtcaggaggtggtacacctggccaccgatccggatttcagcatactcagtatcctcccggccccgaccaatacgccggaggatgcgggcccctattttacgctggggatgtgctatgccgccgatccgcaaaccggtgaacacgacatcactatccaccgcctctgcgtgcagggccgggacgagatttccatgtacttcgtcccgggacgccatctggatacgttccgtcagaaggcagagaatgccgggctgcccctgcccatttccattagtatcggggtggatccggccatcgaaatcggtgcctgttttgaaccgcccaccaccccgatcggctatgacgagctctcggtggcgggcagcctgcgccagcagcccgtggagctggtggactgtctgaccgtgaaggcacgcgcgattgccagtgccgaggtggtgatcgagggcgaactgctcccggactaccgggtcagggaagatcagcataccaacagcgggaaggccatgccggaattcccggggtataccggcaaggcgcagccgcgggtgccggttatcaaagtcaaagccatcacccaccgccgccatccgatcctgcagacgtgcatcggccccagcgacgagcacaccaacatggcggggatccccaccgaagccagtattctgcagctggttgaacgggccctgcccggctttgtcctgaacgtgcactgcccttcgtccggcaccggcaaatacctggcggtcatccaggtgcacaaacgtcaggccagcgatgagggccgtcagcggcaggccgccctgctggccttctcagccttttccgagctcaagcatgtgatgctggtggacgaggatgtggacattttcgatctcagcgatgtgatctgggccatgaccacacgctaccagggcgatgtcagcaccgtctttattccgggtgtccgctgtcaccctctggatccgtcttccgacccggccttcagctattcggttcgcgaccacggcattgcctgtaaaaccatttttgactgcacggtgcccttcagcatgaaagacgcctttcgccgcagcgcgtttatggacgtggatatccggcgtttcctgcccgacggtgaacggcgttaa

SEQ ID NO: 149964 - DNA, 975 bp, Enterobacter cloacae
atgaacggtcaggaggaaaggggggactatcggtatctgcacgcgttcgtggtgctggccggagagctgcatttcggcaacgccgcacgacgactccatatcacacagccggcattaagccgccagatccgggtgctggaaacgcacctcggcatgccgctgtttatccgtgaccggcgccatgtggtcctgagcacggagggaaggcgtctggctgaggccgcccggatctccgtcagccactacgagaagctgatgtcgcgggcacgcagcctgcgggaagggtttagcggtcagctcaagctggggtatgtgggctcggcgatcctcgacccggcgctgacgtgcctgaccagcgggtaccgcaggacccaccccgatgtggagattgtcattgaggagcataacgtcagcgatcagctcaccctgctgctcgatcatgagctggacgcggggctgatccgctctcccgtgccgcgttatgctggcctgaactacctcaatattgccacccggccactgatcgcggccgtgcctcatacccatccgcaggctggcgttgggcgcattgcgctggcgtcactggacggagacactttcatggtacagcaggacccgcccggcgtggggctcggctggtctgtcttacacgcctgcaatcaggcccgttttgtcccgcaaaaaattcactatacccgggatgtggcggtggccatcggtatggtatccttggggatcggggtcaccctcgtaccggaaacacagcgctccgtcacgctgccgaatgtctgttattgttcccttgaggataccggggcggtaacgaccctgacgctgtgctggccaaaatcccgcaaaagccgcgagctggtggagtttgttcgctatatcacccccgatgtacttgccgcgatgacgccgccaccggcggcggcccgttccgctctcggcggtttttctcaccccgcgaagtga

SEQ ID NO: 149965 - DNA, 204 bp, Enterobacter cloacae
atgatgatacaccgtagcctttatgccggtctcctgctggcatgctcacagtttactgcggcgcagaccgtgcctcagggcggcgttctgcctgccgccaacactcgtcctcattttcaggtccggaatgcggacacggctgagttgcccgatgaaaaaatccagccgcatgtcgccatccccccctctcacttcgcggggtga

SEQ ID NO: 149966 - DNA, 234 bp, Enterobacter cloacae
atgccatacattcagagaacaagggggagaaagggggcctgcgaagatctccgcttctccgttgtcacagagagcgtctccctgcgtcaaatgccagacaccgtgaatggtctgtcctgtctcaagatcgtcagtcgtaccgtggcggtaataagccacctgcaccacgccgttatgctggatccagtagaagtcctcttacatttttccctcctctctatgctgaggaaatga

SEQ ID NO: 149967 - DNA, 288 bp, Enterobacter cloacae
ttgtatagctatcaggatattgaaagcattaaggccagcctggtgtggtttgtgcatcaagcctccccggcccgacaagaccagaaagtcatctacagccttcccgagctcattcagacgtatgacctgctgctggctttaatccttcagcacggcgtttccgtcatcgatggcgacatggcccggggtctggccgaaacaaaaacgttcattgcaaaagttaagcggaatgcagggtcaatgtcgaaatacgtcccccgcggcccgatattgactcagttccggtaa

SEQ ID NO: 149968 - DNA, 393 bp, Enterobacter cloacae
atgtcattaacgcagggtgtacaacatatcggactggcggtatcaaaccttgaagagagcgcggcattcttcacgggtttactgggctggcaggaagtcaaacgtcgcgaagactatccggccattttcgtaaaagatggcgccctgacgctcacgctctggaaaacgcagacagaacagcccgttcagttcgatcgcaaaaataacgtcgggctccatcacctcgctttgcgggtggaaaccagagagggcctgtaccggatccttgaagtgttgaaggcaaatcaggtcgaaattgaattcgagcccaccgtgatccgcaaggggcccgtgatgcacatgatgtgctatgagccgagtggaatacgcattgaattttattacccgggttga

SEQ ID NO: 149969 - DNA, 915 bp, Enterobacter cloacae
atgacgtcttcatttccggggttatccacgggcgataatccgccatcacaggtgcactaccgctacaagcaggccggtgacgtaaacgttttttaccgtgaggccagcgatccggcatcacccgttctgctgatgttgcacggttttgcaggctcatcatttatgttccgtgaacttatcggccagctggccgatcgttatcgcctcatagcgccggatttgccgggattcgggtttaccgaagcaccgggccgggatgcgtacgcttatacctttaaccagctggctgagaccatcgacgcgttcacagacgcgctgggcctcaacgcttatgccctgatggttcacgactacggagcccccgtcggatggcgttttgcgctggcgcatcctgagcggatcactgccatcatttctcagaatggcaacgcttacgaagaggggctgggagacgcctgggcaccgatccagaaatactgggccgacccgacgcccgaaaaccggcgcgcgctgagcgattttccgacgccggcgtcaatcaggtggcagtatctggagggagtcaccgatccgagccgggtctccccggacggttataccctcgaagggatgcaggtattgcgcgcaggtaacacggagatccagctggatttactgctgaattacgcctcgaacgtgacaatgtacccgctgtttcagcagtatttcagggaatatcagccgccgctgctggcggtctggggaaagcacgatccgtttttcatggccgcaggtgccgaagcctggaagcgcgatatcccgaaagccgaaatacacttctataacaccggccattttgcgcttgaaacacatgcgaaagagataggtgatgatgtccgggcatttcttgactgcactgtccgtcaggcaggctga

SEQ ID NO: 149970 - DNA, 579 bp, Enterobacter cloacae
atggaaatcaaccctctttcttccccgccgctctttctggccgacaatctcgcgctggacttcatcaacagtgaatacgggacaggcgatgaccggcatgactgctttgaggacgcccgaagcgttatcgactggctaaaaacggcgggccttgtgccgaatgaaaccgtggcgccgccggcgctgctgggggaggcccgtcagctacgcgatgcggccagggccgtcgtgtatgcggcgatgaagtccagggaggcagacctgacggtgattaacagtgtcctcgtcagagggcatcctgacacgcggctggaatgggatcacggcacacagcactattgtgtggatgttcgctccgtcgctgacagcccggccggccttctctggcccattgccgacgcgctggtaaaactggtcacggatgagaaattcgaatacgtacgggagtgtgaagcccacaactgcattttactttttcacgatttgagtaaatcccaccgccggcgctggtgcagtatggccacctgcggtaaccgtatgaaagtggctgcattccgtaacagaaaagcgtcatcgtaa

SEQ ID NO: 149971 - DNA, 555 bp, Enterobacter cloacae
atgcatggcatcgggcaaatcagaagcgaacactactacgatccggttaagcttgcacttgcaacgggcatacaatcgcccatcccctttatgatttcacgtctgcttgatgagctgaaaaacgtcacagatactgacccgcttgccgatattcagcctgcacatggtttccatttcaccttccttccgcgctataagatcaacgagccgttgcctgagaacgtggagcaacagcaaaaactctggcatgaatttcacgggagaaagattgttatcagacgtttacgtttagtggctttgcccagtcagtcattgctggcggggttcccgggtgagccggcgatggccctgtgtcagtcattctgcgagaaatttcttaaaacgccccggagacaggcgttgctgttacgtcataaccacagacccttacccgcccgttctggcacagcacgcttctgcgttaccgtgcggcttttttacctgcagccgtgcgtcaattttttatcgaacgtcaggattgcagttttggcgaggtggccggagaaatggcgttag

SEQ ID NO: 149972 - DNA, 648 bp, Enterobacter cloacae
atgcttattactcccgacacgctgaagattacctgtttcaataaggatatcgttgttcttgatcttctcaaggatgaatatactgtgctcgaaaatacagcagacagtttcctgacatttcagatttcaagtcccgatgttgaagcctttctgaagggtgagaaaaattgccgttatcttcaggcggacagccataatgatcctgaatcatttctggacgttcgctggttgaaacctcgggtgagaataaagcacagttctgcgcttgcccgaatatcggcgctcagggctatgttacactgcaggcgcgccctcaatcgcggaggactgatgatgctaaagcgtcagttttctgaaagtcagaccaccgggtatgagaccaaaattacacccgacgtggatatcagaataaaaaaggaaattgcagcactcaacagtgtgtttgatctgattgaccatgagaacccctgtctggtgtattcctgcgcactgaagcaacgtctgatttcaagaaaaataggcgcaacacttgttataggtgtcagaacacggccattctacagccacgcatgggtggaggttggcagcaccgtggtcagcgatgatcccgacctgagaaagaaaacgagcgtcatactggagtgctga

SEQ ID NO: 149973 - DNA, 537 bp, Enterobacter cloacae
atgttgatcgttcctgccatgatatccacacctgtcgctgttccgacaccctttacgacgctaagaacacgtcactatcacctataccttgatgccggctggtcataccgcgaggatgacagcacgttatctatcttcagtggctgggcgataaccggggacggtgaaacgctttcactgtctgaaaccgcccctaacgtcctggagagagagcttaaatcagcagatggctatttctgttttatcgtcattgaaaatgacgttatccgggtgatgaaaagcctttaccggtactgtgacatttattatgcaaaaacagcgtccggaaccgttatcggtaccggacttaaggatgtggccagaatctctggttcgaaaaccgttacccgtgattttatcaggacgtttatgggtgacagttttcaggccgcattcctttcacccctttacaacaccggtaaagcgtattccggatgcctgacgcggattgaccgggaaaatatcgaaacagaagctttgtcactctgtcaccgctaa

SEQ ID NO: 149974 - DNA, 729 bp, Enterobacter cloacae
atgtccggctggttctgtctggacgggcacggtggtgacagcgtatttattcagtcgccatccgtcaggatcgttcgtgaccttatccgggtcggaaaacccggtcaggcactacgaacggcgttcagactcgcagcgctgaaatcccgatccctgcattccgttctggcttcagcctacagaacggaacccggaaaaagcaaacgtgcacatcctttacttgccggatataccccggggacggcatggtatgaatatctggaagaactcatcaggatcagtgaaagtacgacatgcatttttcctgacgggcagccagtgaaattttccccccttatcagcctcagtgttatccgtagccgtcttgccgttcgatacgaagataatatccgtgccgggcatgaccgtgccgggatcagacgagaggcgctaacccgtttcagggaccctgtatttacaaagaaaacgaaacgttcatcttcccagctcatattcactcttatcaggcagtatgaagatgaacttatcgcctttgtcgtacggcacggcacccatattctggataatcctgaggccatgattgaggaaataagatacaacacccatattgaactgaatggtactcttcccgaaattttatccctcatcaaactaatggtatttagtcagaaaatggaagctgattttttcgacgcggagtcaaggcatgaatattttgagtttatttaa

SEQ ID NO: 149975 - DNA, 1740 bp, Enterobacter cloacae
atgaatattttgagtttatttaaaacgctatccagagcaaccggatcacgacaggtcgggaaaatagccttcattattttcttatcgttactgtctgcagtactggtaatcatctcacctgtactgatatcccggacgaccggttatctgatgagtgacacaactgacagttttcgtgttatttttacgctgggtgcagtttatgtctttgccatttcagctcagaagatgattgctttctgggcgacctatctgcagtcagcgttgagggtcgaatgtattgcttccatttcagcgttttttctgaaaaaactgtattacagcggttctcaaaaagataacgccggaggaatcagtcaacagcttaatcaggcaaccaatgatatatatattattatccgtgaactgacatttggcctgctgccgcctctgctccagctatttattgccctgtggacaatattagcatccgatgatgtgattgttgcatgtatgtttttgatgtttgccttatccttcgtttttaccaattatgtctacacccataaaattgtggccgccagacaggccctgatggacagctcaagaaaaacatacacacttctctcggacagtgtcagaaatatccctgtcgtccgggtttttaatggctttggtgtattcatgaagcgttttaatgggcagctgacggaggatgccagaacacagcgcaccttctggaaggttagtttccatgcgcagctcgtatcagcgctgctgcaaatactcttttttggctcagcgttcttttatacgctctacggggccagtacggggcaggtcaccattgagcacttcatccttgtctcctcctatattcttattctttctgcaccgcttgagaaccttgggcagtcctatattaatttccgacagtcggcccatgcgttttccgccttttcagggggatggctggaagaatctgtttaccgtgatatcaatctgtgcaaaccccaaaatggggacatcacgctgagtggggtcagtttccgttatccggaaagcccgttatataccttgcatgacgtaaacctgcacttcagaaccggtgaatttatcaccattaccggtaaaagtggctcgggcaaatccacgcttcttaaaatcctggcacgccagctcccgctcaccaccggtaagtacgctctgggaggatgccctactgaggaacttcccgagccgttattttatgaaaatatcgcctatgtctctcaggaagaatatgtctttatggacagcgtggcctacaacctgcagattgccaatcccgatgccacgcgtgaggagatggtaaacgcgctggcgaaatctggccttcagatcggccatcttcagggggaagcgttgctcgatctcgatctggcgaacgaagggacaaatatatccggaggacagagacaacgactttcccttgcccgtcttttcctgcgcaatccggccgtcattctgctggatgagattacctcgtctctggatctcatctccgaaacccatgccatcaatgcgatcctctctgcttttccgacggcgaccatcatcagtatcagtcaccgtatcagcacctttaattattcggatcgtatcattgtgatgcataacggcaggatcagtgacgccgggccgctgaatgaattactgcaacgcaacgacttcatcgcgcagctacaccggtctgcagagtcctccgcgataaaggcatga

SEQ ID NO: 149976 - DNA, 504 bp, Enterobacter cloacae
atgtcgaccattaacaatggtcaggtcgatgccgccatccggtacggaacgggtcattatcgggacgcggcatctgagcgcatgcttgatgaaacggtcaccccggtttgcagcccgggttatcttgacgcacataatggcctgaaagaaattcacgcgctttcggactgcgtccttcttcatgaagacaggatgctggcaaactgggaggcctggtttgccatgaccggcgaaaaacacttccgccaccagcagggaccgttatggatgctcggcagcatggcgactgaagccgctattcgtggcgaaggcgtggcgctgggacggagtgccctgattgccgatgatgtggccgcaagacgacttgttgtgccgtttccgcagtacaaactgcaggctgagcggggatacgatttggtttaccgttcaggccatcaggatgcattcaaaatacgcatgctcagacagtggctttctgaagaaatgcgcgtgctgaaaggatga

SEQ ID NO: 149977 - DNA, 414 bp, Enterobacter cloacae
atgatgttcgaccgcctccccccactgcagactcttcgcgcttttgaagccactggccgtctctccagcatgacgctggcggcagcggagctgcacgttacgcacggcgcgataagccggcaaatccggaagctcgaagagcatctgggcgtaaagctatttatcagactgacacgccagattatcctgacggaggaaggggctgattttcaccatgcgattacccgtattctgggtgacatcacgcgggaatccgagcgtctgcggggacctgattcggccagacggttgcggatcagtaccagcgtttcctttgccagtaagtggcttgcaccgcgtctgagtcggttcagacagcaatacccggaatttgatatttatctggatgtgactgacgttaatgtcgaccattaa

SEQ ID NO: 149978 - DNA, 612 bp, Enterobacter cloacae
atgtcgtttcatacctgggcgttatttttcttcacctctgcgggcatatcgctttttcccgggcccaataatcttctggttctgacgcatggcgcgatgcacggaacccgaaagacgctggcgaccatcctggggggactgatcggttttgcgctgttgatcggattctgcatgtttggcattggcgctctgcttgaggcatcggagaaatggctgttcatattgcgtatcgccggggtaggctatctggtttatctgggatataaactgtggcgtgctccgccggtacatgccgggccagaacccggttctcaggttgtttgcaggttacatatgttccggcagggttttatatccgcagcgaccaacccgaaggcgttactttttttcaccgcggtccttcccccgttcatcacgccggaaagaagtctcgtggttcagtttgtcgtcattgcgctcacctatgcgtttaccgagttttgcgcagagtacgcctgtgctaccgccgcaaacaggattcgcccctggcttgcgcggaccgggcgacggtttaaccgcgtctgtggttgtgtcttcattgccgcaggggcagcgatacaactcaggggttaa

SEQ ID NO: 149979 - DNA, 336 bp, Enterobacter cloacae
atggaaagtttgtttgtttacgggacgctgggcccgggaagaccgaatgctcatattcttgaggcgatcgggggaacatggctggaagggagcgttggagggacgttagtgaacagaggctggggagccggggtcgggtatccggggatcgtactggatggatccggtcatcgtgtacagggttacctttttttgtcagagcacttacatgcgcactggcacgcactcgatgcgtttgaaggcgcagaatacgcgcgggttccggtagacgtcaccacctccggcggacagacagtgcgttcctgtatctatatgctcagcgaccagaagcggtaa

SEQ ID NO: 149980 - DNA, 810 bp, Enterobacter cloacae
atgtttccaggcacgacccgacgtcagatcatcctgaccggactgacgacgcttctcagcagcacgctgctcaacccggtctcatacgcctgctcgccctctccgctgaagacccgcccccggagtacgcgtaaaccccgggtgatgatagatccggggcacggcggaaaagaccccggagccatcggatacgggggcacagaagagaagcacgtcgttctcgacacggcaaaataccttcaggcaatgctgaccatgaatgatgtggatgcccgcctgacgcggatggacgatatctttgttcccctgtatgaacgggtgctgatggcgcatcagcacggggcggacctgctggtgtctctgcatgcggatgggtttaccagcccaaacgtgcagggtgcttccgtttttgccctctcgacccgcggcgcgacgagtgcgatggccagctatctgtcagagagtgaaaacgcagccgatatcgtcccgggagaaaactcacgcgccaaagaccggtatctgcaggaggcagtcttcgatcccgaacagacggaaaccatacgggaaagtctggcactggggaggcaattgattgaccacattgccccggtccacactctgcacacccggcaaacggaacaggccgcgttcagtgtactgaagtcgccctttattccttccgtcctggtcgaaatggcgttcatcacccatcctgaggacgaaaaacggctcagcacctcgtcattccggtaccggatggccggtgcaatagccgaagggataatgggttacctgaacagtaaaaaatga

SEQ ID NO: 149981 - DNA, 1302 bp, Enterobacter cloacae
atgtttaaaaaaggaaacaacaaaatgaagaaatttattcccacggcgatagccgcctcactcagctttattatcagcggttctgttatggcgcaggatagccattctctgcaggccgcaccgggttataccgccacacaaaccaagggggcaaccctctggagcgataatgacaacgcgatcggcgtgctgggttcgctacgtctgttcggaaagaccgattctgcgcacacgcagcaacacgatattcagaacaacgattcccgactggggatcgccatgcggcataacctgagggccggtgagagcgatacctttgcgctgggatactacgaaacgggcattcacggactggattcctcaacggatggcctcagcaacaacgtctatacccgtcaggcttacgccggggtgggcagcgaaaccctgggtatcctcacgtttggtaaacagtatgcgccgacggactgggggctgggggtggataccacctatgcctggggcggcaaaggaaaacacgatcaggccggcatgtcgacggatatcgtcaattcagcgggcatctggtactacacggacgatcatcttaccgtgggggtcatggcgcaggggaatgacaacgtcgacaagattggttttgccgactacggaaacgggcccgacctgcacaatgcctttcgtgacggcgccgcacaggttcacaacggcgcggcgatggctgcccgctatcagtgggagaatggcctggcgttgtccacggcagcggcttacaaccactatacggtgaatagcggcctcagtcagggctgcacgccttttggctcggacagtcactgttatccctggaccgcaacgaacgggcagccctatgacgggaacacctattccctggggatgaatgccaaatacacgacaaacgtgggggatcacgcctggtacaacggtgcccaggccacgtggtacgtgaataaagtggataacgtcacctcagcgacccgggggcagtatcgtcataatcctttgcgggcagacgaccaggagaccatcctgggtctcgaatacgattcccggctccagttaacggacaactggagtgtctacaccgatgtcagctggctgcgcggaggcgatgccatggaaggacaacatcttgaatcgaccgtgctgggaaccgattactggctgggtaaaaatgcggtcacctacgtggaatacagctatcagaaagcctggggcaacgccaatgacgactggaatattgacgatcatctgggcgcggtagggcttcgcgtctttatttag

SEQ ID NO: 149982 - DNA, 1386 bp, Enterobacter cloacae
gtgggcgggttactggatacagacactaaaccggtcagcatgattgccgtgctggcggtctcgctcagtacggtcattgccatgctggacagcacgattgcgaatgtggcgctcccccttattgcaaaagatttttcggtgtccgaatccgcgtcgattctgatcatcaatgcctatcagttcgccgtgattgcgacactccttcctttttcagccctggggagaacgctgggtaatacgcggatctttatggtgggtgttatcctgtttgcgctgtcctcactggggtgttccttgtcgacctccctgaatatgctgacgctttttcgcatcattcaggggctcggcgcggcagccatactgagtgtgaacgctgctctgatcaaagcgatttatccgccaagactccttggcagggggctgggcatcaacgtcatggtcgtctcggtttcggctgccgcggggccgtctgtagcttccagcatcctgtcgctggctaactggaactggctctttacgatcaatattccggtggcctgtctttcactcattttaggttgcttcacattaagatcggcgcactgtgcagcaaaaccctttgacagcggcggtgcctgtctggtcttcctgacctgcctgtcgttcgcatgcctgacgctgagcgtgacaggcaaccatgtatcgtttgcggcggccagttttattgtcctcctgtttctgggaagacaactccttatcaatcagaagacgaagcaggcgcaagccatgatccccatggcaatgttcgccagcccggttttctcgctttctctgtctatgtccctgctttcctacagcacgcaactgctggcctatgtcgcgctgcctttttattttcataacgtcctgcaccgtgacattgtgcaggccggcctgatgctgacggcctggccgctggccaccatgatgacctcactgattgccggcgagctctgtacacgatttggcgccgagcgggtagcaatagcaggcctggggatgctggtcaccggcatgcttctgatgacgtggctccctccttcgccatcggacgagcagatcctgtggcgcgtggtcctttgcgggtttggttttggtctgttccagtcccccaataatttgctgattatgacctcggtcagccctgagcaaaacaatatagcaagtggcctgctgggaacgtcccgtctggccgggcaaatcatcggttcagccctggttgccgtcatgttcaatgtcttcgggggaggggccattcgtgccagcatggcggccggcgccctgttctctcttttatcactgggggggcagctgtctgcggctcaggcaggcgcacgtcagaaaatgcgcctccgtacccgacgatga

SEQ ID NO: 149983 - DNA, 1032 bp, Enterobacter cloacae
atgctgaaagttctgcacgtcctgtacacgctgttgctggccctgtgcctgtttccggtggtggttcatgctgcgatggatgagcccatcagacatcatcgaatcattattactggcaactgcccgttcggtgtgatcctcgccaatccgctggcttaccgtcaggttgtcggggtgggcccctgggcattcctgcatgctgatatgaacgttctgaaggacatgaagcctgacatcggacggatcaccacgcattttatcaacgacgattattccgttaacctggaaacattactgacgcttcatccggatctgattttctattacggacaaagccagaatgaccacctggaacgcgcgggggtaccggtcatcaatctggatactggcggcagtgccaaatacgatcccgaagcgacgcagagctactgggaaaccacgtttgaggatgcgcttggactgccccggaccgacaaatttcatcgggcgtgggagacgacccgtaaagccatccagccctatgccgaccggatacgtcagcagcacgtcagagcattatacctcgaacaaagtgacggtaagaccctgcgtgtgagtggtccccatacgttcggcgacacctacctcaatatggccggcatggagaatgttgccggacaccttcaggtcagcggtgatgccggtcggtacattacggtctcgatggagcagatcatggcgtggaacccggatgtgatttttgttgtgtttggaagtgcccgggccctgctcgataaccgcaatcccggacagatgtggcaggggacacgcgcctggaaaaacaagcggatctactcaacgccggtgggattacacaactggggcggattgtctgctgaaacgcccctgcttcccttgtttatggtcagcaagctggaaccggactttgtgagcgatgcggatatgagaggcctgacgagggcgtattacaaaaccatgtttgactacgcgatcccggatcggctgttgaatgaagtcctcagccagcgttaa

SEQ ID NO: 149984 - DNA, 1011 bp, Enterobacter cloacae
atgccggaacaaaaaacctaccgtcagctgctggtcctgttgtgtgtcagcctgtttctcatgagcctggcctcgttgtttatcggccgatattctctgtcggtgcaggatgtggtgcatatcctgctgggggcaccccacgcggagtacagcaaagaaaaagcggcggtgattttcgatctgcgcctgccgcgtatcctcgctgccgtgatggtgggggcaggactgtctgtcgcgggcgcgacgtatcaggccgtgctgaaaaatgccctggccagcccggatgtgctcggcacctcctcggcgtcagctttcggcgcagcgctggggatcgtgatggggttgtcttatcaggtttccacgggatgtgcctttatcttcgggatgctgagcctcgctctggtgttcggcctctgctttctccgacaaagccaggaggcgatcgtgacgatcctctcgggtcttatcgtcgcctcagtatttgtcgcttttgtctctgttctgaaatatctggccgatccggaggataccctgcccgccatcgtattctggctgatgggcagtttttcctcgctgatcaaaacagaagtgttcagccttatcccgctttttatgttctgctattacgttatttacaggctacggtggacgatgaacattctttctctgggtgacgatgaggcgaaaattcagggcttacatccgctgttactgaagataatactgctggtctcagcctctgtgatgatatcggcgtccgtcgttatctgtggcgtggtgggatgggtgggactggtgatcccccatcttgtcagagccctggtcggaaacaatcatggaaagctgatccccgttacggcgttatgcggtgcgctcttcttgcttgtgattgacacacttgcccgcgcgctcacctatgcggaaattcccgtcggtattctgtccgccctgacaggggcaccgttatttgcatttttgtatgtcagaggagcctcccatgatcatcgctga

SEQ ID NO: 149985 - DNA, 723 bp, Enterobacter cloacae
atgatcatcgctgagaacctgacctatggctttaagggtcaacggccggttttcgagaatctcagcttccggctgaggcagggagaagtgctgtgtgttcttggccccaacggtgcagggaaaaccaccttgctcaaagttattgccgggatcctccgtccgctttcaggacgttgcatcattgagcgccctgaccacaaaaaggtctgcctggcctgggtaccacagacacgacatatcccctttgactattccatagcggattttattacgtttggtctgggaggggataaaggttatctgaggaggcccacatctgatgattatgcccgggctgcagctgtgctggtcagtttaggtgcctggcatctgagagacaagcatgtcaatcagatcagcggtggcgagcttcagctttgtgctatcgcgaaggcacttgccccggaccccgatgtgcttattctggacgaaccggagtccagtctcgatttcacatatcagcatcgcatcatcagtctgctacatgaccttgcaaagaaggagcagaagaccatcatcatgaacacccactttatcagtcatgccagtcaggtggccgaccagtgtttactgctccggccgggatgctatgcctgcggcccggcagaccacatgctcagtgagattcagcttagccactatttcggggtatccattcgcaccgcgaccggtccagtctcctga

SEQ ID NO: 149986 - DNA, 270 bp, Enterobacter cloacae
atgagcacactcgcaatttacagcccaaaacaattagcgaatcacctcaaattaacccgccagaaacatggatatactcaagctgaactggccgcaagaatcggcatcaagcagggtacgatttcaaattttgaaaataatcctgataaaacaacggttaaaacattttttaaactgattcaggcgcttgaaatgtctctggtgctctatgaaaagcacgaaatgcggaatggggatcctcattcccgccagaaggaggtggactggtaa

SEQ ID NO: 149987 - DNA, 1305 bp, Enterobacter cloacae
atgcctgtgctcacaacatggatgaataatgagcgggtcggagagctcacgaaactcgcgaacggggcgcatacattcagatatgaccgggaatggctatacaaccgctatgccaggcccatatctctgtctcttcccttacagtttggcacgataacttccgatgcagtcattaattatttcgataatctgctccccgataatcctgctatccgggaccgcatcgtaagacgctatcagacatcatccaggcagccgttcgatttgttagccgagatcgggcgtgacagcgtcggggccgtcacattgcttcctcagggagaacacactccggcgccggtgatgtcatgggagagattgaatgagacccggcttgaagaaattctgagttcgtatcagtccgatattcccctcggtatgattaacggggaggacgattttcgcatatccgttgcaggcgcacaggaaaaaaccgcccttctcaaaatcgacagggagtggtgtattccgagggggatcaccccaaccagccatatcatcaaattaccgattggtgaaatacaccagcccagcgcgaccctcgatctgagtgaaagcgttgataatgagtatttttgtctcgcgttagccacggcgctgggcattgacgttccggatgccgaaatcatcaatgcaggccgtgtaagagcattagccgttgagcgttttgatcggcggtggaacagagaacactcgatgttattacgtcttccccaggaggatatgtgtcaggtgttcggtctgccttcctcggttaagtatgaatctgatggtggtccagggatccctgagataatggcgttcctgcttggctcgagtaatgcactcgaggaccgttttaattttatgaaatttcaggttttccagtggttgcttggtgcgactgacgggcatgccaagaatttttctgttttcattgaggcaggtggaagttaccggctaaccccgttttacgacattatctctgcgttccccgtgctgggtggacgaggtttgcatattggcgatctcaaacttgcaatgagcctcaaagcaaccaggggacggaagtatgaaatcaaccagatctacccccgacacttcttcgccttagcggatgaagtgaacttccggaaaagtgaaatggatgagatcctggacttcttcgctaagaacgtgcctgcggctttacagagggtatcagaatctttgcccgacggtttttcagttgaggttgttgagtcgattacccggtctatgactaagctacatgcacggctggtttaa

SEQ ID NO: 149988 - DNA, 957 bp, Enterobacter cloacae
atgacgatgaacctgcatacccaaacaaccgcccctgttgccgcacaggcgaccagcgtatccccgctggagccgtcaggttccccaaaaacgaaattgtataaaggcaaaaccagatcaaaaacggacgtgtaccagactgtaaccaacggcattatcgaggccctggaaaggggggttaagccgtgggtctgtccgtggaagcgtaacggcgcgatgtcgggtattccgtcaaatttcagtaccggcaaggcctataccgggatgaatattatgttgctgtggtgcagtgcggcaaaacatggctttcaggatccacgctggctgacttaccatcaggccacagaacagggcgcacgggttcgtaagggtgaaaccggcacaaccggcattttttataagacgctggagaaagaaaacgacgccggagagctggaacggatcccgatgctgaaaaccttcaccgtgttcaacatcgagcagacagagggactgaacctggacgatgaaatcagcccgcagccagtgaccggatttgatccactgccagacgttgaagcgctttttcagcgcaccggcgcgaatattaacgaacgcggccaacgggcatattatcagccttcaacagatgaaatctggctgcctgaacgccatctgttcgcagatgccgcgaacttttacgcgactggactgcatgagctggttcactggacgggcgcaaaaagccgccttgaccgcgagaagggtggcaaatttggttcagagagctatgcgtttgaagaactgatcgctgagctgggctgcgcatttttgatggctgacctgcgcgtgagtggagaggtccagcacgaaagctatattgcgtcgtggctgaaatcgctgaaggacgataaacgctatatttttcaggcagccagcgccgccagtaaagcacatcgattcctgatggcgtgctaa

SEQ ID NO: 149989 - DNA, 897 bp, Enterobacter cloacae
atgaaacgtaatctcaccagtttactgtattttgtcacggttgcccgcgagcgaagttttacccgtgcggcggcacatctcggtgtcagtcagcccgcattgagccatgcgattgctgaactcgaaaagagcacgaatattcccttgctcttaagaacaacccgtcgggttacgccgaccgaaagcggccagtgtttactgcatgccatcggatcgcacgttgatgaaatacagtcagaactcaataaactcagcgaattccaccttcagcatgaccgaacggtcaggatcaactgcgcctcgcttttgatgagtcccgcgctgatgaggaagcttaatcgctttattatggcaaatccggaacttcgtctcgagttaggcgatacggatcgtcccgaagcgttcgccggagaagcgttcgatgcatacctcagactggggccgggtaagcgtaaagagtggaacagtcaccctgtcagcccccctgtcagaatggcggtcgtgggttcgccagcctattttgagcgtcataacgagcccgaacggccgcaggacttgtttgcacatcactgtatccggcagatacagcatggcgagaaacaaaccagccggtggatttttaaaaagggagacaatcaacaggatattcttgtcgacggctcgatagggtgtcagtctccggcccatctgattaccgccgtcttatccaatgctggactgggatatctgccggaaggtgacgtacttccctttattgagaaaggaaaaatgaagagggttctggaggactggtgcgagcctttacccggctaccatctttgctattcggcatataagaaggcatcagagcctttgttgaagctcatcgactcgctggttgagaaatcactgagttag

SEQ ID NO: 149990 - DNA, 465 bp, Enterobacter cloacae
atggtcagagcaactgcattcatcctgtcagtccttctgccgggtcccctttatgctggagactgtttcgagcgtgccggaagggattacaaaatagatcccgaccttatcagggcggtagcctggaacgaatctcacttccataacagcgtaacaggaaggaatccggtttcgggttacggttcaggcttaatgcagatagattcccagcattttcctgaactgaaaaaatatggcatctccccacagcgacttctgcaggatccgtgtcttaatgtctacacgggaacctattatctggcaaaagcgtttcagaaatggggagtgagctggcaggctgtcggggcctacaacgccggttttcaacattcggccagacaagcgatgcggcgatacacctatgccagcaagatagcaagaacctacagagtcataaaaaccatgcggtcggacgaagacgaataa

SEQ ID NO: 149991 - DNA, 381 bp, Enterobacter cloacae
atgccacggcaaaatgtatatatgaaacagagaaccctggatagcattcgtgcgattgtgaatgagcgacgcgaggaaggcgacactcatgctgaagcaaatatttcaagcgtttgctcagaaatgctcgaattagggataaggggctatcgtagtgctaaagcaaaaagagaggatgagacactttctcagcaggataaaattcagcaggaaatcattacggaggccgtcaagtcacggctagtggcccagcagattttgaaacttatgtttgatcttcaggatatcaaggccgatacccgaaataattacgccagtctgattgactggttgaaatcacaggcacagacacggattagaatgatattaagtgatgattag

SEQ ID NO: 149992 - DNA, 195 bp, Enterobacter cloacae
atgcaggtgcagaaagacccacaagatgaaaccgaagcccaacagctttatcgtgatatttatttttttcacaagcgttccataaaatgctggtacattaaagattcctgccatcacattgtcgatgtcagcgagggatttaattctcgctttctgccccctgggatcattactgattctgatcttcctgagtaa

SEQ ID NO: 149993 - DNA, 366 bp, Enterobacter cloacae
atggtttttctggccgatctggcggaatgtaatcaacgtatagattggttttcgtctctgttgcccggagcattaccgacaaggaagaggatcagtctgataacgttatccggacagaaagcgctggccagagtcacgccaggagaatgggaaacagcatggatgattatttgtggatgctcgatcagaaaaattgcggcttataagggagtaagcccgaaaactgtggaaaacaaagccagaaatgtttatgcaaagttaggtgtttttaatcgggagggattgttaagtgcggcggaagagcataaatggatcaatcgtattcctgaaaaattgatttcatcacctgccatcatcagactatga

SEQ ID NO: 149994 - DNA, 405 bp, Enterobacter cloacae
atggttaagacgttgcataaacagcgtgaagagcgtttagcctggccacctgaaaggttctggtttttacgcggtatggctggggtgatgacccttttcccgaggtggcctaaccgtcgtctggcgccagtggtgttaaaatatcttgcggtttcgctactgctctggcttgccgcacggggcatggtgcacgctgaagatctgacttctgcaggcaaagcagacgctcaggatacgtttggtccggattccacaatgatgtactacttcatgctggctgaagcggtactggtttttctgctctatctgcgtaaccacaatccggctaccttcctttttataccggtattcatcgtggtcacaaaagtggtgtttgccattatttccgcccggtcgggtggctga

SEQ ID NO: 149995 - DNA, 573 bp, Enterobacter cloacae
gtggaactgaaggcgcaccgcgttatggggcgttacacctcgctcgcatttgtcatgctcctggggctgcttgtcatctccctgagtggcaatacgctggcctggttacagatcgatgccctgattaacagtcatgaggaaacctatattccgatgggactggatgcatcctttacgctgtcccgcaaccgaacggatgcgagctatctcgagcagaccgccgaatcgttagtgttgcttcgctacaacgtttctcctgaatcggttaaggctaatcatcaggcattgctgcgattcttcgacaatgagacacgtcctgccatgcaggacgttctggcggaagaagcccagcgggttattgataataacgtcacctcggcattctatctctcaggcctggatacttacccgtccgcaggcacggtggatattcatggcactgttcagcaatggataggcagtcgtaagcaaccgcctgaagagaagattctcagactggaactccgttaccgccgggggatggtcaccatcaaagcattcagggagaagacaaatgcgtctgcgttacattaa

SEQ ID NO: 149996 - DNA, 771 bp, Enterobacter cloacae
atgcgtctgcgttacattaagttcgggttgtttttagccgccagcgggaatttccaggttcttgccagtcccgtttccctgccccctgttgatattcccgtcggacctgacagccaggtcagaatcgcgatcagcaacacagatcccaatctgtttgtcgtaccgggggaccgaattattgctgtcgacagtgtccagggcatgtttgtcaatgccaacaaggtccagggacaggcgaacgggggggttgtactcatgacaacgcaaacaaggcccttcacattttacttacgcacggcagggggactgacggtctcggttatcggcctgccgcagaaaagacagggccgggtgctgcatttcatctccggtacacctgcgcagaatgagtccacccgtcaatgggagagatcgcagccttacctccatttgctgaccgatatacagaaggctgttctgaagggaaagacaccgcagggttttctgaaggctccggtcgtcgccctgccacggcttcagttaactaccggactcaaggtggaaccggtggacatgtggagcggtggagagctgcgtctctatcggctgaatgtccgcaatacagaccgtcacgtggtggcgttcactgagacgctatttcaggcacaaggcgttcgcgctgtgatgattttccctttcaaaacccgattaatgcctgacgaagctgcctctgtatggatgaccgcctcgagtgagaatgaggatgggaaggcgcatcatggccaatattaa

SEQ ID NO: 149997 - DNA, 1341 bp, Enterobacter cloacae
atggccaatattaacgagatgacgcgcaacaagcagatggctttgctggtgacactattactgggtcttgcaggcgcaggtattgtagcctggtatattgggtccccttcccgggctgcgcccggaaaaaatcagccagctaaacctgtaccggatatgaccggggcggtgacctctacctcctttggcaaaaaggtcagtgaaagcgcagtcgctgacctgcagcacacggcatctgaggtggacaaaaaactgaaccagtttgagctgcagctgacgaagatcgccggagaaaatgaggtgtaccgcaaaacggtccagatgcaaaacgatgtattaaaacatctccagacgcagatggactcactgcgttcagaaaatcatgccgattcgctcaaactgcggggcgacagggccgaacctcaacttcctgtcggcacatccttaccagcatcagtgcctcccccaacggcattttatccggcgcccccgatgaaccagacggtgacctcagaccgtgggcagcacccgtctgagctgtcaaccatgaccgtcgcgtacagccgtaacaacgataaacgtcactctctgccttatatcccttctggcagctttgccccagcgacggtgattgaaggcgcagatgcgaatgcatcggttacgggggaaagtgcctcctctcccatgcagtttcgtttgacggggaaagtgatactcccgaatgacggtgaatacgatctgcgcggttgcttcgtgacggccgccgcgtatggcgacatctccagcgaaagagcgctgttgcgcaccgatcggttgtcatgccgaatccataaccggatcatcgatcagaaaatcaaaggtcatatctcttttatgggcaaaaacggcatccgtgcgacgcccgttatacgtaacggtaaaatagtcgggtttgcttttgccggcggagccattgatgccatgggaagcgccatgtccagcgtcgggtcaacgacggtcggtcttggctcctcacacagcgtaacgagtggagaagttgctcgcgcgggtctgggcggggggacctcccaggcagggaagaccctgtcggaatatttcatcaagcgtgctgaacaatatcatcccgtcatccctgtcggggcaggcgtctccgtctctgttgtgtttcaggaaggttttcagctcaggtatgtcgatggagcggaagcaaaatcaacccggcagataccaccagaaacatcttcagataatggcatcaccatcacgaaagaggtgttaaacgagctcaaactgggtgacaccgttggaacggcgaacccgtcaccggccacatggaaataa

SEQ ID NO: 149998 - DNA, 444 bp, Enterobacter cloacae
atgaccaggaatctgaccgcaatgtttacaggtatttgcctgctttcaggctgcgctggaatgaatacggattttgactgtcaatcgctggctcacgatcgctgcctgaccatggaggacgccaaccagatagcccggcacctgccagctgaagccagcagaaaaggggaaaccagcataccggcgttctctgacatgccatcgtcaaagccatcttcattcacccgtactgtattggcaggcatgggagggtattcacccagcgggtcagacgcattcatggcctcaaacacgcagacccgcgcgaagctgcccgggagaaccggcccggttgttgcgcacctgtggattgcggcctgggttgatgaggaagacgtttatcatgccccttctgttgtctcattcgttgcggtacctgaccactggatggggtacagaaaatga

SEQ ID NO: 149999 - DNA, 2604 bp, Enterobacter cloacae
atgaccctctataatgaatttttccgacgcatgcttaccggctggcacatcaaggacggagcaccagaagcggacgcagtgctgacggagatggactacccctcattgctcagcgtgcttccctaccggcatttcgaccctgaaaccggtatgttcatcaacagcaccaccgtcggatttgttctcgaatgtacaccgctcattggtgcgaatgagaacattgtggatgcgctggacaattttttgcgcaataagcttccccgtgaaagacccctcagcgtgctgcttctggggagtaaatgcatcagtgatatgctggatacgggactgacggggatgagctggcggggtgaacatgcggacaaatttgcatgcataaccctcgcattttatgagcgtggcgccctctatggtctgccaaataacaaaggctatccactctcgctacgtaattatcgtctgtttatcagctacgcagaagaatgtcgtcgtctcgatgaccgcgtcttcagctcgcttggccaaacgctgagtatcctgcaacaatctctctttgctgtccgcctgcattccgtgctggtcaatgatgggggattactggggctggtacgtgagctgatcaattatcgtcacgaccaggtcatgccaccgtcccgtcaggtggatccctatgaagaactgaacgcacagtgtgttgaaccctcaatcacgcttgaagtcagggcagacagtcttcgccagagcctctctgcggccaatggtcaacgaatctccacgcgcataatgagtttcatgccggaaaaaaacccggaacagtttgccctgtggcaggcgggaaataacctcagtaacctcctggatcccggatcaaccgtaccttgtcccttcgccatcaccctgacgacggagctggagcctcaggcaaagagtcagaacgaagcgctgcgcaaatttgccactaacgacaagcgtgcaaactctcccttcggaaaatgggtacccggcgtaaaagcggcggcccgggagtgggatgggttgcgctcccgcctctcgaaaggacagtcggcgctggcgcgttacagcctgagcgtcacgctgttttgtgaggatgatgacgaaaaagcattgatgtgcgagctggcattaaacaatacctttcgtgccaacgggattgtgttgtgcccgcctgcgtttatgcagatgcgtaattacctcgcgctgtttcccttcatgatgccggaagggttatggagtgatatgaagcgcagtggcgccacgctaagggcagaagcgttcaatgtggcgaatctgatgcccgttgtcgcggacaaccggatctgctccagaggcgtgccgatcccctcttatcgcaaccagctctcgtttctggatctgtttgacagtgactccgggctgggtaatgacaactataacctgggtatatgcgggacgtcaggtggcggtaaatccttcctcatgcaaacccttattcgccagatcctcgagagcgaaggacgggcatgggttttcgacatgggggattcctataaaacattgtgtgccaatgtggggggcgtgtatgtcgacgccaccgagctgaaatttaacccgtttgcaggggtcgtgaatattgttgaatcggcggaaagtattcgcgatttactcctggttttgtcgtgcccgtcagggggggttggcgataccaccaaatccattcttctgaacgccgtgcaaagcgtctggatggaaaaaaggaatgcggcgctaatcgatgatgtcgtcgcgcatcttaagacgctggttgtatccgatcagtatcgtacggccgataccgtacgaaaccggatggaagaaattatcgtatccctgcacaaatacaccaccggcggcatatacggggagtatttcaacagcccaaacccggcgctggatgattcggttcggttttgtgtactggagatgggcaaactcaagaacaaaaccgatcttctggccgccatcatgttttccatgatgatttatgtcgaacagcgcatgttcctctcgccacgcagtgaacgtaaggccgccatcattgatgaagcctggaaactgctcgcaagtgagagcggttttattggcgactttattgaaaacggctaccgaacggccaggaaatacggcggcgcctatatcactatcacacagggaattgaggattttgatggtgacaaggccagtgttgcagccagagcggcctggtcgaattcatctttcaagatcctgctgcgtcagaaccttgaggcgtttcgcaaatataaccagacaaatgaagggcagttcagccctgctgaacagagcatcattgaaggtttcccgtctgccaaagatgcccacttcagtgcctttatgctgcgtgtcgccggtcaggtttcttatcaccgtctgcttctcgacccgctcagtcgggtgatgtcctcctcggatggcaaagattttgaatatcgtgagcagagtctgcgggaggggaacagtgttgctgagacggtctggcgtctggcctgccacaagtatcctgatgagatggagttacttctgaaatggacgcaacagagatcccgataa

SEQ ID NO: 150000 - DNA, 441 bp, Enterobacter cloacae
atggacgcaacagagatcccgataacaaaaggcatacggtcgcgacgccggcaacgcagctggcgacgtatcgccagatcagtggcggctgtcagcggcattctgctcctcctgaatctgtggcttatggtgagcattttctgttcgcgacagcaggaggtcgtgacctttgatatgcagggcacggtaaacagctttatggcccagctgagccatcaacaccccggagaggagacggtaaaaaaaaccacgggccgtttcagtgccgcgctcaacggcgcactcactgactggcaacgacatcacgacgtgatcatccttgtggcaccggcggtggtcgccggcgcaccggatattacaccggagattcaggcagacgtggcgaaacgcatgtcggcagcgtcagcgcccatgatgagaaagccagacttgctccattga

SEQ ID NO: 150001 - DNA, 627 bp, Enterobacter cloacae
atgagagacagccttatcgcggtatttttactggttgggctttcgccacagtctcaggcgaaagatctggggacctggggtgatacctggccggttgcggaacagagttttctcgcgtttatccagacgcgactggcgacaatgatgaacgacggcacgctctctgctctgcagcaccagtttgcgcagcgggtggaagcacatgcacttcgtccggttccggtacctggcctgaaagcagactcccgggaacatgtctcctggtatgatcccacttttaccgcggagcaggacatcgcggacgcacgaaatcacgtcttcgttcatcagggtgatcgcatcaatcccctcgacacgctttccctgaatctcacgctctattttatcgatggcgatgataagcgacagatcgcctggatgaaggctcagaagccttccacaccccattacaaaatcatcctggtgaacggaaacgtgcgggaggcgtcggacagcctgtcttcacgggtttacttcgatcaccagggcgtcatatcccgcaggctgcagttaacgtatatcccggcccgggtcgtacaggacggacgacgtctgaaaatcacctccgccgcactgccgaaggaatga

SEQ ID NO: 150002 - DNA, 990 bp, Enterobacter cloacae
atgaaagacacattatccgtcctggcgctggtggcattactcagtgccggagcgacagtacgggcttctgcaccggagtgtcagggacattttgtcaatccgatcaccgatatctgctggcggtgccttttccctctgacgattggcaatgtaccggtggcggccggcaatgaaccagataccgagaatccgtccagtcctgtacagatctgcccggtcagtgagctttaccgtattgggattgcgattgggtactgggaaccctttgctctcaccgacgtgacccgggccccttattgtatggtgaatctgggcggattcagtatctctgccggcaaacttggcagtggtggtggaaaacgtcagggtggggatgatactgccgcgttttatcacgtccactggtacaaatacccgctgacctggtggctcaatattattaccgatctcgggtgtatgcaggggggcgatatggacatcgggtatctttccgaactggaccccacctggaatgacagttcgctcgcatcggtactgtctcccgaggcgtttctgtttgcgaaccccgtcgctcagggggcctgtgctgcggatgccctggccagcgcggtatccatgcccctcaactctctgttctggtgtgccggttcacacgggagtctttatcctttcacgggatttgttcctgaccaggccagcccgcaggcagccagtgtgctgctgtcagaacgcatggcatacaaactgcaccggcagggcatgatcatgaacagcgtgggtcagaacaataaagtgtgttttgaatacccctctccggtcatgccaaaagaccgcttccggtatcagatggtgaatatgtaccccgattcggcacggtgtcacccctttggccgaaccgtgatggcctgggaagccggccatgccacaccggccagccggcagaacttcggttacctcatctggcgcaaacgcaactgcgtttttctttga

SEQ ID NO: 150003 - DNA, 564 bp, Enterobacter cloacae
atgaaaaatatgatcgttatcctgctgtctggcgggctgctgaccgctacctgtgcacaggctctgagcctggacgaatccctgcgattaccccatcctaacctacaggcgcgggctctccgaccacccgttgtcttttcaccaaatacgaccgtcgccgggaaaccgtttcggccagccgctgagggagatgcgcgccagatactgtattttctctctttttctgtgccgcgcgatggcctgaagctaatgattgcgcaggccagccatcttcatgttcccgtgctggtcaatggtcttatcaataatgattttcacgaaacggtacgggtgctttttgaactcatacggacagaaaatgccggcggtattcagattgaccccctgttgtttgaacgttatgacatcagcgcggtgcccgccctggtagtgacctgtgaggcagggtatgaccgcttaaccggtaatctcaggataaaggaggcgctggcacgcattgctgaagaaggagagtgtcgcgacgttgcccggcagtttctggctggaatacgggaggacaaatga

SEQ ID NO: 150004 - DNA, 1860 bp, Enterobacter cloacae
atgaaactcctattaagcgtccttactggcatactttactgcgcatgcgctctggcaaatacgcagtatgacgaagcctcccattacgccaacggtgaaaagggaaaaggactggacaccctgaaaaatgccgatccggcggcattaatccccggctttacggatagcccggaacagtcgaaattgtatggcgggataacggcagaccagaatagtgcgcttgacagtgagggtacccgggagatgaatcacactgaggcaggcaaagccctgctggatgtgatcaagcatcgtccaccagaccggatttcaacggatgccccctttattcacggatcgctggaggttgaggataaggcggaaagcctgacacaggacaccgacacgcagtgtcgcgacgtcgagatcaataacacgcagattaccggttttacctgtgagcgcacgcctgctgtagagcttacctgcacccgaaatgccgggccgggcgggggacacgccgaagatatcgtcatcacgaaaacgttcagcgtgagcaataacgattttgtctaccgctacgatggcgacaaacgcgtgacatttcagtttcgtgcacccgcatcaggaacggtgatccgtgccacgcttaccctgcattttactgacagaaatctctcctaccgcatgcgctggtggggagtgaacgccgagtccgtggccaaaaaggagaacttatgggtcttaaccggtgcggcgggggcaaccctcagtcaggatcgattctccccggttggagagattgaaaatcaaaactgtcttcgcgggaatccatcccgctgccagaattatgcccggaagacgctaaactggttgaaaaacggctctgacggtcaaatgagcctcacgctcgagatgcaggtcagagagaaaaagtgggtgcccgatgtggtgtggacagagacctgtccatttgatccgtctgagcaggtcaaaaccggcagcgtgtgtacctcgccgggcgggaaccgaacctttatcgttaacggacagccagttacgttgcacagcgattgctggcagtacatcgatacctatatttcacaatcgccggataacggtacctgcgagccctacatgaaaaatcccgcctgtactgtgggcagtattgcctgtattgcctcgctcagtaatacctgtctgcgtgaacatgtggtcttttcgtgtgaaaaacacacccgcagcaccgcgcacctgtgtggtggcgagctggtgtgtgccgatggcagctgcgatcacgcagaaaacaaggcgaacgatgattttcgctccgctgtatcaggtcttgcggcactggccgcggcaggaaaggacgtggcccaactgaacagcatgaacgtgtcagcgttcaccggcaaggctataagttgtcgtaaagccatggctggattcagtaactgctgcagggacagcggctggggacaggatacggggcttgccagttgcagctcggaggaaaaggcgctgggacaggcgaaaacgcgaaagttgaccatctacgtcgggggatactgcgcgcacaaggtgctgggcgtctgcaccgagaggaaagaagggtactgccagtttgacagtaagctcgcaaaaatcattcaggagcaggggcgacgggggcagcttgggaaaggattcgggcacggggagtcacccgactgccgggggctgagtgtggctgagctgcagcagcttgatttcagtgccatgaactttgctgatttttatgatgatcttgaaaatggcaccacgcttccggaagaccagttcctgatcgaacggataaaacagcaaatcacagacaaaatgaaggacggtggtcagtga

SEQ ID NO: 150005 - DNA, 786 bp, Enterobacter cloacae
gtgaaggccttattgattgggttattcatctttgtggtcattcccgttgcgaagggagaagacactgccatccgtcctcccacgatagacacctatgttgatcgacctattgtgggctggcactggtacaacgacacccgtcctgaagacgattcagaaacgcaggagaaaatccccctcagccgcctttcgccgactctgcagatggccctgttgaaaaagctgacgcaacagcgactttaccgcgccattctttcaccttcggaacagcacgcggcagattttttgcgtctgcaggcttatctgatacgtctttccggccagttcacgcagacggccaaaaaagccctgctggattacccggcgctggattacaaccttgagcacagtcgctataaccgcacggccactctgcagcaaaatgagagtcaccagaggcaaagaatggccatccattcgctgggtcagcgctacgggctttttctgttttatcgcgggcataatcagatcgacagcctcatggccgccagcgtgaaagaatttgccacgcagtacggcctgtcgcttatcccggtgagtgtggatggcacgcgcagcgagtcgctccctcagacgcgagcggacagtggacaagcgagtcgcctgggggtcagttatcttcccgccgtcctgctggttgacccaaagaaggggcatgttcagccgctggtatacggttttatgacgcaggacgatctcgcccgacgttttctcgatgtggcaacagacttcaaggcacagtactga

SEQ ID NO: 150006 - DNA, 546 bp, Enterobacter cloacae
atggtgttattccgatggggcaaaatggccctcctgatcctgacaagtggcgcatgttgtctccatgccgctacacgggatgtgcgccggatgctggaggcaggaaacgccgaatccgcgcagcggagcgcacttcccctcagccctgacgtcatacgctaccgtgatgagggtcaaggtccaccgcctgatgctctccattctcagcctcttcagagggactaccagattgtgttgtttatgcagggaaggtgccacttctgtcagcagttcgatccgccactggcgcagctgtccctgcaaaccggactcaaagtattcccgtataccctggacggtctcggagatgccagttttccccgggctattccggctccgcagacggtgattgaggcattctatggcgtcggacaacccgtcgtgacgccggcgacattccttgtgaacgtgaatacccttcaggcctggccgctggcgctcggcatagcagacatgcctgcagtaaggcagcgcattactcagatccttaacgcttcgccggattaa

SEQ ID NO: 150007 - DNA, 1368 bp, Enterobacter cloacae
atgttgaaaatttttctcgctggatcactgatcgttgccgcgagcgcttccgcctttgccagcgtggacagtgacctgaatacgttcttcaataaactggggtttgaggggaatgcaaccggggctgcagcctggcagggtcaggccgcaggctatgtcacgggagggaatctgtttttgcgtaaccaggtcaaacagattcaggtgatgtcgttgtctccgccatcactgacggcggggtgtggcgggattgatgcttacctcggtgcattttcctttattaacagcgatcaactgcagcagtttgtgaaaaacctgatggccaattcgcaggggtattttttcgatcttgccttgcagacggtggctccggaactcaaagacgccaaagactatctgcaaaagatcgcaacggacctcaacagtatgaatatctccagctgccaggcagcacagggaatcatcggcggcctctggccacgcacacaggtgtcgcaacagaaggtctgccaggatatcgccggcgatcataatttatttgcagactgggcggcctcccgtcagggatgcaccgtaggcggagagatgggccacgtcatgaataacgcgagcccccaggagaaagatcaggttctgcgcagtaaaaatctgatgtgggacattctcagcagcaatgccatgttcggcgacgatcctgagctgaaggagctggtgatgaatctgaccgggaccctcatttacgatggtaacgggacgccttctgtgctggttcctctggtcgatcatcctgacctgatccgggcgcttatgtatggcggtggcgttcagatccagcggtgtgtttcgcagggtgactgtctgaaaacgaagacagggtacgtcacggtcagtgcaaacaatgcgctggtcagaaaggtcgaaaccctgattgcggggatccgcgacaaattacgcacggatgaaggactgacagagacagaaaaggggttcatccagagcacctcagtaccggtattgcgctatctcatcgatcctatgcagctggatctcaatgtgaatatgctgtccagactgtcagactacatagcctatgacatgcttctgcagtatctgaaagagcttgtcgatcaggccaggatgcagatgagcagcagaaactatcccgacccccagatggtggcattgcgtaaaaatgtcaccgaagcctcggcccaggtggaggcccttcagcaacaggtacagaccaaagccgatgcgctcatcgacctggaccgacaaatgaactacctgcggcaggcaacgtccagtcagctgctggaacgctatcagcagaactatcgtttcaccgggaatgaggggggactctga

SEQ ID NO: 150008 - DNA, 2865 bp, Enterobacter cloacae
atggatacggtctatgtcctgaccggaggtgagttcctcgggactgtttttaacggcgtcgcgacgctgatgggcaccacagagtggtcctccatgtttcggatcgccgcgctgatgtccgcgatggtgttattctccttctatctccgggggcaggatccgctggaggtcattaaatttctgatggcgtttatcctgttgaccagcattctgatggtccctaaacgcacggtacaaatcatcgatcgtacggatgcctccagtattcataccgttgagcatgtcccgctcgggctggctgcacccgcaaaatttatcacaaccctggggacggcactgacagaggcgttcgagacggtctaccacgtccctgattcggtgacgtacagcaaaactggcatgttgtttggcgcaaatctggtgggagcggccacggatttcatgttccgcaacggtgacctggcagaactgtttacagactatgttcgaaactgcgtggtgggtgacatattgcttaaccacaagtactcctttcaggcgctcatgacgagcacagatccctatgcgctcattttcagccagcccagcccattgcgcggcgtgatggtgcctgcgggtaatacactcgcaaaccgggaaggtttctggacctgtgaggaactggccagtcgtgtgctgaaaccccagttgaatgccgataccctttcaggcggtaaaacctgggagtattacgtttcccggattaccggcgccagagcgaacagcagcgccctgttcggtacgctgatggcagacagctacaattactattacagcgggggggcaacggcgagtcagatcatgcggtctgcggtggtgatgaatggccttaaacagggtatttcaacctacagcgcgcataacggggatgccgccgggctgattaacctcgccacgcagtcatcctacgccaaaatgcgtctgagtcagattacctccggcagtatcgctacgacgtatctgccgctgatgaacaccgtcctgctggcgatggtgatcggcctctttccggtgattattctgctagcgacccttcattctctgacgcttcaggttcttaaagggtttctcttcaccctgatttatctccaggcctggggccctatgtttgccatcctgaactatgccgtcagtgcatggctgaccagtaaaacccacacactcagtttctgcctggcaaatctgtccgttattcagcagacccatgccgatatcggtgccattgccggctggctgtcgctgtctatcccgtttctggctatggggctggtcaaagggctgggcagcgtcgtatcgcaggcgggcaattacctggggacggccatgaacagcaccgcctcatctgaagccgcgcgtgccggtgacggcatatgggcattcaataatctgcaaacggacaatgttgcggggaataaatgggatacgaactatgcccgacgcagcgggatggcgaccactcagctggcaaatggcgcgatggccagccagaccccggacggcagcgcagtctacgacaccagtaccgcgatatcgcgtctgcctgtcgatattcagctggatcgcgctgcggtgagtggatttcagcgccaggagcgtgaggcgcaggggcagttgcacaatctgacgacctcgctgggccaaacgattaactcaggggtatcactgctgtcgcagtgggcacgtcagcgtggtcacagcgatactgtcagccaggggacagaccagagcgtcagtaccagtgatgcacaggcgatcagccagcttcagagtgtggtctcacgctatgcccgcgacaatcacgtcagcgagtcggaagccctccgggcggcaatggagaaaagtcagcatctcgtactcagtgccggggcgggggcgtacgcgaaaattgactccggcgatgaaatttttggcaaactggcccgtctcggcaccggggctagtgcaggtgcggatgtgcataccagagtggatgccagcgggcaacgtggaaccagccatggcgtcagcagcgaaatcagccatcgccacggtcagtcaaaggatttcagcgttcaggacctgagggatatacgccatggtatggatgtcatcaccagccaccgcgtcaccgataacagcagccacaccgaaaatgcttccggttcactggtcaaccagatggccgcgacgttcagtgatattcgcgctcaggcaacccagctcagcgacacacaaacccggtctctggagtctgcccggctcgcaagcttcgttgaaaatcacagtgcggcgatacgcagccatgccacgcaggaatttgtggagtatgtgaagcagagggtgccggatgccgatgcgattctgaccgatgtgtcctcaccacaggcacgcgaaaaacgcgaacagcttgccgcgcaatttgtgcaggaaagaatactgccacaacttgaagccgcttacctgaaggggcaggaactcacgacacaagacgcgggttcatccgcgtcgaccggcgtgctcccgcagaaaatccgtaatgatttcaaaacgcgtcagcacgagatccttcaggcagccgcggttgaaggtgcccgcgacgatggccgtctggaggctgacgttactgagcacaatcatggatcccggacatcacttgagactgcccagcagactattaatgccaggcaggcagaaatcacggctgacgcagctcatctgtctcaggcctatcagaccgggaaaacagaatttgatgaagcaaggaaaaaggaaacggcccgtcaagaggtctcttctgcggcggacacattaaatgagaccaaaggcgaaaataaccacgccgggtaa

SEQ ID NO: 150009 - DNA, 2076 bp, Enterobacter cloacae
atgagtgtaaccaaacatataacgcagggagggcaggtcttcagctatatgctgaatatgtttatgcaggttaaccggcgtatcgctttctggctgtgtaatctttttattctgctcgtgccatttattttctggctgcgggttccctggcaggagatctgcaatggcgcgttgtactggtggttatccgtcaccgcgaggggggagcacgccctgtttagggttccacctgtttatgccgtcaggttcgagggccagatattgcacttcacgtccggtgcgatcctgcaagatccctatatgacctatgccggccagctggttatgcaggagctggggatcgccgtgttactcgccagtcttgtggtgctggtggcaggctatggcgtctattactggcttaaacggcttggggcgaaccaggcacaggatgttcagaccggtgggcggacgttaacggaaaatgtgaaatcggtgacgcgcatgctgcatcagtcgggaaacgcgtcgacgctgcatattgatcaactgagtctggttcgcgacagcgaactaaaaaatctgctcctgcacggtacgcccgggtccggaaaatcgaatgcgctgaataaattgctccgccagctgcgggcgcgcggggatatggtggtggtgtatgacaaagggtgctcactcgtaaaacgtcactataacccgacgacagacagcttgctgaatccgctcgacaggcgctgcgagtactgggatctctggctggagtgccagtccacgccggattacgattccatcgccaatacgttgatcccgcagggtacgcgggaagatcccttctggaccggggctgcccgaacgatttttactgcggtctctgctcgtctgaaaaacgaccctcagcggacctataaccgtttgctgcgcaccctgctggccatcaatctggaggcgttgcgcgaatacgttgcgggcacagaagcctctaatctgatggaggaaaaggtggagaaaacggcgatctccatacgcggtgttctgacgaattatgtgaaggcactgcggtatatgcagggaattgaacacaccggcaggccgcgttttgctatccgggaatggatgacacgggtaaatgaacccggacagcctcgtggctggctgtggatcacatcaaacgcccgacaacacacgtcgctcaaacccctgatctccatgtggctggctcaggccgcaaactgtctgctggaaatgggggaaaattcgaatcgtcgggtgtggtttatttttgatgagctcacttccctgcataaacttcctgagttgccgttggtcctgtcggaagcccgtaaatttggtggctgctttgtcctggggttccagaacaaaccccagctcgatttcacgtatggaaaggactttgccgacgcaatgatggacctgctcaatacgcgcttttttttccgttcaccggacgaaggtgtggccagctacgtcatgcgtcagctgggccagcggcgcgcccgcatcttcagtgagcagtacagctacggggctgacacggtacgtgacggagtctcattcagtaagcaggaagaagatcgttatctcgttaactattcggatatacagtccctgcctgatttaagctgctttgtgacactgcccgggcaatacccggtggtgcgaatgaatatgcgctttgaagatctcgatatcatcgcccctgaatttcttccacgcgagctcaacgacagcctcgatcaggaaatagacgcggaaatccgctcccgggacctggagaatgaacgtgtgatgcggctgctcgcgtcgctggaagacggtccaggagaagccgtcatcgcgggctgtacctgtggcgcggaccatccggcatcagcagacgatgccgtcggaaagcaggcagtgccggagggactgattgtcgagaagatgaccggggaaagggggaggagaccggagcaggaacgcacgggcttgccagcggcgcatgcgcttcgtgcaagcgagcaacaccttcttacgcatgcccgctcggataacaccccgcccggagatgactggtaa

SEQ ID NO: 150010 - DNA, 5100 bp, Enterobacter cloacae
atgctgacgatcgccccggtcgcccgcggcggtgcggattattacctcgccggggacaattattattttctgggcgaaaaggcctcctgctggatggggacgcttgcgcagacgatgggtctgcaggggggcgtacaaccccacgattttgaccgcgcgctcgcgggctatttcccaggagcgatcagtctggcaagaatgtctggcggaaaaaatatccatcggcccggctacgatctgacgctgtctgcaccaaaaagcgtctccgtgctcgggctggtcatgggggatcggcgctttctggaggcgcaccagcaggcggtcagcgtagcgatgaacgaaattgaacacctcgccacaacacgaataatgcgtgacggtgtgaagcacaccgttatgaccggaaaaattctggccgctgcgtttcatcatgatacgtcacgggagcttgatccccacctccacacacatctcattctcctcaacatcacggaatatcagggacgatggagaacactttccagcgataaggccgggaaaagtggttttattgaaaccctcttcgccctccaggtggcccttggaaaaatttatcgccatgaactccgtcagcgcattgaagcgatgggcttcgaaacgatcattacaggcaaaaatggactgtgggaaattgagggtgtgccagtggatttattttcaaggcgcactgaacgtatacgggctgcggttggtgaggatgcccccctgaagacacgcgatatcgcagccctggcaacccgacagcaaaaacagggattgccggaccggtcgatgctgcaggcggactggaagcaacgactggaacagaatggctttacatacccgacgctgctgaaggcggcggctgaacgaagcaggcggaagcgcgaaagcgtcgcggagacgcagatcctgcctgccgatgttcgccaggctgtgagagatgccatatcgttgctcagtgagaaacgcacccgctttacgtattccgacgtgctgaaccgaagcctgaataatcttgatgcccgatcgcagatagccctgctggcccgacaggccattgaagaggcaatcagtgcacaactgcttatccccctcgatcgtgaaaaaggcctgtttacgtcttcgctccatcttctggatgaactcagcctgcaggacctggcgcgccggatacgaaatgaatccgtgcccggaatggcacgaacgcgatgtgcttcggacgtattgccgacatcactgacgggcgggaggctacccatcgccattatcagtctggccggcgggatgcaaaacctgagtaaaacggttctggctgccgctgaccttgccagatcgcaggggcgcgcatttcgtgttctggccagtgataaggccattgcgcggttcctggaaaaaaaatcgcccgagtcaggatcggtgctgaccctcaacaggctttctcaggctgaacttccggagaaggccacctgggttgtcgccggcgctgaaaccctttccgtccgggacactgtaactgtgatggataccgtactgcgcacacagtcacagctcctgatgatcgacagcagcggcaggcagggaaccggcaatgcgcttcagatcctggaagaggccggcgtagtcaggctgcacgggacatcggcgccggtcacttatgctgtgaagagcgaggcggataaggttcagcgatatgccttactggcggaggagtatgcgggttatttcagaaaaggtgaaaccgtggccgcgcaggtcagtgggccccgcgagcaggccgccctgaccgccaggatccgccagacgttgtttgaacgaggatgcctcggtaacagaacggtcagggtcgatacactgcttcctgtatggctggaccgtaaaaatcgccgtcaactggatacctaccgggaagggatggtgctggaataccgggaacccgaaaaacgctcggtggtgcgctacaccatcgacagagtcagtcccgaaacacggtgtctgaggttacaggatgatgcaggccataaaacaggcgtgaagttgagccagataaatgccgactggggattgtatcaaccgcacacgattgaggtcgcagagggggaaaaactcatctggttcgcccggcagggaaaaaccgactcacgtgacagtgtcacggttaaatcgataaacggcgcgagcctgatagtaagacatcacggaaaagaccgtgtcatttctctgcatgaaccgttgaaagcgggttatggctatgtcaccccgccgggaggctgcgtgcaggaaaagggggttgtccttgccgccgtcgcaggtcgcgaaatgacgggcagactgcttggcacgctggcccggagcggacaccgcattcgcatctttacgtcacttgcaccggacgatgcccggcggcggctgtcacgcttttcaggccccagaaccatgctttctcaggtaaacgagaatggagacgagctggcgaccaccctggatacacgccggggcgcgttaatgagcgtcacggaaaaagcagtcagacaggccatcagcctgacgcagggcagtaatgtattttttaaccgcatggacgtactcgcaaatgcactgccgcttcacccctctcttggcaaagaggccgtggacagagaactgcgccggcagatccgcaccgccgagctgatccccgtacccggggcgcagggggcagcgctgcagcgctatgtgacggccgaaacatacgaggccgagaagcgcattatccggcttgtggcagaggggctgggcacgcaaccgcctctgatagcgccgggcacggtgatccttccggcaggactcacggacggccagcgccacgcgtcccggctgattcttgaaagtgacgatcgtttcgtggccgttcagggctatgccggggtgggaaagacaacccagatgaaggcggtcctcacagcgcttgagaccctaccggcaccggggcggccagtggttgtcgggctggcccccacgcaccgggccgtgggagaaatggtgatgtgcggcataaaagcacagactctggccagctttctgatggagacggaacgtgagatgcagtcaggggcgtctccggattttcggcagactctttttctgatggatgagtgttcgatggtcgggaaccgggattttgccgaatgcatgcagcatattgcgaacggcgggggacgagccgtattgtgtggcgatcgcgaccagctgctcccggttgcgcatggcgcgccttttacgttgttacaggagcggagccccctggatacggcgatcatgaaggatatcgttcgtcaggtaccctctctgcggcctgcgatttatgcactgacgaaccgttgtgtacccgcagcactggatatttttcgtcaacaggatccagataccgttccgcgtgagcctgaccagtggaaacctgccggggctgtgatagcactgccacagacggcagatcagaaaaaagaggaaggcgatcgtgtcctggccgcggtagtggcggattttacgggacggacggcagaaggcagagcatccaccctcattgtcacccagacaaatgctgataaaaatgcagtgaatgttgccatccatcagcgattgcaggcccgcggcaagctggggacggaaacggttattacggttctggacagagagaaaacgcacagcgatcggctcaaatccgtgcagggaatggctgaacatgccggcaagacggcgctgattaacgaccgttactacgaaattcacgtcagaaaagactgccagacaggcggtatagtggagctggtggatgacaccgggcaggtacagttgttctctgcctttgaaagcagccttcgcgacgtggctatttttacgtctcgccagatagccatttctgttggcgagtgtgtgaccttttctcgttccgatcgcgagcggggacgtaccgctggcgaaaactggcgggtgtctgcagtcgccgaaaccggcgaaattcacctgacccgcggtgagatcacccggatactgaaatcgggccaggagatggcggaccggcatcttgattatggttacgctggcacgacacacaaggcacagggcgcgagcgccagatatgtcattgttctggctggcgcagagggcgcgagggtgtctctcgccacgcttcgtgagacctatgtcgcgctctctcgggctaaagagcacgttcagatttataccgacaacattggtagatggctggaacgggtttccagatcgtcagaccgtccaaccgcacatgatgttctcctgagcgaacacgagcgaatgacggcgctggccaggcgtctgtggaagggagccaagcctctgaaaaaaatggcctgcgatcgtcttatacagggtctgcctggcgtatgccgggaggccagggtaatcccggcaggaacaaaatatccctctcctcatatcgccttgccggtgtttggtctcgccggaaagctggaggcaatcatgctctgtcagggtgaacgtgatgagaacggacggttacgacggtcgtctggtgagtggcactgtctgggggagaacgaagccgggtttacgctgatacagcggagcttcagcgggaaaactcgggaggcggattcagtcagtgacggtctgatcctggcgaagtcatacccggaagagggggttatcgtcagagcgccgaaggctacgctgcaggatttgattgtccggcgtgtgacaggaggaactgttacggatatttccgccagggaaagtccggagatggcggttccaccgttcgctgagacgtcccgcctcagaatgaacgacagactgaatatggacgaggcggtaaacgcagaagtattacgccagcagaaagaagctcgtgattacagccggtctgtcgtcgcgtttacgacccgagaggtaagcccgttacatcatcttcagtatccggagcccgagtttgagaaggggaggcagactttgtctgagcgacatccgggaaggcaggcccgggaagaggaggggctacagaattacccgggcataacgaaggagagagatgaaccagaccggtaa

SEQ ID NO: 150011 - DNA, 399 bp, Enterobacter cloacae
atgaaccagaccggtaatccggcttatcggaaccggagtgaagatatccacagattcggcggatatcgttgccttggttatgcgtttacccatgaacgccatgtgcaaagtgccgatgggtttacggtaaaatacgggtaccgggaagatggctcctctgtaggttttatgacctccttgtcatatctgtattcagacagcaaccctaaaggggatggcatcaggggagactcatcaaaaatcataaaaaacagtgacataaaatattttggtgtcggtccttactggtacgtcacgcctgcactcagtctttatgccacggcaggcgtcaacccgtcaggcaacgatgaatttggtagtgaataccaggatttcgctgctcaccagcgggcgctatag

SEQ ID NO: 150012 - DNA, 723 bp, Enterobacter cloacae
atggaaaaggaaagtaaacaatttgccgtactgattgatgcggataatgctcaggcatcagtccttgagtccatccttaatgaaatttccctcatgggagatgcaaccgtcaaaaggatttacggcgattttaccaacccacagagctcatgctggaaacatcttcttcagaaaaatgctataaaaccgatacagcagttcgcatatacaactggtaaaaatgccactgacagtatgcttattattgatgcaatggatctgttgtatactcaggcatttgatggcttttgtctcgtttccagtgacagtgactttactggtttggccattcgaatcagagaagctggtcttgaggtgataggttttggtgaaaagaaaacacctcaggcattcaggagcgcatgtaataaatttattaccactgaagtttatcgtgaagaaagagatagtgcagctcaacctgaacaggccgggattcgaacagaagaagaaagttacagcatgctgactgaaattattgaaagttttgctgaacaagaatgggttcatctcggacaactcggagatatcatgaataaacgaaatcctgattttgatgccaggaattatggatatcgtaacttgtcagcgatgttacaaagcaaacaagatacattcgaattggtcagaggcaataatataggcatgtctcataatctgccctatgtgcggctgaagtcttaa

SEQ ID NO: 150013 - DNA, 447 bp, Enterobacter cloacae
gtgttgttgaggaatgtttattttgcactcctgtgttttgtggcgttgggcagttggccggcaatagcgaaatcggtgcgtaccgagctgcagataagcccgcaaatggcggggacggttaaagatggtgcgattttggcgaaaggtcgggtgtttaacgccgacggcgcggacggttttaccctgtggatggaggcagccagcccgcagggcgctccgggctatatcattcagagcgaaaccgatccgacaaagaaactgcgcgtgcggctggctggtcgggactggcaggtgaatcccctgaataaaaatagcatgatctcctttcaccctgcgccttctgctgcttttttaattgttgccgacgggcagcagaatatcccggcagggagctggcgactgcgggtttccgcagcggctggcttccctggaaaccgctcacaatga

SEQ ID NO: 150014 - DNA, 2445 bp, Enterobacter cloacae
atgatgctgctttcactggcagcagaggcgcgcgaatatcattttgatccggcgctgattgataatgccggcggccatgtcgacctgacgcaatttgagcagggcgggcagttaccggggcagtatccggttgatattctgctcaacggtgagtttgtcgatgcgcaggacattcgcttcattgagcgcaatgatgataaaggcggcgttaagctcaccccgtgcctgacccgcgagcagctggcggcatatcacgtccgggttgaggattacccggatgctgaaaaagacaacggcgttgccgctggctgttttcccctgtcagcaatcccgggtgccagtgcggatttcaattttaataatcagacgctgttgctgaatattccccagctgtttatgcatgccagacggcagggtatcgcgcctgagacgctctggaatgacggcattccggcgctgctgatgaattatcagctgggttcaacgcgtaccgaatatcgccattacacctcaagagcggataacagcaactggatgcagctgcaacccggcgttaacctgggcgcgtggcgactacgtaataataccaactggcagcggtcgggcgctcagagtaggaagtggcgaagcgtgaatacctatgccgagcgcggactgaacgccataaaaagccggttaacattaggagagagttacacgcccgctgatattttcaacagcgtggcttttcgcggcgtgatgctaagttctgatgaagcgatggtaccgggtagcctgtatcagttttcgccggtggtgcgggggatcgcccgcacgcaagctagggtggaagtgaaacaaaatggtcagacgctctacaatgcgctggtgccggccggcccctttgcgctgaccgacctggtcgctaccggttctggcggcgaccttgaggtcacgattcatgagacagatggacagcctcaggtatttatcatcccatggcagacgccggcgatcgctctgcgtgaaggataccttaaatacaatcttatggccgggcagtaccgttccgctaccggcgcgtctcccgacgttgcacaggttagcgccatctatggtctgcccgccaacttcaccgcgtatggcggtgtgcaattttccccgaaatacctggcgttctccgctggggctggctggtcggccggaaaaataggggcggtgtcgatggatatcaccgagagccggagtcagcgtcgggcagagcacgggcgtgagctacgtctacgttacagtaaacagtttatcccgcttaataccaccttaagtcttagcagcgaatattcgctgtcacgaggttttcataccctgtctgatgcgctggagaatgacccgcggcatggggtgcaatccctttcactgccgcagaaaaatcgtatcggcatcgcagtaaaccaggggatgggaagcctgggatatttcggctttagcggttatcaatcgcgttactgggaccgtgatggttatgacagcacctttatgaccacctataccctgccgtttgaggcggtgacgttaagcctgaactggtcgcagaatcgctacggcagccgtaacaatcaaaaagatcaggttaccagcctgtggatgagtgtgccgctgggccgctggctgggcggcaacactcgcgcttcttatcgctataccagcccgtcaacaggtaaggttacccacagtctgggcgttagcggtgccgctttgcagcgtcgtctgcaatggtcagccagccagcagttcaggcccgacgcagaagaacagaataacggcaaccttaatctgaaatggaatggcacctacggccaggcatccgcttattacggttacagcgatagctatcacaggacaggggctgaactgaacggcggcatggtgctccacggtaaagggatcaccctgagtcagcctctgggcgagacggtggcattaattgaagcaccgggcgccgccggcattcaggtcggcgcctggcctggcgtggaaacggatttccgggggtttaccacccaatcttttttacaaccttatcagataaacacggtgtatctgaacccggagcaattgccgccggaggtggatattgctgaaaccgataaatcgatcgtccccactcacggcgcggttgtaccgataaaattcaccacgcgcaccggcgctcgcgccttgataacggtgttacagcctgatggtcgaccggttccctacggcgcgctggtgacagtggttggcgagcaagcgggaacggggatcgtcggtgatggcggcgtgacctggctgaccggcttgcagcataaaggggcgctgaggatgaaatgggcaaagcagcagtgccgagcaagctaccagctccctgcacagcaggacggcgccgggatatatgttatgaatgtgcaatgtcagcgggagaattaa

SEQ ID NO: 150015 - DNA, 747 bp, Enterobacter cloacae
atgaaaatagtctcacatattattgccgtcctggcgggttcgctgatcgtcacgggtaacctgcaggctgccagccagccggtgaaaaccgaaacgcaatctttttcattaaaggcgggaaccagtcgcattatttatcgtcccgggtctgctggcgtatcgctgtcggtcgctaatccgcagcgcttcccgatgctggttcagtcacaggtactgatggaaaatcagaccaacgccgcccctttcgtggtcacgccaccgcttttccgtctggatggacagcagcagaaccgtttacgcgttgtcagcaccggtaacgtcgcgcagggcgatcgtgagtcactgtactggctgtgtatgaccggcatcccgccttcagcaggtcaggagtggagccgggaacagatgaaacagagcgaggctaaagtactggtgcaggtgcgtgtaaaatcctgcattaaactgctggtacgcccctcaacccttaaaggcagtgtcacagagaccgcggcttcgctgacctggcaacgtcagggtaatcagctcagtgcgcacaatgccaccccttattatgccaacctgaaaaaagtcgccgtcggcaaccaaccgatgaacacccccggttttattgccccttttagtagcaaaaccttccctcttatgccaggagcttcaggcgatgtccgctgggcggttattaccgataacggcggcgaaagccgtgagtatcgtgcgcccttaaaataa

SEQ ID NO: 150016 - DNA, 534 bp, Enterobacter cloacae
atgaataccttttatgaaataaaaaaaatctgtctggctattatgttagttgcaggcagtattaatgtcgctcaggcggcggtgattgatggcagcatcaatactgctactgccgatctggtttttaacgaaacggtcctttctagcgtgaccattacaccagaaacgaatctttttgccggggagttaaatagccacgcactcgttgctactgccagtgttagtactgaaggcgcaaatgtggcatggcgatggacaccagcttcaggtattgtcggtactgcccctgtttctgcgcgtaatcacatcgttatttccgggaaaaactctccggataataagcttgagcttcttatcccttataacgaagggatagtgaatgccggtgaagaaggaagcggtggctggatgcgtatggatgataatagcacaaatccttcctccgctagcctagagatccgttcaagtggtagtcaaatagttaaagctgacacctacgtactttcaattgactctgcagcatggcaggactaa

SEQ ID NO: 150017 - DNA, 285 bp, Enterobacter cloacae
atgatgttattcgtcgtggcgaaagtttttttaagtccggatgacggtgttgataccgattttaagcgtcctggcggtgtcgcgtacaccggcaccgttgaaagccatttcagtgatctgctctttaacaccaggtttacgggcttcataagcataggtgagctgaaacacgcggtggcagtcacggcagcggaaccggccgtgtccattgggattctgtccatgccggtaaacctgagcagactgacaacggggacaatgaacggtaacgctggccatgagtaa

SEQ ID NO: 150018 - DNA, 411 bp, Enterobacter cloacae
gtggctcatgctgacgtcgcgcttatctgcgaactcgatgagcaatggagctttgttggcagcaaggcccggcaacactggctctggtatgcatataacacaaagaacggtgttgtgctggcctacacttttggcccacgaaccgataaaacctgtcgtgaactactggcactgctcaccccctttaacatcggtatgctgaccacagatgaatggggcagctatgccagagagcttccgaaagagaaacacctgaccggcaaaatctttactcaacgtattgagcgcaacaacctgacgctgagaacccgaatcaaaaggctgactcgcaaaaccatctgtttttcgcgctctgttgagattcatgagaaagttatcggtgcctttatcgaaaaacacatgttctactaa

SEQ ID NO: 150019 - DNA, 510 bp, Enterobacter cloacae
atggtcagtcgatattcaaagccgcgtgtttttttacactggctgtctgcccttataattatctgggcaacacttagtggtttttgggtgggattgggcaatccctcacccgccataaagaattgggtcggtttttttaatgtatcactgacaaccctgtttattccggtttttgtcatccgcctgttttatgcattttcatcggcaaagccggaagacaatttattgacgaaaaaagaagaaaaaatggcttctgtcggccacattgcgctctatgtcaccattacagtagtgatggtgaccggcgtactgatgatggagcgcccgattaatgtatttaactggtttatgattccacagccgttaaccaattctcagttaacctcactattcaataaaatccatgctttttcgtgctcaacacttggcgtgctggtaatcggtcatatattagctgttatcaagcatcattggcagggcaaagcattattacgccgtatgagctggtaa

SEQ ID NO: 150020 - DNA, 201 bp, Enterobacter cloacae
atggagttatcggtttcgctgagaattgaaaaacacatcagcctgaaggtatgtattgagcgggcagccgtgctgtactcactgatcgacagctgctggctgaatggtgtggcggcaccatgctctggggcatatcaggacgggtcggtaaaccggctgcgcgatctgctgccgtggaaaaccgctctcacagctaaatag

SEQ ID NO: 150021 - DNA, 201 bp, Enterobacter cloacae
atgaaaaagcccacttataccgaagaacagattaagtttgagctaaaaaagccccaggtcggcccccgcatcggtgatgtcagcataaagatgggcatttctgaagccactttttataagtgtcacatccagacctatttagctgtgagagcggttttccacggcagcagatcgcgcagccggtttaccgacccgtcctga

SEQ ID NO: 150022 - DNA, 228 bp, Enterobacter cloacae
gtgggcagctgccgctggttattccgatgctgttttcccacggtcgccttcacgctgaactggacagagctgtttgacagcccgggagctgcacgaaaactgtataccggtgatttttccatcattgatgtcggcaccatcaatgacgatgaaatcatgaagcaacgccggatgatcctgctggagctgatgctaactaaagcacgctttaacccgcctcctggctga

SEQ ID NO: 150023 - DNA, 1290 bp, Enterobacter cloacae
atgaaaagagaaacacggataacggtgctatttatggcggcaacgatggttttcggtgtaactataccgaaagctgcatatagtcatggggctgtatcatggcctatatcccgtcagtatcaatgctataaaatgggggggttttggggggctgttgaagacatacctaacagcggttgtcgagccagcgtgaaagtttcacagcaatatcctttcattcaatggaatgaggtagccgctaatccccacccttataatgatcctgaagcaatcaaaaaagcagtaccagatgggttattgtgtgctgctggcgatatcaaaaaaaagggacttgatgagccgcaaactgcaggctggaaacttacaccgattaaaacgggtaagatggaacttacctgggatgccactgctccccataatccggcacgatacacaatttatataactaaacaaggggctgctttccagaatcgtgcattacagtggagcgatttggaagtgctggccaaaggggcaatgcccatgcccataaaaacatccacccctcagcaatacaaaattccagtgacgattccagctggtcgaagcggcaaggctatcatttatagtgtatggcagcgagaagatgcagggaatgaaggcttcttcaattgtagtgacgttcagattcagggtaatactgatgataatgaagataataatccaccaccagaccaggtagatgaatggctcgaagaacaagcatttgtcaaaccagactatcctaatcctactccaggagaaataatccgtttccggcttttgggggggaataataattctggttcagaggtcgtagatgcacgcttgcctatcacatcagacatcgcaaataattatcgctgggctgaaaaattggcaagtatagttaatgaaacggggaaacaatacctaaaaattgggatcaagaaaaatggagatatccagtttgatcccagcgagcagcacattcatgaaaacatggtttgggttaaagacaaccgttatactagctcgatgaccataattgcgaatgaagataaaccggatgataaacccgatgacataccgggcaacgttaaggcctggcctaccggtattggcagctatgaaccagggaaaaccgtggttaaaggtaaagatggtaatttatggcgatgccgcccattccctcagggggcgtggtgtaatatcaaccatcctgcttatgaaccaggagggactggcatggcgaaagaagaatcagcacaagcatgggaacgaaataaatag

SEQ ID NO: 150024 - DNA, 162 bp, Enterobacter cloacae
atgttggttagtgcggacaacttaaatggtgaattaccgtcctgtatcacaggagccaacaaagttaaaacgtcattatccgcctgtcatgaggatgagatggatttaaacggctggcctcaacggatgggcgtggtacagaaagccttatcagttctctaa

SEQ ID NO: 150025 - DNA, 741 bp, Enterobacter cloacae
gtgtttgagattttttttgtagtgctaacgggtgttatcgtcggtagttttattaatgttatcatttacaggctaccaaaaatcattcaaggtgaaacattgtcactttctttccctgcgtctcattgcccacgatgcaaagtttctattaagttttatcataatataccagttatcggctggcttatgttaagggggcgttgtgcgcattgtggcataaaaataagtgcccggtaccctatgattgaatcgcttacgggcggattgttctttttaacctttttacgttatggcctgacacctcatggaataaatgtggcgattgcaatattctttttaattccgcttttcttcatagatttggatgcttttattctccctgaccggcttacgctaagttttttattactgtctcttggaatatcattgcgcggatgcgggatagtttccattcaggaatcaataattgccgcaattgccggttttggaatcccctggttcttaaataggattcatatctggcgctatggcagagacggaatgggtatgggagatatgaagttattcgctgcacttggggcgttgacaggactggagggagtgactcaaatcatgctcatctcgtcactgattgcaattttaagtcaaataatcctgttaaggcatgagtatggtaagccttttccttttggtccatatatagtaatcgcttcactgggatggattttttgcttttactga

SEQ ID NO: 150026 - DNA, 672 bp, Enterobacter cloacae
ttgattaaacgtatcattattgctgacagtagagcccttgtccggcgtgggttgaactctatcatacagagcattatatcaacagataactatgcactatcgctagagggagaaactgatacggcatcgggtctgattgcattgcttgatgaatcgcctgctgatatccttctgatggggcttcgtttgaaaaattcttacagatcgcatcctataaatgatcataatgggacgcaattcatcagacatttgaaaataaaatggccaaacatgactattgttgtcatatccccctatcctaaccatcacattttttgtgatataagggatgcaggtgcgcgagctttaatttcatacgattctggcgaacaagatattaattcattgcttaaatcattactaaatgaggaaatgaacagcgagcagcaagtttatcctccgaccggatccggtaataacgctgcagagttattattggatccatacgaagttgacttgttaaatatgctttttcaaggggtgccaaatggcaaaattaaagctaagatgaaggccagtcaacaggaattaatttcgcaaaagaaaaaaatcatgcttaaatttcatgcaaaaaatgaacagcaactctataatatcattgcagaaaaaaggatttttgagctttcactttaa

SEQ ID NO: 150027 - DNA, 345 bp, Enterobacter cloacae
atgaaatattcttgcaggtttttagctatagctagtgctcttttctttacttgccccgtttggtccatgactatctcctctgaagcaataaaaactcagcatgaatacagtgggaatgtcaaaataaaaattgaacctgaagaaaagtttaacattgaatccaatgaaatcacggagtctaatggaaagactacattttcaggagatgttaaggttttttttagtggggcattaataaaagcagatgtggttagcacgacaaagaatgctgatggccagataattcttgaggccgataaattatatttagaggagactgagaaaaaaaacaaatccaatacctga

SEQ ID NO: 150028 - DNA, 237 bp, Enterobacter cloacae
atgtctactgttgtggggtcagtccaggtgggacttgtcgttttacatggtcttccagtcaaccgatatcagccatccgggctaggtttcgaagcgaacgaccggttctacctgtgcagggagggtctgcaaacggatagctctcaggagagagttctgcacgatagtcagttgtatgattaccctggcaataacggtcgcagagatgtaatcacgctattcatcaagatgcaatga

SEQ ID NO: 150029 - DNA, 267 bp, Enterobacter cloacae
atgcagccacgcataaaacctggcccgggcaacgcacaacacccgacacatcgtcatgacaccccatacagtgcggtgctcattgataaagcggtacttcagtcgggctcccttgcaaagtaccgcgcggcctttttcagtatgtcccgttcttcctcagtgcgcttcagttgggccctgagcttcaggctctcgcttttcgcttccagtaaatcacgggcatgctgctcgctgttatcgggtttaatagcccgtaaccacttatag

SEQ ID NO: 150030 - DNA, 417 bp, Enterobacter cloacae
atgaataaatctttatctcactatcgtcagggcggctttacactgcttgagctgctggtcgtacttatgattatcgcacttctggctggctttgttggtccgaaagtcttttccaacgttgatcaggctaaggaaaaaaccgcactgcgacagatgcgctcttttgctgatgcacttagccagtatcgtctggacacgggggcatacccttcggaaaatcaagggctcaaagctcttacggagaaaccagcaaatgcactgcactggaatggtccttatttaagccagcagatcccccttgatccgtggggaaatccttatcagtggcataacccaacccgtgaaaaaaacagcattaatgaagtggatattacagctgtaaataaagatggaaaacctctggtttatggtttctga

SEQ ID NO: 150031 - DNA, 285 bp, Enterobacter cloacae
atgcaaattaatagtagccatttacccgtactggataaattcaatatagatcgtgaaattctcatgaataacccatgccagaatgtgatgaccggagcctggatactcgcaggaaacattcgtcactttggttattcttgggaagccgttggtgcctataatgcggggctggcaaaaacacaaataaaaaaaacgttacgtgaaaaatatataaagaaggttataccgcattatattaaattgaaaaaaaatcaatcagttcaactggcaggtaataatgattaa

SEQ ID NO: 150032 - DNA, 1170 bp, Enterobacter cloacae
atgattaattttgacgttatttatctggaacagggtaaacggaagaccattcagatgatggctgcttcaccggaaatcgcacagaagcaattgcaggatgaaggcttcgtggtcatgcgagttacgccagcagcaccaggtaaaaagaagcgctttccgcttaacttgtttatccaagagttggtggcgttactggatgccgggttagttgtaacagaagccattgaagccctgcgtgccagtagtcgtgagcctcaactctgtagtgttctcgacaccttattgaaaagactctatgagggctgccagctttcgcaggctatgacggctttaccagcgattttccctccacttttggtgaataccgttaggtcatcagagcagacaggtcatctgccggaggcgttaaaacgttttcaatactatgaacagcggatggaggttttgcgtaaacgaattaaatcaacgttgacttatcccgccatagtgatggctgttggtgccttaatacttggttttctgctgggatttattattccgcgttttgccgcagtattcgatggcatgaaaaatctgaatggtagtgcacgctttattttgtggtgggggaagctggttgaacagcacggcatggtattgctggcggccgttggtggcggggggctggggctggttttgttgttaaaaaacaatcaggtacagcgttttttgctcaggcagctgttgaggcttccacagttacgaagtcagcacaacctgacgatcatggtgcgcttttatcgcacattaggtcttttgcttcaaggtgggatgcctgtagtccaggcactgaatctgtcgcgtacaattctgcctgccacacatcatcagcaattgcaaaaggtactggaaaatgtgcaggcaggccaggctctgtcggtcgtacttgatgaccagcaaatgtcaactccggtagcaacgcggctcatacaggcaggtgagcgcagtggtcagttgccatttatgtgcgaacggatcgctgctttttacgatgaagcgcttgaacgagcgatagaaatgtttagcaaagtattcgaaccattattgatgatcctggttggtggcatcgtgggtctggtggtgctgttactttatatgccgatttttgaactagcaggaggactttcctga

SEQ ID NO: 150033 - DNA, 1638 bp, Enterobacter cloacae
atgaaacattcaattaatgatgcgatggagcagttggatacaattctggctctccccactgcatcacgctgtgatgctcttacggctttattggaaaccaatccagattaccttcttcctttggctaacgccctaggactatcagccattagcgaggagcaagctgcccgtattgaaattgactttagtctggtttcgctttctgacgcactgactcatcgcgtacttccgctgcgagatggtgatcatatctggctagcaattgccgatcctttttcgctggaattacgacagtggactcagcttttcccggcacgactggcgctgacctcattgcgctggctgaatcaaaatctggacaaactgaccgggcaacagcgcacactggatcagctcgagcagcagaacactgaaagcgatagcgatgaactgattctggaaatctctcctgccagcattgctcgtgaaaataatgctgtaatcaaactagttaatgccacgctctacgatgctctgcagagtcgtgccagcgatattcatctttctgcggttccggaagggctagccgttaaatatcgtattgatggtgtacttcatgccattcgtcattgcgcgggggcgcagcaagcggagcaggtaatttcccgactgaaagtgttgagctgcatggatattgccgaacgtcgaacgcctcaggatggtcgtttcaaagcagtaatccatcagcggtcggtcgacttccgtgtttctgtggtgccgggaatacatggtgaagacgcagtgctacgcgtgctggataagtcatccgatcagacgctgacgctcgagtcactgggctttgatagttatacgctgaatgaaatacgccagttaacacatcgcccacatgggatggtactggttactggtcctacgggaagtggtaagtcaaccacgctttatgccgcgctgagtgagcttaacagtggtgagagcaaaatcatcacaattgaagacccggtagagtatcagcttaacgatgttctacagattccagtgaacgataagaaaggtcttaccttcgcgagagggctacgagccatattacgtcacgacccggacgttattttggtgggtgaaattcgtgatggtgaaacggcaggcatcgctgttcaggctgcgctgaccggacatatggtactttcttccgttcatgccaacaacgtattcagcgtattagaacgttttctctatatgcaggttgagcccgccagccttattactgcacttaacggtgtggtggctcagcggctagtacgccgtatctgccctgactgctgtgtaaacgtacaacctgatgccgaagcgctggctctctggcagggaagtgaacttcgtaacatctctgccaactggcgtaaaggcacaggctgtgaagcttgtcgtcatagcggctatcgcgggcgtctggcgctggctgaggttctttcgtttagtgatgcaatgaaagaagcgctactggcacgttcgtcagttcggcgtttacgagaagtggccgttgctgatggatttgtaggtctacaaaccattgcactgcgtgcagttctggaaggtaaaacaacattacaggagattaaacgtgttattgcgcatggctaa

SEQ ID NO: 150034 - DNA, 702 bp, Enterobacter cloacae
gtgttattgcgcatggctaaaaatttacagtgcgatattctttctgatcgggttcgtctgtgggaggggaaaaccctcctcagcgatcaggttttacataaagaagagggcctgaaagcagctttaaatcgtttgctggcggcccgccctgagggtatacatttaagagattacgtgactttccgtctgggaaacaaattagtcaatacttttgttgttccttggttggagggaataacttcactggatgaattacgctgctatgcgcagtcgcttattcctaattcgtttcccggtttagccagcggcgcgatgagggttgaattcgaaacgcttgagcatgggcagacagcactcgctaccgcgattgaacaacaaacgtggcagctattatgtgacgtttctcgacagcactatttgcggttcaggggcgcaatgacgccatttcagtatctgttaaagagttataacaaaccattgccggttgaaggcattttcattgtgacagacgatgaaactacatcgtttgcctgtcgttcgggcaatcagtggcaacatgttcataagctagcgttgcatgatttcacactggaagagcaactggggttagttaggcgactgtctggtttaaggcatgccccttcattctgcctggataatgaaaattgggatatcagaaagttgcgtcaggcggcttcataa

SEQ ID NO: 150035 - DNA, 504 bp, Enterobacter cloacae
atgaccccacgatttacgcctatacctgcttgggctattcgtgcctcaactgtagtcgtgatcctgacattgcctctgctcgctatcatgattcattcctggcatgagcagcagcatttagaagcctctttcgaacaggtagagaaacagttgcatgctcatcagcaggcggcaaaggaaattactgaaaaaatacgccaacaagcgaaaaaaaaatatgttccacccgccgtactggatttactgaaccctattggtaaggcgctttcggaggatgtgtcattactcgaagttgatgccagtctgcagcaaaagcagatcagactggaggtcgcagccaaaacattgccggcactactggactacagtgggcgattacagcaaatacccgcaaccgtcgaattacagaaccatcgtgttgaagccagtaaaggcaacacgtggccagtgagtgcaacacttactctcaatatcagtaacaaaggtgatagcagacatgagtag

SEQ ID NO: 150036 - DNA, 537 bp, Enterobacter cloacae
atgagtagaaatctgttggaactttatctgtccagggggcgttggcactgcacgagattaattgcaaagactggaatctggccactggcaatgacgatagttccgttattactggtgatcggatggcagggatggctggtaccccaaaataagtaccttaagcaagagttgataacgatggagcagaagttaaaggcaccgctgccggcgatcgcaaatgatgagccttcattagagagctctctcagcataacagagtatcagcaggtgaaaatgttgtttgctatcttctctgaatatcatcttcaggcgaaaagcagccattattatttttcgtccgccgaagaaaccactggcaaaacattgaaactctcagtgccactacagggagactggccttcactggcgaaggcaattaaaaagatttcacaggcattgccggtaacggtggatagggtttctgcaaaacgtaaacaggaagacgacacagccctttcactgacattacagctaacattgcatagggggcaaggatga

SEQ ID NO: 150037 - DNA, 498 bp, Enterobacter cloacae
atgaaacttccatcatatctggtcattgcactgtttctaacgggatgtgcggtactggcaagccagtttttttcaactgacgaagcatcaacatctgtagtagcgccgctaaaagtcaagcccaagccagtgaataagactccggcggaagaacaggtagatgtcattgacctgtttccatcaagcgtacgacatgttaccgctcccgacatcgtcagacctgttgtaaagacaccagagattcctgcctttccctatcaggtagttggagcatggtggcagggggggacaagaattgtgattatcagcaacggcaatcatgaccgattgatctgccaacgctgtggagtcaaaaacgcgctgcatgccggcagtgcagtaacatccgagtggcgcctgattaagatagctgatgatgctattactgttgaatgggaaccacaaaaattactcaagcgtattgagcttggcgacctgaaatctgcacctatcagataa

SEQ ID NO: 150038 - DNA, 1881 bp, Enterobacter cloacae
atgaaaaaactcactattacattaacgctgctgtgttcaatattggcgggctgcgcccagcacacagaagttaaatcgtcagtaatgcagccaaccacaaatgcttcgctgattgaggcgctggctgaaaatgataaagcgcgcatagctgatccaaatgatacccagcttcgtattcagcatcaggacttaaccacacagttggttaatcgctatctgaaagaggcagagcaagccctgacgcataacgattacagcaaggcctcgcaactttggcgtgatgccctgtcttatcagccgggtaacatgcgcgcaaaacagggtctgcagcgtctggaatcctcgcgggcactggacaaaatttaccagcaggcagtagcgatgatcgtttctgacccagaacaggcgctgaaaaaggttcagcaggttctgtcagaagatcctaattggccaaatgcgcagacgttacgtgatcatcttatgcgcgagattgcagtgcaaaatcagcctgaaacgagacttaaacgcgaactgagtaaacccatttcgctgaattttcgtcaccataatctgatggcgatttttgatactattagccagctgagtggcgtaaacattatttatgataaggatgtaccagcatcagcaaatgccagtctggtggcaaataataccacagctgaagatgcgctaaatttgctgctgctttccaatcagttgcgaaaaaaagtattgaacgacaatacactgctaatctacccagcttcggcgcagaaagaaaaaatgtatcgtgacatcgtaatcagaacagtatttctgggttatgccaaagcgaaggacattaatgtggcgttacgcaacatggtcaaactcaaggacgttcatgttgatgagcgaacgaattcggttaccatacgcggctcaaaagagagtgtggaaaaagctgagcgcttactgattacccttgacaggccagaagcggaagtaacgttggcggttgaagtactggaagtgaatacccaagatattgaaaagctgggaatcaactacccgggcagggttggtgttggttttaacggtcttgaaggagcaaaagaacaaatcactcgcgggggattccgcggcgacaatctttttgtcaacctgggggcaagtcagggaatcagcgccgatatgcaaaaaatccgtgacaacgcaaaggtgctggctaatccccgtatccgggttaagaataataaaaaagcgttagtggatattggcgaacgtattccggttctgaccagtacggtgtcagaagggttctcgcaggagaaagtcgaatatcaggatgttggtctcaaacttgaagtaacgcctgatatcagcgtggatggcacgatttctatggatgtaaaattcgatctcagtaccgttggtagcgcagagaaatcgaaagatggtgtagcgtattatcgtaccaataatcgtgaagccagcaccgtattaagcagtaagaatggtgaaacccagatgctggcaggtctgattaaacatgatgaaaaaaacagcgcttctggattgccttatttaagtgatattcctggaatgggtcgtattttcggcagcactgaaaagaaacatgaaaagacggaagtggttttactgattacacccgtaatcgagcacaacattgatctgcccggtagccatgtcagcaccattaatatggggactgaggagatgcagggtgataccggttttcagcttaggggcgtagagaagccgagtactgaaagcacatttcaggcaccaccgttagcgccaccggctcgctttcctgccaatgcaggctcactgcctgcaccggttgtcgatgatgctcataatgcgagtgaggaataa

SEQ ID NO: 150039 - DNA, 474 bp, Enterobacter cloacae
atgcgtgggcaacaaggatttacgttgattgagatgatggtcacgttgacattgcttgccacactggccgccgctgcacttcccatggtgcagcggcatcagcaacagcgtcaagaggaacaattgcgtgactcgctgcgagagattcgctcagcgctggatcgctatgctcaggccagcgctgagggccggattgctaaagaggctgacgcatcaaattatccgggatcgcttcaggtattgacggaaggtgtaatggataaaacttcgccaactagaaaaaaactctattttttacgtgccgtgccgcgcgatcccttttgccagtgcgagggtaaaagcaatgcagaaacctgggagcttagggcatctaatcatgcccctgatgacttcagcggcggcgaagatgtttatgatgttcgctccagtagccatatgattggattgaacggagtgccttatgcgcaatggtga

SEQ ID NO: 150040 - DNA, 363 bp, Enterobacter cloacae
atgcgcaatggtgaaaaaggttttactcttatagagttgctagtagtgatggctattattgcaacattgatgaccttggttgcgcctaggtttttccagcagacggaacgtgccaaagaggtagtactggagcacaatcttcatacgcttcgaacggccattgatagttttcgccatgatcgtctggtggggccacagcagcttgatgagcttgttgaagaaggttatttgcgtgaaatgccgttagatccactggcaaaccgccgtgatacctgggaagtcttaacggatgagcagggacaaatcattgatgtgacttcatcgtcactaccggaaaaccagggcgaacaggatgaccgataa

SEQ ID NO: 150041 - DNA, 501 bp, Enterobacter cloacae
atgaccgataatcaattatctctcagacaggggggctttacctatatcttactattgctggcgcttactgttttagcactgtcgttgttaaaaagcaaagatacaatacaagtgcgatttcgccagcagcaggagtctgaacttctttttcggggggaacagatccgcgaagcgatgcgactttatcgggttgacgagcatagcaatggttgttttcctgtcgggtttgaggagttgatacaggatacacggggcggaaaaacacgttatcacttacgccagtggtttactgatccgctcacaggacaaaaagagtgggggaagatattcgacgaccagcatcgatggattggagtatacagtaaaggcaagggcacaccattacgcaaggaaggttttgttaaagacagcgaaacatttaaaggagcaaaaagttatcgtgaatgggcgtttaagttggaaactgatcctagtgcaccactacccgaggcttgccgatag

SEQ ID NO: 150042 - DNA, 1251 bp, Enterobacter cloacae
atggtaaaatttacgttgcaatggctgatgttttgcatgctgtggagtgcactcgcactgctgagtctgagcagccgggacccctggagcctttcaactaccacatggttacctgcgggagtattgttttttaccctgataatcagcccgcagggaaagtggcctttgtggcttatctcctccatgctactgcacacgctgtgtggtttttatatggggcggtcgttaccgctggcagtccttttcagtgtttttgatgggctgagtataccgctctgtgcactggtctacttgatgcttgagcggtatgggcatatgcaagaacaacacagtccactctttttttcattgttaaaaagtggtgtattggtgatagtagctttcagtgcgggctcgctgttaaccctttgcctatggctcagcaattacgacattgcctcttcgcatctgatgtcatggtctttggcactgctcactggctgtctctcttttctgccgcttgccaggagcataaggcaaggtaccgacgtgaaattaacagcgataggtggaagagatgcgggaataatgaccatcaatattattataatgctgtttttattcactcaacctttttatgagcccaaatctattttctctggttttaaccccacctatttgctttcatgtagtctgcttttgtcgtcactgcacctcaacggccgcatgctgggagtattattggttttgcattacgtcgcggttattaaggctactctgattggattggggccttttgtctggacgcgagatcctgccatctcgcctatttgggggatctggggagctcaatggtatgttgcattcacctcactactagcatttacgttattgcgctatgcagaaagtaatcggttgcagcaagcgaagcttttaagacaacagtctctctcatcggcgctctcaacagcggctacatatgtcacctttgatcttaatccatcagacaagcgattaaactggtcagtcccaactaactacttctttaaacatggttttccggtagcgacaacgttggcgctgttggaagctagttctgaaactccgtttatggtggcgtttgatcactggcttttaaacggtcaggctgatcttttcaccagaaagctcaatatcctgaagggggagctgagcgtgccgtgcctgctggtcattgccccagccttatcggataaaatgttatcaggtggtattattgtgctttccgaatga

SEQ ID NO: 150043 - DNA, 864 bp, Enterobacter cloacae
atgtctgtaacatctaataatggaatttctttatcatcgcaagtctatttctatcctgaccaaaactgtataaaaaacaaattatcaggacataaggtttatcttacaccaagtgaaaagaaattgcttgacattatacttgatggtaaagggagcaaggaaaatatcatacatgaaatatggctgaaaaacggtacaatagtaggggagtcaagctatcatcagttgatcaaaatgctgcggggtaaattaaaaagcgcaggccttccatgttcaatgataaaaacaatacctcgacatggagttatatttattagtgaacatgaagttacgggaataaacaatcaagaggcgcatgcctatgtactaccccggccagaagacgatgaatctcccatcacaccgatcgggaatgccgaaacgttatgcaatgataaaccgatatcagatgacgttgacgttgacgttgacgttaatacgttatatttgcgcgaggttgaatcagttgagcatgcctcgaatgatattgttaataaaaagaaaaagactttcattttacctaaaaaaatagcgttcctcgttttgcttgtgattattttctcaccaatggcatatttcatttttaatggtgcaactacgaccagttttcctttaaatgaaaatgttgagggtgttaattttcattcatttactgtggaacagctatcatcaaaaaatctgaataaaatcttccactcattggataaagaaacccatgaagtttacattgcaagtaatgggccgaaaatatggatagccaaatgcaacaaaagtataaaccagaaggacagccaatgtcagtacgaatatttgtcagcctattaa

SEQ ID NO: 150044 - DNA, 471 bp, Enterobacter cloacae
atgtcagtacgaatatttgtcagcctattaatcatttttggtataatcagctcaggtgcggggttgtttatacaggattggcaggagaaaaaaagcgttcctcagttcccttgccatagcgtgatagaaggagggcagtttataggcaacgatctgcaaccctacatatttgatggtatccttacatggtggcctaaaagggggctggtgagtatatttgggataaaaaaaatgggtaacgatacacaggttgttaaacaagcagtacaactaaaagacattacccagtatggtaacgctatttatgggcatgtggaccagtttgatattcctaccaatggccacgtaagcttatttcctactttgaataaaaaaggggcctcagtttcatttatttttaagcctctttctgaaaggaaatggctgatgatgatgaatgataactgggtgagcatgtgcgagaaaaagtaa

SEQ ID NO: 150045 - DNA, 621 bp, Enterobacter cloacae
atgcgcaagacgattctgattgctgatgatcatccagtctacttgttagggttacgaacgttactccagtcccagcaggacaaatatgaagtagtccacgaagctactagtgcggacgagttaattgacaagctcatgaagcagccagtggatgttgttattacagaccttagtatgcctggcaaagagcatgctgatggtctttctctaatccaatttattaaacgacgctggccggatattatagtgattgtcgtaactatgatttccaaccccgggatacagaattcactatcacgccttggcgtgcatgctgtactgaacaaaaacagcctgtctgtggatcttttgcaaacgatgaaggcacttttctccccggtggctctgcgcgcagtagccaaagccagcgaagagcaagaagctattgtttccttatcgcctaaagagtcagaagtgttgcgcctgttgctgcgaggcatgacggtaaatgaaataagtgctcagctaaagcgaaccaagcagactgttagtgctcagaagactaatgctatgcgtaagcttggtgttacatctgagctggaactttacgaatatgctcgccagttaggactcaacagttaa

SEQ ID NO: 150046 - DNA, 3366 bp, Enterobacter cloacae
atgctggtttcactactgattttgagtgcatcgcttagcctgttcagtacggcgatttatgcggaagtacgtattgccttgcttgatgggcgtacgccgctctccagtgccccgcctgagcgaagcattctggcagatgatatatcgcttctctggtgggattcagcatatccaccacacatccttccttacactacttctggtgatgcgcttcaggcgctgatggaaaaaaagattgatctgttcgtcagcgcagagagttttaataaaaatgaacttaatgccagccagcctttaatgacttttcacttatgtctgttaggtgaacaacgagcggagatgccattactggtaatgcctgatattccgctatcaatacgagcattacttcgttacgactcatcaacaatagtggagggtgatgtatcactttacggcaatattcgccgcctgatgcgacatgaagcttatggactagttgctccgtgtttcatgatcgagcaatttatgcggcgtgcgcctctgactaatttgcaaaaccgtctgctttccggacttcctcctctgcagtaccgagcctggggtcgtgccgaagaaaagaggctgacagatgaagttaatcgtcgcctgagtcgcagcgataaccaagatgtacgtgaactcgaacaacgatggggattgccgactggcagcgtgactgacagacgcacattaatgagcagtaaaataactcagcctttactgctgcggattgcggtagttgatgcgcatgcgccactcatcatcgaagacgaagaaggtaacagacgtggcgtttgggatgaactgctcacttctttttttccaaaaactattttttcagtgcagttaattcaagttgccggacagacgcaggctgaacagatgctcaaatcccacaaagtggatatgataatgggcgcgacacagccaacaactcaaggcgacaggcgatttacttttgataatcagatactgggattggtcagtaccagagcacacccgctaaatggcgatctgtcttcactacaaaacagacgcttagccgtgatgcgtaatgtagcagatatatcgattttacgaaaaagtatttcttctactggattactggtggtagatgacattccgcgtggtctggctttggttgatgctggtggcgctgacggtctcattgctgacgctttcagtttgaactacgagcttaaccggcgcaacaatagtaaccttattttaggagggatcgatttgcccgaaataccactcaggtttgtgttgcctgatggtgattccgtgcttcatgaacgtataagcgatattcttgaagggattaccccagagaatatcctgagcaataaagcccgctggcttgaaaacgggcagcatgaagaaaataatcgaatggtccgctggttggtactactggccgtcattgctgccatagcggtaatcgtcgccatagctatggctgcccgtgtttttatccatcagcgtcgaaacacgcaaattcaccatcagcttactgatgctttaaatctctggcaggcattattgaacagcgccccagttgctctgtttgtctgtgatcctgccgggcgtgtcgtccgcttcaatgaggcttttgcccgttccccgatagtgccttcaaaaatagttgaaggggattcgtttcccaaagagacaggactatttatggaacagtggctggatttacctggtcgtatggcaacgctttattcagctgagccacgtgtagatgaagtaacactgatgcacctgtctaagccgataacactgctgcgatggatggcacgctataccgatagtagaaatgttccgcagggcatggtcggcggctgggttgatatcagcgacaaggcagcgcttgaagccgcattgaatcaatctcttacgcaagcagaaaaagccagtgaagaaaaaactacattcctggcacgcatgagccacgatatcagaaccccgctgaatgttattttggggcagcttgacatggaacgagagacccacccttccctggagctggcctggcaggcctccatcaccctacgcgatttagttggtgatattctggatctttctcgcatcgaggcgggtgaacttcagttgcaacctgatatcaataacctgcgacaaatacttgttaatacagcggctattttctcgagcagcgcaaaagctaaaggcctggaatggctgagcgatattcaggttccagaaaatattttttgtcgaattgatcatgtgcgtttcaaccagatccttgcgaatctgctgggaaacgctatcaagtatactgagaaaggtagtgtgactcttgaagcccgttttaatataactgaattgtctgtaaagattatcgatactggcatcggtattccgctggaacgtcatgagaatatttttgagccatggtttcagcttgacgctaacacaccttatagcagcggattaggattagcaatctgcaatcaactagtttccttaatgcaaggatcactgacgttgcagagcggagttaatgaaggcacaagcgtgacgctttctttacctcttgagatcgtcgccgcacctacggaacgggtcgttgatgatatatgtgtcacagaaggatgtgacgtgctgctggtagacgacttcccccccaatctcactattatgaacttgcaattaacccgtcttgggcatcgtgttaccgctttcaccactccaggcgaagctctcgatttcctgcgcaataatgaggtggatgttttgataactgacagccagatgcctgaaataagtggctatcaattggttgaaagaattcttctaaggagtctgcttgatgaggtgaattgcccgcccgtgatgctgggctgtacggcaaatgcccttcgacgagaagaggagcaggcgcttcacgcaggtatgaatgcgctactacgtaaacctctgagtgagcaacgtctgcaacaggcactatcgcgatttcttcaggaaaaagatgaaaaaatcgacctaagtgaaatttatgcgctggcagggcagcaggatgaaatggttacacttatgttgcaacagcttgtaacatcgctggcaggcgatctggcttcactcgatgcgggccagcctgatgcccgagaagtggcgcgggtggctcataagcttaaggcctcatggaacctgctgcgtttgcatcgcgcggagcgctattgcttaacgatggaaaagctgccagattttctggagcaaggaattttgaatcctgctgagctgcagaaacttatggcgcgttttatgtacgagatgaaaaactatcaacaacagcttacagaaatacttccttaa

SEQ ID NO: 150047 - DNA, 1206 bp, Enterobacter cloacae
atgaaagttaagaaaatagcatttgcggttgcaacattaatggtgagcgcgggttcatgggcgcatggatttgtaatggatccaccttcgcgtgcgtttttatgtaaagacattacgtcaaaagttccaggttatgccggcgaactaaataaaagctgtggtaacattcagtatgagcctcagagccttgaggctccgaaaggttatcctgcatttggaccgaaagacggtcagattgccagtgccaatcagacgcgtggtccggaaatggatcaaactggtgcagagcgctgggtcaaaactgaaatatctgcaggccagaatcaattcaaatggtattttactgccccccacccgacaacgaaatatgagtacttcattactaaaaatgactggaacccggcacagccattaacccgtgcaagctttgaaagcacaccattctgtactattccggtagcgaatggagcgcgtcctggcattggtgcatctgttgttcacacctgtaatgtgcctgaacgtgaaggctatcaggagattctggcggtctggactgtaaacgatacctcaaatgccttttataacgtcattgacgtagaatttgccggcaataatcaaacgcctgatgacgattctggtaccgttacgcctccaccagtcgttccagatgagccagctgatgacacacctcctaatggcaatgaggaggaacatgcggcacctgttgtccatgttgcacaaaaccatattattgtggataaagcagccgttaactcaggatatgctatggacgcatccgcgactaaagacgctacgatgttcaagtgggagcgtatcgaaggggattctgccttccagttgcagacccattctggtgccccaacgtataccacccctctgcagggtaaggagctgaaaactatgcgtgcatgggttcgcggtggaacaacaggtaaagctaaatatcgcgtgacggcaagtaatgctcacggaagtgactcgaaaatcatcaccattgaggtaaaaaataccgataacggtggaattcaggacccttctgtaccggagtttaccgcacgtaccgagtacaaagcgggagataaagtcagctataaaggccacatttacgtttgcctgaattctcataccagttttgaacactggaaccccgcagaagcacattcactatggaaaaaagtgaagtag

SEQ ID NO: 150048 - DNA, 174 bp, Enterobacter cloacae
atgatttttattatcatggctattgcctttccctttcgttgcggaggcaatagcaacgccagccagacttgcggcggcaatccctcccgcgacggcaagtgcgccattagaaagcaaaccagccaaaataccgttatgatcgtcattgctgtcttcatcgtcagcaatgattga

SEQ ID NO: 150049 - DNA, 3429 bp, Enterobacter cloacae
gtggagcagaccgataaggcgggcaacacctcggaggcggtctccctgcctgcgttcgaggttgataccgtgaagccgggcgacgtgacggaggtggcgctgaaggacgataacggcgctaacatcagcagcgccaccaatgatagcacgccaaccgtaagcggcaagggtgaggtgggtgcaatcgtggtgctgaaggacggcgccggtacggtgctgggcaaagcgaccgtgaatagcgagggcaactggagcatcacgccggagcaagagctggctaatggtagccacagcctgaaggtggagcagaccgataaggcgggcaacacctcggaggcggtctccctgcctgcgttcgtggttgataccgttatcgcaccggctgagaatatcacactgaccgacaaaaacggcgaaaccgtagaggacgggaaaaccaatacaaaaatcccagtgatcagtggtgaagcggaggcgggcagtaccataaccattactgatcatgctggtaacatcattggttctgtaagcgccggtaatgatagacactggagcattacgccatataaagagctggcggaaggcaaccagacacttactgtgcacgttaaagatgcggcaggtaatgagacttcatcccccctggaggtgagtgttgacactgttgttcctgacaggccagataacgtgacgattaatagcgatttgaatggcgaagaagttgaaatcgttaacgggctgaccaatgacagtacggtcgtgttggtcggtcacgccgagaagaacgcggaagttaccatccgtgacggacaaaccgtgctgggtacagttaaggcgagtgaaagcggcgactggcgttttgaggtatccgaagagaaaaagctgaaagatggtgaacatacactaattgtgacagcaacggacgatcaccttaacgtcagcgaagaaacgtcgctgaatctacacattgatactataaataataatgtgaccacgattaatacgcaggatggtagcaatatcactgatactgatattccgcgtgttaatggcaaagttgacctaaaggacggcgacagtccggaaagtttgaaggtattaatctttgacgatgtggacggcgacggcgtatacgataaaaacgtcgacaaacttctggccactgttgacagcatcggagcagacggcagctggaacgcgcggctgacatcgatggacaaaggcgaacaccatatcaaagccgtcgttgtggacgccgcaggtaaccattcgcagacgagcaacctcaatgactcctccgatggcagtctggatgttaatgcgcctgagagaactacgctttgggggtatgatgaaggcaacactgtcggacgagggcagggaggcattcactttgcaagtattgtgaagaacataggccacttcagtagtaaagatgccgatgatattgcaatcagtgcgccttttagttcgcatggaaaatttaatgatagcggcatggtttatgtattgtatgggaacagcaatcatttactgccgaagtatcacgatattaaagagttgcttgatgctcatcctgaagccggtctgaaaatttataactcaggaacgggaatcaatagtaatggggaaatagcggttgccaaggacataatggccctggcgattgagaaagttgatctaaatggggatggaattaatgagttggtaatatcttccttatggggcgacaaagcttatgtaatctggggagacaaaataaatggtactcatgaaatagatcttgccgatattgataaaggagataatacatacggtttttcagttagctcacatctgaactattggcttggatacagtctggcagcctatgactataatgccgatggtgtgcaggacctgttgattagcgatattcatgggccgaaggatgaatacggcggcgttcttgttcttaagggaagtaaggatcctaaccacaagtgggagaatatacagctggaggtgattgagaattctgagaatacacctggtggcggctacgctccgcctgccagctcagatactgaaggtgattatatttaccatgagaaaacagaaagtggtaaccagaactggaatctaggcgctgatatgcggaatgtgggtgatattaatggtgacggaaatgatgatttcgtcattcttgatacgcgcgctgccgtacaaggtgcatccgggagaggcgaggcttatttaatttatggtcagaaggatggctttaatggttcgctgaaacttgacgatctctcttcagatcagatggtgcgtatccagaataatggcactggctggttaggtgaagacaaccctaacgccgtcctgcagggggatgccgattatgaaaccgagcctaacgagaaagttatcgctggtttaggtaatttttatggtgacggcgatcacgctggagatctggccatagctgcaccgcaggatcaatatggtcgccaccagggcaaagtatggataattaagggttcgtctgcgggaataggtcacgacggtaaattacaggtcggaaccagctcaaatacacatttatctaccgaagatggctttggcattgtttcctcaaaaagtagcggagatcgtagttttggttcgcgcatcgtaggaggttacgacatagatggcgacggaattcctgacctgattatcagcgatccgctggccatgcatgatgggaagactgtaggcgctgtttatgttgtttacggcggtaagacaggcgagtaccagctcgatgccaatggtgagataagtattgattcactggttagcaacggccttgccgaggtacattggggagaggttcctaacggacgattcggttctgatgtggatgtcgcggatatgaatggcgatggaaggctggatctgatcgttggcgcaaatggtgaggacggtgccagcaatccggctaatccaggtgatccaaacggcaactgtggctctatcaccatcatctacaaccatcatgatgtggtggagagcaaagcggctgcgatgagtgcgatgagcctggaaccggagagccacgcggtggctgattgcagcgcgctaatcctggatggcgatcaccagtacgtcgatctggcgtcgctgacgcaggcgctgaaggcgctgcaccacgtcgatttagccgacggggaaaatacccttaccgtcagcagcgatgatgtgaaagcattgagcgaagggcaggatgccactgcgcctgcgctaaccattgaaggagaaaacggcaacgtagcgctgaccggtggccaggaaaactggcaggagggcgataaagtggaggtgaacggaacggtttaccaagcctgggagagcagttcccactcgcagatccttgtagacgatcgcatccacgtcacggtgttgtaa

SEQ ID NO: 150050 - DNA, 2208 bp, Enterobacter cloacae
atgtcagaaattaaatcagagaacctttcgctaacccgcgaagaaacagcagacagcactcttctgtgggccacgatctggctgacgcgccatcatgcgcggccggccagtcaggcggcactcagcgccggcctgccatgtggtaaaacgctgacgccgcaggtggcaatacgcatgcttgaacaagccggtattgatgctgcctggacaaaacgttctgtagaagagctatcgatatatctcttccctgttgttgttacggataaacagggacgctatgagatcatttatgagcgttctgaaaaaggataccgcttatgtaaagaggacggtagcgatgagttcatttcagcggaaactgtacgccagaactatcttgacttcgtactgctttcgaaagcaaaaaaggaacataagccacgacacgaagccgaaattcttcctgaaagccagagagaaggacactggttgtttactaatttatggcgctaccggcactatttcttcagcgcagcgctggcagcattgctggcaaacgtgctgacactttctaccacctttttcaccatgaacgtgtatgaccgtgtggtaccaacacaggcttacgtcactctctggtcactggccattggtgtactgatcgctattacatttgagttctgctcacggcaaattcgcacatatctgatagatgtagccggaaaaaaaactgatctgctggtagggtcccggctttttcgacagacgcttgcactgcgcatggaaagcaagcctcgttcatcaggctcgtttgcgaatcagcttcgtgagtttgaatcagtacgcgattttatctcctccgccacactggcgacgctatccgatttaccgttttgtctgcttttcatggggattatgtactgtatcggtggcccacttgcagtgatcccgctactggcgatgccagtgataattctgctcagtattgctattcagtggccgctcgcgcgttttatgaaagagaacgtggcagaaatctcccagaaacaggggttggtcattgagtcaatcaccggaatggaaacactgaaagcctgtaagggggaaggcgtcatgcagaaacgctgggatgattgtagcgcattggcggcagcttcatcgatgaaaacccgctatctctccagtcttaccactaatatggtgagctatgtgcagcaggtctgcaccattctcatcgtcgtgtggggagtctacctgattcatgcaggcgagatcaccatgggcgcactggtggggatggttatactttccggccgtgctctttctcctttagctgccgtagttgggctggcggttcgctatcaacaggcgaaaacagctctgacatcgttaaatcaattgatgaaactgcccgtagagcgtaatccgcagcagcagtatctggcttccccagagctaaaaggtgagatcgtgcttaaaaatgcctcattcagctatccgaaaacggatcaacataaggccagcgtggtgttatctcctgtgtccattcgaattcagccgggcgagcgtgtggggatccttggcaatgtaggcagcggtaaatcaaccttacttaagctgctggcccgactttatcagcctactgatggccaactacttatggatggtctggatgcacaacagatcgatcctgccgactggcgcagttgcgtcggctatgtcagtcaggagtgtcatctgtttcagggaactttgcggcaaaacgtcatgctgggcaatcccgcagctaccagcacgcgttttcttgaggttgcccgtctgaccggacttgacacaattgccaatcgccatccgcttggctttgacatgcctattggtgagatggggcaggggctttccggcggacaaaagcagctcgtggcactggcacgttgcctgctgcttgaaccggaagtctgtctgatggatgaaccgaccagtgctatggatggaatgaccgaagcaaaatttgtcgaacacctgaagcaagcaactctgggaaaaacgctggtaatggtgacgcatcgtcacagcgtgctttcaattgtggatcgcttgattgtactggacgacggaaaaatcattgccgatggccctaaacagcaggtgctggccgcacttaacgccccgcgtcgcgggccttctcacgtcacaactcaaaacagagcaaaaagtcatgaaacggcttaa

SEQ ID NO: 150051 - DNA, 1272 bp, Enterobacter cloacae
atgaaacggcttaatatttaccgctttttaacaatacgtcgatgggccaaaaataagaaagagccaaggcttgtcgcagacgagatgcgctttattgatgatttgcaaagcgccatagtcatgcaaaaaacgccgttcagcttggtaatgttgtggttgatagccagcgtattagtgacagggctgatctgggcgcacttcgctcgtgttgaagaagttacccgtggtgaagcaaaggttatccctgccagccatgagcaggtaattcaaagtcttgaagatggtattcttgagaaattgcttgtacgtgaaggcgatattgtggaaaaaggccagccgttacttaagttggacgccaccagtacagaagcaaagtaccgtgaggagctgtcaaaagtttacggactgaaaggggcaatctcgcgtttgcgagccgaggcgtttgatctgccacttatttttcctgatgagatcaaatcctttcactctattgtacaggacgaaacgcgagcctatcaaacccggcgtaaattgctggacgaaagcatcgcggcactgacgcgtaacttaaagctggcccagtctgaagtcgcactttcggagccactggcaaaagcggggttaatttcaaatatggaaattttgcgcctgcatcggcaggtcaatgatctgcgcctgcaaattgccgaccgcaccaataaataccattctgatgccaacggcgaactgactcgtctggaaacagaactggcgcaaagtgaggaacggctgacgcagcgacgggaccttatggaacgtcgtgtgctgaccgctccggtaagaggtaccattaacagtatcgcttttaccaccattggcggtgttattactcaaagcaaaccaattatgacgctgatcccgctggaagatacgttattgattgaagcgaaaatcagaccggcagatgtggcctttttgcgtcccgggttgcctgcgacggttaaaatatccgcgtatgattacgccatttacggtgggctaaatggcgaagttgaaagtatcagtcccgatacactggttgacgaaagtcgagctaaatcgggtcgtgaagaccaaacctattaccgcgtttatattcgtaccaacagggcctatttaagcgttaaaaacaaaacattcccaattatgccaggcatgacggcaagtgtagaaataaaaactggcgaaaaaaacattttgtcttatttgctaaagccagttcttaaagcaaaagaagcattcagagagagataa

SEQ ID NO: 150052 - DNA, 1290 bp, Enterobacter cloacae
atgcgtaaattatttaaaactaaaacaatcgtttttttgcttgcaggtctatccgcaataactacaaaagcggaggttttaccttcgccttttatcattgaacaggtgaaaaaagcgattaacaacagccctgaaattcagagggcgggtgcagataaagaggcagcaggctgggatattgatcaagttgaagcgcaacgctggcctcaggttcaattaggtggctcaagcccgctggctggatcgggccggaacggctctgtacttaagaatattaatgccagcaacctgtcactttcaataaacacaactctttatgactgggggaaaacatcggctcagattgccagtgcagaatatctggaggaggcttcggcacaaaatttttcttcagtcaatgagcaaattgcttacagcacgttgtcggagttaatgaatctggatcggtatcagaaacagcaggtaattgcaaagcgctatgtcgcaaggatgaatgagcttacatatatgctggaagccataattaaggtagatccggggcgtagcaatgagctgacacaagccagagcaaaacttttagctgcacaatcagcggaggaaaatattaataatgccatgcatctttctaaaattaaactgctacgcctcacgggtgaggaaatgcagctcccggctggattaaagtggaatatgccccgctttactgctcagcagttgcgcgaatgtttacacaatcatccggtattgttaaaagctcgagcggaaactaatgcggcccgggctcaggcaagcgctgttgaggccagcagttatcctcagataaactggagcgtaagtaaaattgcgcagcgtgatactttgggtcatgaaggagagtgggcgacaggcattaaccttcagtggaatgttttctctggcggttcgcaaaaagcggcgcatcaggctgcaagagccagagcgaatagtagtgagcaacagtatcatcaggccagtatggatatgcttcaccagatcagcgaccttgttcagacacgtgattcatcatggcaacaggcgaagaattatcaggcactggcaactgaaagtgagcaggtgagaaaaatcttttttgaccagtggatgaaactaggaaaacgtactttactggatgtacttactgcggaaaacgaccattttaaccatcaattaacggcaattaaccagaaatacgatagtgaaattgccaatgttaaattaatggcatctgcagcgatattgcttcgctctctcaatctgacacaaacaaagtaa

SEQ ID NO: 150053 - DNA, 228 bp, Enterobacter cloacae
atgtttctatcataccagtcagaaaatgccctcattgtcctgatgctaaagaaacattccgggtactcaatgttacgtatcgttcaggctcaggcgccttcgggccccatcgagcggtgtatcacaggaccagggggagctggccagtgggctgagctcaaagccctgtattgccagtcggaaatctatgctcaaccgggtgtagaactgagacgttcggtgctgtga

SEQ ID NO: 150054 - DNA, 678 bp, Enterobacter cloacae
atgtctgttaatatcctgattgccgatgaacacacgcttattcgtcgtggcatcacctccatgattaatactctttccgccggtgccatggacggtgtcagcttcaacgttgtcggcgatactgattcaccggctgagctgcttactatgctggccggacagcgcattgacattctgtttctcggcttttcgctaaatacccgccgtacacaaagtccggtatcagaactcgatggcaccgccctggtaaaatggctggcacgcaagttcccggatacacggatagtggtgctttctcccttccggaataccaacattatccggatgacactggaagcaggggcgagagggtatatcagtcgcgatacctgcgaacgtatgctttcccgggctatcgccacggtgatggatgatgatgtgtatattgaacgcggactgatggactccctgttccgtcgcgacacactggtcggacaggagctgacggcacgtgaaaatgatgtactgcgcatgttgtgccgggggctgtcgttgacagcgatttcagacaaaatgcacctgagcaacaaaacagtcagtgcccataaactgcgcgcgatggagaagctgggggtgcagaatgattgccagctttattgcttgctagcccagacccgcatgtttgatattgcaatttga

SEQ ID NO: 150055 - DNA, 1794 bp, Enterobacter cloacae
ttgaaaaagttaacactcgcactctttgttggttcggctctgatgtcatgctctgcaattagcgcagaaaacagtcgtacgttgagctatttgacatcatggggcaattatacggccgatgctgtaactgacttatcaaagtctggcgttaatacatttctgctctctttcggtggctgggatgcagaaggtaatatctcatcctctgacaagatgattgaagtgcctgcctacaatgcttattatcttgaaaagggctatgtagtgtggactcagaccaagctggcgcatccagagaaaaaaatgatggtagcgtttggtggcgaaacttatgaatcgatgtggtcacatcttagtaatgccgctaatcgagaaaaaattgctcaggggctggttaaattactgaacactgatttcccagtttataaaaagaatctgaaacctgccgagctcgatggaccttgtctggattcaagttgggatggctcatgcaatctatctaattatcagaaagctggttccgtgcagctggatggtatcgatttcgactatgaaaagcaggctcgtttgacgccggaagaaaatgacaatctactaaagttagcgcagcgtgtccgagaattgctgggtccaaaaagcaataagctacttagtctgacaacgtaccatgttggcgcagatcctgaagcctgcatgagcaatactgttatggataattgttcttttgtagaagataagcgttcttcacatcacggggaggtcttacctttgctgaaaaatggcaaagacacttttgacttcttcaatgtcatgacctacgacgctggtaaaaatttcagatataaggttgcactggaaaattatgcaaaagccgttggtaacgccagtaagatccttctgggaaatacaatcaatagccagtgggggcctgaaggtcgctttaccgaaactcgcgaaaataaccttgctcgtgcagcttggcaggcagaaaatggctatggtggtttcttcgtctggacgctgggcgctaatgataatggtaaaacctttggtgagcaggtcgaatacattaatgatatgaagaaagccgctgatgcagggcaaggtggagtggaaaaccataagcccacggctgtggtaaaatatagtccggttgtaactggtgcagcacatgttgttctggatggctctcaatcttccgatccagagggtgactccctgacctggcgatgggaacagatttcgggccctgcagtaacattaattaatactgatcagcctaaagcgagctttgatctcaacagtactgattctgatattgagctgggcttccgcttgactgtcaatgacggaacacatgattctgtgccgtatgaatttactataacgcacaaagctgtcaatgatgacaaacctgttgatgacaaacctgttgatgacaaacctgttgatgacaaacctgttgatgacaaacctgttgatgacaagcctgttgacgacaaacctgatagtggcacgcacagtacttggaaaggcgacaaaatctatgttggcggtgataccgttacctggaaaggtaaagagtataaagcacgctggtggacacagaacgacctgccgggtacaagtgatgtctgggagagcatgagcaaggctgataatgaagaatggaacgccaataccacctatgttggtggcgataaagctgagtttgcaggcaagctctggaaggcgaagtggtggactaagggtgacaaaccaggtagcagcgatgtctgggcgcaggtaaactaa

SEQ ID NO: 150056 - DNA, 276 bp, Enterobacter cloacae
atggttatgccggagcaatatgaacaaaacttcatcatggtacattgcatgatggcgggacacgctatgtccccaatggaagaaattgcctgtgggtactgtcatctgctgattcatctgccatttgtccagttcgtgctggcggtaatattctggctgatattactctgcgttcgtctgtctcttcctctgcaggccctcttctcaccgattttccgcgcctggacacctcagtgtgcccgcgctcctcctgctgcttttctttctgcgaattaa

SEQ ID NO: 150057 - DNA, 147 bp, Enterobacter cloacae
atgacaggcgcaatgaacaacatggctactgagagcaatgccatacatgctgctatgaagaaacgattgcgcccgtacaaaatgttaccccgtgatgacgatatgggctatagtgtatcttatttgatttgcaaatgtttctcttaa

SEQ ID NO: 150058 - DNA, 273 bp, Enterobacter cloacae
atgcttgtgaccatgtcagataaagaactcagtcggatcaacgtcattcagtcagttgttgaaaagcgtatacgctgtcgtgatgctgctcatcagtttgctttgaccgaacgtcagacccggccgtttaatgaaccgactttgcctattcaaggcgagctgaaaaccgcgctgctgacaaaaatgataattcccgacagcgagctcaaaatacaaatgatccctattagagcaatctgcatagcgttaaatttcaaaatgtgtttatcctga

SEQ ID NO: 150059 - DNA, 291 bp, Enterobacter cloacae
atgattaaacttactgaattaatttatggtacatcagaaaaaaagatagcgttatatactcttattgtcaatcgcctaaatatattacatgagcagctaactcggaacagcatggcgaaatttcgccggggagatttggttgcttttcgtactggagatgggaaagtagtgatcggtgtaatcgtacatctgaataacactacggtgacggttcgtaccaaaagcgatgagcgttggaatattacgccacaactgttgactaaagcagaatacaaacctggtgcgtactga

SEQ ID NO: 150060 - DNA, 5148 bp, Enterobacter cloacae
gtgtgcacttttagtcgtaatacacaaaaaaaaatcgtcaatattatcctttttcattatttgttttcattatgggttttgctttttcctgctggagtcaacgcagccttagtgcaaacgcagaaaaaaagcgagtcctcaagctatatcctgtatcagaagtctgaaaataaacgctggcaagacatagccagggaactatcgctgcaaactgatgatattacgcgttggcaacgtcagttagcacaacagtatggtttgacttttaattcaacttctttattacctcctgatgcgcacaatgcgcaggcttacccacgcgttaaactggtttttatccctgaagaacagaacctccgtaattttgcttggggctataaactttcagaagagcaattgataaaccttaatcgccccgtgaaaaatacctctcagcttgcgaatctaccgggacagtgggtgattgtgcctgataccagcattacgccggttgccggtgccagtgaaggttcagagaaacttcgcgacttactggggtcgttctggcaatctgcacagcaacatggtgccacaaatagtgcacgggcacaggcagaaaaggccgtcagcacatccctgaccgctgaaatagaaaactggctgagtcagtcaggcgcacgtgcgcgcgtcacggcaaacaccggtctgagtaaaggcgctggtgccgattttggacttgactatttttatccgatagttaatgccgagcaggacacgttgttttttcaaatgaacgctcaccgctggaatgagcgtaatattgctaacgcagggataggtttgcgtcacagttttaatccttacctgctgggaggagtaaatactttttacgatcaagatatcactcgccatcatagccggttaggtatggggcttgagctttggagcgagcgcctgcatagctccataaattattatctaccactcagcgaatggaagcgttcagaagatcctttcctttccgacacggatcactatgtgctatatgaacgcgccgcgcgtggatgggatttaagccttgaggctgccctgtcacgaaccctctacggccggactgaattttataagtggtatggcgaaaaagtggacgttaccggcagccgtaatcaagccagtaaaaatccgtatggcatgaatctcgggtttaagtggcagcctataccccttattgctctccacggcgaaaagacgtttatcagcggacaaaaagatggcgttaacgttggcttggaattcaactgggaattcggtcgctcgctcactgaaatgcttaaccctaataacgctcacgtgctgccttcactccaggaggcccgcaccagttttgttcatcgcaataacaatattgttctagcctataaagaacagaaaaaaagctggcacctctatttttccccatcagaactgacggtgcgtgccggtgggccagctttcattaacgccgttaaaggcgcccaaaatgcacatgtcgtttaccactcaacgcagccacagatcgctaccgtggatgcagtcagtgggcgggtggtgcctttgcagatcggtaaagctgcgatcgtcgcaaaactgtatgcgtcgattaaagatacagtgccatcggcggttgccgaatatcaagtgactgtagaggccggcaattttgcgccgtcagtcagtaatgtgcagattcacggcgaaccggcaattggtaatgaacttaacggaagctatcagtataacgccaatcagggtgaggtggaaggtagctcccttttgcaatggttccatgccgataatatgacgcagcctctggcaaccggggagcgatatcgggttgtcgccggagatattgaccacgaactggtatttcaggtcattccgcagaacaggaataatcttcgcggtgaacccgctatggcaaagattaacgggccagctatgaagctgatagatatgaaattcgaaccgctgaatcacggcgtcaaagttgatgacgtaacggtcaaataccttaacacgcaaactggtaatatccagttcagcgtaagagccgttgatgaacaagggcgtccgttggccgatcgtacagtctggtggcagcatggggcaacgtcgctgggtcaactcagcgcgaaacaaactcgtaccaacgaggaaggctataccaacgttattctcaataacattaccgcagctggggccgatgaaatagtcgcctcgctgcataatccctctgacgttaagtttgcaagcaaattgcctcagaaattaaaaacccaactgaaggtcttgcgggttgaacctgaaatgcagctatcagctgaaaacaacgtgcagcaggtgccaataggatccggtgcgcaggcctttacgctgaagttgaatgaggaaaaccatctgggtattgctgaccgccaagtgcgctggctaagtaatggtaaagaagtgggcatgacacgtacggacaacagcggcttaactaaagctgtaattcctgtgcctgaactttttggagcggggacctggcatattgaagccgtggtaaccgatgaggatcgtcgcgtcagcatcacattgacgttgctaaaaagccagacagaacctctctcggtgaaggatgttgtgctgaactggggggatgaggctcccgttttacaggtaactggcggcaataatagcaagcttttttatcttacggataatgaagagatcgtaaaggtcagtgaaaacggtcaactgatcataaaagatattggcgtagcaaaaataacggtcagtcagtacgcaacggaaacgcagcttgcgccagagagtgcaacagctactgtaacaatcactgaagccgatgcgccggagctgagtgcatcgccggtgtcggctgtctatggtgacgcaccgcgcagcctgacagttgacggcggcaacggcagcgccctgacttatcagtcagataatgagaaggtggtcagcgtcagtgccggtggtcagctgacctttaacggcgccggaacggccacggttaccgtcagccaggcggccacgcccacgcatgctgcgccaccggcgctgcaggtaaaggtgaccgtggacaaaaaaacgccgtcggtggatgtgacgctgacgaacaccatgcaggccggcggcaagcagcaggtcagtgtgagcagcgagaccgagctgaagacggagttcggggttgatctcggcgcagatgtgctgacggtgacgaaggacggtctggtaaccgcactgaaggcagggaagggtaacctgaccatgcgtactgaagagaccgccaactataaagcaaccagccggtcatgggagataaccgtacatcccgccgatgcgccggagctgagtgcatcgccggtgtcggctgtctatggtgacgcaccgcgcagcctgacagttgacggcggcaacggcagcgccctgacttatcagtcagataatgagaaggtggtcagcgtcagtgccggtggtcagctgacctttaacggcgccggaacggccacggttaccgtcagccaggcggccacgcccacgcatgctgcgccaccggcgctgcaggtaaaggtgaccgtggacaaaaaaacgccgtcggtggatgtgacgctgacgaacaccatgcaggccggcggcaagcagcaggtcagtgtgagcagcgagaccgagctgaagacggagttcggggttgatctcggcgcagatgtgctgacggtgacgaaggacggtctggtaaccgcactgaaggcagggaagggcaacctgaccatgcgtactgaagagaccgccaactataaagcaaccagctggtcatggaggataagtatttatggtgcaccggcggtgacaggcctgcatatctccggtacgccggaggtggggcagaccctgaaggcggattacaccttcacagcaaacggaaccggtgcggatgcgtccaccttccagtggcagtggctggacggtgggacctggaggaatgcggccgccgctggcaatacggcacgcacgttcacactgccggacagctatgcgggctatggcgtacgtgtggtggtaacgccgaagggcagcagtcagccgtcgctggcaggtggggtgcagaacagcaggccggtggacgtttatggtgcaccggcggtgacaggcctgcgtatctccggcacgccggaggtggggcagaccctgaaggcggattacaccttcacagcaaacggaaccggtgcggatgcgtccaccttccagtggcagtggctggacggtgggacctggaggaatgcggccgccgctggcaatacggcacgcacgttcacactgccggacagctatgcgggctatggcgtacgtgtggtggtaacgccgaagggcagcagtcagccgtcgctggcaggtggggtgcagaacagcaggccggtggacgtttatggtgcaccggcggtgacaggcctgcgtatctccggcacgccgaaggcggggcagaccctgacggcgtattacaccttcacagcaaacggaaccggcagcaatgaatccctatatcagtggtactggcgtaaaaccggcagcactgacgactggcaacctgcgcaggagtccggttcgaaaagtaaatatttcataccggacagctcttatgccgggtacgatgtgcgtgttggagtcacgcctaaaggcagcatgtgggatattaacggcaaggaggtatacagtaacagcgttacgatagccacctggcatatcgccagtgttaaacacaactattatcatagatttgggtcggcgtgggtttatgagccgcaggtcaaagtggtggataataaaggtcagattgtgagtaacgttgaggtttgctttgtttcttcccagggctcttttgggtcaattggtcctgggggggcaattgtggttggtggcagcgatcaatcctttaagtcgacgacaggatccgagggtactacccacgtaaaacaaatggaatacgtatctagagcgaggacgtatgttcgggcctggatttgtaagtccaatagcgtgccgtctacctcgctctatatgggagatggtaataaaggctggtatacccctcctgccgactggcagacaaaggtagcagcaaactaa

SEQ ID NO: 150061 - DNA, 249 bp, Enterobacter cloacae
atgattgatgcctggtttcagctaaccggcggttcgcatcatctcatcccactgttccttggctttcgacagctcggcacaaccacgcgccagctcatccagtgcaccgtaatttgccgatttatccaccgggtagaataccacttcaccggcatcggcaagacggggggaaactggtatcctggcagccagaacaagccaaaaataatgtcgctggtacaggctgtatctgccattatctcaacctga

SEQ ID NO: 150062 - DNA, 213 bp, Enterobacter cloacae
atgacctataaactggtctttgacagacgcgctctgaacgggtgggaaaagctgggtcatactgtccagctggcgaaacgactgcatgatccacatatcccctcgaccagactgaacgacagaattaaactgcgttcattcggctacaggcttgtttatgaggttattgacaatcaaatcctttgtcgccgtaagcaagcgaagcgacagtga

SEQ ID NO: 150063 - DNA, 2421 bp, Enterobacter cloacae
atgaacaactgtcctttattttcttattctatcctcacagtctccctgtttataggttaccctacattttcagtagctgcacatcaggaatctgcaactcaatctgctaaagcatccatcgaagcacctcgtcaaatcattttgaaccaaccaggtcaaattgacgtttcccgtattaagcagtataggacgtataataatacgccattgcaatcaacaggatattgggtagagaaaggtgaaactatagttgtagagcttgattatcagggaggcgagttaaaccctaaaatgcctgcatttaccgttaccaggccagatgacacatcagccggcgcattaaaacatgctttccagtatgtactaaaaaaaggggtcaatcgctttacagccactgaaagcggaatcgtttatatttttcttgatgctgaccctatccctggcgatataatagtcaatatcaagtcagggggtagacccttcgctcgctttgtctccggtgtacatagtgcgcaggattatcaacaaatgctctctcattttagtgacgttccctatgttgagctggtaagcgatcgcattataattacgctgcgtcgagctaaggcgctccaatttatagacagtgctggtccacaaaaaacactggatacctgggataagattgtaacctgggctgaaaaccagtatggtttagtcgatgaagatccaaatagcattcatcaacgcatttcccatcgattccactggaaagatgggatcgctccccctgaggttacccccacgaatgatcattgttctggatatatgaattccggcagctggcgtatgataacgtgcaccgataatgccattgccgatgtcgttaactattccatgttgacatctgaggacggctggggcggctggcatgaacttggtcatcagtttcaaatgaagcaggggctctgggatggtatgtcagaagtctctgtcaacctgacatcaatgtatgtacagcgggagttacatgcacctgatcgcttagaaaatgaaggaacctgggataaatacgtattcccatatctgaatcaaacacatcgcgactatcataaactacaggaaaccagctatttagctaaagcagccatgctctggcaactggatttaacttttggtaaagatttttatgcgcgcttaggcaagatgtatcgtgaattgccagaaaaagagcaacctgcaacttcagatgaaaaaattcagcgatttatttttgaaaccagccggatggctggatataacctgaaacctttcttcgaaaaatggggattaccacttaccccagcaacaaaacaagcactggagtcactctcccttaaagcattaaatgttccaatctgggaaaacagggataaggatattcgttatgatttgtcagaagggatagatcattctctatcgaaagaactcagaaaccctggcgcagaaagcggtaaattaactggctggcatcctgataaaggacaattcagggtggttgaaatacaggatggtatcaaaccggcaagcggacattatttcttcaccgcccgtcaaaatgatggcgcggcaggtaatgacagtttagaccagatgagccagactatcagtcttgatacatcaatagtcaaccaggggcaagcaagcgctagcctgaaatttaagagcaatggctggggcgatggtgattacgggacggtatttctgattgccagagatagcaatggcaatgttcaggaagaaaaacaagttgatacaaaagggaccgcaaataaatggttagacaatgaaattatcatgcctttacccacaggcagtattacactgaccgttcaggtgcaggcaaccaaaaaagcaggtgcaatgtctgatgtccattttgacgattttgtattgaaggtggacagagaggagacagatacgcctgagaatacgccacctgtggcaaaggcgtctctcgacccgaccacacttaccggggcaggaaaaattactctctcagccgcggatagttatgaccctgatggggatagcctgacttataaatggaaacaggtcgcaggcccgactgccgctttaaatgcaagcaacgcaatgacggcaacagtacaacttgatgcagttaaaaacaaaactgattatcagtttgaagtcactgtcaccgatagtcataatgcgttttccagctaccgagtcagcatgacacaaaatcctgaaaccatcagcacagctcccgcctgggatgcatctaaaacctattcctcaccatgtgacaaagtcttctggcagggtaaaacatggatgaatggatggtggacgaaaggaagcgtgccgggttcagacggtacctggggtgtctggcgtgaaacaggcacggcgaatatgcacagtcaatgcaaataa

SEQ ID NO: 150064 - DNA, 774 bp, Enterobacter cloacae
atgactgagcatactatatcaggtaaaaccgtcctcattgccggtggggccaagaatctgggtggattgattgcgcgggactttgcccttaatggggcgcgcgccattgccattcattacaacagcgccagcacgctgaaggaggctgaagccactgttgcggcagttaaggctgccggtgcggaagcatatgcctttcaggctgatctgacgtccgcaatcgctatggaaaaccttttcagagatgtcgtggccactatcggtaaacctgatatagccatcaacacggtaggcaaggtacttaaaaaacctatggccgaagtgactgaagacgagtttgatgaaatgagtgccgtaaacgctaaaacggcctttttcttcctaaaagaagcaggcagacacgtcagcaatggcggtaaaatctgcacactggtgacttcacttctgggcgcatacacccccttttatgcagcttatgccggaatgaaggcacctgtagagcattttacgcgcgctgcctcaaaagaactcggaaagagaggcatttccgtaactgcaattggaccggggccgatggacacgcctttcttttatcctgcagagggtgaggatgcggtggcctaccataaaacagccgccgccctgtctcccttcagtaaaaccggcctgacagatattgaagatatcgttccgtgggtccgcttcctggtcagtgaggggtggtggatgacaggacagaccatcctggttaacggtggttactgcacgaaataa

SEQ ID NO: 150065 - DNA, 918 bp, Enterobacter cloacae
atggattcaattgatctgttcagaattttcctcagggtggcagaaaatggcagttttgttcgtgccgcagaatcgttaaaccgccctgcatctacagtctctgcggcagtacagaagctggaatccaggctggggacgcgactttttcaccgcaccacccgcaatgtatccctgacaatcgacggtaatgctttttattcacgctgtcaggcagcagtgcagtgtattgaagagacggaaaatcttttcaggcatgacagccataaagtgacaggaacaatacgtgtggacgtaccgggtcgtgttggtagccatattattgttcctgctctgccattatttttcaagctccatccggcgatcaaaattgagcttggtgtcaccgaccgtaacgtcaaccttgctgaagaaggcatcgattgtgctgtacgagtaggccagctcgaaaactcaggcatggtggcaaagtgtcttggatatctcagcattattaacgtggcgtcagcagattatattgctgaatacggatggccgggaaatccagaagaactcagcaaacattattccgtcggctatgcttcaccgacctcgggcagaaaagagcatttcgaatgggtacaccagagagaagttgaacgaaccgttgttaacagcattctgacagttaacagcgctgaagccagtattgctgcctgcatagccggaatggggatccttcagataccagcctatgatgtatgtgaccagcttgccgccggggtgctatgcgaactgatgtctgagttccgtcctagggcagtaccggtccacattctgtaccctcatcggcggcatccttcccgtcccgtacgcttatttacagactggcttaccccccttctgcagggaaaaatgaacctcagtaatgatgaatattaa

SEQ ID NO: 150066 - DNA, 582 bp, Enterobacter cloacae
atgcgagagaaggaaaaaacgggtcacctggcatggtgtgctcttatcgccctgctgacagccagggaagatggtctggtggcgtcggagtcgcaggaaaacctgtttattatccgctggtttgcgcaggcgaaaaaacagcgccgtttttcacgtgacgtggccaccgatattgactgggtactcaaccaggggcgaacgctcggcgttcgtgcgcgcctgcgccataagctggattatctctggcgcagctgcaccggtgaactagctgagcagaacgatctttttcgcctgacctatgcgatggagctggctaagcagtacgactgggtgtatcacgtcctcagcgacagtgagtggagcggccgacatcagattcagccttcggctgccgtgaacagtatttgcctgctgaaaagcgcgctggatgtcggtttcaatgatgacggaacacaggttatgccggttccggccagaattggcggcagggctgacgggctgaatgcgctgctgaaaacctgtggctgggaggccgtcagcaacaacgatcactggcaactggtgaccatcagtgcgggttga

SEQ ID NO: 150067 - DNA, 408 bp, Enterobacter cloacae
atgctaattaattcacgcagtaagtttgccatcctcattacgctttatctttcccgtaccggaaaggcagtcactacgcgcgaaatgcaccaggcgctggggatatccgtagcctatctgaaccagctccttgcaagcctgcggaaaatggagatagtgaaagccgtacgcgggccaggaggcggatacaaactggcacgttcttccgatagcataacggcagaaaagataatccgggccttccatgatgatgaccagaaacacccggcagagtgctcagacgagattttcatgctgtggaagcagttttgccagcatacctggctgtacctgggtacgcagacactcagtgaaatttccggtctgaaagaaaacatctcccaccggggcaatgacggaaaccgctga

SEQ ID NO: 150068 - DNA, 1911 bp, Enterobacter cloacae
atgaaaaaagtactgaaacttaccatgttagccagcagcctgctgctgtctggcgtgtcagccagcagctatgccgccgtccaggacgcggcatcagctatgccggatatcagtggaaaaaaggtccttgtgggattctggcataactgggccagtaaatcagatggctatcaaaggggcacctctgccgatctgccgctgagcgcggtgcctgaagcttataatgtagtcaccgtggcttttatgaccggtgatggcatcccgacctttaaaccttacaatatgtctgatgagcagtttcgctccgaggttgccaccctgaatgctcagaatcgcgcagttatactctcgctgggcggcgctgatgcacatattgagcttaaacagggcgacgcgcaaaaatttgccgaggaaatcatccggctggtagaaaaatatggctttgatggcctggatatcgatcttgaaggcggcgctattagtgctggtgccaacattaccgagatcccggcagcactgaagatggttaagcagaaatatccgcactttattatcagtatggcacctgagtttccctatctgcaggctggacgcacgggttatgtacagctgattaagaaccttgaaggttattacgactttatctccccgcaattctacaaccagggcggtgatggggtgtccgttgagggggtcggctggctggcgcaaaacaaccagcaaaaaaaaggcgatttcctgttctatctgactgactcaatcattcatggcacccgcggttatatccagatcccggccgataagttcgccattggtttgccaagtaacccggatgcggcggctacaggttacgtgaacaatgaagcggacgttggtaccacactgaaaagacttgctgcgcagggtacgccaattaaagggctgatgacctggtcggtaaactgggacgccgggcgtgatgccagcggtaatccctacggttatgagttcgtaaaccgttatgccggattgattcatgaagaacacgttgatgcacccgataccgaagcgccaggcgcgccaggcaagccggcggcggtgatcaccgcgtcaatgattagtctgcagtggagcgcgtcggtagataacctcggcgtacaccactatgaaatctggcgtgacggcgttcaggttgcccaacccacgttgccagagtggcacgacacccgaattacgcctgctacgcagtacgcttatcaggttattgcggtggataaagcgggtaaccgctcggcacccagtgagaccgcctatgtaaccagcgccgatgaagtgcagcagccagagcaggatgtgcaggcaccttctgtgccgcaggatttacaggcatcggcaataacgcagactagcgtgcagctgaagtggcagacggcgaaagataatgtcgctgtgaccggttatcaggtctggcgtaatggtattctggtcgcgaccatcagcgatacgcagtggactgacagcggtctgcaggcggacagcacttacctgtatcaaatttccgctgtggatgccgctggcaaccagtcggtaaaaagtcagactgttacggttaaaaccctggcgcagccggagaatgataatcctgacaatggaggcgatcacagtcagtggagcagccagaaaatttatcatggcggcgatatggtcagctggaaggggaaaacttataaagccaagtggtggacgcagaataatcagcctgacaccaatgacgtgtgggaaaacctcgacaaggagagcggtggcgcatggaatgccagtgaagtttacctcggcggcgatgaagtctcttaccaggggaaaacctggcaggcaaaatggtggactaagggggataaacccggaaccaacgacgtctggcggttaaagtaa

SEQ ID NO: 150069 - DNA, 984 bp, Enterobacter cloacae
atggcgagaagatcgaagaagagcgaaccggaaacgctgcgtaagcagctcctggcgttaattaccgattttgaacagaagctcgcagaggactccctgcgggaacaggttctttctctcatcccggccaaccatctgctacgggatctcggcagctctctgatgcatgaggagggctgtaattcggcacgcgaccgtattctggcttatctcctcaaatatccgcgcgtcatcattcacggggatgaactgatggtggtggccgggataagtgagtatgcgcggcggataagagagctccgggtccagtttggctggtccgtattaagcggtaccacgctgaaggaaatgattgaacaggacgagataacgctggaagaacttcaggcccgcacaatgaccgtcctcaaaacggatgtctatgcactgatggcgacggagcaggacagggaggccgctctgcgatggaatgaggccaatgttctgcgacgaagtaagctttcgacgaaagacaaaattctctcctatctgcgtaaaaacgttgtccgtccggtaacgggcgaagagttacgttatcttgcaaacgacagtaaggagtgggcccgccgtacacgcgagctgcgtaccgaagagggctggccgattgccaccaggaattcaggccgaccggagcttgaagtgggggcctatttgctcgaggaagatcgtcaggctgaggtacatgaccggaaaattcctgatccggtgcgcgtagccgtccttgagcgcgatcatcacgcctgccggaactgtggctggtcgcacgcccgtaaaacagcaaatgacccccgaacattccttgaattgcatcatatagagcatcatgctgacggcggtgaaaatacgctggataacttaattacgctctgtaatgtctgccatgatgacgtgcaccgccgtaaagtgtcgggggaggcgcttttacatctgttgaagggagcctga

SEQ ID NO: 150070 - DNA, 1131 bp, Enterobacter cloacae
atgagtaaaaccaataaattaaagatcattgatctgttttgtggcgctggcggcttgtcctgcggcttcatgaaagggaagaatggcgctcatttcgaaagcgttctggctctggacaatgataaggcggccatcagaacgtacaacgccaactttggcgagcatggcatcgtcgccaacatagaagagtggataacggaaaatactgtgcctgaagcggatattgttattggtgggccgccgtgtcagggattcagtttactcaataagaaccgggaaggggaccatcgacgcgcgctctgggaaccgtacatggatatcattgagcgatcgggcgcttctgtctttgtgatggaaaatgtcccgggtctgttaaccagtgatgaattccaggatatccgtgaacgtgcggagagtatgggctttttgcttctcaacccttctgtgctgaatacggcagactatggtgccccccagacccgtaaacgtgcgattgcaataggcattaagaaagaccgttttgtgcaggggggcatccctgcgttcccgcctgcgccgtcgcatcggcatcccgataaagccggagatctgccggcctggctgacggtcagagaattcatcggtgatttaccggaaccggttggtacagaagtgcgcgatctgcctccgcctttagatctgcattttgggcgaaacccgactgtactgtctcaggagcgttatcgcgctgtgccggtcggcggaaaccgtttcgacttacaaaaaaacagacccgatattacgcctgcctgctggatcaaaaaaacctccggtggtacggatttgtttggccggttgtggtgggaacgtccttccgtaacgatccgcaccgagttcttcaaacccgagaaagggcgttatctgcatccggaatcacaccgcccaattacgcaccgggaagcggcgcgcctgatgagtttcccggatgattttgttttccttggatcaaaaaccgagatcgcacgtcagattggaaacgcggttccgcccgtgtttgcgcaaaagattgcgacctatgtgctgactttaatggaatatcagattcaacatggcgagaagatcgaagaagagcgaaccggaaacgctgcgtaa

SEQ ID NO: 150071 - DNA, 549 bp, Enterobacter cloacae
ttgcttcagggcattatctttacccttttgatcacctttgcgaccgggatggggaatgtcttatctgctttctttatgctgaatgtgaaaaagcaggaagtggaagatacgcagctagcggaagccagacgccgggcgacagagctgcattgtctcaagcttcaggaaagcgcctcactgggtgcagagattgtatttcgggccgatcagggctatcccaataacgtctccctgtatgaactgatgtatgaagacagccggccgacaaagcgcgtgcccgacgatcaaatcaaagaagaacagaaaaacttcgaacaccaggttttcggtttgcttccctatcttcagcctgacgaagctcaggtcatgaagcaggtaactcttcagcatttcgtcgtgacaaccaggcggaccagtaaagttcctgccgaacgtcggatatcccctgccgagggcggattcgatttcaacaaggaaatacagaagctacgtgatggaggggatttcatgggtcagatattcagggaaagatgcatgcgtatcgggtaa

SEQ ID NO: 150072 - DNA, 2757 bp, Enterobacter cloacae
atgaatgaaaaaacagaatggaaagaaatcccggggatgaatattcaatcagacagagatgccttgatgggtgagggaatatgtgtgtttgttatagatccccaaacagataaaatactggaaaaaaatattttcacgccaaatgagaatgaagctggccagtatacttggccaaagaaactggctgaaaaaataaatgcaaacagcataaatattcgtgcgggtgaaatggatgaggatgggaatataacccctattggtagccagtacagaaacaaattatgggcaaaggaaagctctgatctgattatataccccacaaactgttttctcggtggctggaaaagtgatggtgctatttcctcagagggagcagtcatccccggcataaaaataaaagtttcggtaagcagcctaaactatagtttattatatgaagaggtggagtttattactaataataatacctcatcaaggtatagctggcctttctacttatctgaccacataaacaagaatagtctatttttacgagcaggggcgaaaaacatagaaacaaaaagaataaccccgctacagagtagttatagaaacgaagtctgggtgccaaatggaaataactatacatatgaaataaaacatgaagcaagtgacaatatcatacatgatgcagaaacggtatacaacaatgcccttgcgatgttgactgctgcttctcccccggcaaaggcggtaatcgatcggtggcttaatggatttagccaaggaaaatttagcgacatatcatacccaggaactaatgcaggaagtaatacatcccctttgtatgaccatttgaacagaacgaagcatattgcaaattatattcattacaatcctgttccagaaaatgatttctattatacatcagcagtcgaagcaatacatttttataccagccaggactttaagaccagtaactggtgggacaggcagataggacttgcaaaaatcgtctcagaaactctaataatattgacagaaaaacattccccaccacccttgaacgagtgtattagttatttaaagagaacaacccacacttctatgggtcaaacaggggctaaccaggcagacttcgcatatatacaattactatggtccatgagtggatggagaaatgaaggactaacatatttccttaatgaagcttatgcagcttcggattcgatatcatcgctatgtttacctgttacccggcacgggaaggagtacggcgaagggatcactgttgataattcattcagtcagcataaccctcattcgggtaaatattcccagttgtatgcaggaacttatggagctgtactgttaggcaacatattcaaaactcagtcttttctttatggtgttttttctctgaataaagcagcactccgaagtattgaaaatttcatcataaacgggatgggctggttcagttattccagattatatgattttcaggtatgtggccgggcaatcagtcggggtatgtatgataccaatgctttggctggatggtgcagacagctgatgaatagcgctcctgagcatccggaaatgttgcaggaacttatccgcagagctgatggtgatgaaggaagtaacgattactacctcgggtgcagggcatactgggttaatgattacctcgcaaaaataacgggggaatattgcctgtgggcaaaggtaatatcttcaagaactgtcggcggtgagagtggcaatggcgagaatctcaaaggatattacatgggaagcggtagctgctttattatcaggactggaaatgaatatcgagacatacaaccgctatgggagtggcagcgtattccaggcacaaccgtagagcaaatcgataatttcatttaccctctgattgactggggctacaacaactggggaagtgatgattttgctggtgtcattagtaatggggagacagggatagcctcaatgattcttaccaggaaaaacgtaaaaaatgccaagaaatccgttataacgctccctggtaaggatatcttcgctggttcttcgattgacaattcatccgctaacaatcctgtgtacacaagcgtcaatcaatgcaatctgaatggtgatgtggatgtttattttaatgacggaactcaaaaaatcatcacgttgggagaaaaaataacgtctgataaaatagttgaagttattcacgatggtttttcctattgtttcccaatcccacaagttatcacagtgcaggtagggacccaaacaggacgctggcgtgatataaataaaaatggaagtaatgaaattatatcaggtgagattttttctgtctggattgaacatgaaaaagggaactcgacatcatactactatgagattacaagtacagaaggggaagcacccgcacaaaaaacgcaggctatatatgacaatctagctcatgttatcactggtgatgataaaaaatccgttgccgctgtaatttttacaaataatggttacgacattgtactatctaatgttaagttcaaagttatgaactctcttgcagttatcgcatctgtaagagaggacggcatactggaaataactattgctgatttgacgcagaaaatggagaaagctgatttgcttttcacatggggggatgtgatatctttaacgagctttccattaccggacggagataataagggagaaagtattacttacttggtttcacctgtcactaggtatgatggataa

SEQ ID NO: 150073 - DNA, 363 bp, Enterobacter cloacae
atgctggagcagtttgttcaggagcggggatataaaatcgccagttactaccggggaaatatcagtggtacaaaacgtgaccgcccggaattcggacgcttactgatggacagtcaccgcaatgatattttgctggccgagcagagagaccgcctgacccgcctgagcgacagcgacgggatgacgctgaaaaagcagaaagaacaacacgaactgcgaattgtcagcctggatgtccccacctcatggcaggcattgtcagataaagatccttcgcaggtcgacccgctcccccgtgccgtgataggcgccatcaataacatacttatcgagctgatggcggcgatgtcgcataaggactga

SEQ ID NO: 150074 - DNA, 237 bp, Enterobacter cloacae
atgctgatcttcctggccttcagggtaagccaatctcagctatccccgtttaccatgaaagacatttctgaccactgcatgtcctccctctctacgattgagttgttgcaacgttcagcgtcgtttactttcatcgttgtggtaagtcagcataggaatagttttatcggcgcggcctatttcggttatagcttggccaggctagttggcctgccgccagtgtgcattgtgggataa

SEQ ID NO: 150075 - DNA, 1341 bp, Enterobacter cloacae
atgaagtcacatgaacatgcaatcgtgattggcgccagtatcgcgggtttaacatcagcgtttgtgcttgccagacactttaaacacgtgacattaattgaacgtgacatcctttatgatacagattctttccgcaaaggcgttccgcaagcccggcacgcacacgggctcaccagccagggggctttggcactggaatctttatttccggggatcgggcatgaacttgaactggccggagcgcctgtttttgatcacggcgaatcaatgaatacgtggatttcgacagggcacattcccttttcctgggcggatttaccactgcaggtgtgtactcgccccttgctggagacatgcatacgtctacgagtgatgaatgtagcaaatatcgagtgcattgatggacatgaggtgattcagttacagatgacaggttcatatattagtggagtgcatattcgggctttacctgcatcagaaaacgccgggtctcgtttactacaagcagactgggttgtggacgcaagcggccgtttttcacggatgccacaatggttagagcaacttggttatccgcaaccaaaaagctatgttgtggacgcttctgtggtatatgcaagctgtttatttaaaacggcctcaccgccgtggcgagggctttatcatcttagtatggtgcccgatcaatctcgtggggtttacgccttgcgtacagaacgtgatgaatggcttgttacgctgtatggtatagctggcgataagccgggacgcgatgaaactgcattccgtgactttgcggccagtctggggaattctgatctcgatgcgttgttagtatccgccaggagagtgtctcccgttactcgatacgctcgaactgaaaatcgtcgtcgtgcttacgctcaaatgcctcgctggcctgagcatttagtggtgatcggtgatgcagtttgtacgtttaatccaatctatggccagggtatgactctggctgtgaagcaggccattttgatgggagatattcttgacaaatcatcaacattgcatggtatcgcccgacacttactgattaaacaagagaaattgaatgcctggccctggcgtctggcaatcagtgatgatttgttgtggcaagccaaaatgcaacaacgcaggggacccatcctggctaccctgtttcatggttataaggtaatattaaatcaggcagtattgcgtgatcccttcttgtataaactcttcctcggcgtttttcaccaggcccgtcatccactgtatatgtttcacccgaaagtattgttacgagttatcaaacagttgatacgttatggcagacgataa

SEQ ID NO: 150076 - DNA, 552 bp, Enterobacter cloacae
atgataattttagacgaggagtcactcattcttgtcaataagcaagaccaagaaataggaacagaacgaaaactaaaagtgcatcaagagggccttcttcacagggctttttcaatttttgtattcaatgctcacggtcatttgatgctgcaacaaagagctcttgataaatatcattccggtggtttgtggactaatacctgctgtgggcacccccgccccaatgagactaccttttcagcagctcaccgtcggttacaagaggaaatggggtttgattgtgatttgcaggaagtaagaactgttacttatcaggccaaagtttccaacaatcttattgagaatgaatttgatcacatttttattggtcggtttgatggtgagccagtactgaatccaggtgaagcttcagattgggcgtggatccccacgccaattttactggaatggatttctgtgcacccccacgactttacaatttggtttactaagatattgcatgaagctggtgatggttgtctcgaaatctggaagacctatacaaaaaattga

SEQ ID NO: 150077 - DNA, 1101 bp, Enterobacter cloacae
gtgacacaaaatattgtaaccccaatgaacatatcctgctccttacaaaaaaaagcgagtgactatcaggacaggatcctgccacttgtgtcccgtagttttgcgctgaccataccacagttaccagtagagttacgtcaagtagtgaccaatgcttatttgttgtgtcgtatcgccgataccatcgaagatgagcctgcactatctgcagaaaaaaagcacaattatgaaactgcgtatgttgatgtggtaactggtaatatggatgcacaaaaattttccagcgaaatattaccacttctgtcagacgcaacatcggatgctgagcgagaccttctcctgcagttaccattaattttgcaaatcacccaagcattaaaacctgaacaacgtctggcaatcatacattgcctgaaagtgatgtcacagggtatggctgagtttcaaaataaagtgagtctgaatggcctgaatacaatgcacgagctaaaccgttactgttattgtgttgccggtgttgttggcgaaatgttgaccagtttaattattgacttcgaacccaccctggaatcaagacgcagcgaaatgctgcccttgtcagtatcattcggtttaggtcttcaattaacaaacatactcaaagatcaatgggaagatcgcagtcgaggtgtctgctggttacctcgtgacatatttattgctcatggggttcagctggaaaatttacatcctggccagcaggattatcattattcggctgcgctcaacaaacttattggaattacccactcgcatttacgccaggcgcttaaatatactctgtttattcccatctctcatgacggcattcgccgtttttgcttatggtcaatcggtctggctctgctaactctccggaatatatatttaagatgtgatttcgtttcaggggcgcaagtaaaagtatcacgtacaatggtagcaggtacaattttcctcactaaaatatcctgtagatatgatgccggtttatatcgactttttacgatggcagcccacaatatgcctctggcatcactcgaaacaattcattttgatttaaatgaattatcatcgcactaa

SEQ ID NO: 150078 - DNA, 2058 bp, Enterobacter cloacae
atgactaatacaattaaaataaaaagcaaagtaaatcttcccgattacgctagtgatcatttcttttattcgcaagtcgatgctgcatttaataatgcttgctcttactttatgaaaaaccaactcaacactggagggtgggagggggaagtatggtggtgtccattaccaactgcgcaggttgtgttcacacataaaattattggacaatcaatttcaaaagcgaaaagtcatgagatattgcgttatttcaggttgacgcaacgaacagatgggggatggggttttcatgatgaatcgcactcttatcgttatgtaaccactttagtttatattgcggctcgcttgctgggcatgagccagaattcccgaatgttacttaaagcacataggtggctacattctaattctggtaacgtagagagtattccaactcaaggaaaatgctggctggctattttagggctatatgactggaaattcgtgaatgtatctggccctgaaatgtttcttttaccgcattggttttttttatcaccagttcggttttattgccatacccgttcactatatagaagcctggcatacttgaaaagtattcagtttcaacataatttaggggagttagctcaggatatatactatgaattatatggtgcagcgattacagaagataataatgaaaagcgtcatgcgtatcgccatacaatagctgagagcgatgtgtttcagacgcccagtaggggattgcgaattttgtatgatgttcaacgccagatagaaacactcctaccttatataccctatatgaaaagggttcgtcagcatgctttggcgaagtgttttgatcgtatccgtgccgaacaatatagaagcaattttcagggcttgtccagtctgagcagtaccatgaatatcctggtactatggcacgaaaaccctacggatgaggcggtatcttgtagtgttaaaatgttagagagttggcggtgggatagcgaatctgaaggctcgcgctatgcaggtgctcgttcgacaacctgggatacagcgttcacattacaggcactcacagcgtcgaaccaagtaatggaacactttaaaccagtgatacgtgcggcttatcatcgtctcctcaaaatgcaaatttctgatgaattaccaaatgaggatcgtgacgaacgagattcaaatgcgggcggctggtgctttaacgattcaactcatcaatgggcaatatctgactgtactgctgaagcaataagtgctttgctatgttgtcatcatattgatggtttgatttctattaaggaccgtatagaaaagactcggttgcaagcagcgataagtttcttattaaccaggcaaaatgcagatggaggttttggttcatatgaacgatcccgtggtggacagtggttaaataaatttaatccggcagaaatatatggttcatctatgactgaacaatcttatattgagtgtaccgcttctgctttacgcgtattatctgtctttgttcaagattatccagaactgagttctgcccatattagcagagcaattgataaatcaagacattttttatgttcgcagcaacgtgaagatggaacatggcaggctgcatgggggataaatttaatttattcgacctggtttgcggtagaagcattgtgcatttcacagtttcctgtttcacattctactctaaataaggctgctgtctggctgaaagcgatacagcatgccgatggtggctggggagaacatttttccgggtgccatacggggactttcatagataacccaacaagtacggttgtctgtaccagctgggcaagtctcgccttaatggcaatagaaggaccaaaatcagaagccgctaagcacggcatcatgtggctagttaaacaccaacagaaggatggcgcatggctgagtgatgcagtaaacggcgtttttttccgtactgccatgctggattacaggttgtataattgttacttcccgactttagctcttgcaaaagcaaatgctcatagagggaaccttcgttaa

SEQ ID NO: 150079 - DNA, 414 bp, Enterobacter cloacae
gtggtaagaaaaattcttgtaacgggagggcttggttttatcggtcgtgccttggttgatcgctttgctgacctcggtcacgatgtaacatgtgttgacatgcttgaaggtacataccggagcgacgtgaaattccgtcgtcttgatattcgtgatccaggggcagtgattgaggcttgcgcaggaatggatagtgttattcattgtgcatcactggtacataccaaacacaatcgagagaaagatatctgggcgatcaatctggacggaacgaagaatatcatagaggcttgcaggtaccagtcaatttcacgcctgacctatattagttccgcaagcgttgtgtatgagggaaaagacatcgagcatgctagcgaaatgctaccgtattcatctgtttcccaaataccttga

SEQ ID NO: 150080 - DNA, 165 bp, Enterobacter cloacae
atgaagaagcgttttcccgacgaacagatcatcagtgtcctccgcgatgccgaagccgggatttcatcccatgagctgttacgtaagcacgccattttcgacgccaccttttacaactggcgcaagaagtatggcggacttgccgaagccatgctggataattag

SEQ ID NO: 150081 - DNA, 507 bp, Enterobacter cloacae
atgactgtgtataagataacaaagttaattttaaaagtgaatcttaacttttttggtttatcaaacaatattaattcattaactatcaaagagttattcttctggacaatcaaaatggatattaagaacgacgaaaatcgagaagaagatcacaaattgcagttcggtagaagattggcgcaggctatgttgcttacaaagcattctaacgctgccttagccaaagctattggtgtgagtgagccaatgattaagaaatacgtggatgggaaaaatctcccgaaggccgatatacttcaaaaaatttcgttagcattgggtgtagatgtttcattattgcttgatgctcaaggcgaagatagtaattgtgaagaaaaagatctcgaatttcttaatcactccttcaagtatctaaccgttttacaaagaaaaattgtgcttagacagctttcagagaccgtttcaaaactccttaaattagaagagaattacctaactaaaaaataa

SEQ ID NO: 150082 - DNA, 519 bp, Enterobacter cloacae
atgacactgctcagcctgaccgggggcgtgtttggctttatccactgcgcttacggccattttatcaccctggcggtgaccgtcctgcccgcctttgtgctgctgcgtatcctcctgacggtcaccctgcgccttgccgggaccgcccggaccgaagcgctggcaagaaccttcgggcgctcgcgtatcctgacctacgggctgctgccggttattggctggctgctgctgcgaacctacggcgcgctggcgctcgggtttgtgctgcccgagaagagcaagcccggctacgaggatgcccttacaaccctcgcccatcccctttcagcttccttcccgggcgtaatcacgcccgagctggtcgcctggctcagcatctgcgccggactccgggcccacgggctctccgtcactcagctggccctgcgctacgtgctcacggccgtggtggtggggcttatccggggcatcgtcaccgaacggattttcctccggctcgcggcaaggaggaaagcctga

SEQ ID NO: 150083 - DNA, 381 bp, Enterobacter cloacae
atgcagctctatcatgcgcgcattcgcaagccggggacctatgtcgaacgctggctcacccgggggatcctgattgcctgtccggacagcatgaccgggcggctgcggccgtacgccctgccgctggagtgcaccttccgggacgagcggcaggccttcgggcccggggacgcgctgcgcctcggccaccgcctgtttctcatcaccgctacaggtgaccgggcccgggagtcgctttttagtacggggctgctggtaatgtgcttcgaccacgccctgacgccccagcatgacgccgccctgcacctgggcggccctgccccggacatgcgcgacctgcggggcgactttatcatcgaggagggatacccatggaactga

SEQ ID NO: 150084 - DNA, 975 bp, Enterobacter cloacae
atggaactgatccacgtccggcccggccccggcggcaccgggaccggcctctggctgccggtgcgcagcggacgcgtcattctctgcctcaccggaggcgactttcacccggtggccatcgagctcgcggccctcaccgagtctgagctggtcaacggctacgccatcctgcccccggacgagcaggtcctctgcgtggtcctggacgatccggggtcgtttctctgcggcctgtacccgcagaagcatatcccggtcatcaacgtccggccgggctgctaccggggccgcctcgcctgcttcatcgacgacgacacctgggtctccggcgtcaccctcaccgagctggcccaggcggaccggcagcgccttcccgacccggagccgctcaccctccaggtgaacgacgcggtggtgcatcaggagccggaacccctccggggcgtggtggcgatggaagtgcgtctcgccgccctgctcggggagatgctgccgctgctgagcgatgccgcccgggatgcgattcaggtggccctccgggacatcctcccctttatggccctcattgccctgctgatggcgttcgccgaggactccatggtcgggaccgccctcgcgcacctgctcacccccctggtgagttcggtctgggggctggtgctgctctcggtcatctgcagctttccctttctctcgccgctccttggccccggcgcggcctttacccaggtggtgggggtcatcatcgggacgcagatcggggccgggacgctgccctccgccctggccctgcccgcgctgttcgccatcaacgtccaggtcgggtgcgacttcatccccgtcgggctcgccacccaggggggcacccgggccaccattgccgccggggtcccggccttcctgctctcccgccagctgaccggccccctggcggtggtcatcggctgggcctgcgccacggggctcttcacctga

SEQ ID NO: 150085 - DNA, 1272 bp, Enterobacter cloacae
atgaaaatcaaaaacctgcgatggtacattattgtcctggtcatgctgggcaccgtcaccaactacctgtcccgcaacacgctcgggattgccgccccgaccatgctgaaggagatcggctttaccgaacagcagtattcctggatcaccgccgccttcaacctggcctatcccgtcggcggcgtcttcgccggctacatcatggaccggttcggggtgcgcgcggtcttctccctcatggccattctctggtccgtgtttaacgccctgaccgggttattcagctcgtggatccccatgatgatactgcgcctcggcatcggcctcaccgaatccaccttcaaccccgccgggatgaaggtctccacccagtggttccccgcccgggagcgcggactcgcctgcgggatctacagcgtcggcacctcggcaggggccatgcttgccccgcccgtcgtggcctggtccatcctgcactacaactggcgggtcgccttcgtcattgccagcgtcttcggcatcctctgggccatgctctggtgcgtggcctatcgtgccccggagaagcatcccctgctgagacctgatgagctggccctgacgggccgggacacgtcaccggttgtccgtcgccgcgtctcgctcagaaccctgctgccccgccgcgatctctgggccatctcgctgccgcggatgtttgctgaccctacctgggccgcactgggcttctggatgccgctctatctggtcaccgcccgccatcttgacctgaagcagatcgccctcttcgcctggctgccgttcctcaccgccgacgtgggctgcctttttgccgggttctgcgcggagaggctcaaccgctggggggtgagcctggtcaacgccaagcggatcacctttacctttgcggccctcctgatgaccctggtcccgctcatcaaccacgtgaccagcgccgggatggccatcaccctcttctgcgtcgccgggttcgcccaccagtgcgcctccatcaccgtcatcagcatgtccggggactacttcgatgagagcgaggtcgggaccgtcaccggctttgccgggctcatcggcggcgtgggcggctttaccggcacgctgcttatcggcgcggccgtggccggcatcggctaccacctcgtttttgacgtgctcgggttcctcgacctcatcggggctgccctgctctggacgctgctcagtccctcccgtcccgttcccgcgcgcgataacgccttcaatccgggtctgtaa

SEQ ID NO: 150086 - DNA, 1998 bp, Enterobacter cloacae
atgaaacagttcagtgagtctgatatccagcgcctgagacaggcgtaccacgatgatccgcgtatcctcacgaaaatccgcgaggacaatgacgtcgtgctcaacaaccccgttctggtacccgagaccggctgcgccagctgggagctcttctactactgccccactcacggcgtgccgctcatctgggaccggcatgcgtctgaacacttccgctgtccggtcgatggcgaggtgttcaccggcgaaccgttccgcggggcctggtggcgtaagctcaacgacatcaacgcccgggcctgctaccagctcggcatcgcctggatgctgaccggcgacaaaacctgttttgaccgggtacgggagatcctcatgcagtatgcccggtactacccgggctacgccgaacacggcggtatcccctacaacgggcccggtaaaatgaacgcccagaccctctgcgaggccctgtgcctgagcgagtttgtgaaaggctacgatctcatttatgacgaactgacggagaacgagcggctggtcatcgagcgggacctgctccgggcatgcgcggacttcctgatcagcaagcgctgggaccagctgcataaccatgaggtgcggatcaacagcgcgctcgccatgaccggcgcggtgctggacgatgcgcactatctggagatcggggtgaacgagggctgggggctgcgggaccagctccgctgcggcgtgctgaagggcggcctgtggttcgaaggctccctgcactaccaccactatgccctgcagggcttcttcgagtttgagcgcatgatccgctacgcccaccaggaatacagcctgatggggatgccgcagtaccggaaaatgctcaccctgcccttgcacctgctcatgcccgatgacaccgagcctgcctttaacgactgtataccgctcaaggacacggtgagatacccggacctgtatgagttcgcctatgcctgcaccggggatgagatgtgcgccaggatgctcgccatcatctacgaccacgagccgcgcaccagcctggcggcgtttctttacggcgatccgcgcctgcgcctcacggagccggtccgggagaccggcaactaccacgatccggacaacggcatcaccatcatccgccgcccggaacacggccgggccgtggtcctcaagcacacgccgtacgcgggcgagcatgaccactacgacaaacccgggctcattatctacgacgacaagatgcccgtcctcccggacatggggaccaccggttatggcgcgcccatgcactacagctactacaaaaacacgctcacccacaacgtcctgtgtgtggaggagtttaaccagccccccgtgaacccgcagaccctgagcttcaccgaaacggatgactacgcggagatcgccgtggaaatcgactggcgcgagcccccggccgacgtcccgagcctcatccgcgtggagtggaacacccacgcctaccgggatatcgtttaccggcggaaggtcatcgtgtacgaacacctggtgattgatatctcccgggtgaccaatccgcaccgccgccagctggacaatatcctgcacgtcgacggggagcggctcctgaccaccggggcgtacacgcccctgcgcaactatgacccgagcgatccgatgtactacttcagcgactgtttcgtcagccggatggggcgcacggtgagcgtgccgttccgtaccctgacggagaaaaaaatccagatccactgcgcctgcagcgatccggatgcggaactccaccagctgaccggaccggccaatccgccgatcggctccctgagctacctgaaaacccgctcccgggcccggacggtcgtcagcgtctacgtgattgacctgcatcccgaagacgagcagatgcgtaacgtcttcatctccctgcggcagaacaccgtgaacatcgcctccgatctgcaggcggcgatcctgactcatcacatctga

SEQ ID NO: 150087 - DNA, 414 bp, Enterobacter cloacae
atgaaattggctgtgatgacagctgttattctgacagcactgagtgtgcctgctctggcaggggagaacatcagccagccgctggcggtggcgaaagtgtactgcggggccacctttgatgcgctcagaggtgtctggtcggggacctcgtccacggacgacctcgtgtccagcgcggtacactcggtgaagaacagcgggtatgcgttttcagatttcgcgacggaagcaggtcagacgcccggagaggcggattttcgacattcgctgacccgcacactgaccagtatgaaaaaccacaaggatagcgccttcaggagcagggaggcgtttgagcaaagtatggatgcccaggaactggcgtgtttgatccagcgcacacaacccaaccgcgcccggctgagtaaaccgtaa

SEQ ID NO: 150088 - DNA, 390 bp, Enterobacter cloacae
atgaaattttctcacaccgtactgactggcctgctgatgctggccccagcgttaactgccgtagcggccacgccggtggccaccggctgcgaggccaaacgccaggatattgagcagcagctcaactatgccagagcaaacggcaacgatcaccgcatcgccggtctggaaaaagcgctgtctgaggttaacgcgcactgcactgacagcgggttgcgggccgaacgcgaagcggacgtgcgcgaaaaaacgcggaaggtggaggagcgtgagcaggagctcgctgaagcacgggctgatggccgtgcggacaaaatccgcaaaaaagagcgaaaactggacgaggcccgggcagagctggaggaggccagagcagcgctgacgcagtaa

SEQ ID NO: 150089 - DNA, 1341 bp, Enterobacter cloacae
gtggatcgcggctgcagtcagcaaggccagtaccggctggggacagaggccgccctgcgcccccatctgcgcaccatcctgatccttcgtcaggacgtcgtggtctgctcgtccctggcaggcaaccaggcgctgctgacgtatgccccgggtctgcccgagcgtcccctgctgctggtcccggcagaggagaccgccgaaggagaaccggtcctgatctcgcaggcgcgctatgccggaagccgcatactggtgaccatcagcgatcgccacgtgcgggatgcgctggacgtgcagaaaaacatgacctatttccttcgcattggcgagcaggaaaccggtggtaacggcgcgttaggctccgtcagtgccgccggaggccacaccggacaggtggcctccgacctttacccgtttgccatcaccttcagcccacccccgttcttcagcgcagagcggcttttccggaacggcagcgctatcctggcgtttttgctgatcgtctccggtctcgccgccttcctcctgaaccggttcatgaacaaaaccgccctcccggaggaaacgctgcgcctggccattgcccgcgggcaaatcgtgcctttctatcagccggtggtggatggccgggacggcacggtgcggggcgtggaggtgctggcccgctggaaacacccgacagcaggcttcatctctccgtccacgttcatcccgctggcggaaaaatccggcctgatcgtctccctgacccgcagtctgatgactcaggtgatcggccatatgaataccctcgccgacaaactgccggaggggttccatatcagccttaacttcagtgcctcccatattgcgtctccggacttcgtggaggagtgcctgcactttcgcagcgggtttacccgtcaggatctgaaccttgtcattgaggtgacggagcgtgaacccctcgacatgagtgaggggacgatccgcacgctgaacggactgcatgagagagggtttgggatcgcactcgacgatttcgggaccggttactccggtctgtcctatctgcatgcgctggacatcgactacatcaaaatcgattccacctttgtcagccgggtgaacgcccgcactgagtcaacggcaatcctggatgtggtcctggatctggcacgaaaactggcaattcgaatcgtggcggaaggggtggaaacccgggaacaggttgactacctccggcacaatcacgtggtgctcatgcagggatactattacttcaggcccgtcagctcgcgtgagctggccctgatcctgctttcccgcccgaaaatccgtctggaggatgctcccccctga

SEQ ID NO: 150090 - DNA, 531 bp, Enterobacter cloacae
atgcgtttggataattgttgtgaagacttaagtcttatcagcagagtgattgctggtgtgactttggatgcttctcagtatctgaacaaaccctccgggcatgtacactctgtcgggtacagactgccgcgccctgacacgcctgttaagccggtggctaagctttcaggcttctctgagcgggaagcccgcgagcgacctcatatcgatttcttgccatgtcctcagcctgaccggaatgaaattcaaaaatttcaccattacgcggaaaaacttcatcagatgatggtcagccatatcaggctgacacaccagatttctgattacagtgccgaacaaattcgtggttgcgtgggtagggatcaataccatcagctgcagaatattgaccttatgatccgcgggctggaggggctggtttcaaacattttacgcgaccagtatcgccctcacaccagctttgttaaccttgcaaaggccgtcaccgggtatcgtgtagcgctttccgatcttctgatgattctcgactag

SEQ ID NO: 150091 - DNA, 246 bp, Enterobacter cloacae
atgagtcacgaaccggatctcagcgttgccagcgatctctccgccttcaccggcacccactttgtctatacctatgataacggctggaagtacgaatggtacggccggaacgacaccaccggtgattaccggatccatcagggcctggttgacggacgctgggtgacccaccagaaaatgcacgccgtccagtttgcgcctggcatttacaaagtggacaggcacctgcgtcatcctcctgtttga

SEQ ID NO: 150092 - DNA, 318 bp, Enterobacter cloacae
ttgcgcctggcatttacaaagtggacaggcacctgcgtcatcctcctgtttgatcttcaccgcaaggtgatccacggtatcatcttcttcccacagtggatcgctggcgaaggccagcatcccgagaaaaccatctgctaccagaatgagttcattgaggatatgcaccgctttcgtgatgaaggcccggcctacccgtacgtggtgctccccgagtttgcgaccgtcacctacatcaaaaacgaagggcctgacaatgatgccgtgatcaatatgccccccgggcagcatccggcggattattttgataataagtaa

SEQ ID NO: 150093 - DNA, 834 bp, Enterobacter cloacae
gtgaaggggataactgtgtttatatcgaaggccatggccgcatttgtaacggtcgcgcaggaaaagagtctcaagcggaccgcggagaaactgtgtctcaccgtgccgcctgtctccagaatgctgaaaaataccgaaaactggttcggtgaaaagctggtcattattgaacgtaacagcgtgacgctgaccccgtttggcatcaacatctaccgtcagatactgccgcactatctgtccctgcagaatctctctaagcgaaaaagtcgtgcacccgtcactatctcctctccggtggtacatgccgcattttttgatgaaatcctgcagatcgtggtgccggacatccgtgaatgtcccgtcatcaaatacgcggagcacattcatgaagacgacgatctctttattcatctgaatccggtagcctgtccggcctgttttgaagagtcggttcgttgtctggagctgtacctgacctgccacaacgcctccgagacgcgctggccggaactcaatctgctggtcgggagcgaactgctcttttctgaggcgtttcatgatgcgcttgagaatttacgggcgcaggggtttaagggcgaggtgaggttactggataacgcgaagatacgcgcgctgctgcagcagcgcggggcggggttaaccttccgctgcaaacctgataaatgtgaaacggtgcgttgcggggatccggtgtgttaccggcagcccttttacgtttaccggaacaaatactcacgggtcggatttccggcagcggacaggtgtcagtccgtccgggaggaacaccctgccgggggggcaggggtcagatag

SEQ ID NO: 150094 - DNA, 375 bp, Enterobacter cloacae
gtgcgcgaaaatactgaatggcaccgtgtcgtattgttcggcaagctcgcggaagtggcgggggagtacctgcgcaagggcgctcaggtgtatgtcgaaggccagctgcgtacccgtaactggcaggacgacagtggcctgacccgttacgttaccgaaatcgtgggcgggcagaacggcaccatgcagatgctgggtgggcgtcgtgacgctggtcagtcccagaatgctgtcccgcagcagtcgcagactcagcccgctgatgggcaggaaaaaaaacctaaagcgaagggcgccagaaaagatcgtcagtacgcaggcacagtctcagcaggtgctgcagccgttaccggacgattacccgccgatggatga

SEQ ID NO: 150095 - DNA, 636 bp, Enterobacter cloacae
atgtgcggtcggtttacgcagtacaactcccgcgaggagtacctggcctttctcggagaagaagcagaacgggatattccgtattatccggagcccgtcggccgctacaacgttgcgcccggaatccgggtattgctgctgagtgaacgccgctcacagctgcatcccccggagtggtggaacaagcccgctctcatcaacgcccgaagtgaaactgctgccggcagccggatgatcaggccactctgggagcacggacgggccattttttttgccaacggctggttcgagtggaaacagcaaaacggcgtgaaacagccgtttttcatttaccgaaaggacggaaatccactcctgctcgcagccatcgggaaacaaccatttgaaaacggcaatgaccaggaaggattcctgatcgtcacggcagctgcggatgagggcctgctggatattcacgatcggcgaccgctcgtgtactcaccggctgccgcacgtaaatggctcagcgaaaacacaaccggtaaagaggcggaagacattgcccgtgagggtacccttcccgcccaagatttcacatggcaccccgtcagccggccagttggcactcccggtaatgggccggagccactgacctag

SEQ ID NO: 150096 - DNA, 318 bp, Enterobacter cloacae
gtgacggcctatatacttaccactgatgcggaagccgacctacggggcatcatccgctacacgcgtaaacagtgggggaccgcacaagttcgtcgctatattgccaggctggagcatggtattgcagatcttgctgccgggcgaggttccttcagggatatgagcgaactctttcctgaactacggatgatacactgtgaacatcattatgttttttgtctgccacgcgggagtgcgcccgcactggttgtagcgatttttcatgaacgtatggatctcatggcccggctgagcgagaggctcaacatcgaaagttag

SEQ ID NO: 150097 - DNA, 252 bp, Enterobacter cloacae
gtgagccgactgacaattgacataacagaccagcagcatcagagcctgaaagcgctggctgctctgcaaggtaaaacgatcaagcaatacgcactcgaacgtttgttccccggcgatgcagacgctgaccaagcatggcaggatctgaaaaaactgctgggaaaccgtataaacaacgggctggaggggaaagtttctaccaagagtatcggagacattcttgatgacgaactgagcggagagcgcgcgtga

SEQ ID NO: 150098 - DNA, 381 bp, Enterobacter cloacae
ttgaagctgcctgtgaccgggtctggttgcccggaaagtgatgctttaccagagttcctgcaggatatttcgcgggaactgtatcagcactcactggccgaaggtcatcgggagattttccagaatgcctgtagcattttaaaagaaatgatcccggagaccgaatgcccttacagaccgtataccatcgcctggcgtttatggtttcggggattcaccagaggctttattgaaagctacatcgatacagtggccaacaaaagcatcagtagggtcagactggatattgcgtgcaccatgctgaagcacggattcgatagcaataccgtcatgaaaatgaccgatctggctgaagacgacctgacgcagatccgccactaa

SEQ ID NO: 150099 - DNA, 669 bp, Enterobacter cloacae
atgaacgttaacgggaacccgccagcattttacgggctgaatataaggaaagagcactcagtgacgttgacagaaaaatcgggccatctggcgtggtgcgccctgatggcgcttgcgctggctaggcagaacggcgatgcgctgtcgccggcacaggaaaacctctttctcacccgctggctggccgccgcgctgaagcagcggcgcttttcgcgcgacgtcacacccgacctcgagtggctgctgaaacagaggcgtcagctgggcgtcggcgcgaagctggccggcaagctggattacctctggcgctcctgctccggggagctggctgaacagaacgacctgttccggctgacgtatgcgctggaaacggcgaaggacatgagctggacttaccgtctgctgaacgacagagagtggtccgggcggtatgccgtggctctgaatggcgcagtaaacggcgtttacctttcgcgatctaaccttgatgtcgcttttgacgataatggctatcaggttaacccattgatggctcagctgactgggaatgtgggcggtgtgatgaagctgctgaaccgctgtggctggcaggccgaacctgggagtgatgtctccctgccccaccagtactcgctgatggccagacagggagtctcaggaaaggattag

SEQ ID NO: 150100 - DNA, 399 bp, Enterobacter cloacae
atgtccatgtttgttcgcgcctaccttcgggcttccaccagtgagcagtatgctcaacgtgcccgcgatatgcttgatcgctttgctcatgagcataatgtcatcgtctgtaactattatgctgagaatgaatcaggcgcacgcctggagcggcccggacggcgtgatggttttctgccgggctgtttcgccgtcatccacacctggggacgcgacctgcagtggcatccgcacattcatctctccaccactgcaggtggggtgaccggaagtaacacctggaagaaaagccagttttgtgccagaaacatgatggcgatgtggcgctggcgcatcacggacctgctgcgccgggaatactggcgactggaaatgccggagagtctggcggcattttga

SEQ ID NO: 150101 - DNA, 198 bp, Enterobacter cloacae
atgattagctctgaatggaaactcactaaaattttcgacacggttaaacctcattacaatatagtcagtgggcaaacttttgttttgcacactccggacaataccatggccttactttcactctatgtgaatagattccttatgcctgatgtcaatgataacataacaaatcatcgcgatggattcagggggttttga

SEQ ID NO: 150102 - DNA, 276 bp, Enterobacter cloacae
ttgatccatgtgtacgaaatgttagtgcatctctataacgaaaaaaaagataaaactaatcctatcaacgaactcacatctcgtgagacagaaatactttactggagcggcactggtaaaacttatcttgaaatagcccgtatactaaatttaaccgtcagtaccgtaaaatttcacatgtcaaaagttgtcaaaaaactcggggtaaagaatgcgaaacacgcaatcagtttaagtatcgaattgaatatagcacaagatatgtcaaaaagataa

SEQ ID NO: 150103 - DNA, 591 bp, Enterobacter cloacae
atggaaattaagcatgctacggaattggaattaaatagggtttgtaaaattctcgcatctgaattttataatgatcccgtgctcaaccatgcattcgatgataccgttcgagaacggcgtatggtggcattacaatctttttttgagatttatgttgatcttgcaaaaaaatacggaggtgttcttcttgctgaaaatgatatgggggtattagtttattttcgtccagaaatgatagacgcgatagataaaaataaaattgatgaacaattgcgtcaaaaatgtggtcaatattatacatctgtagctttgcttatgaatggccttgaccattatcaccctcagacccccccccatcattatatatttttaatagcagtgaagtcattacatcgccggaagggggtggccacgaagttgctcactgagtttaatgtgattcttgatgaaaataaatcaccttgttattcagaatgcacaacatctggcactcaatcattgttcatcaaagccggatatgttagcaatagtcagcctattctcattgataattttccattgctgttaccagtctggcgtgacccgcactaa

SEQ ID NO: 150104 - DNA, 1425 bp, Enterobacter cloacae
atggatgatattttggatgcaggtgaaaaaatcccgtcaaaaatgaaagattcttctgtgaaaacgtctaagcagaagggagggggctctgtagaagagtttcactcggacctcgaaaaaatttattcagatgctcagagtaagcgagagctatctttaggctatccggttaatcaaaaatttgactattccgccctctcgccttttttaaatctacatctcaataatgctggcgacccttatgctgccagtggaacaatattaaatactcgtgaccttgaaagggatgttctcgaatacttttccctgctctggaatgccagttctcgtaatccactaatttcccaatcgtattggggttacattctgggaatgggggctacagagggtaatatgtatgctctgtggagcgcccgtgagtattttaagacgaaatcacattctggaaaaatcggtagtgcagtactcagagaacctatacttttttactcacaggaatcgcattactctcttgaaaagtgcgcaaaaatattaaatattacttcctttcaggaagtgggaaagacgttttatccagatcagtgcccggtaacagctgatggtcagtggccccatggagtacctgtagatcaatatggagccgtagaccctgaatcactttccatgttggtcagtttctttgcggcaaagggtcatccacccattatcgttctcaacgagggaacaacatttcagggggcttttgatgacccgcaggctgtttgggaaagtttatatccagctcttaaagctcacggtttctgtttacagacgaataacgacaaccatccagatttctggattcatattgatggtgctcttggtgctgcttatctgccctaccttgaaatggcttatgaagaaggattgagcagtaaaaaaggcccatgctttgatttcagactccctttcgttagctcagttgttatgagcacgcacaaatggtacggggcaccgtttgcatcgggaatttatatgagtaaggaaaagtaccgtatgcggccagctacgcttcctgaatatatcgattccccagataccaccttgtgtgggagccgaaatggcctctcggcattgcttctctggtatgcaatcagcacagttaatcatcataaacaggtaaaagcggcagcagattgtatgaagctggccgaatatgcgtatgaacagctggaaacggttaaaaccagtcaccctggatttcaggttatgaaagggccacagtctctggtcgtgcttttttcccggcctaatattgatatattcaataaattccagctcagtggacgaggtgattttgcacacattgtagtcatgcctcatgtgacacaatctgcaattaataaactcatcagagcactccgtgatatggatgcctttgagtaa

SEQ ID NO: 150105 - DNA, 180 bp, Enterobacter cloacae
atgttaattggtagcataagaatggtggatttagggcaatgttttttcatcgctatctgtatactgttcaaatccatgatgaaagaccgaaatgtgtttcaggagatgactgtcgcatgttttatttatcttattcagagccatatgctggctttgctctccggaaacataccagtgtaa

SEQ ID NO: 150106 - DNA, 330 bp, Enterobacter cloacae
atgaaagttagcgaaaaaaaactgctggagtccggcttcagtcatacagatcttcagaaaattaagagcaatgtggaaaatttcgggggaacacttgacgaagtgattcaggatttagcaaaacgattcaatatagctaagtggataactattattgctttcgtaatcttggttttaacgtctgttttatcgacaaaaaataacaccctatctctggctttttcgttgattgtaggattaccttttatctggtacctgactcccgccaaactcgcttttaaagcctggcggtataaacaatatgcttctaggattgagggcgatcagtaa

SEQ ID NO: 150107 - DNA, 609 bp, Enterobacter cloacae
ttgacgctgacagataaatcgggccatcttgcatggtgcgccctggtggcacttgcgctggccagacaggatggtggcgttctctcgccagcacaggaaaacctctttctcacccgatggcttgcgactgcgcttaagcaacgccggttttcgcgtgatgtcacacccgaaatcgaatggcttctgaagcaggggcgccagctgggcgtcagcgcgaagctggccagtaagctgtattccctctggcgttcctgcaccggtgagttgtccgagcagaacgacatgttccggctgacgtatgtcctggaaacagcgaaagatattcactggaactaccgtctgctgagcgatcgggaatggtccggccggcatgctgtggtgctcagtgcgggtgtcaatatgatttatctctcacggtccaacctcaatgtcgcttttgacaacaacggccgacagataaatccgctgacagcgcgtctgacggggaatgtagcaggggttattaagctgtttaatcgctgtggctggcaggcagagcctgagtctggtgcctccctgccccaccagtttacgctgagggccggaccgggagtgtcagtaaaggattag

SEQ ID NO: 150108 - DNA, 486 bp, Enterobacter cloacae
atgtgttcccagcctaatggcgacagattcgacagcagttgctcgttgatcttcagccccttccgcttcagggcatcgacggaagagcagttcgccgatcgggcaaaagagatgctggtgcagtttgttcaggtgcggggatataaaatcgccagtgactaccgggaaaatatcagtggtacaaaacttgaccgcccggaaatcggacgcttactgatggacagtcgctgcaataatattttgctggtcgagcagatagaccgcctgacccgcctgagcaacagcgactggatgacgctgaaaaagcagataaaacaacacaaactgcgaattgtcagcctggatgtccccacctcatggcaggcattgtcagataaagatccttcgcaggtcgacccgctcccccgtgccgtgaagggcgccatcaataacatacttatcgagctgatggcagcgatgtcgcataaggactggctgagccgctga

SEQ ID NO: 150109 - DNA, 216 bp, Enterobacter cloacae
atggaagattttcggcccggggatgtggtcagcttacggacggaagacgggcaaacggtgacgggggttctggtccgtctgaataaaaaaacggtgactgttcatactgaaagtgatacccgctggaatgttgcaccacagttattgacaagaattaaacgccagctgggatccgaaacccgggcagacaataccgttgaaaaaaagcttcattaa

SEQ ID NO: 150110 - DNA, 273 bp, Enterobacter cloacae
atgctcaacctgacagcagaacaacgacgattagcgaaaacagttcatgactacgccagccgctttcttctctcagagaacggtcatgcacaattattgcagggttgttatgactacatggaggcctttaagcgagtgatggacagcacatcaaaggtacagatggactacatctgccagcaatatcctggctattttcgctttgcgaaattgatggaacggctggctcagggtgttgctgatggtgttattgaggttccgaaagatcactaa

SEQ ID NO: 150111 - DNA, 381 bp, Enterobacter cloacae
atgatgaaagtaaactggcattatgagtatttcagatatctgttacgggtttttcggcattatttaagaagtgataaaatatatcgcgtgaataaactcaggaaagattttgggtatacgccgaatttatcattccctgtgacatttaacgagaaaatcctttgcaggatgataaacccggtaaatgaagagcttatcactcagttagctgataagttaaaagtaagagagtatgtagaaaagataaatccaaatatattacctgttgtttatggtgtgtttgatgatgttaatcatattgacatttctttctttccggaaagatttattctgaagtgtaatcatgataccggaagttttataatatgcattaatatgtag

SEQ ID NO: 150112 - DNA, 336 bp, Enterobacter cloacae
atgcagcatgaatggaaaaaacacgggacctgttatggagaagggcaatcagagtactttaatgagtacaagaaattaagaagggtggtgaaatataaaaacgcatttaaaatgaatattgggaaaaatctgtccatgaaagagattcaatcatggtttccttctaataccagttttcgttgtgtgactgtaaatggaaaacagtatttgtttgaagttttttatcttgtaaaaaaagatggaactcctttcagtcatgataagaaattgcagataggagaacgttgtcatacctcactgaaaactatacctggtgtgacagagaataaaaagtaa

SEQ ID NO: 150113 - DNA, 150 bp, Enterobacter cloacae
atgttgcactttaaaaatatttattatatttattatttttattatttttattgttttttgctggtttttctgcgcatgcccttgataagggtgagcaggatatttccggcgcccaaagcggtacttatgactatcttgtctacgctgtaa

SEQ ID NO: 150114 - DNA, 330 bp, Enterobacter cloacae
atgtcccagcccttcgatttcgacaaagcactcaaagtcctccagtccggtcaggcattaacgggaaaagatggtatcttaacgccattaatcaagcaattaaccgagtcttccccgtctgctgagcttgattcccatctggctcaggatgtggaagcaaaccgtaaaaatggttccggcaaaaataccattaaagcccctactggcagttttgaactgacaacctcgcgcgatcgtaacggtacttttaagccacaactgatgaagaagcatcagaccaagctgtccgacgagctagaacgcaagatcattgtactagctcagacctga

SEQ ID NO: 150115 - DNA, 1059 bp, Enterobacter cloacae
atgttacacatatttggattaaaagtgaaaaacaataaaacgcatcacccgcatgcgtctagtggtagctaccaattggaagaaccagagaaggaaattcaaccgcaagcactctgcgagaaaattttatgtcataaaatcttgcttggttcctccacgattgaaatcatccgtcagtctattatcaactccagcgaacagctggatatagaaataaatcgtattcacgaattaaaccagaaaaatgataatgcgcgaagtgcattgcaatcattgattgagtttatttcagatattagcaaaacatcttcggatgctcgtgtacaaatggaagctttggactgttcgctggataagattaatagctgcattaatgatattcagaaaatagccagacagactaacttgattgccatcaattcagctattgaggcagccagagtgggaaacactggtcgaggtttcagtgttatctcaagagagattaaacggttatccgatgatgttcatcgcagctcaaaggatgttcatgatacgacgactgtggttcaacgaagtgcaacaaatactagcgaggtgttaatgcagcaaaaaacactgctcagtgacattcaacataatattagcgatgtggttgattcaattggtttggttataaataaatccactgaaatgaaagcagttatggagtacatatcgactgttcagtttctcaatatcgttaagatagatcacgttatctggaaactggaaatatatcgtttactgctaaacaaaacaccagacaagaaagttaccatgcataaccagtgtcggctgggtaagtggtactatggtaatgcccaacaaacactgtcagatttcgatagcttccgtacgctagaaaaaccgcacagggaagttcatgagtctggctgtgcagcattaagagaatacaccgccggcaatatagaaaagatgtcgttagaactggatagtatggagatggccagtaacgacgttatcaggcagttagaacaactcatcaacgacctgaaagttaagactctgtcgcattaa

SEQ ID NO: 150116 - DNA, 1323 bp, Enterobacter cloacae
atggatttcatcaataaaattaaacatgggggcggtcttgttttcattgaaaagatctctaattgggcgggtgctttttcagggcagcgacatctttcggcagtgagagaatcatttgttgcgctgatgccgttaattattgctgcgtcgctatttatattaataaataatgtattgctcaacggtgaatcgggcttagtcggttttctggggctggaaggcgcatgggttggccatttgcaggaaatcggtattcgcgtatataacggaacgctgaatatcctcgcctttcttgcaacgatgatgatttcataccgattagccaacagctatggcgaagagggtataacgtatgccattttctcactggcgtgtttatttgtactattcccggtaactattcccgtgacggtaccaactggcgaggtttttcaggtttcggggcttatcagtggcaatgagagtggtgctgcaggtatgtttgtaggcatatttgtggcgctcatttccactgaactttttcgcaaggtttcggcctcgccaaaattgaaaataaccctggcagattccgttcctccgtcagtttcaagaagctttaacgtattaatacccatgatcctggtgttaaccttgctaagtatctttgcatggtcgttaaccagtcttttcaacaaaaacatacatgaaattgtcacgttgatgatccaggccccgctgcaaaatattttacaggggctaagcggcgtcatcgggctgctgctgacgcaaaacggcttatggtgggcggggatccacggcgccagtattatgtacccaattactgagaccacattgctggtggcgattcaggaaaatacggcagcgtttaaggctggccttgaaatccctcatatcgtcacgaaacctttcctggatgcctttggatttatgggcggtggcggtcagacaatcggcttactcattgcgttgtggatcgccgctaaaaaatcggagcatcgtgcaataacgcggcttgcaacgccaggaatgctgtttaacataaatgagcccattatttttggtttgcctgttatgttcaacccagtgctgattgtgccatttttatttaccccgattatcagtatcgtgattgcttatgccgcgacggcaatggatttcattaaccatacctatgttcttgtgccatggacaacgccgccagtggttagtgccttcctcgcgacaggaggggactggagagctgcggtattatccgtattcttaatcggcttgtcggttatcatctatctgccatttgttatcgttatgaataaacagaaataa

SEQ ID NO: 150117 - DNA, 1545 bp, Enterobacter cloacae
atgaatattattggcatacctctggatatcagaccttataactatgatttcctggtctcccttgtttcgatggacaataatgtttcgttaaaaatgccggagaaagcggttttgggttacaaaaaacaacccgctgaacatcaagctgtagataaatttttgaaagaccactgtgcagatgctgatgcattaattatcagcctggatatgtatctctacggcggacttttccctgcccgtatccatcaaatggaattaaccgagttgacggcaaggctaaatacgttaaaaacgctaaaggagaattatcccgcgctaaaaatatatgcatcttcgctggtgctacggacgccaaaatataattccagtgaagaagaaccggattactatgcgcacttcgggcattccatttttcaggtgggctatttgtctgacaaagagaagcgcgttgggctaagtgaagatgaaaaagcacagctgtttgcgcaccgttcagctattgattctgctgcttttgatgactggatgctgcgtagaagcaaaaatctacagctcatagaaaaagcgatagagttcgttgatgaagaggttatcgagcagctgataatcccactggatgatacggcgcaattcggttttacgatgcaggatcttgaacgtatctacgaaaagatatctcttctcggtgttcaggaccgggtgtttgtccatcctggtactgatgagtcaggatgcacattattgaccaaagcttatctatcgatgagggggcaggcgtttttcgccacgacgtactattcaaacgaattgtttaaaagctatatcccgaattttgaagatcgtccttttgtacactcattgcgctcgcatgcggccgcatcaggtataacattggttgatgatgatgtctcgctgcccgttttagcgatcaatggttgcggcgagatcatgcaagaggcttttgatatcagctatgggctaaaccttcataccggcacgcgcaagccgaagtataaaaatattacgtattttacccaccgtaacctggcaacatatgcaaaagaaattgccagcagggctttgcaggtccccgtggtggttattgatgtggcaatgtcaaatgggggggaaactgaactgattcgtgcgctggataaagctggcgctcttgatgccattaaaggctatgcaggctggaataccacgtgtaactcgttagggacggggatagcgaaccttgtcttttcgaccctgggcgataatgctggcgcaatcgaacatttcctgaaagaaaggctggtctccgactgggcttatcagaccgaggtccgttttcctgttcagtatgaatatctggcgtcgattggtctcagctatgactcatttgaagaaaaggagtctatggtcttcgagaaaattaagtctgaaatcgaaaccgtctggaaggaaaacgttaagaatagcgttaatttatgctgtcctgtgatctcttccatatccgcgcctttccggcggatgagtggtttacatattaccctttcataa

SEQ ID NO: 150118 - DNA, 312 bp, Enterobacter cloacae
atgaataagatacttttagtgtgtgctgcggggatgtctacctcgatgttaatgaagcgaatgaaagattatgccagttctctcgatcacgagacgataattgaagcgcatggcgttgatgttctgaaagatattatcgcgaattatgatgttgtactggttgcccctcagattcgattcaagctggctgaaatacaaaaactggcagaaatgcatggtaagaaagcaaacgccatcgatccattcctgtatggatcgatgaatggcgaaaaagtgtatcaacaggctgttgatttaattgccgcaaaatga

SEQ ID NO: 150119 - DNA, 306 bp, Enterobacter cloacae
atgagttatgaagatgatgttatgtcgctgattattgccgctggcgagggacgcagctgtgccatggaggcgctcagttttgccaaagcagggcattttgctgaagcagaggcttcgctaaccctttctgccgatgccttcaggcaggcacatgaggtgcagacccggctaattggtttggacgagggggcaggtaaactgcaaatgacgttggtgatggttcatgcccaggatcaccttatgaccggtatgctttgccgtgaatttgtgacagaattgatagaggtttataaaaaaatggagtga

SEQ ID NO: 150120 - DNA, 858 bp, Enterobacter cloacae
atgaaaacacgagtcggctttaatactttaattaacaccagaattaatgaattgacccagactgaaatacgtatttaccagtttatcaagaataatcgtatgcggtttatcgatatgagcattgcaaaattagccgatgcaatgaatgttggtgaggcgtctatcgttcgtttttgtaaaaaactgggatacaaggggctttcagaattaaagacgactcttcgcctggaaacagataaagacgatacattgttatcaaaagtgacttctcttgatgagcagacgaactctatgagaggaattgtacaacaactggctaatgataattacgttgttatcaatgaaacacttgccctgcaggaggagtcgtcgctgctgcgtgccgctgactgtctgagcaacgcccgacaggtctatttttacggcattggtatgtcggcgatatccgttctgtatgccaaatatcgatttatgagaattatggtaaacgttgatgcgttgatcgacaaccacaccatgacgctcaattcgaacaatgttggagacaaggatgtagtggttgcgatttcacattcaggtgaaacacgcgatgttgtcgatgcattaaaaagggtgaaagagaagggggcggtaactattgttattagtaagctaaagcattcttcattaagtcagtacgctgatgttgtcttactgacgggcgggacctcaaatccttatcagtcagattcatcaacaattactgctgcacaaagttttatggttgatgttttattcaattcattattgtttatcaatcagggcggtaatgttgagaagataatatcttctctggatattattaataaagctaaataa

SEQ ID NO: 150121 - DNA, 765 bp, Enterobacter cloacae
atgagagcatttattgctgttatctgcctgacatccgtttcctgcacgtcaccttatcctaataccattcctgagatgaattatatcaactcattagattgcaataatggtaaaacaaaggctgctgaatgtgtaaataccgcgaaaaatccttatgagagcatggcgactgaagtcaaaagatatgaaatgcaattatcggagaaagaacagcaactagcgacgcagaaatatgtgcttagcgatgtcagtgccgccggtactgtcacatccgtaattgcggcagccagcggggctctgaccacagcactctatggtggtggggtatcagtagtcggtggggttgtaggtcagcgttataattatgatgttcagcttctgaattatcacaccacccggcagaaattaaactgtatataccgcgccatgacagatataacctctaaccaactggacatggcaattagtaccaaaaccgaaccttcagtgagcgagcttataaaaccctatttaaacagtgtcatatctgatctggtgtttgaactccagtcgcaacaggctgccgtcagtttggttgcacccgatgtcgcagccattaccgagggattaaatcaacaaaagacggcacagaaaaactttacgtcttcacagacagacgatagaagtagaacattagcgctcgctgaactgatccgtaccaatataaaaatgtgtaaaacatcacctgcaacagctccggtgaccgctgctcctacaactgattag

SEQ ID NO: 150122 - DNA, 945 bp, Enterobacter cloacae
atgaacagcaattctgcttcatattatgtttttccaatcgcgatggtatgttttttatttagtgccaaagtgttatcttatgaatatgcctgcggtttttctgaaaagaacctttcgtttgcaggaacaccacttcaacaggcaaattgtttattaaaacaaataacaatcggaggtgatcttgcaaaaacatccccctctttacctcctcatctaaaatcattgattggaaataaagtatcaatagataagtcaaaaataattaaatatttttctgacaataatatttcagatactgctgttggcggtagtataacagaatctttgtctcattcatcagaaggaagtaagcctgtggcgcgttacttcgtaatacacgatgtaagttataatgtttgtgataaaaaagaaaagcttcataacaccgacagtccctctgctgagtggaacttatcaaaaacttgggagaacagcacacaagcacatctttatattaccagagatgggaagtttctatctccacaggggagaactttcgcaaccccatggcgtgcaacgcagcttgagttggataaggtaggcaagcctagcatggggttgtttttgcatgttgaaaatattcaggttagaaccgcagcatatccacccggcggtatctattgggtaaaaaagaagaataaaaatgggagggtatatatagattgtgaaaatgatcgcattgcccaaacacctggatttactgatatacaattatctcgcttggcattggcatatattatagctagttatagaaaagggtcgtggcttattcctgcatatcatgcaaatatagatcgaggaattcctggtggtcatgatgacccacagaatttcgatttagataaatggagcaataacatctgctcaatactaacggagttgaattctccagattgcaagatgtag

SEQ ID NO: 150123 - DNA, 138 bp, Enterobacter cloacae
atgctgaacccaggattcgttacccgcaaagcgcttgctaactggcaggatgttcccgcttttctgcccagttccagtttcatgaaaaacaccaaacggtcatccacacttcccaccctgaaaatattctgccgttga

SEQ ID NO: 150124 - DNA, 306 bp, Enterobacter cloacae
atgcttccaattcggttaaaaaaagcccggctaaacgctgggttaactcaagagcagctgggaatacttgtgggtattgatgagagctctgctagtgctcgcatgaatcaatatgagaaaggtaaacatgtaccagatttttcacttactaaaaaaatcgctgattcgctaaatgttcctgtctcatatttttacactcccgaagatgatttggcagaaataattttgagaattaatcaactggacaagaaccaacgattactattattaaaaaaattagtagatggaattataaatcatgaataa

SEQ ID NO: 150125 - DNA, 819 bp, Enterobacter cloacae
atgaataaacaagaagttgtacttaaagtgcaagagtgtgctgcatggtggattttggaaagacaaagtaaattaacaaagttaatgtctgaaactatgtctataaatcctttcatgaccccatttatatttgattatcactcacttgataattttgatgagcttgttgaagcaataattgccaaacatttaatgactggacacgatactggttttggaaagttgatcgatgagaaaatactgcctagggtatttggagcatataaattagataaaggttacagagcttccaatgagccttttatacactcttgtttcgatgaaatagatcatgtaatacaaagggatgatggcagaattgaacttttatcgcttaaagcgggtaagtggactattcaattgacaatggctgttcaacttaataaagcatttaacgaaataataaatgattatccaggcgtggccgataatatcgtagtcggtgttttttatggaaatagtcatggattgactgataagtataggattctacgaggtattaataccggcgctaatcataatgtcatagatatacgtgataaagtgcatgtgtatgcaggtaaagaattttggtcatggcttaataatggtgaggatgaaacgcagcattgggtgcttgaaggaatagaacgagccgtcaaagaagctgatataaaagaaaaaaataaagaactcattgaaagattcaaagagcatgttgctaagaaatataatgagcaagtattgaatgcagatggcacggctcaatggcataaattactaaaaatgattaatgaataa

SEQ ID NO: 150126 - DNA, 1260 bp, Enterobacter cloacae
ttgtctagtaaaaagtttatttcgctatttagtggcgcaatgggtttagacttaggtcttgaagaagcaggatttgagcctttagcttgtgttgaacaggatagggctgcgctgaaaacaattaaaactaacaaacccaaccttgcggttttcgagggcagcattgttgactgcagtggtcctgaattattagctttggcaggtgtgaaagataaagaagaaatagatttaattgctggcggcccaccatgccaggcattcagtgtttttggaaatagattaggcttagaagatgccaggggacaacttattttcgaatacattcgaatgataaaggaaatctcccctaaagttttcgtaatggaaaacgtccgtggcttattatcaatgtcgatagttccagcctctaaaaagaaagaactatcagacatgatcgaatcatctgcttttgaaaaaggttctctaattaaaagggtcgctaaagaatttaataaattaggttatcatgttgattgctttgtagttaatgcggctaactatggagcccctcaaattagagaacgtgttatcttaatcgggaatcgtttcggaatgaaagctgatttcgccaaccctttatttagcaatagagcagaagataatctaccaccattcaaaactttgggcgatgtaattggccctgagagtggatttatcgataaatacccagaggtcatgaatttttcaccaagaaaattgaaatatctttcaatggttccgccgggtgggaactggagaagcatgacagaagaaatgcaaaaagaatctatgggaaaaagctggtaccttaagggtggaagaagtgcttactggagaaaactgtctttccagtttccctctcctacagtagttactatgccaaatcatgctggaacaagcatgtgtcatccaactgaacttagagctatttctgttggtgaggctgccgcgatacaagaatttcctaaccattggaagtttgaaggtactactacagaaaaatttagacaaattggcaatgcagttccagtccgattaggaaaagttgccggtgaagcagcaatgaagcttcttaatcgtatacaagaaaataatgcagctgatctagcgaccccaagttatacagaaacccacattaggcctcatattagaactagatctttctataaaaatggtcaagcatttagcggtgatgtttcttactatgacctggaagaagaatgtcaggatgaattattttaa

SEQ ID NO: 150127 - DNA, 267 bp, Enterobacter cloacae
atgcaggtgcatgaccggcctcagggggcgccagtgctggcgctggcgggggatccagtgtcggtaaaacgcatgcaaaaccatgcaccttatcaatgcatggcttttttacgggaaaatagcgggattttcggtttttttttgaacggactactgcacggccagttctgcacgacggcgggtgtaattcaggctctgtgcgggcgtgaatttttcacgattatcatcgcgcgaagccgcgtcaggcctgaatccgatggccgttaa

SEQ ID NO: 150128 - DNA, 228 bp, Enterobacter cloacae
atgagacactccaccattaccgcccgtgacctcgaatgccttgagcatatgtgcaatgtcggcaagctcgtcagtgagctgatgcaggtgcaggactgcacgcccgttcaccgtgacccggcgcagcattcacatctcacctccgtgatttacctcatgaccgcccagctcgacggcgtggtcgagcgctgcaatcaacaccggctgaccggggaggacaacgcatga

SEQ ID NO: 150129 - DNA, 1122 bp, Enterobacter cloacae
ttggctgctttggaattaggtattgatgttttatcagcaattgaattggataaagatgcatgtgatacatatagagataacttgataaacaaaagagaaaataatatacagcttttgaatcaagatatcatgtctatatctcctgtaagtatgatggacgacttatctttaaatgaaggcgagcttgatattattatcggaggccctccctgccaagggttttcatcgcatagaataaaaaattctggggttgatgaccctcgaaataatttgttgattagatattttgattttgttaaggtttttaaacctaaattgtttttagtggaaaatgtcccaggtctattatgggataaacataaagaatatttaaataaatttaaagcattggctggttgtaataattataaaataattggaccagtcaagttgaatgctaagaattatggtgttccacaaaataggaatagagtttttattttagggctcagaagtgacatcaacattggaagcgtgacatggccgccagttagctctcattttaaagataagaaaccactttggagaaattcatctgaagtctttgagagaccagctccagatattattgaaaaaataggaaataaaattggtgaagagtctgcggcaaatctaatcttctataagaagataaatcatatttctagcgatgactcatcaaatattcacatgaatcatgctgaatatatgattgatagattttcacgaacacctatcaatggcagtcgtgaggatattgattttagactaccttgccatgctgctggttatggtggtcataaagatgtttatggaaggatacgtttggctcagccaggccccacaataacaacaggttgctttaatccgtccaaaggtcgctttcttcatccctgggaaaatcatgggatatctattagacatgctgcaagatttcaaacgtttcctgatgactatatgttttctggagggataatcagtcaggggaaacaagtggggaatgcagttcctgtattaatgggaaaggcgttacttaattcatgcgtcaatattataaggcaacagagtcaggaggatgatattgcatgcaaacaagaaatttga

SEQ ID NO: 150130 - DNA, 1536 bp, Enterobacter cloacae
atgcaaacaagaaatttgacatttaaagctagggctcgaacaatcgagcatttaggaaaagggcagattgccgactgtccaactgctattagtgaattatggaaaaattcctacgatgcatatgctcgagatgttgcattatatacaatcgacggtgaacatccttgtggtgcattgattgacaatggttgtggcatgtcggttgaacaattaatcgataattggttaattgttgggactgagtcaaaaaccaaaaaaaaagcattgagcaaagaggacagatttggtttacctattcggaaaacacaaggtgagaaaggtattggtcgtctttctgctgcattcttatctccagttacgtatttagttactaaaagagtcaatagtaattttactgctcttttaattgactggcgattgttcgaaaatccatatttgtctttcgaggatattataataccatctgctgaatttgagtctctagatgatgctaataatattttacttgaattaattaaacagctaaaagttaacatagctttcgaagaaaatgctgaagaaagtgaggatcaaaacttcagaagagatgcttgggcgcgtttttctgaagatgagaaagagttatcaaaatttgatgactttataacaactcaagaaaaaatattaaatttttgcgtgtctgttaatattccatctgaaatatactctccttgggatgatatattacgtaaaacagaggatctagatggtggaaaacatgggacagcattatttcttttagagcttggccgtgagttgtcattgttaacaaatacaggtgatttagctaaagataatgctgagttaatagatattgaacaaagcctagtcgatacacttaggggatttgttaatccctatgtagaaataaaacattcattctcatatgaaatattttctgttagaaaaaatggttatcatagaccaattctaagtcagacagatgttttcggaaagaatgattttgatgctcttgaacatactgtggttggcaagattgataataaaggttggtttagagggaaagttaaatcttttggtgaagaaagaggcgaggtaataattccatctaatatcagcgtcagtgaaaaatatggtgtcggcccatttgatattcgtatcggaacatttgaaattatgccgaaaaatacgactcattctgagcgtgaacatacaaatctggaggcgaaagctaaaaaatatgctggtttgatggtttttcgagatgatcttcgagttttgccttatgggcgagtagataatgattttttccagattgaagaaagacgctcattaaatgcaggacgatattattggtcaaatagacgtatttttggttatattggcatttctcaagatgaaaatagagaattaaaagataaatcaggacgagaaggctttataaggaatcaagctgcaagggaactaaaaaatatagtttctgacttgctgaaagctttggcggtttggttggagtctttatctcgacacgaatag

SEQ ID NO: 150131 - DNA, 603 bp, Enterobacter cloacae
atgcgtaaaagttacaagagcttctctattgacgataatttcctcaataaaggaacgcttattgaggaaatcttgcaatacatggaaaccgctccgccggcatcatgcgtctacctcctaatcactaataattgtgggggagccgtgaatgatgcggaacggttggttagaggtatctgtaagaacgatcatataaaaattcatctaattttcaggggttacgcgataagtgcggctgcttatgtttacagctattttgttttttatgacgctaagcatcaacacgtagtcatagaagcgggcactcctctttgcgttgtctttcataaacccagaatcatacgcaatcaggcacttagttttgcgaacaacatctttgaaaacaggcaacctattgatgtttataataaatatttgctcgccatcagtaaggagtttgatgagatatttaacgcaatgcacggtatattgttagcggagggagagttaattgctccgcatttgaaagatgtctacaatatgaacggtgatgtatctttcacattccctaaggaggttcatagtgaaaaagcgggaagataccggcattatagaaagagctag

SEQ ID NO: 150132 - DNA, 507 bp, Enterobacter cloacae
atgacactacgcgatcgaagcaatgcggctggtcagtgcctcaacctgccgacactagctaccagcctatcatccggcaaaacagcttctgtcccggtctggtggtacttcattcatgtaaccagcaaaggcatcaccagcgccacagttgcccccttgccctgccagcctgacctgcgtcagcttcgcttggaagtgctgcacacccggattaaggatcaggcgctggctcaggaactgcgggattttgtcgaggagtattatgccccttcccgcgctagtcggaaattccgcgccggaaagctggacgatgacactagtgacgatacggcttggttgggatcatcttattttctcaacacggttggttactacgataccgaccgcgcgctttcatcacatagcgactggttgtatagcgcatcacgcgatgccgggctagccgatgcaggtgctggtggctacccacctgtaaacagtggtgggccgacgatacggttgggctga

SEQ ID NO: 150133 - DNA, 312 bp, Enterobacter cloacae
gtgctgcgctcgctggttagtgaacgcaatatgcaggtatcgcagaacgggcgcgtttatccagtctatggcggtaatgtcaatggtacactcaccaacgccgccacgcacttagcctctacagtcgggaacatcatcggtactgcggtagccttcccggcgtttgacagcgtgcgtcaggctctgccaatggtacaggcgatgctgcaaatggcgctggtgatttgtatttcgctgataacgttgtgttcggcgtgggacgtgaaggtggtgatgacgctgacgtttgtgcagttagcgatgttttcctga

SEQ ID NO: 150134 - DNA, 345 bp, Enterobacter cloacae
gtgggacgtgaaggtggtgatgacgctgacgtttgtgcagttagcgatgttttcctgacattctggcgggagctggcgcggtggctcgatagctggttgctggatgtgctctacagcagcgatatccacagtagttggaatctggctgggatccagaatacgcaggatgatgtcattattaatttggttatggggtcaatgtttctggtgctgccgactttttggctgggcgcgatgaagtgggctggggtgagggttggcgtggaggtaaatggggcgctagcgggcggggttaaggtggcgcaggttagtggggtgaaggttggggggatgattgggaaatga

SEQ ID NO: 150135 - DNA, 744 bp, Enterobacter cloacae
atgcaacaattgaataattacgcagataacagactggtgaacggttgtgtatattgcggcggcattccagaaacaagagagcatgttccatctaaagtattcctagatgcaccacttccggaaaatctaccggtagtaggagcgtgtaggaaatgtaacaacggcttttcttcagacgaagaatatgttgcatgccttcttgaggccgccatagcaggaagtgcatcgccctcggatatacgaagagagaaaatttctgaggttctagaacgaacaccaaaacttcaaaaaaagttagaatcagcgaaatttataaaagatggagaaacatatttcgcaattgaggatgaaagaattaaaaaaatcataataaaattagcgcaaggacatgcagcttacgaactgagcctaatttgtaaaaatggacctagctcagtttggtggcatcctatagacttactggataaggaattacgagaagattttgaatcagatcgtttttcttatattctcagtgaaattggcagcagaaactcccaaagaattcttattgtggatactaaaatggtctctcaagagaataaggagctacatatccctattttcattaacccttggatagatgtacaagaaggacgatatcgatactgtgtagatgattcagcagataatatcgcagtaagatttgttataggtgaatatctggcgtgcgaggttaaatggtcagcgcctaccttagaatag

SEQ ID NO: 150136 - DNA, 1341 bp, Enterobacter cloacae
atgttgaggggggcatatgatctaaattcacgtctaattaattatgataatgaagatattattacatattggaatgatgtcattttacctgacttaaatagtggtggtggatattctctgtcgagaccagaaattgtatcgtacattcaaacaggtaaaacaatagggcgtatcaaaggcattttaagccgaaatgatgacataacggatcccaaagatagagacttcattgcagatttaatatgcgaatattatattcaatcaagcaataatctcaacgatgcgcaagatgcctgcaacgtcaatggtgatagaaacgggattaagtggctgcagataggaaatatctttgtaacattatatcgtaaagaggttgattcttatgaaaatgatgctgaaaatatttggaacactttaaatgaatcattgtgtgaatggaaaccatcttactatcagttattgaaatccgaaattcaaaataaaatcgaagcagaagctttatcgtttaacattcacttagctaatgatatatatggtcaagcggcttggctaaatgaaattattaaaactgataatgttagtgttaaaaacgaaaagatagatgttattttcggaaacttatcagaagagttatatataaaattaagaaaaaaccctgagctcaaacaatttattaactctgtatttgacgcttataagcaggatttcgatgcttgtgcagaaacagatactctaaaatattgtgctgctcagatgaaacttccaactaatcaaaatatagtattccaagatatgtatcatgctttgaatatgaatctttcgtcacggaactatgaagaaaaacatatatcaacaggtactgttttttgggatacagataacaataattggtatttatgtgtatctgccgcttgtgatatggttccaacacaggggaatgatccccaccatgaacggctgagtcctcatcgtctaattaaagtacttcaattatttccagttaaacctgataaggcattacctctcgctcatcactcaaagtatatctatgcttatgataaagatgaacgtaaatatttttcaattctcaaggaaggaaaagatttaccagttgttgactatatgatcatccttaatcatggacacaacgttactgatctaagtaaagggaaagcgaaggcggttgtttggaaaaacactaatggagatattgaaaaattgactttaaatataaagctaaaatctcaacttcgaactggttatgctgaaagatatcaagccattgcatcacagtatagtgcaagaatcggagtcgattatattagtgtagcactcccttga

SEQ ID NO: 150137 - DNA, 462 bp, Enterobacter cloacae
  misc_feature (423)..(432): n is a, c, g, or t
atgactacgaatacatataatcaattagtgagcagtactttttgtgataatgcgattcgttctgtaatgatgattgatgatgagtttatcacttatgctgactccattaaagcactgcagggtcagattaaactagatggtaagaagcttgattcatcgaagagagctgcattactagaaagtttttttcaatcaaagaaaatggtttgtgatatagacgatggcgttgccagccttgatgcagatagaatcaggaaatcggatcttatcatcattgactatcatttagaaaaagattcacctgataagaccttatttgttctaaataaactaaaagactctgaacatttgaatatggtcgtcgtatatacccgagaaaatatggaaacagtatggttacagattgcttctatgttgaggggnnnnnnnnnngcttgcttctatgttgaggggggcatatga

SEQ ID NO: 150138 - DNA, 1026 bp, Enterobacter cloacae
atgaaattaattgtgaataagctcgattctgaattaaataaactagaaccgtcacaactagcaaaacgacatttagagaaaaaccaaggggtcattaattcacgtttaacgaaattcatatcgtcgataacagataaaaataacctccttttgtccaagtggaattcggaagtaaaagaagaacggtcagtttactatagtaaatgcatatccttagttgatgatgttaaacatggttccgatgttgagcaaacattgaatctattggatagtatctttatagagttaacagattctttgacatttaaatatcaatctatcctgaaaggtatggatagattattggaaggtgttaatttagattctgctttttctatgtcagaagaagaacgtgcttattttgaagaaaaaacaagaaatctaaatgcattggcacaattaggtattagcgtagaaatactttctcatgaattagaagaaatggatgctcttgttagtcgtggactgaactcattacccactatagcaaaagaacatcctggatatgagttagcactaaatgcacataagtctcttactcagcagattagatttctttcgcctctaaaaatttccggttatcagtctcgtcaacagagagttgatattaaatttggtgatgatttccttaaaatttctattgtagatctaccatcaaggatttatcctgtttttataaatatcattaataatgctttgtattgggtatgtctatctgagagcagagtcattcatattgattgtattgataatcttgtgattattgctaattcagggcctgctgttgatgaggatgatattccaaaattgttcgagcttttttatagtaaaagagctaacggacatggagtgggtttatatctgtgccgtgagaatctttctgttgctcatcataaaatatggtactccaatgttaatgatggtgggccgtatctaattcgcgatggcgcaaattttgttctagagtttaatggattggagatgtga

SEQ ID NO: 150139 - DNA, 642 bp, Enterobacter cloacae
atgcctaatcacgtaacaaatcgcctgacaatcacaggtgacgagaagtctttgtctgaactttttaatgcctgcttccgtaaacaaaaacgtgaggttcctgagtactggcatgagaaagcaaatgatgtagaagctgacgaaaaaagtcgtaaagagtggtctgaacgcatcgctgatctcgaagctcgagagccgtttgatgtgttcgacttcaaccgaattatcccagctccagcatttattttcactggcgactctcttactggcgggagccgggaagagtcaaccggccgtaactggtacgaatttaattctaagcgatggggtacaaagtggaacgcctacgacatgtctatcgtcgagcgcaccgattcgaaactggtcattaaattcgatacagcttggaacatccctgagcccatcatcaatgaattggtcacctggttccctgagttaactttcttccacgagttttatgacgaaggtggatggttctttggcgatcgcaccttccaggcgggccagattgtagtggaccgctacataaatggtgatgaccgtgaaaagaacaaagaacttgaaagacgcctttccattgaactgaaaggatgggacccagattctgacgaagacgactga

SEQ ID NO: 150140 - DNA, 297 bp, Enterobacter cloacae
atgagaaaattgttattggcaatagtattactggctccattagcggcaacggccaaagagtcagttcttgatcacttaaagcaatcgtcatctgtgatatgtaaagaccaccctcagcctggtcagtgcaaagtggcagtacaagccacaatgctagcggtttataatttcacttcgctcgatgccgggtgcgagagcagctctgacgaagtcaaagcaagaatgaacaatgagttgaaagcgcagtgcgcagcagccaaagaagtctccgactactttaaaagccaaaaccagtaa

SEQ ID NO: 150141 - DNA, 462 bp, Enterobacter cloacae
atgacaaacttaagcgcagtagaaaaaatggctgaattaatgcagcagatggaagagaactcgccacgggtggccgctctccagtattccctgaaactggttggtgaaaaaatggaagagggagaaaaacgtatcgaggaacttgaggccagatgcgcggcgctggctgcggagaatgcggggctgaaggatgaaatatccaacattactttcatgcgggatgatgatttctttggttcaagtcagcgcgcgcaggaagtgatggggcgtctcgttaatttcaaaaccccggacactgacgctttcctggctgaagtgcgggccagtgcggtagaagagttcgtcagaatggctgattactcagaatcggttgctgatggcgaagtcatcgtaacttccagctctgtattctctgccgggcacgagttcgccgccaaaattcgcaaaggagcacagtcatga

SEQ ID NO: 150142 - DNA, 195 bp, Enterobacter cloacae
atgagcaataaaatttctgcgttcgttaagcgtatggaagagcaagggcgcactctggaagtgaatggaacatttgttgtgattacccctgctgccggtctgtctatcacagacatgcttgagatgcagaatctcaataagaaaggtgagttggcgtattacatcaccaaatctcacaaaggagccgcccaatga

SEQ ID NO: 150143 - DNA, 213 bp, Enterobacter cloacae
atggacaatctacaaaaaatgaaggtgttctatgtgcgcgcactcctcgctgtggcatcaggaaatccaaaacctgatggtgtgacagctgcggaacacgcaaagaacctgtctgatttagcgtgggagttagcggagcaggtcagctctatgaattgtactgatttcgttcaggcgggtgattcatgtccgacatctacatcatcaaactga

SEQ ID NO: 150144 - DNA, 1083 bp, Enterobacter cloacae
gtgaactataaatttagcttctcgatattcttagcaatactgtctattgccgcagggtcatttatatatgcattcaaaatccaagaaggcaagcaggtagtaggtgagtggtggcttgtaaacacttatcagtttaaaggaatggctgctgatagtataaaatcaaaaaaaataattgtgctaagtgggtctaatagcctattttcgattaatgcagatactatttcatcaaagactggatttccggttgttaatctcgccactcatgcaggattagatttaaactaccacttttatattcttaagaagcacatgaagaaaggcgacattgtagtcatgcctctagagtatgaatattatactgccagtggaaaaccaaccgactggtttgttaacaatatgacaggatggggtcatgattatgtttcttcactttcagtatatgattacataaagtttttaatgaatgtcacaccaaaaagaatgctggatggtttttcagcctcagataaaggttacgtagaacctgctaaggctgtatatgagaaatttaaaatagcagatggatcatataatggatacagttacaaaagcatggataaatttggtgacattaattatataacaaacagtaagactgtattcgcgaatatagagaatggtagctttgactactcatctaacataagtgcaatatcagaatattcagcagagaagctaaacgatataaaatcatttgtcgaaggcaatggcgggacattcattttgacatggcctgtcactatgagaaacccatcttttgacacagacatagcttcaactactgataacttaactcggttaaaatcattactgcatgatcgcgggctcgagataaaatgctcaccaagtgcatcaaacttgggaagaaaattctttatggattctgcttatcatactaatggatatggtgcattaattagatcaacatttttaggtgaatgcctgaatactgttattaatggcaagggtggttacaatgataaccagaacttcagagcagtagttttagaaatggaaagcaaaacaccatttcatgattaa

SEQ ID NO: 150145 - DNA, 1443 bp, Enterobacter cloacae
atgttatttaattcgttagaatattctgtattgttcttacctttggtggtattgatattcttttttctaaagagatataacattactctttctaaggtatggatctgttgcgcaagcttatacttctatacatttttcacatttaagtttttacctctcctgttaatatccatgctaataaattacgcaatattaacgatgataaaatcaggtagagcaaaattctatgtaacgttgtccgttatctttaatgtggtatctcttgggtactttaaatactgcgatttctttgcgagtaatatatctagcattttcaacctaaacataggtcacatgaatgttattgcgccgctagccattagcttctatacatttcagcagatttctttgtctgttagcttgtatagaaagcagatatcaagcatttcattattagattactgctgctacattttgtttttccctaagctcatctctggaccgatcacgaattatgatgtaattacaagtcagattaattcaagggataattacttcggaaaatatttcgtccctgcggtgtttatatttagtgttggggttttcaaaaaagttgtcatgtcttcatattttggttctatagcggatcaaggttatgcgagcatctcttcgcttggtgctttggaggcatggataacaagcctgtcatacagtatacagttgtactttgatttctcaggatacactgatatggcgattggctcagctcttctgtttggcgttgtgctgcctataaacttcaactcaccgtacattgcaacagaccttcaagatttctggaggcgctggcacattaccctttctacgtggctcaggaattatgtctacattcctcttggtggaaaccgcaagggcgtattccgcacatatttaaacctgtttttgaccttcttgatcggcggcttttggcatggcgcgggatggaattttctggcgtggggcgcattacatggagtcgggcttgtcattcacaggtattggtcacaaaatggcttccgcatgccgcgtgctgttggttggtttgtgacattcaattacgtaaatattacctggattttcttcagaacggatagcttgcaggatgcatttagtttactgaaaaaaatgtttgcaggtcacgactctttggtctcaggatttaaatttactcaaccttttgctgactctttcctctatgaggcatcaaaaggtggtttctatatgatattgatttgcgctattgccatcattgcttgcttaattaatgtcaactcaaatatgttccttggaatgattaaagagcagaagagaggcctcgcgtggaacctgatcgttccttgcatatgtgcttttggggtttgcgtagcggtgattgcttctttgggtggagcggcacctggctcctttatctatttcaatttttaa

SEQ ID NO: 150146 - DNA, 189 bp, Enterobacter cloacae
atgatgacccgtaaaagtatcgataccatcctgctctccattgccgctgataagctttcacagcgtgaatgggactggattaagctgatgaggcccatggacccgcctccggccatggtcgccggtgccatactggagcaccgccacgatacggctgcgctcacacgcctgcaggacgccgggcattaa

SEQ ID NO: 150147 - DNA, 588 bp, Enterobacter cloacae
atgcgcgcccgctggatatggaatatccgtcagttactcctgggagtctggttcgaaggcgtggccctgccaccgcccctgtcacatatcactactgaatcacagtggcgcagcctggtactgaccgcgggcagcgattactggcatgtgtatatgtcaaaaaagacggccggtggcaaaaacaccgtaaaatacctgggccgctacctggaaaagccgccgatagcgggctcccggctggcgcattatgcgggtggagccacgctgagcttccgctacctcgaccacaacaccggtgagcaggcaacggaaacactgacgcagcgtgacatagtggcgcggctgaaacagcatattccggagaagttcttccggatggtgcgttactttggttttctggccaaccgggtgtgcggagaaaagctgccggtggtctacagcgcgctggggaaggaaaagccggagccgctaccgaaggtctgctacacacagatgagtaagcagtacctgcggcgtgacccgttcgaatgcgtactgtgcggcgggcgaatggtgtaccgccgcgcggtgacgggtctgaatgtgtag

SEQ ID NO: 150148 - DNA, 954 bp, Enterobacter cloacae
atgaagcgtgcaccggtgatccgtaaaacaaccgtccctgcaacccctgttgaaacggaacaggcgccagcagcacccatggtggattctctgattgcacgcgtaggggcgatggcgcgtggaaactccattgtgatccccgtgtgcgggcgtgatgtcaaatttacgctggaaacgatgccgggcaatgttgtggaacgtaccacctgcgtctgggcaggcaatgagcgcgatcaggatttgctcaccgaagaatctctggatgacctgatcccctcctttttgctgtccggtcagcaaaatccggcctttggtcgccgtgttgaggaaggcattgaagttgccgatggtagccgccgccgtaaaacggcgatcttaacgtcgagcgattatcgtgttctggtgggcgatctcgatgatgagcaaatggatgcgctctgtaagctgggcaatgattaccgtcccaccagtgcttatgagcgtggcaaacgttatgctgcccgtctgactcaggaatttggtggcaacatttctgctctggccgaggcggaaaatatttcccgcaaaatcatatcccgctgcgtgaatacctcaaaattgccgaaagagctcatcgccctcttctctcatccgggtgaattgtctgcccgtgccggagatgtcctgcaaaaaagtttcagtgagaaagaaggtctgctcctggagcaggttcgtcagctggcggaacggaaaacggccggggtgatatttgaagccgatgaggtgattcaggccctgaataacagcctcaaggcggagcccgttaaacacccttccgccccgacccgtcaggagattgttaaaggcgcaacggccatctataaagggaataaggttgtgttccagctggaccgctcacttctgccagagcatgttattgagcagattgagacgctactcaacacgctcaaatga

SEQ ID NO: 150149 - DNA, 597 bp, Enterobacter cloacae
atgtctcttttaagtcattacggttttttcggatgcttgcgcttggttattgataaatttttaactttatctattagtcgtcatgcccgtatcatacgtcatccttttgatatccgtggtaaagataaaataaaaattggaaaacgttttacaactggacgatattgccgtcttgaagcatatggagataagccatctcctgcgctaattattggcattgattgtcaaatcaatgattctgtacatattgctgctggggaatgtgttaagcttggtgataatgttttaatagccagtagagtctttataacagatcttaatcatggatcttacgttggagaaaatcaatcacatcctgactcaatttgccgtaccagagaattgagtacagctccggtatgcattgagtcaaatgtctggctgggcgaaggagttgtggtattgccaggcgttgtaattggaaaatcctcaattatcggtgccaattcagttgttacaaaaagtattcctgagtactcaatcgctgtcggaaatcctgctaaagttatcaagcgatttgatttcactaaaaacatgtggataaagtatgatagctaa

SEQ ID NO: 150150 - DNA, 972 bp, Enterobacter cloacae
gtgttttattcaaaaaaagccttggttttttgtcctaagtttttttcttatgatattgagatcaaaaaggcaatcgaaaaacaagggtattctgttgaactacatgatgaaaggccttcaacagatttatttgttcgagccctcataagatttggtctaaattcactgctgaaaaaaaagattgaaaattattatttgaatattcttggctcaataaatgaagttgttgacgttctagttataatcaatccagaatctattactccatttttgcttaaaaaatttcggacaaagtgcaaaaatatagtaatctatatgtgggattcatttaagaataaaccccaggcacaaaaattaatttctcatgctgattccttttatacatttgacttcaacgattctcaaacgtttaatatcaggtttaagccattattttattcggaagcttacaatattgataagttgtgtaattctgctagatatgacttatcttttattggaacagtgcattcatcaagatatgagtatgtaaaaaaaataactcatggatttaattcatatgcttttttttattgccctagttctttggtttttttctataaaaaatacatcactcgtgaaatcaagaaggttgctcttaaagatgtttcatttaaatcattaaaagaagatgatgttatttcagttgttgtaaattctaaatgtatccttgatatatctcatccattgcagcaaggtctgacaatgcggtctattgaaacacttggtgctaagcgcaagctaataacaactaataaaagtatcgttaattacgatttttttgacgagaacaacatcctggttgttgataacacagttacgaaaaatcaagtcgaccaattcctacaaagaaaatataagtcattagaggcggagatatataataaatactctgttaattactgggttcaagattttttaagagaaaattga

SEQ ID NO: 150151 - DNA, 1320 bp, Enterobacter cloacae
atgctacagcagacaatttcacgtcttaacgacttagagactgcaccaccaattgtaatttgtaatgaagagcaccgttttattgttgctgaacaacttcgtcaaatcaatgcattaaatgaaatcatacttgagcccattggtcgtaacactgcacctgcagttgcgttggcagctattaagtctttagacaatcttcctgataatgaagatactcttttattgattttggcagcagaccatataattaaagatgatatttcttttataaattctatccgtatcgctaaaccatatgccattaatggtagtttggtcactttcggaattgagccgtcaacacctgaaacgggttttggctatattcaggcaggtgaagaaataagtagcggtgacatttctggtgccttcaaagtcaatgcatttgttgaaaaaccagaactggcagtagcagagaaatttttgtctgatggtgggtattattggaatagtggaatgtttatgttttgtgctcggaaatatctttctgagttgcataaattttgtcccgatatttatgattcttgcaataaggcgatacaatcacctgacaaggatctgaattttatccgcattgatcatggtatttttgctaattgccccgatctttcaattgactacgctgtcatggaacatacagccagtgctgtagttgtaccgatgaatgctggttggagcgatgttggctcatggtcttcattatgggacattagtgataaagacgaacaaggaaatgttttaattggtgacatcataactcataatagttccaataattatgtccactctcaatctggtctagtgactatgctcggtgtagaagatctaattgttgtacaaaccaaagatgccatcttagtgaccaaacatgatgcagttcaggatgttaaaaaaattgttgaacacctgaaaactgctgggcgaagtgaatatagaacacatcgagaagtttatcgtccctggggtaaatgcgactctattaatacaggtaaacgttatgaagttaaaaggatcgaagtaaatccaggcgagggtatttctcttcagacccatttccatagatcagagcattgggttgtcgttgccggtactgcgaaagtaactctcaatgataaacaattcttattatgtgaaaatgagtctgtatatattcccgtcggagcgcaacactgtctagaaaatccgggaaaaattccgcttgaaattattgaagtacgctctggtgcttatcttggggacgatgacatcgttcgcatcactgatcgatatggtcgagtttaa

SEQ ID NO: 150152 - DNA, 534 bp, Enterobacter cloacae
atgaagataacaatatcaggcgtattactgggtgttttcttactggccggatgcagtcagccaaaggctgaggcacaaacgcaaagcggtggcgcaggaacaatagaagccatcaaccataccaaatgggcgattaatcatttcagcgttaacggtcagtcgggcatcgatgccatcgggccttttgatggcggtggcggtgggtgctgctacggagtgcctgctgtctggaaacccggaatgaaggtacaaatagactgggaaagtggtgaagcttctacagaaggatttccggggtttgctgactatgaaaaatacaaggcttgggaaaagaaaatgagtgcaaataatagggaacatcgcaaaacagttccactgcccgattatacaggccaggaaacctgcggtattacggtgcattttttaccctgtgatgatgtgaaggtcaccaccagttgttttacctacggtagcccgtcttatccgatcaaattaccgctggaaatgcaggagccgaaagtatgtccgaaataa

SEQ ID NO: 150153 - DNA, 534 bp, Enterobacter cloacae
atgaagataacaatatcaggcgtattactgggtgttttcttactggccggatgcagtcagccaaaggctgaggcgcaaacacaaagcggtggtacgggaacaataaaagcgatcaaccataccaaatgggccattaatcatttcagcgtaaacggtcagtcgggcatcgatgccatcgggccttttgatggaggtggcggtgggtgctgctacggagtgccttctgtctggaaacccggaatgacggtgcgtgtagactgggagcgcggcgaagcttctacagagggattcccggggtttggtgacagagagaaatacaatgcatggttaaaaataaagagagtcaataataaagaatttagcaaaaaagtcccactacccgattatacaggccaggaaacctgcggtattacggtgcattttttaccctgtgatgatgtgaaggtcacaaccagttgctggtctcccgctaatgcaaattacccgatcaaactccccctggaaatgaaggagccaaaagtatgtccgaaataa

SEQ ID NO: 150154 - DNA, 534 bp, Enterobacter cloacae; identical to SEQ ID NO: 150152

SEQ ID NO: 150155 - DNA, 534 bp, Enterobacter cloacae; identical to SEQ ID NO: 150153

SEQ ID NO: 150156 - DNA, 312 bp, Enterobacter cloacae
gtgccactcggccctgtcatttataccaaagataaagagggggtgatatgtgccgccgttaacaatatcaacggagacaaatttatccacattctccattttttgggtttgatcctggcagccgacgacaagcagcgcatcctgagaaaacgtgtaggttgtctcaccatttgcattaagaacaagatctttaatagggctacctataccctcgtagtttggatcaatggcggcatagcaggaaacattttgcggaacattaccaagacggagggtgacgctttcgttcttgacgccccacgtatgcgttaa

SEQ ID NO: 150157 - DNA, 303 bp, Enterobacter cloacae
atggattttgcgataaccataaacgcaaccggactccagccagaactgtttaatctgtcctgtcagtctcagatctacctggtggcgcttagaatgcggctgctgaagccaggcgtaaaagccactgggatgaacatccagcacccgacagagcagacgaacaggccagcaacggctgttgtcacggataaaggcgtacctcagccggacagctttgcgaagtacgctgcggctttttttaatatgtcccgttcgtccgtaacccgcttctgctccttctggagccggcggatctcggcctga

SEQ ID NO: 150158 - DNA, 2007 bp, Enterobacter cloacae
atgcgcttaagtaaagttcgcgtacagaactatcggagtatcatagatactggagagtttgagattgagaaacttaaaacaatacttgttgggccgaatgaggcaggtaagactgccattcttcaagctatacagcaaattaatcccccagaaggggtcaagaaatttgtcccgcttcgtgactacccgagagctcagtacacaaaaattagcaggggggatttagatccgaaaactgttccagttgtaaccgctacctttgacttggaagcttctgattatgggcatgctcctgattttcttaaggaagtttcattgaagtataaattcactcgctacttaaacaacaatgcgagtcatagtttagaaggtgttgaaccacttatttataacgaaataaaaatggatctcacaaggttagctgcccatttagatcgcgactctgctgagggagaagcaaaaccacataaagctagccttgacaaaattactgcgtcatggagttcccaaaaatatttgtattctgatgcttcaatattaattaaatggcttgaagaaaaactgccttttattgatgaggaagatgagaaagaaaataaaaggtgggaggttattgaatcaaagttatctaaagcagttgaaatgagttcgtttcttgattttctagatcagaataaaccggtttttgtcctctatagcaattacttcagagtgaagccaattatccatttagggaacttagcaaagaggatcgaaaccaatagtttagacgatgacgcatatgattacggtaacacctgcttattgagattgcttggtttttcagcacaagaactttctgagttaggtaaaacatccgatcctagccacactaccacagatatagatactttcagagaaaagttagaccagcgtagctatgaactaaatgctgcgagtgttgagctaacacaacaaataataaaagtatggaaccctgacgataaaaaagcggaagctagccgactcaagatttccgcagatgggcaatatcttaaagttgtagtagaggataacattggtgtggaagtagaactagaccaaagatcagaaggtttccagtggctagtttcgtttttcatagtgttttttgctgaagcaaaaggaaagcataaaaatactatcctgctgcttgatgaacccggtgtaagtcttcatgccctcaagcaaagggagtttagaaagacaatttcattgcttgctgatgaaaaccagacaatttattccacacattcgccttttcttgttgggcctgatgaacttgacttggtgagggttgtggagctaaccgatagaacagtgggtactaaagtacatactactgtaacatcaagtgacccggcagcattattgcctctgcaagaggcgcttggttatgatttagcgcaaagtctgtttgctaatcaaagaaacttaatactcgaagggctaactgattactggtatatagaggctatatctaacctgctaaaagaagaagggaaggtatttttaaatgaaaaaatatctcttgttccagcaaatacggctagtaaagttgtttactttgctacaattttgacttcacataatctcaaggttgcagcactattggattcagataatgctggtaatcaagccgcacaacaagaaattttagttaatcgtttaggtaacaaaaggattcttcgaacatcagattttaccgtccaaaaaattgagaaggctgagattgaggatttacttagagatacattgatagttgttgctaaatcagaactaaattgggatgttgaatcaacgttagctagtgctgggaatagaccagttgtcgatatttttcaaagagaagtcaaagagttttcgaagtataaactggctaaagcttttttaagatggtcgagagagcatactttatctgatttaacagaaaatgagattcagggttgtactaatttgattaatgctatcaatttggctttgaagtaa

SEQ ID NO: 150159 - DNA, 213 bp, Enterobacter cloacae
atgtcagtacgccttattaaaatgcctgaagttatgagccgcaccggcaatggaaaagcctggatttacaggctgatatctcaaggccgcttccctcgccccgtcaaagttggggcacgagctatcgcatttgtagaaagtgaagttgatgaatggataagccggcgcattgaagagcgtgatgctctaatttccacaaaacctcaactgtaa

SEQ ID NO: 150160 - DNA, 960 bp, Enterobacter cloacae
atgtctgaaaatatttctatacccttttcattttgtcgattaaatagagctgctgatttcttagggatgagtaatgaggatctacttagccttgcattatccgagaaaataatcctttgcgttaggttagatggtttaaattcagtacttttggtcgatggtaaacccgatgagttggatgaatggtatttatctttaaaaaatgatggcagtgcattagctgctgcattttatttatcgaaatacacatcgttttccattgatcgactttcttacgatgaagagaatgaacaatgtatctttcatccaaggttttatcaaagtttagatgcaaagggcaatccattaggcaatcaatcccaaagtcatagcggaagagcatatggtctctgggttcctcagttaccggtaataaattcgataatgaactatggacgttcttctcttttatgggggtctttaggcctttatcgtacagatgaaaatacacctgatttatgtttaattcctttgccgatacactccgatagtaacgatattgatgatgagaatgatagcgatgaatgtgaagaaaattatccagatgtcgaaatagctgcaaatgacttgtggataacatcagaacaggtgagaaaattactaaaccataatggtgactacagcgatctacctcagtgtagtgataatgagactttcctaactgccgatttggttaaaaaagtaaacaaaaacaaccaaagcgctgaacgtcatgcaataaatcgggagaaactatacaaatatgcgataagcttattatcgaaatatcctgaggaatgtcgaggcgaacgcaaggaaataagtcctgaaaaatggcgtgattgcattatggctcgtcaaaatgagatacctccattaccaatcacaaatgaagatgtgatactaagacatctgagagctgcagcaaataacaaggggtag

SEQ ID NO: 150161 - DNA, 402 bp, Enterobacter cloacae
atgtcgaaagtaaataatccgggatttgtcttgtcaccttactcgcagaagaaaatcctcaaggcactaggaagtcgccaagaaaagacggacgctacagctaaacggcatggaaaaccgacccgctataatattgcaaccagcgattatgataatcttgtcagcggtgagcacggtccgctgatcctgaaggtcagaagggggaaaatcgttacagaaaaacattactgtgccgaatgccacagctacatcagcccaatcagggcatatgccgacagcaactatgggaaagtgcatctttgtacaccttgccatcttgcagcgttcaaccgtagctttggacacgcggatgctatgccgctcaagctggaccatgctcatgcacataggggaaagtggtaa

SEQ ID NO: 150162 - DNA, 3654 bp, Enterobacter cloacae
atgaatacgtcaaatatcaaaaaatacgccccagtggcacgtaaacagttccgcgatgcggtcatgcaaaaactgaccacgctgggtattgaggccgataaaaaaggcaacctgcaaattgcgcaagcaaccgatcttggcgacagtgtgcgttatggtcagttctcgctggataaatcactggcgtcacgtcgtgagcgtctggtcaaacgtgcagaaaagcagggttacgaagtgctggttgagcatatcgcttacacctggtttaaccgcttctgcgccatacgctatatggagctgcatggctatcttgagcacggtttccgtatgctgtctcacccgacgctggaaggtggttttgaggttctggatcatgtgccggaagtggctgaagctctggatctggacaaagcgcgcctggtggagatgaagctggcgggcgatcgtgacgaagagctgtaccgtgaactattgctggcccagtgccatgcgctgcacggcgcgatgcctttcctgttcgaagcagttaatgatgaaattgagctagtgctgccggataacctgacccgcaccgactccatcctgcgcgggctggtagatattattcctgaggaggactgggagcaggtcgaagtgatcggctggctgtatcagttttatatttccgagaaaaaagacgatgtgatcggcaaggtggtaaagagcgaagatattcccgcagccactcagctgtttaccccgaactggattgtgcagtatctggtgcagaactcggtgggtcgccagtggctgcaaacctacccagattccagcttgaaaggcaaaatgccgtactacatcgggccagcggagcaaacgccagaggtgcaggcacagctggcggctattaccccatcgagcattgaacccgaaagcataaaagtgctggacccggcttgtggttccggtcatatcctgaccgaagcctataacgtgctgaaggccatttacgaagagcgtggctaccgtacacgggatatcccgcagctgattctggaaaacaatatttttgggttggacattgatgatcgcgccgcacagctgtctggttttgcgatgatgatgctggcccgccaggacgatcgtcgtattctgggccgcggcgttcgtctgaatattatttccctgcaggaaagtaagctggatattgctgaggtttggaccaagctgaacttccatcagcaggcgcaacgcggcagcatgggagatatgtttacccaagggacgtcactggccaataccgacagcgcggaatataagctactgatgcgtactctggcgttgttcactagtgcaaaaacgctgggatcactgattcaggtaccgcaggaagacgaagcggcgttgaaagcgtttctggatggattgtatcgtctggctgttgaaggtgatattcagcagaaagaggcggcggcagagctgatcccgtatatccagcaggggtgggtactggcgcaacgctatgatgctgtggtcgcgaacccgccgtatatgggcggaaaagggatgaacggcgagctgaaagagtttgctaagaaactattcccggacagcaagtcggatttatttgcgatgtttattgagcgcggatttggctggctaaaaaatagtgcattcaactcaatggtgaccatgcagtcatggatgttcctgtccagctacgaaaatatgcgtgcgaacattctggataaatacacgattgagaacatggtgcatatgggtaatggagtaatgaaaattgcctttgggaccaatgctacaatatttagaagctcccatattccttcttatcaggggacattttcttatgctgagaataatgatattaatgatgaaggttatccgattgaatttccggttaaaaatgaccgtctaaaagtagctgcagctgctggctttaaaaaaatacctggctcaccaatttcatactggcttaatgaaaatgaaattaacttgttcgataataaaaaaatatctcaaattgcggctacccgtctaggaatggcaacagctgataatgaacgttttttgcgtttctggcatgaagttgatttttctaaaattggtttttattataccgatcggactcaggccaaagaatctcatttgaaatggtttccttaccaaaaaggtggagagtacagaaaatggtttggtaatcttgactacgttgtgaattggtttaatgatggatatgaaatccaaaattttgtcgatactgattcaggaaaggttcgttcacacaactataacttagattttatcttcaaaaaaggaataacctggaatgctttatcctctaataagacgtcagcaagggtctctgaattttcgttatttgataacgcaggttcttcattgtttgttaacgaagaaaaacattatcttcctatccttgcgtttatcaatagtgatataattattagtttaattaaagctatatccccaaccatgaattatcagccaggggatataggtaagttaccagcatcttttgatgctgaactgatagcagttttatcatcaaataccagcgaattgatttctttagctaaagagagttgggctcaacaggagactagctatcagtatatctttgaccatgagctttttagttatggaagtctaaaaaacaaaattgattcactaattgatgtttgtcataaaagggtaattaagtcatatcaacttgaaaaatcaaataatgttatcttctttgaaaaatacaatattccacatgggggtgatgttaatattaaagagataactttagagaacaatgtatttaattcattggaagaagtatcaaaagaagaaatttatgaacttcgcggaattcaaattataaacctgcacagtttggttatcggcttcatgatgggccgctactcccttgaccgtgatggtctggtctatgcccatggaggcaacaaaggctttgccgaattagtcgccgaaggcgcctataaaaccttccccgccgatgaagacggtatcctaccgctgatggattccgattggttcgacgacgatgttactgcccgcgttaaagagttcgttcgcacagtctggggcgaagaacatctgcaggaaaacctcgatttcatagctgaaagcctctgcttgtacgctatcaaaccgaaaaaaggcgagtcttcgctggataccatccgtcgctatctttccacccagttctggaaagatcatatgaagatgtacaagaagcgcccaatttactggctgttcagttccggtaaagagaaggcgtttgagtgcctggtgtatctacaccgttataatgaaggcacgctgtcgcgtatgcgtaccgaatacgtagttccgctgttggcacgctaccagggcaatatcgatctgcttaacgatcagcttaagaatgctgaatctggcgcggccaccacacgcctgaaaaaagagctggatggtctgaccaaaaaattcaacgagctgcgtagcttcgacgaccgcttgcgccattatgctgatagacgtatcactattgatctggatgacggcgttaaggttaactacggcaaatttggcgatctgctggcggatgtaaaagccattaccggtagcgcacctgaggagatttga

SEQ ID NO: 150163 - DNA, 1095 bp, Enterobacter cloacae
atgaaaatagcggcgatttatacgcagagagttggcccgttgggcgatgcggacattagctttaaaaacgactggacgggagaggtggaggaaaacgttctccttaccggcccgaatggctgcggtaaatcgacgctgcttcgtggaattgccatgctttgggatgccctgggattttggctggatcgtgaaaaaacgttacccgctacccacaatgctaaaaaatggctccagaactgggaaacctttgctgtcgtcatcgatggactagagtgttcacatttttctccggctagttttggcttgttctatggggatgaacttgctcttgaaagaatcatcaaatccaatccaggggtttactggattggagaaacgtattcggacaagaaaaaacacaccttttttacccaaagtgcttattcaaatgaatccctgtatgaatacctcagaatgttacgtgtaactcgtgcccaagtagttctggggatgctgagttctggtatggatttgtccattccgaacatcatttatctggatgcagaggcacgtcgttggattacacctaaacgcaatatctcatcgctggtacaggatgatttaaatcagcgctggcttgctacgtacacagtgacggaagactggaaggggcagcttgaatcctcgctgttcaatatgaaagcgacgctccctgagctgtatcccgagatgatgaaaactctgaatcagttcttctcaggcaaagtcattgaagagggtattcagccgggacagcgccagcaggtcaggctggataacggtgacacccataccctggatgaactgagttctggagagcaccaggttttgatcatgttattcatggtgcagcgctggcttcagcctggcggtgttgtattgatcgacgaaccagatctgcatctacacccatctttggtctctccgctgcttgccatgttggagaatattatacagggacgttctggccagctcatcataacctctcatgccacagatctatggcagcgatacgataacttaggactgcgtatcaatctaaatgacagaaaaggtgctgataatggccagcattaa

SEQ ID NO: 150164 - DNA, 828 bp, Enterobacter cloacae
atggccagcattaatgaactgattcagaatattaagcaggaaaaaatctcaacctctggaaggtccgttttgctggtagaaggcccagatgacgtgcttgcatttagtaattttcttcaaaaaacaaatgcaaactgggagctaagctggatccttgagagtgcaggaaacaaacgtaatgtcctggagatcctgaggaaggaacctgcttggttagggattgttgatcgcgatgaatgggatgacgcaagaattcagcagattacaaatgagtatcagaacgctattgttctgccacgcttttgtatcgaaagctaccttgtagtgccaaccgaactatggcgggccattcccgaaaatatgcgcacagcagtagctggcggagagcaaggttttattcagcgactaacacaaaaccaagataaatggctcagccatgctgcgctctgggctgttatcaatcctttgtgggaaggattgcgcgctttaggttttaaagaagcgttattagaacctgcgattgctaacgacctagagcagatcgcagataagctgcaagactggcacaattaccttgaaccaggccaattagttgaacaaatagcagcaaagaaagaagaacttagctctttagactttagcgagctgcttcggttttttgtacatggcaaacactttttcaatgaggtagtgcatcaggagttttgccagtccttcggtacatttagtgcttcaaaacgcaaaaccaacatttttagtacacttcctgtccctgatgatttaacggatatctggcaacgcatgaacttaatcctcgaagataattaa

SEQ ID NO: 150165 - DNA, 1047 bp, Enterobacter cloacae
atgaataagccagcgattccaatacgtaacatctattatatgcttacttacgcatggaatcatttacaggatgctaaaatagttaaccttgatgcgcaaccggccaataacttactagatatactcgggcatgctttaaataaatgtgttctttatctttgtcgtcggggattcgagctgaattatcagtcaaatacagagttaatcacaggagtaaaaggacgggtgaatctaactcaaacactccgcagtttacatatgacacaaggaaaaacagtcagtacttttgatgatttaaatccggatacgcttgcaaataaaatcattaaaagttctctgactgtattaatcaaaaatgaaaatttaaataaaaccatccgagaagaatcgcgctctatccgagcaagaatgccagaagtgaaagaaattaacctcactcctcttcacttcaataaagtgaaagttagggctagtagtcgttactacaaattcgcaatcagtttatgcaagtttattgcagacaattcgataagtaatcaaaacaatggtagttatcgtttttatgattttgaacgtgacgaacgcaaaatgtcacttctttatcaggaatttttatattgtttttgcatgcgagaattaaaaaatgctaacgttaaacgctcatatttgaaatgggatgcatatagcgacagtgataaaagtttatcttttctaccgcgaatggaaacagacataacgataagcagtaataacaaaactttaatcgttgatgcaaaatattataagaatatattttccagccgtaacgaaacatcgaagtttcactcgtctaacctataccagctgatgaattatttattggcttgtaaatcaactccagcccaaaaaatcagtgggttgctgatctatcctcatgtaacgaaggctgtaaagcatcgttataatgttagcggtttcgatatcggattatgtactataaacttggatcaagaatggacactgattcatcaggatttactgtctatctttaccgagtttctggaatga

SEQ ID NO: 150166 - DNA, 3519 bp, Enterobacter cloacae
atggacagtaatactcagggattcacttcatactggcgtaataccttagctgatgccgagtctggaaaaggggcatttgagcgtaaagatgaagagtcattcactcaatggatgaatatcgataaggggcgcttggatgaagagatcgtgcaatcgttcttcgtaggtgaaaacgagaaggttcagaccgtaaaagtgttgttacggccgcatgtatggatccacttgttaaagcatggcaaggagcgcatggctggcgcaccaggtatagttacgcctttggttacttccgcgctgatgaaccgcgaaggctttctattccctgcatttcctgccaccattccccgtgacctgcttgaaccactgcccaaaggttccttttctattggtgagatggcggaatatgacaaatataaaacctcccatgattcattaacttttggtcctggcgacgaggatgagcagcgtgaggaaacagacgaacaacggactgagcgacatgctcgctataagctattatggcaaaaataccttaaagaggcagatgagcttttaaacaatgtggccgggaaatggctcgagtcaccagagcaatatgagtcagctggttatggctttattatcaaagccaaccagcccggcggcgccagcattcatattttgcccatgtacgaccacctgctgtcgtgcaaaaaagaggtgccattgctggcgcgttttgcttcaaaagataaatctcctgttgagccgcttcttgccagtaatgccatgttcagtgagcgtctgggccattctggcgacaaattccctctggctactgcacagcgtgatgccctgagccattatctcactcaacagccgggcgatattcttgccgtaaacggtcctccgggaacagggaaaactactcttgtgctctccatcatagctacagagtggacgagggcggctttaaacaaaaccgaaccaccggttgtcattgcggcatcaaccaacaaccaggcggttaccaacattattgaggccttcggaaaagattttgctacgggcaccgggcctatggctgggcgttggctgcctgatgtaacaagctttggggcttatttcccttcttcgcgccgaaaagccgaggcagcaaaaaaataccagacagaagacttttttaaccgcgttgaatcccttgaatatgtagaagatgcccggctcttcttccttgaaaaggcaaggttggcttttccgactcaggaatgtcattcacctgaacacgttgtggatctcttacatcagcgtttagttgaactctctgcagagcttgagcaaatcgagcctgcgtgggacaacctgaacgcaatccgtcaggagcggtgcgccatcagcgacgatctcgaacagtatattcaggctaagagaacgttactgctcaatagcacaaatgaaatctcgctattaacacagggcaaaaaacaatgggaacaatatcgagctggtgagtcgatcatgttcgctctcttctcctggtttcccgccgttcgtactaagcgtcactatcaaatgaagctgtttttggaggctacgtttggcgaaagaatgacagcattccagggaactttgcctgatggaattgatgcctttatcgaaggcctgatagcagaagcacttaaagagcaggccgagtaccagcagcagattggtcttgccgaggacatttcccaacgtgaaagtgaagcagccatacgctggcgcgagatcactcattcgctgggaagtccgggtgaaacggagctcagtctgaatgaagccgatcagctcgctgatacgcggctccgttttcctgcatttttgctggcgacgcattattgggaaggccggtggttaatggatatggctgccattgaagatcttcaggatgaaaaaaaacgcaacagaataaattatgttcaggcccgctggcagcgcagaatgaaacttaccccttgtgtggtgatgacctgttatatgctgccgcatcatatgaaaattggtatccgggatgaaaaattgaaaaagtatgcggaaagctatttttataattttgcagatctgctcattgtcgatgaagcaggccaagtacttccggaagtggctgcggcctcctttgctctggcaaaaaaagcgttagttattggtgatacagcacagattgcgccaatctggaatagttaccctaccattgatatagggaatctgttagagcagaaacttcttactggcgatactcaggatgagcttcacgacgcttatatcacgataggtgattcaggtaaaagcgcggcatctgggagtgtcatgaagatcgcccagtttaattcccgctatcattacgacccaaactttgcgcgtggcatgtatttatatgagcatcgtcgttgcttcgataacatcattggcttctgtaatgagttgtgctatgacggcaaattatttcccaagcggggtatagcaaatggcacgttatatcctgcaatcggttatttgcacatagatggtaaatgtgtacaggcaagcggcggaagccgctataacctcttcgaagctgagacagtagctgcatggcttgcggcgcacaaacaagatattgagcgtcattacaataagctgctccatgaagtcgtagggattgtgacccccttttctgcgcaagtcagcgcaattgaatcgtcattgcgtaaggtggatatcaactgtaatgatgataaaaacgggctgacagtggggacagtccactccttgcagggcgcggaaagggagattgtgctgttttcttctgtgtattcgaaacacgaagatggcgaatttatagacaacgacagcagcattctgaacgttgccgtttcacgtcctaaagatagcttcctggtctttggcgacatggacttgtttgagatccaacccggttcttcacctcggggactgctggcgaaatacctgtttgcttccactgataatgcgttgcagtttgattttcaggagcgccaggatttaagttcctcgcaaacgcagacctctatcctgcacggtgtggagcaacatgatgtgtttctgaatcagacttttaactcaatcaatgagagcattactatcgtttcgccgtggcttacctgggaaaagttggaacagaccggttttcttgcatcgatgatgcaggcacgtgcacgtggtattgatatcactttagtaacggacaaatcatctaatactgcagatgtggattttgaaaagcgcaaagagaaaaatcagcgtcttaatgaggccgtggaaaagttaactgaaatgggcatcacgacgaagttggtcaaccgtgttcacagtaagattgtaattggcgatgagggactactctgcgtcggttcctttaactggttcagcgctgcgcgggaggaaagataccagcgatatgacacatccatggtctaccatggcgatagtttaagagctgagatcaaaacgatttattccagccttgagcagcggcagttataa

SEQ ID NO: 150167 - DNA, 1143 bp, Enterobacter cloacae
atgactaatatttttgccttatcaatcgcaacaacatgtcttattgttgcaatgcttatatttagcctgcctgttttcaaattcttagacgatgacactcttcctaaacgatcaaacagtctggacggtatgcggttcttccttgcctcaatggttattttccaccatatggactgtttttactcatactacacaacaggcaagtgggctcctgtttcttacttcctttttgccgcaggtaagtatggtgttgctttgttctttatgactactgcttaccttttctggggtaagatacgaatgaaggacagtattgactgggtgtcgctatacaaaggcaggatgctcagaataatgccgttagccttattttcatcttttatcgccataatccttttgttcatattaacgaaaccttttccgatatcgaacacccctatatctaacatattgtcatggtttgatggtggcatatgggatagcaagcctccagttacaacaatgcagcgcccgaccatagctcttgctggtgtgacatggactctgaaatgggagtggatgttctatttcacactgccagttatgttcttttttaataaaagaccacttgaattatcactgtctctttttgctttttcattctatttcatgcctgcatttaccaaggatgcatatctttggtcatatttctttgctgggatgttatgtcgcgagctaaaggagaggatagtacttgacaatatcaagtctgagcttctgttgatttctgcaattattttcctgcttgtagccaaccccaccctattcagggttccaggaacaatattccttggtgtcatcttcttttccataatctctggaggaagtattcttggtttacttagaactaaagcggcaattaggcttggcacagtaagttacagcctgtatattacgcagggactaatattattccctgcttataatctttacaaacacttctttagcttgagcattgataataattacttcatttttcttgttttttgtttcattgctacgtgcatattatcttctattacatatcatttaatagaattgccattcatgaatttaggaaagattaaaaataaagcttatattgctaaagaaaaagtgagttga

SEQ ID NO: 150168 - DNA, 1971 bp, Enterobacter cloacae
atggctacgacacctaccaacctgtcagtaccgagcgagtccccccgcgatctgaaatttaacgcagggaaaattgatgaatttgtgacatcgctggcacttcagtacattgatcgctttggcaatgctcattacaccatcgaaggcctgcgctggatggcgcagcaggctatttcccagtatgggtgggttccgatcggaacattccaggatggtgcaacattaactctgcctaaccaaatcctgaaagacaccaccgacggtgaatactatcgctgggacggttcatttttgccatcagggaaggttgtgccaaatggttctacgccaggatcaacaggtggggttggtgtaggtgcatggataagtgttggtgattcggcattgcgctcaatgcttgcttctgagcaaggagtttccatggttggcggcattgccatggagctcgactctcaggccgatttggcaacaaacacaactgttcagggacggctggtggcagtaaagaacactgtcggtagttacaataaatactccataattccaaactctggtgtgcttggcgatggcgatgtaatcatcgacagggtggatggattgcaggcagagcttcagattgaaggggttctggatgtacgggcttttgcaaagtctggtaggacagaccaacaaataattcaggcggcattagattacgctggatctaaatcaggccattgggttgttggcttgacggccaaagataaaaccggaacaccatggagattcagcacacttaaggttcctgatagcacagtttttcaggggcatggcggtgcactaaaactaaatgataatgtctgtatagattcatcagtcagttattatcttcttcacaacctcgatggtaacgatgtatggcttgatggtttatatatagacggcaatatgagtaacaattcattatttactgtcgctgacctggtaacactgattggtgaagggtcaaagatcacaaattgtactctcatgaatgcacctgactccggtttaatgttttctaacgttactaacggcatggctctaggtaacgtaattggaaatggaagagatgttgctatttatgcaaactcaagtgctgatggaagatccagggcaaccgctatttcagacaacattctttatggttacccagcaggaggtattggatttaaaagatattttgctgactgcgttgcaaatggcaatttggtttatctttgtgggaatggaatgacgtttgaggatttctcaaatgaagctgaaggtaaattcccaaaaaggataactttatcagatacatttatgcgcgacatagggtatccgcacagatcgcctggaagtgtagccgaaagagggataagcatccaaagagcctctgatataaacataactggacttcagacagttaatgtttcaggaaacatattatatattggtaatggtgaggatatatgtgttgacaatgcaatgcttaggggttacctagccagtcctcagagcaacgggaataacggcgttttagttgtgaatgcaacaggaggacatttaaataatgtaaatgtaactggcgtagcaagcagggcgggatattttcaaactgtaaacggaatgtcacttcgtggcggcaggtggattagctcgggaagccagtcagccattcgtgctgatgcgaccgctcaattctcagtttatgaaccagattatctctccggaggttctggcgctgatgaagagtggtttgatggagcttcaggaatttcaaatggttatataaaatcacactccactggccctgaaaagtacggctttgtaactatgggtgttggtgcctcaactcctataggagttgttacgcctcgctttattggtcagaatatatggcttccaggaaccagtaaatggtggaagtctcacggcatgacaaaaaatgactggtcggtaataaactga

SEQ ID NO: 150169 - DNA, 369 bp, Enterobacter cloacae
atgggcatcaaaaccagagggattaaggagtcaaagagaaaccttgatcgcatcatgaaggatgtccagaggcgcgaccttgtcaggggcatgcatgcggcgttgattatcggagcagatcgggcagcactttacaccccgataaacatttcaaccttaattaacagccagtatcgcgaggttgaggttagaggtgttgtcgtgactggcagggttggctattcagcaaactacgctgtttatgtccatgatccaggcgtcccgcaaacattccgcagagctacagccaaaaaggaatttcttactcttgccatgaatgagaccagaaaccagatgcaagctgcgctacttagggagctttcaaaatga

SEQ ID NO: 150170 - DNA, 267 bp, Enterobacter cloacae
atgatctctggtcttcatcactttgattcatggcttgagcgtagtacctggtacactcttcatgtagatgaagaaaaactcttttatctggcgttaaaaaaagtaattgcggaaaacccaggtgtattgatccacgagcaatacgtgagggattacattttaaacaaaaaagtatcaacactggctgatgataccctcaagccaacagccaaaaaatatggaaaactagctgaagatatttcagattacgtattgaacacacagtga

SEQ ID NO: 150171 - DNA, 225 bp, Enterobacter cloacae
atgagtgaagaatacaaaaaaaagattggcattcccgaagcccattctctccaacaagtatccatggaatggaaagggcaaaggaaaggtcaggatattgatgtttacgtttttgatgagctagacccagatgggaatgtggttgcttcttatgaagtgactgatagcacctctatctacccgccgtttgaccgacacatctctcatcagaaattccggaaataa

SEQ ID NO: 150172 - DNA, 450 bp, Enterobacter cloacae
atgaagcagcactactgcatcgttaacgacaccgttaaagagaacctcatcgcgtacattcgcaccctgccggtaaaccctcgcgcgccgatggtggtcgaggcacgggaagagacacgcaccgataagcaaaaccgtcttatgtggccattgctgaaagacctgtctgaccaggtagtctggcacggcgaaaagctgacccgcgaggaatggaaggaccttatcaccgttctggtaaaccagactcaggaccaggagcagaaatccgcgccgggtatcaacggcggccgcgtttatttcggcgtccgcacatccaaatccagcaagcgctacatggtcgacgtcatcgaggcgatttactggttcggtaccgaccgcggcgtaaagttctccgaagcatccagtaagcgcattgcctgggcgcaagaatggagggcttcccgtgggtag

SEQ ID NO: 150173 - DNA, 273 bp, Enterobacter cloacae
atgatggaaaaggtaaaggtttttacgcgagagcatttcagtgactatatggatgctgaatatatctattctacccgtcaggggagaaatggaccggtagcaaatcatcaaattaccatagagaagagtgagctaagtgatggacttttccacggcatgaactacaaaatgggcgtgagcttgagcgtagttgggtcagaggaagggtacagagactattattttgtccacgatacagccgatggttatgtttttcagaccaaccccgaataa

SEQ ID NO: 150174 - DNA, 312 bp, Enterobacter cloacae
atgtcagaaatttttgataacgggtacaaggccggagaagcctcctacggaaaggaaaagatgtctgatttcgaaggttcacagttcaaagatgagttcatggttgggtattgcctcgccagagctgagtacgagggcggtggaacaccttttgtttttttatcgctaggccagcatgccggattttatggcttgccaaaagaagcatttaagcgttactacaaatcagacgactatcaagggcactttgagtcagggtacgaggatggagccgaagaacggcgaagccagtattccgactatgaggattaa

SEQ ID NO: 150175 - DNA, 447 bp, Enterobacter cloacae
atgagcgtgaagcgttatgagtgggtggcatgtgatgagcattcgtgccattgcgacgtggtagagagcgtcgagggcgatatggtcggttacgaagactacgccccacttgaagccagatgcgcggcgctggctgcggaattgcagacagttaaagctatgaatgattgcctatctgaagagcttcgcggatatgaatctgacggagcttttgaggggccgaaaatgcacctgctttggtggcaatgcgaaacgccaaatcatggcgatttcatggctgaagttcaggctcagggtgtggagatgtttgctgagcgaaaaaataacgaaatgatgtcactccacccagacacccatgctgttggttctatcgctgctgaaatgagttcgcaagtgaagcagttgcgcgagttcgccgaacaaattcgcaaaggagtgcagtcatga

SEQ ID NO: 150176 - DNA, 324 bp, Enterobacter cloacae
atgaagaaagtttcgctttccaggcatcgctatagccttgactggttcactgtcgaccaagttgaagtcagtcttgatacgtgctggcactacgaaatgcagttcaggctcgggtgctggtatttgatgcattgccaatatgacaaatcgcaagagaagtggctaaaccgttccgaattggatttccgtcttgacgaccctgctgatgcggtaatgaagcttggcgacagggtttatcgttttagcaaaattcacgatgaaaacctttcaaaagaggtttcagaccttatgaagcgtgtatccgctcgctcggaggcctcatga

SEQ ID NO: 150177 - DNA, 753 bp, Enterobacter cloacae
atgatcgaaccattagtatcggtaataatgccttcgtataattccgaagcgacaattgaagagtctatattatccgtattgaaacaaaaatacgaaaattgggagttgataatttccgatgataactcgactgataataccattaatattattcaagattatgccaagaaggatcatagaatacaagttgtaagacataccataaacaaaggtgcaggatttgctaggaatgcagcaattgaaagagcagcagggcgatatatagcatttttagatagtgatgatttatgggatgaatataagctaagcacgcaaatagcgtttatggaagaaaataatattgcttttacctattcccaatatagaaaaatagatatgcaaggtaatttaggaaggataatatcaccaccttcaactataacatatgccgaactcctaaaatcgaatgttatcggttgcttaacagcaatatataatcaagaggttctagggaagacttttatgccactaattagaaagcgccaagacatggcattgtggttagatttgttaaaaataactgagaaagcctattgtataccgtctgtattggcttattatagagaaggtcaaaaaagtttatcttccaataaatataagatcctgatttcacaatggtatttttatcgtaattatattggcttgaatgtgttgaaatcagcttattatttttctttttacatatataaagctgttaaaaaacatggtttataa

SEQ ID NO: 150178 - DNA, 303 bp, Enterobacter cloacae
  misc_feature (230)..(239): n is a, c, g, or t
atggcgaattttaaagctagtgtagtgctttacaataatgccgataatttgaggatgggtacaacatttccaactcgatttgccttgggtatgctcggttgtcaccctgtttttatcccagcagggatatttaatgctttagaggatttaggggattttgtcttgacatatcatgacattaatgaacttataaataaattttcaagcattcaagacaaaaatatcaatannnnnnnnnnggatggtgaggttaataaaaagcgtttagatgattttattaagtgcgtcctcaatgataactga

SEQ ID NO: 150179 - DNA, 762 bp, Enterobacter cloacae
gtggtgattgccactaagttcggtttcggcgtggaggaggggaagccaacctcccttaacagtcatcctgaccatatccgccgcgccgtagagggctcgctgaagcgtctgaaaacggaccatatcgatcttctttatcagcatcgccccgatccgaatgtgccgattgaggatgtggcggaaagcgtgaaggcattgatccaggagggtaaagtgaaacactggggattgtcggaagcgagtgccaggacaatccgccgcgcacatgcggtactccctgtgactgcagtacagagtgagtatgccatgtggttgcgtgaaccggagacgcggatatttccaacgctcgaagagctgggtatcggctttgtaccttactgcccgaccgcccggagtttccttgccggggcagtcaatccaagccagcggttcgacagcacagatcggcggcataacctgccacgcttccagcccgatgccctggccaaaaacatggtactgcttgaattcgcgcagtcgtgggcccgccgcaaaaacaccactccggttcagttcgcgctggcctgggtgatggctcagcggccatggatagtccccatcccgggtacgacgcaatatccgcacctgatagaaaatagcggtgcaccgcaagtccggttgacggacagcgagttacgcgaaatcgatgcagcgcttgccaggatcccattgcagggcggtcgcgcagatccgtttaccgaaagtcagtttgataaaagttaa

SEQ ID NO: 150180 - DNA, 207 bp, Enterobacter cloacae
atgaatgcagtccagcttttgtgttctctggcattgattttggtcgcatcctttcgcatttttgcgcaggaaccagagctcccgctgaaggaacaggtcaatacagatgaaggtacaatctgcgtttatgaacgcggggaacaccgtgaaaaaattgttattcctgttggtcagccgtgtccgaaaacctcacccaacaataattaa

SEQ ID NO: 150181 - DNA, 555 bp, Enterobacter cloacae
atgaatatcataaaaacttcaatctccgatgtgcttttatttgaaccgaaaatatataatgatgatagaggtttctttttcgaaagctttaatcaaaaaatatttgaggaggctatagggcatgaagtaaatttcgtccaggataatcactcaaaatcttgcaaaggggttttgagaggtttgcattttcaaaagccccccttcgctcaaggtaaactagtacgttgtattgttggcgaagtttacgacgttgcagtagatttaagaatagactcctcaacatatggtaaatgggttgggtataaactttcagctgataataagagacagttatggattcctgaagggtttgctcatggatttgttgtgctgagtgataatgcagaatttgtctataaaacaacaaattattataatccatgtagtgacgcaggattaatctggaacgacgaaaagttaaatatatcttggccaaatatggaggcgtttgtcttatcagataaggatatgaaccttccaacttttgacgattattctaaagataattgcttctaa

SEQ ID NO: 150182 - DNA, 450 bp, Enterobacter cloacae
atgctgagaaggtacgctataacaaacgccgtgtatcagccgcggcagtgtgatgtagtcagcctgagtcttatcagcaactatcagccgttcggctatctgtatttgatactgaggtgggcgaccagtgcccagataaaaactaatcaaggaatcagggaagcgtttcaaccagttcgatactggtgtgtagaacaaatccacaggcagcgcgtcatcctcaattacaactacccggcaaggttgctcagcagcccattcaagcgctcgtcggtgattccagttcgcgccgtggttaccgtcgtcaataagcagatgagcatccagcagcgcagcaagacgttgcgcatctcctgtgcgagagtgatggccgaccaccacaaacttaatctcttcagccaccagcgtatctccaataaaaaaagccgcacgatggcggctactgtctga

SEQ ID NO: 150183 - DNA, 582 bp, Enterobacter cloacae
atggatcttgttccatcccggaaagagttaaacagggctaaacgttgtattgaacgcatgagatcggcggcatcctacgatgagtatgatgaggcatggagcgattttctaagtcgaattgaaaatgttttcagcagaatcaaggttgcagctgaaactcataaaaagtatccctcgttctcatcaagaacgaatcacctccgtgctacagatagtttgcttgtctatctcaaacaggcacgcaattcagtccatcatggaattgcagatacgtccaaatatgttaatggcggattcggtattaatcctgtttcaccaggtgggagcgttcacatcaagtcgttaacttttgataagaacggtaatattaatattattgccgggtcgcctatcaaagttaacgtaatacctagttcggtagaggcaataccatgtcgaaacagaggcgttacttacaatccaccagagtcacatttgggtaaagttttaaaaactaaaagcccaattgatattgctgtattaggcattgaattctacgaatcttatcttgcagaggctgaaaatatattcctcaaacaataa

SEQ ID NO: 150184 - DNA, 798 bp, Enterobacter cloacae
atgtctgacaaggataatccgggtaaattaatctggcacgtttcctgtgatgagtcaggaaccggcggacaacgattctatgggtttggaagcctatggatgaaataccaacgccgtggtgacttcgttcagattatccgggaacttcgtgaaaaacataactgttcagatgagcttaaatggcaaaaggctcactctaaacaaaacgctgcattctatgatgatgtcattgaagctttttttaaatatcagtggcttgcctttcactgcattattattcagaaagcgcatgtaaacaaagagttccacgatggtgattatgatttagcaatgcgtaaacacttcactgagctactgacaaagaaaatcatccgtgtgattcgcaaattcccagatagagaatgtgagttccgtattgatgttgacccaattgcatctaggtatgataaagctgacgaggcttttcataagattgcaaacaacattatcaaaaatgcaacagggaaagaagaagccataaaggctgtaatcaccaaggattcaaaagaatcggctcaaatccagatctgcgactttctacttggtgctgtgatgagtgcctaccaagacaaagcctctaacccacgaaaaattgcagtcgcaaataaaatcgcaagttacttaggttgggatggtttccactatgacacctggggctccgagcgtaagtttaatatctggtacttttatgatcctacaaaggggccgcgtgaacttaaaacaagaaaggtaatactcaagtacccattaccagaataa

SEQ ID NO: 150185 - DNA, 1707 bp, Enterobacter cloacae
atgcgtcaactcacccgaacgctactcacactgtttgctgctgtccttgccctgtggctggtcgtgggtttctggccgctttccaccgtcagccgttctgtgcttagcatctgtattctgctggtctgcggcgcggcgctatggcatcggtggcggcgtcgccagttcgtcataccggtaacggagcatgtcctgcccccggaagattttcagggtgcggtggtgctggcctgcggcgatacgaccagcctgttccctcccgataccgtttatcgtgaaacccgtcagggctggtacatacacgcgcaaaacgcagaacagctgccgctgctggcgcagcatctggcggctgtccgtccggcgctggtgtcgcaggtctcggtattgctggcgctgataccggaacagcagacgtcggaagaggcactggcgcagacgctccgtggctggcgacgcagtattacgcagtgccggaactggctgaacggtgttccaccggtatggagcgtggcctgggtgtcgccacctgaccttcactctaaagaagaggcgcagtggtttaccgtcacaccggagttaccgggcgtgcgggtgcggcagaacggacatgtcgccctgccggtgacggactggcagtgggagagcggcagccgcgcctcacgcctttatgacacgctgtggctggacagcatactggcgctgatggcgcaccacctcacccggccactcagcgccagacagggtgagcttccgcagctgaatctctgcgcggcaggtatctgtctgacaccgatcgccgcaacagaggataacctctggcagcagcagatagccggtatcaccacgctttgcccgaaacctgtctttgcaccggatttactgccgctgccggaggtattgctgccgtacctgccacgtcgccacggcatcagccgccggatgcagaatatgcggctggccgggggtatcagctttgtcttccttgcgctggcgatgctggcttcctttatcaacaaccagcggctggtgcgcagcgtgggcgaccaccttgccgtataccaccgtctcagcggcacgccacctgagccgaagcagcaggcgcagcagcgtttgcgggcagacagccgcctgctggacgactggctgcggcgtggtgagccactgcgttacgggctcggcctgtatcagggcatgcgtctgatcccgccggtagaagccgccattaatagctggacgccaccgccgccacttcgtccggtgattaagaaaatcgtgcaggggccgcagactgtccgcctcgacagcatgtcgctgttcgataccggaaagtgggcgcttaaacccgcctcaacgaagctgctggtgaactcactggtggggatcaaggcgaagcccggctggctgattgtggtggcgggccataccgacagcaccggggatgacccgtccaaccaggtgctgtccctgaagcgtgcggagtcggtccgcgactggatgcgggataccggcgacgtgccggagagctgttttgcggtgcagggctatggtgaaagccgtcctgtcgccaccaacgacacggctgaagggcgggcgctgaaccgccgtgtcgaaatcagtctggtaccgcaggcgaatgcctgccaggcgccgggcaagacccatgcgtcatcgcaggatgatggcgctgataacaatgtaacggagtaa

SEQ ID NO: 150186 - DNA, 492 bp, Enterobacter cloacae
atggcaattccagtctatctgtggctgaaggacgacggcggcgcggacattaaagggtctgtggacgttcaggatcgtgaaggcagtatcgaagtggtggcccaggagcacaacctgtacatcccgaccgataacaataccggcaagctgaccggcacccgtatccacacgcctttcctgttcaccaaggaaatcgactcctccagcccgtacctgtacaaggcggtgacgaccggccagaccctgaaatctgccgagttcaaatggtacagaatcaatgacgcaggccaggaagtggagtacttcaacacgaagcttgagaacgtgaagctggtgaaagtgaatccgaagatgcatgacatcaaggatcctgctttcgagaagcacaaccacctcgagcagattgaactgcgttacgaaaaaatcacctggacctacaaggacggcaacatcattcattccgattcctggaacgaacgcgccactgcgtaa

SEQ ID NO: 150187 - DNA, 2541 bp, Enterobacter cloacae
atgagtctgacagatacgtttaagaacaccctgtctgcgctaactgaaggcgggctgaaccgctatcgtctggatattccgtcctgcacagccttactggatgtggaaactttcaccggtaaggagtttataagtgagctttaccactatcaggttatctttaccagcagtgaccagaatatcagctcagcgcaactgctgactaagcctgccacgctgaccatggggacagggccgctgatggagctgaccgggcagaaagtggtacatggcgtggtgacgcattttaagcgtatcagtggttcatgtgaccaggcgacataccaaatcattatcgagccttacctgtctctgctgcgcaaacaattccgtacccaccgctttttcgtcaataagtccgttccggaagttgtcaccgaagtattgcaggaacatggtctgaaatgctgggagtatgagttcaccctcaaagccgactatccgaagcgtgagcagataaatcagtacaaggaaagtgacctcgctttcatagagcgcctgctggccgaagtggggattttctacttcttcaccctgcaaccggacacgcaaaccgaagtggtgcacttcgcagacaagcagagtgcctggaccttcggtaaaacgctgcctctgaacagcccgtcagggatgaatgacaataaggccgatgctgtatggggcataaacgtccggcaaaacgtggttgagcgctctgtcatcgccagtgattacaaccaccgtgaagcccagaatgtcctgacctctgcaccggcggacatgacccgtggtgaaggtgatggtgtgacttacggcgaggtttatcactacctgccgcgtcatcttgaacgtggcgacaaaatcacaccttccgcggaaaccggcaacttctgggcccgcctcgagcacgagcgttttctgtccgtacaaacaacggtcagcggacgcagtaatgatgccctgctttctccggctcaggtgctgaccatcagtgaagtggcgatcacgccgactttaccctccgaaacggacaaaggcattattattacccgcacgggttatactgccagccgtaagaatgctctgttagtgacgtgggaagggatgccttattacgaaaaccgttgctggcgtccggctcttaaaaaacgcccggtggtcagcggtaccctgatggcgcgcgtgaccagcgccaaagataacgatatctacgcctggcaggatgcgtcgggcatgtaccgggtgaagtttgatgctgaccgcgatgacaagggtcagggcctggaaagtatgccggtgcgttttgccaaaccttacggtggcgacaagtacggcttccacttcccgctcatacagggtactgaagtcgccattgcgtttcatgagggcgatccggatcgcccgtatattgcccatgcccttcacgattcccgtcatgttgatcacgtcacggaagccaacagtacgcgcaacgtcattcgaacagctggcctgaataagctgcggatggaagataagcgcggtgaagagcacgttaagctcagtacggagtacgggggtaaaacgcaactcaatctgggacataatgtcaatgcagacagggtagtgcgtggtgaaggagcagaactgcgaactaatgactgggtcagcgttcgaggaggcaagggaattttacttaccgcagatgtacagcctgacgtcggcactaagatgcttgagatggacagagctgtagaacagctggaacaggcactcacgctggcaagaagccttaaggctgctgtgaaaggagcgaaggcaactgtatccgatatcgacagccagaagacacttaacagctcactgaaatatctcaaaatgccaggaatgctggccagtgcacccgctggaataggtattcttagtcctgagactgtccgagtggcttcaggcggggcaagcattggtctgatgtctggtaaaaacaccgatataagtgccgggcaatcattcactgtcgcggttggcgaagctgttagtttgtttgcacaggctgcaggaatgaaaatgtatgcaggcgccggaatggttgatattcaggcgcaggctgatgcagtgaatgtctcagcattacaggacatcaccgtcatcagtggtcagggaagcgtgaaagttaatgccagccaggaactggttttaagctgtgggggcgcttatataaagcttagcggcgggaatattgaactgggatgcctgggcaatattttgctgaaagcggccaatgttaatcagacaggtcccgccagtttagatacaccacctgtgactttcccgaaagggtacagcgaaggatttatcacaacgtcttcagaaagtggagcggtcaaaccttttaccacatatcgaattacgacggctgaaggggaggtttataacggtgtctccagtgcaacaggagaaacggctccaatatttacgtccatgccatcacaattaaaaattgaatacccgcgaaatgttcctgaaagcctggaggccgaataa

SEQ ID NO: 150188 - DNA, 501 bp, Enterobacter cloacae
atgaaaattacaccagggatgttgaatatatgtttggttatttcgagtaaactaattgcaaaatcaggtctgcatcgatctaattcgtcaataataatgaacagaggtagtttcttttcaatcccatcttgctgttcaatgtatctaacccattcactaatacctttttttatggtgactattttgtttgctttttcagaatgtaggtcaagtaattttgccgataactcttttgttaggtctgaaaaactttcaatcccagtatatttttttattaatccctcaagcagtataggtgtcgctgtctttaacaaaggacctaaatttgaaattgttttatttaaaagtgtagtgaatttatctgattgccctgttaactgctctttaatagaactaaatactgtaagtaatggatcatctgaaaaatcttctttccatgcgtctatatatactgttgcatgggtagttgatattgtttgtgcgagacgttttgtgaagtaa

SEQ ID NO: 150189 - DNA, 234 bp, Enterobacter cloacae
atgtgcaatacatacatcgtaaagatgtttgccgtatttttgacgatcaagagtatctgcgggcagaacttcgtttataaatttattatcctgatcccagctccaatcaatatctttttccatttaagcctcactaatcacactgtaaactttagctataggtttaatatcactaatatcgcattcaaaagaaaaaccatctcctgttaccattgctttacgaacaggaattaa

SEQ ID NO: 150190 - DNA, 564 bp, Enterobacter cloacae
ttggatttcaatagcggtggaaaaaaagtgattgagcgtttggttgaggcgtatggtttcactacacgtcaggccctttgcgaccacttgggcgtgtcaaagagcacaatggctacgcgctacatgcgcgacatttttcctgcagattgggttttgcaatgtgtcatcgaaaccggtgtctcgattgattggcttgtttctgggaagggtgagttagcagtaaatccagaagcaaagctaacggacatagaaacgcaggagttgagaaatggtgaggcattttctattggatcgtacaaaatagatgcatttttcctccttcgagaaattaaatcgcctctagcagtaaaatctaaccgacatctttatgtatgcgatcgcgaagatgcaactctctctgatggtcagtggttagttgagattgaagataaattaagtataaaaaaaataaatttaattcctgttcgtaaagcaatggtaacaggagatggtttttcttttgaatgcgatattagtgatattaaacctatagctaaagtttacagtgtgattagtgaggcttaa

SEQ ID NO: 150191 - DNA, 228 bp, Enterobacter cloacae
atggctgattccatggatctcgtacaacagcgcgtcgaagagaaccttcaacgccatattcagaacgcccgcgtcagaaagccaggcattgcccgcgtgctttgcatcgactgtgacgcgccaattccaacagctcgcagacaagctattccgggcgtacagtgctgcgtgacctgtcaggaaattgctgagctgaaaggaaagcactacacccgaggcgcgctgtga

SEQ ID NO: 150192 - DNA, 570 bp, Enterobacter cloacae
atgatggaaccagtaaaaatttattcttgtggtacttatcatccatggaagtatcggggtgtacgtaatcctaggtcaggagatagactttcgaaggcaatgatggatttgaaagatgctactcatcagaataatggcaaagcagttaatattttttctcaacttatagttgctagccttaaaggctatgtcataggcagagttgcatttactgacgtaccttttgaaataagtattgttccatcacatgcagaaggccgagtgtctccagccttagttactatcgcgcaagatatagttaagaaatatccaaatgctgtttacaatcaatccttgcaaaggaagacaactgtcgttagcgcgcataaaggaggtggagatcgttcgattgaacatcatatgtccacaattggtgtagtcagtgacgttgctgaaaaagtaatattgcttattgatgatgtcactacatctggtgggagtatgtctgcttgttattatctgttaagatatgcaggtgccaagacagtattaccattggctctattagaaacagcaagttatgaggagtga

SEQ ID NO: 150193 - DNA, 963 bp, Enterobacter cloacae
atgtccccttctgaaatgaaagtatatttgggtttggctattcaggtagatagactaatttcagagcaggggttgcttaaattatttaataatataccttttcataatatttcggatgattatgaattaattgaatgtgtgaattcacttcagttgttaaaaaataaattcaccatttctgctttctataatgctgaaaattattttaaaaatcatttgtctcatgatatttatccaattccttttggtgatgtgaaatatcctgtttgcctagctataacccctaaccccccagcaatgctttatattaaaggaaatgtggaaattctagagaatatgccgggcgtggcaattgtcggttctcgtgaggtttcaaaggctggagaggaaattactaggagaataactgctaaggtatgtgagaaagggcttgtcatagtcagtgggttagctatcggaactgatgcgaacgctcataaagcaacactcgaagctaatgcaaaaactattgcagtacttgctcatgggttagaagtagctaagccgaaacaaaatagccgattggcgaatgatatactgaataatggcggggcatggatttctgaatatcctattggaagacctgcattcaaacaatcttttgtacagcgcaatagaattcaggttggtctctcggctgtttctatattaattgaagcagcgaaaaatagcgggacaatgactcaggctgattttgcactcaaggcagcaagacctatttttgccgttgtacctcataaaaacaataatccattagggcttaattgtgagggtacgcagcaactcgttactgatgaattagcccgaccattgcgtacaagtgatgactatgagcagttaattgatgtgatatttgaatcgatagataaaattagtattaattcaaggatctatcagaataatgttggagggcttctcatttaa

SEQ ID NO: 150194 - DNA, 447 bp, Enterobacter cloacae
gtggataatctgcataaggtggatgagtggctggcagcgctgttggcgaatctggagcctgccgcacgtcagcgcatgatgcgcgagatggcgcaggaattgcgccggaatcagcagcagaacatccaactgcagcataatcctgatggcagcggatacgagccacggaaagtcacggcgcgaaccaaaaaagggcgcatcaagcggcagatgttttcgaagctgcgcacggcgaaatacctgaaaactgcagccagcgcggactcagccagcgtgcagtttgcgggtaaggtgcagcggattgcgcgggtgcatcattatggactgcgcgaacgtgtgaatcttagaggttcagaagtacgttatgcaaagcgtaggttgcttggaattaacgggaaagtattgatttatatcagagatacttttctaaaaaggctaataaattag

SEQ ID NO: 150195 - DNA, 858 bp, Enterobacter cloacae
atgaacagtaattctactgccactgatgagttgaattggtctgatgccgcagaaaatgtaatcagcatgttttatgatgctgacataatggtatatgttgaaggtcaggatgatattggattttgggagatcgtttttaaaaaaacaagtgagcttaaggttgaaattcaagatgtgggcggatgcgaagaactcgaaccctatataaatagaatcatttcaggccaaataaatgctatagttgccagagatacagatttaaattattttagctcaactttagttgagcacccaaacataatttacacaaaaggatactcgatagaaaacaccattatagattcaagagtaattactaaaatcctaaaaaacattggtcgctacaatgcaaaagaaattcaatcctttaatgtcctaggctggatggatgattttcaagagaagacatcagaccttgtcgcccttgacgtttataatcatctaaatcagtgtgggttatctgtagtaggtgattcatgcgatagatttatgaaatcaaaatcttcttttgaattatgcgaagaaaaaatacatctatttatcaatgaactcccctcagaattcattaacaatggaattttgttaaaacatagtttgtcataccctaacaacacttctatttttaattggattagaggtcacttccttttctcagccactttgcgttttattactaaatttttatcgcaaaaccaaagaaaagctgcaatttcaaatgatagttactattctaatatgcttacagcatttgaattatactttgacgaagaacaccaagattataattactatagaaacaagatatcacttgtagcatga

SEQ ID NO: 150196 - DNA, 1251 bp, Enterobacter cloacae
atgtataaaatacatagcgtagcaataaacggattttggcaacgtttaaattccttttgccaatttaatgatgatgtaaatataattataggtcgtaatggaactggtaaaacgacatttatgaatatattgcattctgtcctatctttggatattgatggaattaacaaaaacgattttaactctgcagaaattaagcttaaagatggcagtaaaaaaaagaccataaaaatccaaaaaatagacaatgaaaaatcatcacattcaatcattgaatatcaaatatcatctaaaaaatatttcatcagagtaattaacgatgatgacagaagactttcttttagttataaaagaaggatgctcgaagaatctcaagaattacgtgcagctttagtaaaactagtttctttatcatcgctatcagtttatcgtttaagaaacagtgacgacttagaagttagagacaaatatggctctcgacttataaaccctgttgattataagttatctgagctaatggctgaactaactaaatatcaattagatctttctcagagagcacgagacatcgcgactgatttgcaaaaagacgtgctagcatcaattctttatagtaaagatgacattgacgatcatgcgtatgggattgactttgataaagaaaaagaaaaacagaatttattgaatgcttacacgcagttgaatgctatcgatatgaatataagaaggaaaataaattttcacgttgaaaacatcgatgaaacgttacgtaaaataaaagaaagaaatggtggcgtagatatacgctctctagaagcgcttagaaaaacacaaaaaataattaagatgtctttaagctctaagcaaaagacatcagccgtgttttctccaatagatcaatttttgcgaacgataaaagagttcattacagacaaggattttaattttattggcggtgaactctacatcaaaaacaatcacggttcgattagacaagaaaacttgtcatctggtgaaaaacagttattaattcttttcattgaaacactcttacagcgtgaacaacaatatattttcttgacggatgaacctgaattatcgctacacattcaatggcaaagaaatatcatcccagctataaaaaaattaaaccctaatgctcaaataattgcagccacacactctcctgaagtagcatcaaaatacaaggattcaatattcaatatggagaaacttgttaatgaacagtaa

SEQ ID NO: 150197 - DNA, 798 bp, Enterobacter cloacae
atggtctctccccagcacttccagcaacaggccgcctatgcggcctggtctgcggaatgtatcgcccgactgggtctctcccatccctggggggtgattaatgccactttcgaaccggatgtactgaagttgggccgtctacaggcccgtcatctgcacctccggttccctgacgggacattaatcgatacggataatgctgacgacctgccaccggtgctggcgcttgagagtgaaacacaggacgtggtggtggttctggctcttccgctgctgcgcgcgaatggtggcaactgccttaagcccgatgaggtggccgcgcgtcctgttcgctatcgccagcgctggcgggatgtccgcaacctttttggcgatgacacccgtcagattgcagtgatgcggccagagctgacgttgcgatttgcccatcagaacaacagcgattacctgacctgtccggttgcccgcctgcaacaagattcgcaggggaactgggcacttgatgagacataccttccgccgctgctggcgttgctgggcagccgctggctgatgacccagctggagcaactgttgacgcaactgcgcgcccgtctgggccgcctgatggacatgcgccgggaaagtaatgagcgcatggcggattttgccgtagccgatgtttcattgttctggctgctcaatgccctgaacagtgctgagcccgtgctgggtcagtttcagcgccacccgcaaagcccgcctgagcgtctctatccggaaggggtgtgtgacgatgagtattactgtccccgatag

SEQ ID NO: 150198 - DNA, 1044 bp, Enterobacter cloacae
gtggccggtgccatctcattattctgtaatttcttatctgaaagagatatcaatattgaggaaagaattatttcaggaaagtatctgagcattaatgaaatagatgctttaagagattatagtgagaagaagacccggttaaaaaaaattcttccatatactgtcaggaagaggaatgttgtaaaccgtgcaaccaaacacttcagattaaccaatatagcaaactatttgagttggttaagtcagatacttaaacagcaacaaggaagtataaatgaattcgtcgataagattagagagagaagaccaaaactaagaaggcgcagccgtcaagaccaaccagaaaaatctcttgatggaaaccaaattaatcatttattagaagtcataaaatgtggagcggcatttaatccattcggtgaaaatcttcagataagaaaccgacttattattctggtgctttattctttgggaataaggtcgggagagcttcttaatattcgtatatcggatattaactttagtgattccagtctggctatccgtcgtcgggctgatgataagaacgatccacgagttaaacaaccattggttaagacgatggaaagaaaactacctctatcttcggcattggcaaaagaattgcacaattacattaccagtgtccgtaggaagtttaagaatgccagaaagcatgagtaccttttcgtaacccataagtctggcccaacacaaggtatgcctttatcgagcatggcttaccataaagttatcgatagcatcagaaatgtcatgcctgagctttgcaatcttacggggcacaaactcagacatacctggaactatgaattctctaaaaaattagatgagatgcctgagcgagtaagtgaggctgaacaagaaaaaatgcgttctaatcttatgggatggactcccggctctggaactgcacagatatataacaaaagatttattcaggataaatcacataaagtcgcaataaaactacaggaagatattaataaaaaaggggaggttgaatga

SEQ ID NO: 150199 - DNA, 807 bp, Enterobacter cloacae
  misc_feature (793)..(802): n is a, c, g, or t
atgaattcagtacataaagtgttaatgagtaaagatcttattccagctaaaatggatgggtattatttttcaccacaagaagatgtatgggtacttgacagaaacaatcagataaataaaaaagcagttactgatgttcttaacgacaatttaaaagaaggatatctaaatacaattgcactatttgcgagggattatagcgcaagttttgcctccaagatacatggagcatttcttgcttttataaaggaagagcaatgcgtatatgtcagtaaagcttcagttttaaatttcagaagcaaaaagcatgttaaggatgaattattatttcgtctgaggatatttatcactaaatggtactctcttggctacaatggaatagcttcggaagctgtacagataatgaaaacatggaaacttgttaacggaaagccaggtgatgtcgttaaaagaaaagaacccatacaaggtcctttgactgatattgaattgcaagaatttaacgagggagcaataagagcgtacgagaaaaaagaaatatctctttttatgttaactatgacacttattatcagccacacaggtcgtagacccttgcaagtaactcagatgaagataacagatatccttaaggtttcaaaagaagagggtgaaatttattatcttttaaatataccacgaattaaacaaggcttaggattcagagaagagtttcgaacgttcagaatcaccaaagatctatatgaactggtttgtaaacaagccaaagattctttggcaatgctgtctgaannnnnnnnnntctga

SEQ ID NO: 150200 - DNA, 711 bp, Enterobacter cloacae
gtgccactttttatttcaaaaaataaaatcggattaattgataaaagtgttagtttagacttttatttaaaaactgatgtattgcatcattatagagggaaattaacagaggttttgaaagttgtcatcaagaaggaaaatgtcttctcagaaaggactggggaatccttacatataaatgccagaaggtttcgttatacgttaggaacacgagcagcaagagaaggctatggagaattcattatcgcagagctacttgatcactccacgattaagagtgtaggagtctatgttcagaatcatgttgataatgcttataagattgataaaactatggggcaggcattgactggaatatcatgcgtgttcagaggtcaagtaaaaagaaaagaagatattgaatatgacataactccaggtataaaaattaaaaataatgatggcgaagacactggcagttgtcagcaatgttccacatgttcagctaatgtccccattccttgttatacatgtatgcattttaccccctggctggatggaccgcatgaaaaggtttatcagtatttgattggcgaaagagaacgaatatacagcataactaacgacagaattgtaacggaatcgctcgacagaacgatcattgctgtaaaggaagtaattaaccactgcaacataatgcgaagctcacacaaggggaataaatccatatga

SEQ ID NO: 150201 - DNA, 2007 bp, Enterobacter cloacae
atgaccgatagtaatgtattattcttcaggaaaaagattgatataaatgcagagttaaatctgaaagagtttatccgattttgcagatacgatcttaccgctttagggagtgattttaactgggagtcttacgagtggagaggtgtcgctgtttttaccaaaataaatttaaaacgtaaggtaaaaacagataaagaacaattactcgatgaggagtatatcgattttgctaaagcttatatgagatatcagtcggctttaaccaaaagcagatggaagctgtcagcttcattgaccatattaaaagttgtcgaacaaacattactgatggtcaataaaaatgcaaatatcaccggggtcagcatacctgttcttgatgaagccatccaaaccatcaagagtctttacaaagaacatccggcctatgattatggactggaacttcagaaatttgtgaagttccttggtgaaaatggtctattgatcgcgggtgtcctttcatgggtcagcccaataaaaccaccggaacctgttaaccgtgtgtctaaaaaagcagatgaagcaaggttaagtaaacttccggatgaaacggctttgaatgctatggcagagatcttctcactgcctgatgaggcattgagttgccgggatatttttactacttcaatttttgcgctcctgatgtgtgctcccagtcggatatcggagattttggcacttccctgtgattgcgagattacggaaacagactctaacggggtggaaaggtatgggctaaggttttactccctcaagggttatggtgcggacattaaatggattccagacgttatggttcccgttgccaggagggcaatagaaaggttaaagaaactttcaaaaaatgcccgtgaattcgcacagtgggtggaggagaatccatctacattcttcagacgggatagccttcctgaaacaggagaaaacgaaatattaaaaccctggcagatatgtgaaggattaggatataaccttgaaagaaaaaatgggaacgtaaagtttttatctggagtgagtttttataatagccagaaaaattacaccatgaactcattatgggaaattatcctgtccagattaccagaaggttttccatggtatgataaaaataaaggcataaaatacagcaatgcactttgcctggtgaatacccatcaactggagaaaagaaatgaaactatcatttacgagttacagaaaccaactaaaaatattttcatgatagatatttctgagaataagtatgaggggctaaggtttgaaaacatatttaccagacatcgctatattggcccggaaggaaaagctctgcatttgagaagccatcagcctcgtcatttactcaatacgattggacagcgaaacgggatgtcagatctcgacctggcgaagtggtccggaagaacactggttacccaaaacccggtttacaaccacgtatcagaagatgacatgctccgtaaggccgagacactggatatcagcactatcggctcacaggccttcatgattgattccgtagagcccaaccttcctgttactccgggtatgatcaatctctgggaacatggtgcagttcatgtcaccgagttcggctactgtgttcatgactatatgatgagcccctgcgacaagttcagggattgtatcaactgcaacgagcaagtttgtgtgaaaggcgaagaagagaagctccagcggctcaaggaaaggcacaatatgacagaagggcttctcttcagagccagggagtcaatgacggaagaagaactgggtgctgaccgatgggttcagcatcatgaactgacccttactcgattgaatgaattgatcgcaatcctttcaaataacgaaataccagacggttcacgtataaaacccggtggggaaagtttcactcagcttgggcgagtattaaataaatttgaaaatctcgaaaataatgggaatgataaatatatagagtaa

SEQ ID NO: 150202 - DNA, 399 bp, Enterobacter cloacae
atggcaaaacatcttaaccgaaatgatataggtacaatcataaatacaataattgtttgggataatgacaaaattacatgggatgaaatatgtaatgctgttgaaccattaatcggtaaaaaaccgacaagacaatctctgaacatgaataaagatattgttgaagcctatcagaacagaaagaaaggtatccgggctacggataatgaggtcaggaaaccagccaatctgaagattgctgctgcgagaattgcaaatcttgagaaaagagttcatcacctcgaagaacagaataaaaatttaaaagaacagtttgtgaagtggcaatataatgcttataagcatggaatggaagaacaccagttgaatgaagatctacccaccattgagcgacattga

SEQ ID NO: 150203 - DNA, 315 bp, Enterobacter cloacae
atgaaaacatatactatcataacaatcattctttcaacttttttattaacagcctgtaattctgaaccatcagacaaagacatctataatgcattcaaaagtattgtagatagaacaaacgccagtatgaaagctttcgactcaagagtctcagaaaaggatcttttaagaatcgactatgtgaagaaagttagctgctcagaggaagcaaacaatgtttataactgcattgtcgatgcctctattagtaatatgaaacagacaaagcctgttaagcttgtgaaagcagatggtatctggaaagaagttcagtag

SEQ ID NO: 150204 - DNA, 279 bp, Enterobacter cloacae
atgaataacgaaaccattaagtgtccgttctgcttcaaagagagccagtttggtgtccgtgtctgcactggctgtcattcaacaatcaaatatggcgaagtttcaccctggttatcgttgttcataggatttattttattagcaattgcctacatcatactttatataagtcaaagttttttagtagctatcattattttgttggtattaatgatttctacaagattgtatatccgtaaaaaattcgcacatagagcaactttcacgcaccaacattaa

SEQ ID NO: 150205 - DNA, 1173 bp, Enterobacter cloacae
atgaagggtatgcggaagatcaagaggggtaagaactttgctggtgtggtccaatatgcattgaagccaggttcacatcataaaagtgatccaatcgtcattggcgggaacatgttaggtgattcagcctgtgaactgatcgcagaattcgatagcaccaagcatcttcgccaggatgtcgcaaaaccagtttggcacaactcgctacgattgcctgatggagaaatattatcgaatgaccaatgggtaaccatcgctgacgactacatgaagaggatagggttcagtgatactcatctccgttgctatgtgcttcatgacgacgatggccagcatatacacatcattgccagcaggatcgacatggccggtgggaagctctacttgggtaggaacgaaaatcttataagcacacggatcattagtgaactcgaaatcgctcacggtctgacagtgaccaaggcagcaccttccattacaccaaagcaacagaagcgaataaaagtttcccgtaatgaacagatgctttcagaacggactggccttccctcccctaaagaagctctacaacaaatacttgataaaagtttgactgataaacctgaccttttaacttttatcaaaaggctggaagaagccgaagtcggctggacagcgaatgtcgcttctaccgggaaaatgaacgggttctcattctcataccgcgatatagctttcaaagcttcgcaattgggtaagggctactcttgggcaaatcttagtaacaggctcaactacaacctaggcgatctagaagctctgcgatccagcacaccggcaaaagaccaccctgctcctgctcctgctcctgctcctgctcctgctcctgctcctgctcctgcaaaagatgttgcaacaacggatattccaatggaaagcataagtgaaaaaattgctgaactcgaactgcgactcagaaaagacagaagaaaagaaatagtagaaaagattcttcaaaaaaacgcagtacaacagcaaaagcatctcaggcttatcggctggcttccatttcttagaaggcttgcagagcttctccgaagctatggtgtgagcattcttcacaagcccctccctggattctcaaaactctatacaacccgacctctacataaagaaagaaaaattcatttatag

SEQ ID NO: 150206 - DNA, 378 bp, Enterobacter cloacae
atgaatcaatctaatatcatcccacgatcattgcgaacacactgtgtcagtgtccgtcttaataactcggaacttcaattactcaacacaaaacgaggttctacatctaaaggcgaatggttacgtatggcttccttgcagaagctccccatgaatgtacctcctgtaaacatcgaaacatggaagactctgggtgagatcaatcagaagctaaaccgtatcgctcttcatatcgatagtaagagtaaagatagccagcttactcatacagagcttttcgctgtgaagcgacaattggaagagcttcgccagcacctgctaaatgctgacatatggagcaaaccctatgaagggtatgcggaagatcaagaggggtaa

SEQ ID NO: 150207 - DNA, 696 bp, Enterobacter cloacae
atgtatttaatgatgcctttgcatatgcacatagactatggttttggtgcaacagcagaacagtttaaagaatcagcagatatattatcggcttctgaatctgttaaagatttaggtatgccagtcaattatcttagacgacatgcaatcgaactttacctaaaatctttaatttatgttttgcaccgaaattttaaaatcccattcagtagtggtggtactcttgaaaaaccaaagattaaagtcttgggaaaggattttgaattagaaaacatacatgacatcagattattaaccatatatttaatcggtcaacacaataagttaataccttgtttttttcacttaggaataggtgtaattgaaaaagatattttagataagatcaataagataaactccattgattctaagagtactttttttcgttatcctaaaacgggagatcacatccaagatatgagaaagtcatctgtaaggcaaaaaagtacggaagatattataaactcgatgaacaaaaaagaagggaagtatgtgaaggctttgctattagttgatgacgaggataacatagttgactcatttgacatagatgtagatgtattcccagatttaaataaaaaccttatatatctatgtgattattttcatgatcttcatgcggcatacagatggggtatatgtgatggcaggtga

SEQ ID NO: 150208 - DNA, 297 bp, Enterobacter cloacae
atgaatattgaatgctttgtaagtgagaatcatatgtgcaaccttggtgagaggttgtttaacgagatttttgatcttgatgccattgctgaactcgctgatgacaagtttactagagaagctgtttatttgctgagccagtatcttgttggaaacacgagcggaccatttaaagcaatcaatatgcttggagccaatgagcaaattaatatttatgaggtatggatctcaattattaaatcggctgatgagttaaggattttattcaaggcaatacttcgacattgtattgaatga

SEQ ID NO: 150209 - DNA, 207 bp, Enterobacter cloacae
atgaacaatcaaccaacccgtctcatccgtctaccagaagtcatcgctcgaaccggttacggcaaggcatggatctaccacctgatcagcaaaggtcgcttcccgcagccggtcaagattggacttcgcgctattgccttcgttgaaagtgaagtcgaggaatggattcagtctgttattgaaacaaccagaaaaaatgttgcctga

SEQ ID NO: 150210 - DNA, 879 bp, Enterobacter cloacae
atgcgcctatcaagatcattatgtaaagccgtaggcgacacgttagctaacacggcgtcacattcagcacttgaaaatctttttataactgcaggagcaccgggcaaccctgagggtactcatagtgtcagatggaagaactggctctacatagccggacaagatcctgagacggatagcttggcggtcttgggaagcgtcattgaagaattcatggattcaccaccttcagaaaatagcgacaaatatagtgagtggcaagataagaaagccaaccttgaagccgtattacatgataacggccttagatattaccgctttgggagagtgttgcctttaggtcaaatcccctccactgatatccccaatgaggaaactattcaagcgctacaacaacccgtaatgcctacaaaagttgaggtactgcttgaaaggttagttaaagggttgcatcgagctatgcatcctcttacgcatagaagaagaggtagccagcctcttacgtttgacagtgagtatgacgtgcaagatttactccactctctgttgagaccctggattcaggatatacgacccgaagagtatacccctagctatgcgggctccagtaccagaatggatttccttcttccagtgcatgaattggtgctggaaacaaaaattgtacgagatcgctcacatgctaaaaaagtaggtgatgagcttatcatcgatattgaacattacaggcgacacagccgctgtaagaacctatggtgcgtaatatatgatcctaatcattacataactaatgcaccaggcctgatagcagatttggagggagtgagaaactcaaaacatggtgaggtaactgtaaaagtctatgttatatgtagttaa

SEQ ID NO: 150211 - DNA, 903 bp, Enterobacter cloacae
gtggatctctttcccgatattgaacaggctgtacctttaccccatgaagaagtgcttcgctacatggtatgtaaaatccgtgataaccgatcggaagaatggcttacagagatgtgcaggaaaaataacctttccgatgtctgtcaggattatcttcaaaagggagtgctgaaggctctggagggtgaacctgatgtgagcttttacccaccaagactgacgattgagctggtgccccgaacatgctggttcgataacgtcagaagtgcggtatcttcaatggactggaaacggttaaggcaacaaacggccagaacagcagggtggaaatgccaggtctgcggcggaaaggggccccgatggcctgtagagtgccatgaaatctggcattacgatgatgaccatcagtatcagaccctcaaagggctcatcgcgttatgcccttcatgccatgaagtcaaacatatggggttcagcgagctccggggtaaaaaggacgaagcggtggctcatctggctctggtcaacggctggtctcttcagggcgcatttgactatgtggatgaagcttttgacgtatggcgggcacgatctcgtcatacctggcaactggatatctcgtggctcgaaacgcatgggattaaactcaaggatgagacagcagcagagggcgacaacattcctcctgaaaatcagctttcactggagcttgaggttccgcctgtcgcgatggagagcactgcagtgtccgccgtcgtggaacaagaaagcaattcttgcgagatggggcaaatcctgaaggacaaaactgtatcccgctcatcgtccgcatggccagcgttctggtcagtctgccagcgagtgttctaccgggtgaaaaaggtgatacgggagcagtggtga

SEQ ID NO: 150212 - DNA, 732 bp, Enterobacter cloacae
atgatcataaataaccttaatgaattattgataccagacgctgacagaaaaagtcaacctttagataattttaacactcaatctgatacaacaagtgtttattttcgcgatttggagaagcatttagttaaccatatcaagtcagcagatattgtgcttggtgctgttgcatggttaacaagttactcagtacttgatgctttagctcaggacgataaagaagtggtttttgtgattcaaaaagaggacttcttaagacctgacattggtgcaaaaaatgattttaaagaaactctaagaaaaaaatatagcaagctcaaaaactctctgacgcgctatgattttgaagggacgattcttccaaatatgtcttatgctggtgatccttcaattgaccctgtgacatgtgtcggaaatatgaataatgcaaaggctgcggcattcccacgaatgcataataaatttattatttttgccaaaaaggatattgattatgatgttcctgaagatcctgaaagtgattcaaggatgaaaattagtccttatgctgtttggactggatcattcaacataactaaaaatgccggaatgtcgttcgaaaatgcactttacataactgacatgaccatagttaatgcttattatcaggagtttgctcaaataacagcattgtcagaatcactcaattggtttaaggattgggtagagccgcaatggcgtataggcacttag

SEQ ID NO: 150213 - DNA, 420 bp, Enterobacter cloacae
atgactgaaaaaaaagcccccttctggaaccgtatggttccagagctgacggtaacggattttcccgcctccctgcacttctatgtcaatgtgcttggcttcaacattatgataaagcgaaaagaacccgattttgcttatctcaatcttggtgaagcccaactaatgcttgagcaataccactcggatggatggaacacgggagaatttacaaggccactcggacgtggcataaattttcagatagaagttgatgacgttgaacagattctcgcccgggtacatgcgcatggcgtaacgctttatcgggatctccacgagagccattacagtatcggagaaagctctgcctgccagagagagtttctcgtgcaggatccagatggttatcttttgcgatttagtcagtttatcgaatga

SEQ ID NO: 150214 - DNA, 252 bp, Enterobacter cloacae
gtgagcgtatatgttttttattacaacgagtctggcgcaagagtctttaccaaaagtagtgtaaatgatgaagcaaaagagcttctcaagcgtaaagggtacaaaaaacattttttcgaggttgaagctgaaagtgccaaggaagctattgcgaagatgaaaagcaacaacgatgaatatcttaatgaattaaaagattattctgacagccttctttttgttggccttgttgggggggggtcatttttttaa

SEQ ID NO: 150215 - DNA, 669 bp, Enterobacter cloacae
atgcagagtgtttatgctatcgttactgtgaatttatatagttaccatggacatcataagatgaagaaagttatcttattcctttgccaaggattagaagagtatgaggctagtgtattcacagatactattggctggacaacaacatacggattagaacccatagaattagtgacagttggtctacgtcaaaaagttaaatgcgcctggaatttcactatcgaaccagaatatcaactacatgaaattgatgatgatggctttgacgccatagccattcctggggggatgagtcgggccggtttttatgaagatgcatttgatgagcgccttctaaggcttattcaaaaatttaacgcaaaaaacaagattattgcttctgtttgcgtaggtgccttagcaattgccaagagtggcgctttacaaggaagaacgggcacaacgtatcatctgagcagtaaacgtcaagctcagttgctagaaatgggaggccatgttgttcagcaccctatagtggtggacggaaatattattacgtctcaaagtccggcaacagctattaatgtagcatttactttaatagaaaagctggcatctagagctaatgttgaacgaataaaagaaggtatgggatttgcccccctctctatcgatccatccggaatgtag

SEQ ID NO: 150216 - DNA, 309 bp, Enterobacter cloacae
atgccaggaacagtagatatttgcgccctctttgtagcggtcgcagagccatcccttcctccttctgcaagtatcgttgaaacgcaggaaggctttgatgtcattgataaagcattgtcattcaatcgcggagatacattgctgatctggttttgcggccgccagcagcacgcctattgggcgggtagcgcgcttatcacggatgatggcgaagccatcgaaggagatgcgctggatgacgttcgcctggttggtgtagttacccataccattcaccgggtgtacacagacgaaaatcccttcatgtag

SEQ ID NO: 150217 - DNA, 1212 bp, Enterobacter cloacae
atggcgattacacctactgatttgtttttgattgttttttcaccagcatgtgcaatgctaattgcttatgctctaagtacttcgtctattaaaaaatccctgaataccaatccaggaatttttgataaaatagagcctttaaggggggttgcggccgcgttggtggtgattcatcatagcttctattcatataaccttacttataatgcacgatgggctccgttacatgcggggttaacagatatccctcaacctctcataaatatcattgcatcttttggtggtgtaggagtaatcatatttttcatgattacaggatttctttttgttgacaaagcagtcaagtgtgatgggcaaatagatttcaagaaattttacattggtcgtttttttagaatagttcctgcatatatatttgtcgttatttttgtattcgcggtcgccatattaactggcgcaagaatctaccaaagttacagtgactatatttctgctgttttttcttggctattatttggactggcaaaaccatatactatatctagtcatattgataattatctaattgtggcaggagtgttttggactttaggtgtggaatggaaattttattttctatatcctttgatttgtcagttttcaaaaattaaaacagccacagtagcacttgtattgtcagcggtgatggtgtcatttctgatgatcattggtttttttgagggaataaatggcgggatattgttaagctttatctttggtggattggcggcgctaactttaaggtttagcatgattattagatcttaccttaaaaatagtctagtttctgcttttgggttctctatttcattatattgtatttacattgggatggatgtatattcattattcccatgccttgggttgtttattgcatttgtatctatgtctaatggtgcttctgtctttggaattcttaatttaaaagtgtttcgatggatgggggcaattagctattctttgtacttgtctcatggtgttttctattttttgttcaataaaatattaattaataaccatgagtatttagcaccatcagcacttgctgttctttttgcagtagccttcagcgtagtgtcttatcactttgttgaggttaaaggaatttcgtttggaagaaatctatcaaataaaacaaaaaagtcagatttggtgagcgagaccacttattag

SEQ ID NO: 150218 - DNA, 216 bp, Enterobacter cloacae
atgcaatacaaggtcttattctctgcattaattgatggtaaaaagcagaatctcgatgctgtatttacaagcaaaggcagtccgtctcttgatgacaaagtgacagccaaggctgctgcaatggctgctatgcaagctttgtcctccgtcattggagttgagacgccagtatttacagttgaattccgcttggaagccgtgctcccaatcgtttaa

SEQ ID NO: 150219 - DNA, 279 bp, Enterobacter cloacae
gtgaagaccataaagttttataattttcgcatggaaagcatgcatgcacagatattcaaaggaataataacggctactatgctgccaaagaaaattcaaaacgtatcaaaagggctggtcaattctgactatgtcaaatgcaagtacatggcagttgatatacatgcctttaatgttgtaatagacaattcgaatcttcagaaagttttagatgagctaagtaaattctttgtcgtcaaaaatattccaatcacatccaactcttattggcttagctag

SEQ ID NO: 150220 - DNA, 255 bp, Enterobacter cloacae
atgtcagacttcttcatagcagccaaacccaaggacgaacacgacaaggttaacgttgacctggcgtcttccggcgtgccgtacaaagaacgcctaaatatgccggttatcgctgaggtggtgatgcgcgagcagcctgagcatctacgcgattgcttccttgaacggttgagacagtaccgggaggagagtttgaaatttcctaaggcaagcgatccacgttacatagaaatgacagaagccaatacgaaatag

SEQ ID NO: 150221 - DNA, 396 bp, Enterobacter cloacae
atgtcgataaccggatgtgacatcatagccttggcgggagagatactgaagtttgaaaatgaagcctcgtatagaagctgcatttctagggcttattatgggatgtaccacgaaacgctactcaattgcacaagcataccggcgttctctggtagccatcatagcggtcttattggttatctcactacaccatctgagcacaagatggaaccatacgattctaggaagttgaaggcaattggctacttcctgaggcagcaacgtgatgctagaaatgaggcggattatcacctcacagatgttacggtttctaagcaaatggcagaaactagtcttgcggcagctgaattacttctgggtaagtgggaagaacttaaaacgcctaaggcgtcatga

SEQ ID NO: 150222 - DNA, 741 bp, Enterobacter cloacae
atgtatgctgaaatgctcagatcaggggctacgattcttgagttggattatcgcagagcaaaacgagagcttgaaggcaccaagactataaactcaattagtgctttgggaattttgcatgctgtggctgggtttgaagacaggtctattgaactttttgagcatgctctttccgagtttaatgatattattcttgctcgaaattttgtttttgtgcttgaggtcactcgcaacgatgagcttctgtttgaacatgcatactcgattgccgagagatttggcggaaagcagttcaccgaaatagcatattctattgcttatcgctttggtgatattgaaaatacgataaaatttattgatctgcacaacaaactcttaagtgaggatgaggggcggtctatggcagagaagcataaagatgagcttatctccgaactagaagatgcgtatcgatcatccggctgctcttctaaccagtttgaactgctagctcgcattatcagcagggtgattaaaactcattccgctgagacgggtctttttgaagtcactcgaaacggtagtgccagttacgttattgatgttattaacaaatctgcattagagattgcggaaatgaatttctatcttgcagaagaagtctgcgcagagccagatcttgatgattgtcgcctcacggccaggttttcagctgaaagacaactgcatacaggagtttcttatgtcgataaccggatgtga

SEQ ID NO: 150223 - DNA, 156 bp, Enterobacter cloacae
atggtaactcagcagaccggattgctgatggttgccatgctctgcctgctgtatgacctgcagccggcagacctcgaatcactggcccaccagctcgcagaatttgacgcagttaacgaccaccttacggagattaagcatgttgcgagttattga

SEQ ID NO: 150224 - DNA, 657 bp, Enterobacter cloacae
atgttgcgagttattgatactgaaactaccagcctggaaggtagtgtgctggagatagccagcgttgatattgttgacggtgttatctgtaatcccatgagcgattttgtgaggcctacggaggcgatcagtttcgaggctatggctatccatcacatcaccgaagatatggtcgctgacgccccactgattggcgaagttatcggacgttaccttggcgcgcaggcttacgtcgcacacaacgcgaagttcgataaatctaagctgccacaaatcgacgccccctggatctgcaccgctaagctggcccgcgctcttcttcctgatcacccaagtcacagcaaccagtatctgcgttacagccttggcctgaaacctgaactgccggaaggtctgtatgcgcaccgcgcgttgtatgactgctacgtcactgctgaattgcttctgtacatgggacgcctggcgaaatggacgtttggcgaaatgcgcgccatttcaaacagcccgtcactgattaaggcgatccggttcggcaagcacaagggcctgacgtttgaagaaattgcgaaggtcgaccctggctatctccgctggttgtccagcaacagcgacgacgaagacattctcttcaccatcaaacactggcttaaggggtga

SEQ ID NO: 150225 - DNA, 309 bp, Enterobacter cloacae
gtgactgatgcgctgatcgtaaaattcgaacagcgcctcgtcatctaccaggatgtcgcgacggcgggatttatgctcaagctcttccacctcggcgcgcagcttcaggttttcgcggaagaacgcatggcgcgtctgccagtcgccctccaccagcgcgtggcggataaacagctcgcggctgagcgccgggtcaatctggctgtagttgaccttacgcgcggccaccaccggcaggccataaacggtaaccttctcggtcgccatcactgccccctgcgcacgctcccagtgtggttcactgtatga

SEQ ID NO: 150226 - DNA, 249 bp, Enterobacter cloacae
atgaatttcacggtactccgcaggctcactgttcaccggaatgcccagctctttcaccacctggcgcagctgggtgtagatatcctgccactcgcgcacgcgcaggtagttgaggaaatccacgcggcactggcggcggaactggttcgaggagagcgctttctgctgctcgccgagatagttccacaggttcacgaaggcgaggaaatcggactctttgtcgtggaagcgacggtgtttttcatctga

SEQ ID NO: 150227 - DNA, 789 bp, Enterobacter cloacae
gtgcttctgggcttccagcaccatgcgcgccagacgcgggtcgaccggcaactggctaagctgacgacccaacggcgtcagtttatagaccgtcgcctgctcgtcggtggtaatggcccccaactcttccagcagacggacaccatcctgaatgttgcgtttgtccggcgcttccacgaacgggaacgccgcgatgtcgcccagccccagggcggtcatctgcaggataacggacgccaggttggtgcgcagaatttccgggtcggtaaactccgggcgcgacaggaaatcgtcttcggaatagagacgaatacagatcccttccgacacacgaccgcagcggcctttacgctggttggccgacgcctgagaaaccggctctattggcaggcgttgcaccttggtgcggtagctgtagcggctgatacgcgctgtgcccgggtcgattacgtatttgatccccggtacggtcagcgaggtttccgccacgttggtcgccagcacaatgcggcgtccgccgtgcggctggaacacgcggttctgctcgctgttcgacaggcgcgcgtacaggggcaggatctccgtatgacgcagatcgcgcttgctgagcgcatcggcggtatcgcgaatttcgcgctcgccgctcataaagatcagaatgtcgcccgcactttcgttgcccagttcgtcgacagcgtcgaagatggcctggagctggtcgcgctcggtatcatccgcctcttcgacaatcgggcgatagcgcacttccaccgggtacgtgcgtcctga

SEQ ID NO: 150228 - DNA, 750 bp, Enterobacter cloacae
atgcttcgagaagcgctccgggtcgatggtcgcggaggtgatgatgattttcagatccggacgacgcggcagcagttctttcaggtaaccgagcaggaagtcaatgttcaggctgcgctcgtgtgcttcgtcgatgatgatggtgtcgtactgcatcagcaggcgatcctgctggatttccgccagcaggataccgtcagtcatcagcttgaccatggtgttatcgctgacgtggtcgctgaatcgcaccttgtaaccgatgcagccgcccggctcggtttgcagctcttcggcaatacggttcgccacggtacgcgccgccagacgacgcggctgggtgtggccaatcagacctttcaccccgcgccccagctccatgcagattttcggcaactgggtggttttccccgaaccggtttcccctgcgacaattaccacctggtggtcgcgcacggcttccaggatgtcctgttttttctgactgacaggcagcttttccgggtaggtaattgccggacgtgcagcttcgcgcagcacaactttccctgctgcctgttcaatctctttcgccatctcctgataaatggcctgttgtgcatcaggatttttaaccttcttcacaccgtgcagacgacgcgcaaaccgctgtttatcgcgcagcatcagggcatcaagcctttgcaagagcatcgggaaggtgattttttggtgttctgtcatagcgttaatgggcagtgctctgccgggtaa

SEQ ID NO: 150229 - DNA, 525 bp, Enterobacter cloacae
gtgcaggcccgccactggcagccgggcgatccgctcgatcccgacagcacgatgggaatgctcatcgacgccgcgcacgccgataccgttcacacgtttattcgcgagggcgcccggaaaggtacgctgctgctggacgggcgggcacaatcctggccttctgcggtaggtccaaccatttttgtcgacatcgaccctgcctccccgctgtgccgggaagagattttcgggcctgttctggtcgtcacccgttttaaaaccgaagaggaagccttaacgctggccaacgacagtgaatatgggcttggcgcggcggtatggacacgcgacctctcccgcgcacaccgcatgagccgtcgcctgaaagcaggctcggtcttcgtcaataactataacgacggggatatgaccgtaccgtttggtggctataagcagagcggcaacggccgcgataagtctctgcacgcgctggaaaaatttaccgaactgaaaaccatctggattgccctggagcctcaatcatga

SEQ ID NO: 150230 - DNA, 1155 bp, Enterobacter cloacae
atgagtgtttttattgagtatgcgcttttgttttctttcttaactggatgcggtctatttttttctctcccctggtttggatttgttgatgacactgccgaatctgcatccaatcataacaactccatggattctcttaggttttttcttgcttcttttgtattcatcagtcatgaaatcggatttttctattactttaccgatggtaaatttacccaccaatattcaggggtgggtatgctatcacatgttggggttgccttgtttttctcaattacaggatatttattctggagtaaaattaagaaaggaaatgttaattggatatctctatataaaggcagatttttcagaatcgtacccttagtatggtttaactctataattatcataatcattgtttgttttatatctggggaattcccaaatataaaagccttaaattggtttgattttataaataatcatcgcccggacttcacctcacacagagaaacatttatgttcacagcaggtgttttttggacgcttgctttcgaatggggcttctacttcgcgcttcctgccttatcactgcttgcgaataaatcctttgaattcagtatgcttttcttattttttcttgtttacgtctctggatacataacattcaaccttccattcaacttccttttgttttttgcgataggaatggttacatcagatgttgcagataaaattaagctgaaaaagcaatatttcgatttcatcttccttttatctctaatttccttattattttgtgaagataaaatttaccgagttgactctttcactaatgctcttctgtttttaataatgcttagtgtggctaaaggtgctgatttatttggattacttagcataattggattcaggaggttgggagtcgcaagttatagcatttatgtaatgcatgctgtcgttataatgtgcgcatttatgtcatttaattcactcggcattttaaaaaaccatccaattgcaataatgctacctcttagcgttttcgttttgtacatttcgctaataacatataatctaatagaaaaaagatttataaggcttggccgagggattgatattaatacgccaccacctacagataaaattgcagacaaattaaagcgattttga

SEQ ID NO: 150231 - DNA, 1098 bp, Enterobacter cloacae
atggctcttatacttttggccgcaaacaacgcacaaacagtgctgtcggcaggaataagttcttcggcaaccacattgaccgttaacacgggcacaggggcactattcccggcccctgtctcaggaaccagcttttataagttaacgctggttgatgctgcgacaggacaactgactgagatcatgcacgtcacagcgagaactggtgacgtgatgacagtcctgagggctcaggaaggaactacggcccgggcatggtcggcaaacgatattgcggcaaacatgctgacatctgggtcattgtcattttttgcacagaatgaaagcccgacatttactggagcacccttagctcccaccccatctcaggcggataattcgacaaaaattgccacaactgcatttgtcgcaggtgcaataacggcaaacccaggtcgactaatcaacgttcggactttcaccgcaagtggaacgtacacacccacatcagggactaaaaaaattagggttcgcatcgttggcggcggcggcgggggtggtggggctggagctgcgacatctgctggatatactggcgctggtcatggcgcaaatggtgggacctacggtgatacaggactaatcgatgccagcacgattaccactatcgcggttgtggttggagccgccgggactgggtctgccggagcaaccggaacgaatgggggtaattcatcttttggatcttacataactgctccagggggtgggggtggtggggcaggtgccgctggtcctcaagtaaatgcacttgttgccgatgcatctgctactgctgactgcacaggaacaaacgtgttagtaagcatccctggagaaggtgggctgggtcaaatgagtattggcagcacaactcaaaaccaaatcaagggagggcgtggtggttcttctttcttgggcaaaggaggcggagctgtaggtggaggccagacaccttatccaggggttggttatggagcgggtggggctggagctgcgacgaacaacgcctttgggacaaccgcagcagctggttcaaacggttcttccggtatagtaattgtcgaggaatacgcataa

SEQ ID NO: 150232 - DNA, 705 bp, Enterobacter cloacae
atgctggaaaatatcattaaatcttacctgtatacgcagtataacgacgatgatgatattcaggcgttcgtgtcggcctataacgcaatggcacaggaaatatacacctggatgctaaacgccaatcttcccgtattcgtaggaggatataacgtaggcgatcagctcaaatggatagccagagggatttatggtgttaagccacctgtgctggttagcggaaaaagccagacgtttggtgcctataactcattcgtttataaccagctgccatttaatgggtataaggtcgtcaacctgtcagagcaggtggttgtttccgatgacctgttcaagaggatcatgacatggaatttctataagggggacgggtactacttcacaattccgtggctaaagcgaaggattatgcgcttcctcactggcgcggacggcgttgacattgttaatgatcatcactggagtatttcagtccttttttctgattccggagccagcgtttcgatcattaaagggtttcgaaaacttactaattccggactctacaatgccagtcagttcaataccagagcatttaatcaaaatacaagtgtgctcattaaaagcaatgagtatgagtatgctgcattgtttaagcaggcctttgatagtggcctgctccacatgccattttaccagccggtttcagtaaccatcataggctga

SEQ ID NO: 150233 - DNA, 1044 bp, Enterobacter cloacae
atggcaaaaccggactggggagctctgcaacaccagttcctcgccgaccatgcaaaatccggtatttccccaaaagactggtgtgaagcgcagggacttaattacgccagcgcaaagcgctacatcaaagttacgaattatggtgcgaattcgcagaaagaaactgcgaagaaagttgcgaattcgcagatgggtaaagagccaaaaaaagctgcgaaagcagagcctgagaccgaagcaaggcctgccattgtagagcattatcatgcggaaaagaccccaggtgatttcggcatttctgaccagcaagccaaatttgctgagcatgtggtgaacggtgaaagccgaaccgaagcataccggaaatctgggtatgcaggggagggtgcggttgcgtgggcagcggcgtctcgcctgttaaggaatgttaaggtttcacgctacgtgcatcacctgcgcaatgagcgacagaagcgatactctgcagaactcgatgatgtgatcggtcagttgacagcaatcattaacgctgacccaaacgagatatctcaataccgtcgcgttaactgccggtactgctggggaagcgatcacaaatatcaatggcgagatatcgccgagcagctatccgctgagcgtaaggctgaatcggatggtgccgcgccgccagatacatccggcggaattggctttgtcgacaacgccgatccaaatcctgagtgccctcgctgtaatggcgaaggggtaggagagcctttctttgctgacactcgcgatcttgaaggtgacgcgcgctatctgctgcagggtgtgaagttgggcaagttcgggatagaaatcctgacggcggataaggatagcgcccgaaaagagctggcccgactaatcctcttgcggaatacaagcgagcgccaggctcagcttgatattgagcggcttgagctgcaaaacgagaaactcaagcgggagatcaatgtgctgaaagacggcgacaaggacaacgcgatcgtcgtacacaataccctgccgatacctggaagatga

SEQ ID NO: 150234 - DNA, 522 bp, Enterobacter cloacae
atgaatgtgattccactgaattacaaaggtgaagctgtgcgcttcaataccgatggttgggtcaatgtcactggcattgctgaaagatatggcaaacgcatagataactggatgcgcctggcagaaacgctcgaatacgtccgggctttagatgaggcgcttacgggcgaagaatctcaaattttacatccctcacaatcgaggtatgtaaaaaccagtagggctcgaaaggacaggggtggcgggacgtggctacatcccaagctttccgttgcgtttgcccgttggtgtgatgctcgctttgctgtgtggtgcgacttgcacattgatagcctgcttcgtggcgaactgactgagcaacagaagtttgagcaagcttgccgtattcacgatgaccggaaatcaaaagccagcaatggggcaagagagatggctcgctggagatgggataagccagcgattgaggccaatgtagaattctggcgtgaacagcttcagttgacgctggatattgccgtttga

SEQ ID NO: 150235 - DNA, 474 bp, Enterobacter cloacae
atgctgacggcgctgcttaagcggtactggttacaactggcagtgctggcaattatcgcggcgatggccttggctattaaccactaccgcgacaatgccatcacctacgaagaccagcgcgataaagccactgagaaactcagcctggctaacgccaccatcgcagacatgcagacgcgccagcgtgatgtcgctgcgctggatgccaaatacacgaaggagctagccgatgcgcaaaaaaccattagcgatttgcgtcgggatgtcgattctggcgctaaacggctgcgcgtcgccgcaacttgcccagccgtgcgtaaagccacctccgccaccggcgtggatgatgcaggagcccccgaacttactccagacgctcgacggaattatttcgatcaccgagacggaatcgccaccgtcgacaaaatgattcacggcatgcaggaatacatcaacacgcagtgcctgaagtga

SEQ ID NO: 150236 - DNA, 294 bp, Enterobacter cloacae
atggccgcatttagagacttcagtgcgacggactggttatttttcgcaacgatggtgatcgcatggttttacctggcagccaaagcgcatggctggtttattggttttctgtttcgccgttgttggcgctggtggaaccggaaagacgagaaaaccctagctatggattcgttttacgaggcttttgatctggctgatatcaatcctggggatagcatggtgatcaccacccatagtggaatgacgatccgcattcatcggcccgaggctaagcgcgacgtaaaaccgctttga

SEQ ID NO: 150237 - DNA, 633 bp, Enterobacter cloacae
atgagggccatacaaacaattttactcgtcagtcttttgcttagtggctgcgcaacagagttagacaataaaataagaagcgttgaccaagcgtctacaatgcaaactaaacgagactacctcttaagctattcagagcaaaagggctattctgctactgctgcaagagcaaaatttctcaaatatggctctgaagatgaagcgctcttgtcgcgcctgattgaaagttgcaaagcaagcgatcgcagaagctgcgtccaaaagttctacgagaaagctgcgaatgatgctgagcagcaaacaagaagcaagtgcttttcagatgaagtttgtaagaagaatttagtaatcgaagagagcacgactgagctcaacgataaatattaccaggttgtttactataaccactatcaacctggtgatgctgatcgtcttgcaagaatggtatgcagcgcgatatcgaataaccaaaagtcaggaatgccatttgaccaggctgaatccgtagtaagaggaataagcggagtagacccagtaagcagagaaatgcttgttggtgtaggtaatgcatgctggaacctcagttattatggattcaaggatccattatcagcgttgcgaccattacgctaa

SEQ ID NO: 150238 - DNA, 432 bp, Enterobacter cloacae
  misc_feature (343)..(352): n is a, c, g, or t
atgtcatggcaatacttcaaacagacttatttagttaagttctggtcacctgttccggccgttatcgcggcaggcattctctctacttattatttcggcattaccggtaccttctgggccgtgaccggcgagtttacccgctggggtggtcaacttctgcaactcgctggcgtgcatgccgaagagtggggctactttaaactcattcacctggacggtactccgcttacccgcatcgacggaatgatgatcatcggaatgttcggcggctgtttcgcggcggcgctgtgggcaaataacgtcaagttgcgcatgcccaaaagccgcatccgcattatgcagnnnnnnnnnnaaaagccacatccgcattatgcaggcggtcgtcggcgggattattgccggatttggtgctcgcctggcgatgggctgtaa

SEQ ID NO: 150239 - DNA, 975 bp, Enterobacter cloacae; identical to SEQ ID NO: 140510

SEQ ID NO: 150240 - DNA, 1515 bp, Enterobacter cloacae; identical to SEQ ID NO: 140571

SEQ ID NO: 150241 - DNA, 240 bp, Enterobacter cloacae
atgcctcgtcaaccagatattcgttccgcttttattgcggccatacagcaaaacccgaagggctatctctgcctgcatacaggcaaattcatcgccgaactgcaggagaggcactggcatttcagccaggaggatgcaaattcatggatcgagcgataccagccggacttcgccgataagacaacaaacggaagtgagaaccgatactggatcctgcgtaacatggggaggatattctga

SEQ ID NO: 150242 - DNA, 1983 bp, Enterobacter cloacae
atgccacacctgcataccgcatgtttacgcccgtcacttctggcgctggcgattgtcagtaccctgccgggcgtcgcgtttgctgccgcagatgaaataaccgtcaccgcgaccggcaacgcccgtagcgccttcgaagccccaatgatggtgagcgtgattgacgccgctgccccggaaaaacagaccgccagctctgccgccgacctgctgcgtaacgtgccaggcctgacgctggacggcaccggccgcaccaacggtcaggacgttaatctgcgcggttatgaccgacgcggcgtgctggtgctggttgacggcgtgcgtcagggtaccgacaccggacacctcaacagcacgttcctcgacccggcgctgatcaaacgtatcgaagttgtgcgcggtccgtcggcgctgctctacggcagcggtgcgctgggtggcgtgatttcctatgacaccgttgacgccagagatctcctggaaccgggcaaaaacagcggttaccgcgtgtttggtaccggtgcgacgggcgatcatagcctcgggatgggggccagcgcctatggccgcaccgatacgcttgacggtctggtgtcatggtccagccgtgaccgcggcgatatccgccagagcgacggcaagcgtgcaccaaacgacgaatccattaataacatgctggcgaaaggcagctggaaaatcgacccggctcagacgttaagcggctccctgcgctactacaacaacgccgcgcaggagccgaaaaacccgcaaacccccgatgccaccagcagcaaccccatcaccgaccgctccaccatccagcgtgatgcacagctgggttaccgtctggcgccggaagggaacgattggctgaacgccgatgcaaaagtttactggtcagaggcgcgcataaatgcccagaacatcgacagcaccggtgagttccgcaagcagaccaccaaaggcggcaaagtagaaaaccgtacccgcctgtttggcgacacctttgcctctcaccttttgacctacggcggggaatattatcgtcaggaacaacgtccgggtggcaccaccaccggcttcccggaggcgaaaatcgactttagctccggctggctgcaggatgaaatcaccctgcgcgatctgcccgttaccctgctgggcggcacgcgctatgacaactatcggggtagcagcgagggctacgacgacgtggatgccgacaagtggtcctcccgcgccgggttaaccgtcagccctaccgactggctgatgctgtttggctcttacgctcaggcctttcgcgccccgaccatgggcgagatgtataacgacgccaaacacttctccatcggcagtttctacactaactactgggtgccaaacccgaacctgcgcccggaaaccaacgaaacgcaggagtttggttttggcctgcgctttgacgacctgatgctcgccaacgatgggctggagttcaaggccagctatttcgataccaaagccaaagattacatctccaccaccgtcaattttgccgcggcgaccaccatgtcgtacaacgttccgaacgccaaaatctggggctgggacgtgatggcaaaatactcggctgacctgtttaacctcgatctggcctataaccgcacgcgcggaaaagataccgataccggcgactacatctccagcatcaacccggacaccgtcaccagcaggctggatattccggtggcgcaaagcggcttctccgtgggctggatcggcacctttgtcgatcgttcaacccatgtcagcagcagttacagcaaacagccgggctatgcggtcaacgacatctacatcagctataagagccaggagcagctcaagggcatcaccaccacgctggtgctgggtaacgccttcgacaaggagtactggtctcctcagggtattccgcaggacggtcgtaacggcaagatttttgtgagttatcagtggtaa

SEQ ID NO: 150243 - DNA, 240 bp, Enterobacter cloacae
atgcctcgtcaaccggatattcgtgctgcttttattgcggccatagagcttaacccaaagggctaccgctatctgaggacagatagcttcattcagaagttgaggggctttaactggcactttactaggggtgatgcaaattcgtggatagagcgcaaccagccaggtttcgctgacaaaacgactgacggaagcgacaatcgctactggatcttgcgtaacatggggagggttttctaa

SEQ ID NO: 150244 - DNA, 648 bp, Enterobacter cloacae; identical to SEQ ID NO: 140488

SEQ ID NO: 150245 - DNA, 210 bp, Enterobacter cloacae
atgaacctaacgatcaagcagatttatgacctggcatctttcgcagggctgatgtgtagctcaccagaagaatctcaggttgatgaggaaacagaaatcagtatcgacaacggcgtaattcatggtgatgacggtcaggttgaatatgaaggtttgcgggcttgctgtgcagattatccggaagaaggctacatcccactcgaagactga

SEQ ID NO: 150246 - DNA, 393 bp, Enterobacter cloacae
atgagcgatatgccagctgtatttggtcgcgaagagcggaaggccagaaaagaacacaaatgttgtgaatgtggctgccaaattaaaccaggggataaatatcaatattcgcacggagtttgggatggtagagggctcagtttcaagcagtgtaatgactgttgtgacttggctgaagccgcgcttctttcttgctttgatcctgaagaggggccttcgtttacagggctgcgcgaatggtttcttggacattccacgattgattttaacggagaagaacttgttaaaagcttcgctgaagagctcgacgtgaatgaaagccagatccgaaaagtattgcgattgggtaccgacaatgtttcagctaattcaacggggtcagatttacgctga

SEQ ID NO: 150247 - DNA, 426 bp, Enterobacter cloacae
atggaatacagcaagttgagtgatgcagatataaacggcctagtaatggatgcgctatctgatggcaatcaggtccatcgctgcgacaagggttcggctatcaagctgctgcatcaggtaaataccgttgagtttggagagcatatcgagcgggaagaggtctatgccaagttcgacccatgtaacaacccggcggacgcatggccgataatttctgcaaaccgaatcagtgttgaatacgattccgagcatcaatgtgatgttcctgctgagtgggttactgcttacggaattgacgatctaaaggtgtatgtggtggctcatcagccatgcgataaagccctgcgctcggcaatgatcgtcttcctcatgatgcaggagtcagccaatgttccagctaattcaacggggtcagatttacgctga

SEQ ID NO: 150248 - DNA, 543 bp, Enterobacter cloacae
atgacgcttttagcaagtttgatagagaaacttccatccgtgggtggctggccgaaacctctcgatagcgctgacttacctcttgcaggaaacgaactcgttacctcttggcgatggagtgtggaaagcaatgaattcatctcctgcacttatggagatgaaacggttaccaaggctcagtatgaagttgcactttccggtcacaaaaatccatggaatggactattccctatcccaccaggcacagaggtggaagttcattttgacggcgatgatagtcgaatttggactcctttcagagttgagtatatgtgcggcgaggtggtggttcttcacgattacagaattgacgacgttgacgcatatagacataaaactctcagctttcgccccgccattacagaggaggaaaagaaacgtgccgcattggtagaaacagttgatggcctgattgatggattcatgaaatcgtcaggcggcgattattcaaaacttggcgcggtggtagtcgattatctctcgctgttgaaaaaactcgaatga

SEQ ID NO: 150249 - DNA, 1113 bp, Enterobacter cloacae
atgtccctgttcacggtaaaaacgcgggtatatagcggagccgacagtttaacctggctcagaacgctccacggtaaaaagatctggattgtctgcgatggttttctggctggcagccccaatctgaaaatggtcaccgacaatatccacgaggacaacactgtcggtctgtttagcgatatcatccccgatccgcctgtcgctacagtggcggctggtattgaggctatgagtgcgatacagccggatgtagtgatcggtttcggcggtgggtcggcactggattcagcaaaggcgataattttctttggccgcaagcttggcattatggttgagaacttcgttgcaatccccactaccagtggtacgggttctgaagtcaccagcgccagtgttatcagcgatccggccagcagaataaaatacccgttgtttgatgacagtctttaccctgatatagcgcttcttgaaccgcgactggtgctaagcgtaccaccggcagtaacagccaataccgggcttgacgtactgacgcatgcacttgaggcatatgtggccaaaggcgcaacggactttactgatgcactggcagaaaaagcagcacaactggtcatcagtttcctgcccgtcgtatatcgggacggtaatgaactggaagctcgaacccggatgcataatgcttccacgctggccggtatcgccttcagccaggccgggctgggaatgaaccatgccattgctcatcaactgggtggtcaactgcacataccccatggacttgccaacgcgctgttgctgtgccacgtgatccggttcaacagtcgtgatttagccgttcgtgcaaaatatgcacggttaagtaaactgtgtggcctggcaaacttccagtcggcggatgagtattgtgtcgcgagtctaatcacccatctgcacaatctcatgaagcaggttaatgtcgcagacaaccttagcgcattaaacatcactcgcgaacaggtaacgactgctgaaaatgccatgattacagccgctttacaagatgcctgtctatccaccaatccggtaaccgtatcggatacggatatacgtgctattcttagagcgattatatag

SEQ ID NO: 150250 - DNA, 1395 bp, Enterobacter cloacae
atgaataccactgaactggagaatatgatccgcaatattcttgctgataatctgaaagggaccgctactgcccctggaaacattcagcacactatcttcgctcgtgtggaagatgctatcactgccagctacgatgcctataaaaaatacatggcagaacctctggcacttcgaaccaggatcattacagccctgaaggaagagctggcaccctggatcaaagagatgtccgaacgcgccgcagaagaaaccggcatgggtaatgcacccgacaaaatcagtaaaaacactgcggcactgaataatactccggggattgaggatttgaccacaagcgccctgactggtgatggtggcatggttttattcgaactatctcccttcggagtcattggcgctatcgcccccagcaccaatccgaccgaaactatcattaacaacaccatcagtatgctggccgctggtaatgctgtctacttcagcccccatccgggcgcaaaaaaggtatccttgtggcttattgaaaaaatcgaagacatcatttatcgggtaagcgggatccgcaatctggttaccaccgtagcagagcccacctttgacgctactcgcgaaatgatgtcagatccgcgcattgctctgcttgcggttacaggtggtccggcaattgtcaatatggccatgaaaaccggtaaaaaagttatcggtgctggccctggtaacccccctgtactggtggatgagactgcctgtccggtcaaggctgccaaagatatcgttgatggtgcctctttcgatcataacgtcctttgtatcgccgaaaaatgcgtcatcgtagtagatagcatcgccgatcgcctcatggataatatgcagaaaaacgatgcctttctggtaaaaacgcccggtgatattgccagactgcgcaaggtcgttatcaatgacaaaggagaagcaaacaagaaactggtaggtaaaagtccggcagtgatcctgcaggctgctgatctgaacacatcaacagcaccgcgactgattattgtagaagtggagcaggacgatccgctggtgatggtcgaacaattaatgccagttctgcctgttgtacgggtcagtgatttcgagacaggactggcactggctctgaaggtggaaaacgagcagcaccataccgccataatgcattctcagaatgttacccgtctgaacctggctgcgaagaccatgcagacttcaatatttgtgaaaaatggcccttcctatgccggactgggcataggtgccgagggttttaccacctttactattgcgacacccactggcgaagggacaacatcagcacggagcttcgcccgtaaacgccgttgtgtgctgaccaatggattttccatccgctaa

SEQ ID NO: 150251 - DNA, 510 bp, Enterobacter cloacae
atgccagaacaggatatagcatcccttatcagcgagcatcgcatattgctggaggaggccgtccgcgaagttatccgtcggtacccgcagtcactttcgccatcggaaaacttcagtaagcacattttcagttcagagcagttgaaaaacattatcgatactgttctggcagaggcgtggcagcaaagcgccatggtagttatcaccttgtgtgacgaaaaaggcgaatgtgttctgacttaccgcatgccaggtacatcggcagaagatattgctgtcgccgggcgtgcagccgaagccgcggtaagtttcgctaaagaaaataaacagatcattgaccccacactacataacgttattggcgggattgatacctcccgcggaggctgtgtcgtgtattgtgcggggaaagtgatcggcgggatcggaattagcggcgcatccgctgaaaaaaatcatcttattgcattacgggctgtcgacagccttaaatcagggagtcaaaaatga

SEQ ID NO: 150252 - DNA, 279 bp, Enterobacter cloacae
atgcaactggcgaaagtcgtagggtcagtggtgtcgacgcaaaaatctgcgtccctgacaggtaaaaaattgatggtcgttactttagttaatctggacggctccacaccgcttttccaggaaaacacccaggaggttgctgtggattctatgggagcaggtgaaggtgagctggttctggtcagccgtggctcttcagccagaaagatctttccggaaccaaatcaggccattgatcttgccatcgtcggcatcgtcgataccatcgaccggttttag

SEQ ID NO: 150253 - DNA, 480 bp, Enterobacter cloacae
atgctggacatgatcgtctcaagggtcattacacttttacagggaagggaaagccggagtttacgggtgacccaggccgagctggcggcaggcttatcaaaaacggtttatttgcataatgcacaactgatattgcccttacctgatctggcttttattcagagtctggttgcctatgatcaccaccacccggcagtgtcgactgtcctggaagcatgggcatatggcgtaaggttacaccttcagatccaccagcaattactgaccgcactgccactgcgagagttacgccgccttccggtcacactcactgaccatatgagtacaccggtgaaactggcagctgcagctggcctcagctatgccagcgttattcactggcacgattgctgggttttactggaaaagcagacgctgattaccgccctcgcccgggaagtaatggaaagacagaacatcaaactaatatggcaggagtaa

SEQ ID NO: 150254 - DNA, 636 bp, Enterobacter cloacae
atggatcacgatctgatcacaaaactgaccggtcaggtaattgcgcagatgcggcaacgaacgattccgctgggtatatcaaaccggcatgttcatttgtcggcaaaagattaccagagtctgtttcccggacagactctgaaaattaaaaagccccttggtcagcccgggcaatttgcggcagagcagaccgtttccttaatcggtccaagaggtcagttgaaaaacgtacggatactggggccgttgcggggacaaacacaggtggaaatctcgtacaccgatgccaggcaaattggcctgacggcgccactccgcctgtcaggtgatctgaccggaagtgtctctgtcacactcaaaagcgaggccggagaaattaatctcaccgagggagtaatcatcgctcgcagacatattcacatgtcgccactggacgctgcgatatttggcgtaacacaaggagaaacggtgaaagtcgggattgagggcaccgatcgaaaactgatttttgatgatgtctgtatccgggttgctgaggatatgcgtcttgaaatgcatattgatactgatgaagcgaatgctgccggtattgatggaggccaggcagtggcaagacttctcctgacaaaacgctaa

SEQ ID NO: 150255 - DNA, 867 bp, Enterobacter cloacae
gtgcaacattctcttggccttatcgaagtctcgggtatgtctctggcgataactgttgctgatgtgatggcgaaaaccgcccagatcagactgatcggcgtggaaagaaccatcgggtctggctggatgctggtgaaaattgcaggcgatgttgctgcagtgcgtacggctctatcggccggagaagaaacagccagagcacaccagggatttgttgcctgcaccacaatcgcccggccagcgaaaggaaccggtgaactggtttcaacaactaaaccgccccgagctgagcctgttcagaagataaccgttctcccggccgttgccctcacggcatccgccgcccataccacaaccggacctgaatccgttcaggaggatccggacgcagaaaaggcagtccccccgatcagggaggctgtcgagggaagcacaggcaatatcattcaggtcgatgctatcaatgatcctgtggaaacggccagggaaatcagtaaaccaaacgcttcagcaaagtctcctcctgctgaatatggtgaaaaacaatctgtggcgacggtcaaagcatttccggtcatgggagatatcgctactgacctcgatattccgacagcgtcagcgagatccgttgccgttgcgcagcaggttaaacccggaatatctctgcatcagtttcattatcaggaaaaacctgatgatgaaactgcagatgcgggtagccaacagacaggtgaaacaaaacaggctgtcgccatatcagcaaaattactggtgacatgcaaaatctgtggagatccttcatgtccgcgacataagggccagccacgcagtagatgtattcacaatcagaaatcggtattgaggtaa

SEQ ID NO: 150256 - DNA, 291 bp, Enterobacter cloacae
atgaacaatgcgcttggaatgatcgaaacctatggactgattggcgccatcgtaggtgcagatgccatggtcaaatcggcaaacgtccagttggtgggttacgaaaaaattggttccggcctggttaccgtcatggtacgaggtgatgtcggtgcggtaaaagcttcggtggaggcgggctccgcagctgcagccggtgtgggccaggtgaaatcaactcacgtcatcccacgtcctcataatgaggtggaaacgctgttgccggtttatcagaccgcaacagccgagtga

SEQ ID NO: 150257 - DNA, 828 bp, Enterobacter cloacae
atgaacacaaccttaccgacattaaagcaggagtgccttgccgaatttctgggcaccggactctttctgtttcttggtatcagttgcctcgcagcgatgaaactggctgccgccagtttcggtttgtgggagatctgtattgtctggggactgagtgtcgcactcggtgtttacctcactgcgggaatatccggagggcatcttaatccggcagtcactatcgcattgtggcttttcggcaatttcagtgcccataaggtcttaccttacatcctgtgccagattatgggcgcttttggcggcgccatggtggtctacctgctttaccacaatctgtttattgattatgagctggcacaccatattcaacgcggcagcatggacagccttgcacaggcgggtattttcacgacgtttccccatccggaaattaatctgcttcaggcttttgccagtgaaaccatcggaacgctgacgctgatgtgcctgatcatggcgctgaccgacgacggcaacggtgttcctcgcggtccgctggcgccgctactgattgggatttccgtggccctgattggggttgccatcggtgcactgacgggttttgcgctgaatccggcaagggatttaggtccccgtctgttcagctatctggctggctggggtagtaatgctttaacaggcggacgtgcattcccctacttcattataccactcgtcgcaccgatcttcggagcctgccttggcgccgcgctgtatcgcggtctgaccaggttaccacttctgccgggcaaggggggccagggaaaaagtctgtcgctgccggaataa

SEQ ID NO: 150258 - DNA, 963 bp, Enterobacter cloacae
atgctgaatatcagcatgaagaaaagaaataaaggtattgacatggcggaaattgattacgcgcagactggcaccgtatttaatatacaaaaattctccttacatgatggcccgggaatacgcaccattgtattcctgaaaggctgttatctggcatgtaaatggtgcagtaatccggaatcacagcacactgaaccggaaatattttactacgatcgcaattgtatccattgcggacgctgcgtatccgcctgccccgttggggctatcgatgcctcacgtcaagggcttattgaccggaatgcctgtattcattgtggagcttgcgctgaggtctgcccggctggcgcgatggttcagtcaggtaagagaatgtcggtggtggaggttatagacgaactgcgtaaagatgagacgcattatcgccgctccggtggaggtattacattgtccggtggcgaagcactggctcagcctgcatttgcagcagcattgctggccgcctgcaaagccagaggatggcatacagcgatggaaaccaccggaatagcctcccgggccgtgctggaaaaggttatcccattgcttgatatcgtattgctcgacatcaaaaccttttatagtgaacggcataaggaatttacgggacatccgaatgagacggttttacgtaatgcactgacaatttcagaactggcaaagaatgtcgccgttcggatcccggtaattcctggatttaatgatgatgaacaaagtatcgaagctattgccagatttgttacgcacatgaaaaatgtatcgcgattacatttattgccctatcacaactatggccagaataaatataacctgcttggcagaacgtacgacatgattgaaataaaaccaccggaagaaagtcgtatgcataaatataaagatattgtgacatcccttggaatcgactgcgtcatcggtgggtaa

SEQ ID NO: 150259 - DNA, 2544 bp, Enterobacter cloacae
atgagccaattatcacaggcttttggtgaaccaactgaccgaattcgtgccttacgggaacaaatccttgatacgaccccctgcattgagacggatcgtgcccgcctgatcaccgagtcctataaggaaacggaatccctgcccatgatcatccgtcgcgccaaagcgcttgagaagatccttgcggaattgccggtcaccatccgggcaggtgaactaatcgttggtagtctgacagtcactcctcattccacacaaatttacccggagtactcaaatcgctggcttcaggatgaattcgatcgtctgaatctgcgtaaaggcgaccgttttaccataaccgatgaagcgaaacagcagctggatagcgtatttggctactgggaagggaaaacaacgaatgaactggctacatcctatatgttgcctgaaacgcttgattgcatggcagaaaatgtcttcactgtcggcaactattactttaatggcgtcggtcatatagccgtggactacgcgcgtgttctcgctcgtggatacaaaggcatcatccaggatgttgttgcagcaatggccagcgctgataaaaaagaccccgcttttctgaaaaaagaatcgttctacaaggcggtcattatttcttgtaacgcagcaatcaattttgctcatcgttacgcggttaaagctcgtactctcgcggaacaggcctcaccagtccgtaaaaaagagctgctgaaaattgctgaaatctgtgacaaagtacctgaaaatggtgcaagtaatttctatgaagcctgccagtcattctggtttgcccatgccattattcaacttgaatccaacgggcattctatctccccggcgcgtttcgatcagtacatgtacccttacctggaaaaggacagctccctgagcgaggaacaggcgcaggaattgctggattgtctgtggctcaagttcaacgacgttaacaaggttcgtgatgaaggctcgaccaaaggttttggtggctatccgatgttccagaacctgatcgttggcggtcaaaccagcggcggacaggacgccactaacagactgtcctttatggccatgacggctaccgcccatgttcgtctgcatgaaccttcactgtcagtacgtgtctggtcaaaatctccggacgatttgttactgaaagcctgtgaagtcagtcgtcttggtatggggatcccggcctattacaacgatgaagttgttatccctgcattgattaaccgcggcctgaccctggaagatgcgcgggaatacggcatcatcggctgcgtcgaacctcaacgtccgggaaaaacagaaggctggcacgacgccgcgttctataacatgagtaaggtactggaaataaccctgaacaacggacgctgcggggataaacaactcggccccaaaactggtgagctggattcattccagagtattgaagacatcattgaagcttatcgtaaacagaacgaatattttgtctatcatctggcaatggccgataacagtgttgaccttgctcatatggaacgggcccccctgccgttcctgtcctgtatggtggatgactgtatcagtcgcggtaaaagcgttcaggaaggcggtgcccattataacttcacgggtccgcaaggtgtcggcgttgccaatgtgggcgactcgctgatggctatcaaacgtctggtatttgaagaaggccaattatcgctgggtcatctgaaagaagcactggatgccaatttcggtgtatctggcgggatagagaaacctgacactatagccactgaaagtacgccgaaacaggatgcaacctatgaactagtccttgaggccgtgaagaaagtgctgggcgaaagcggcgcacttgcactcacctcactcaatagcaacccaccggagcctgtcaaaggggctaatgccgggctgacagcagtgcgtcagttactcattaatggcgcccccaagttcggtaatgacattgacgaagtggatatgctggcccgtaccggtgctgaaatttactgtcgcgaggtagaaaaatacaccaacccacgtggcggtttattccaggctggcttatatccggtatccgctaatgtggctctcggtgagagcgtcggggcaactccagatggacgtctggccggccagccgcttcccgatggggtgtcgcccagcaggggcatggatacaaaaggtccaaccgctgccgccaactcagtagccaagctggatcacttcctggcctcaaatggcacgctgtttaatcagaaattccatccggcagctctgaaaggcgatgagggattataccatctggcggccttactgcgtggttatttcgatcagaaaggcatgcatgttcagttcaatgtgatcgaccgtaatacactgctggcagcacaaaaagaaccagaaaaatatcgtgatctggttgtgcgtgtggcgggttacagtgcgcaatttgtctcactggataaaagcgtacaggacgatattatcctgcgaaccgaacatgtcttttaa

SEQ ID NO: 150260 - DNA, 816 bp, Enterobacter cloacae
atgagtagcgataacctcgtagaaaatattatcgccgaggtgctcggaaaagtcggggatttgaaaaccccgtccgccgcatcccagccggggatatctcagcaggagcccgctatcccaagaaaactttgcggtttaaccgagttcgtcgggacggcaacgggcgacagtatcggccttgtaattgccaacgttgacagcgccttgctggatgccatgcatctggagaagaaataccgttcaataggcatccttggtgcacgtactggtgcgggcccacagatcatggcggctgatgaagctgtcaaagccacaaatactgaagtcgttgcaattgaactggcccgcgacactaaaggcggcgcaggacacggttcactggtgctgttcggtggtcaggatgtttccgatgtgaaacgggctgtggaagtggcgctaggcgaacttgagcgtactttcggtgacatttacgccaacgcagcaggtcatgtggaactccagtacaccgcacgcgccagctacgctctggaaaaagcatttggcgccccccttggacgcgcctgtggcgtgattgtcggtgccccggcagcgattggtgtgctgatggcagacacggcgatcaaatctgccaatgtggatgtggtggcttacaactccccggcaaaaggcaccagctttactaacgaagttattctgattgtttccggtgactccggtgctgtgcgccaggcggtgcgttctgcacgtgatgtaggtctgactctgctggaaacaatgggtggcaaagcgccttcagccacaaccccctatatctga

SEQ ID NO: 150261 - DNA, 303 bp, Enterobacter cloacae
atgcaacaagaagcgttaggtatggtcgagaccaaaggtctgactgcagcaatagaagctgctgatgcgatggtcaaatcagccaatgtcgtgctcattggttacgaaaaaattggttctggtctgataacagtgctcgtacgcggagatgtgggtgcagtcaaagccgccaccgatgccggttgtgcctctgctcgtcagatcggcgatgtcatcgctacccatgtcattccacgtccgcattctgatgttgaaaaactcctgccagcaggccttaaaccatctgaaggagttaaacaatga

SEQ ID NO: 150262 - DNA, 861 bp, Enterobacter cloacae
atgtcaatcgataataccaataaagacactactgttaccgaaaataaacgccttacctctggcgaccttagaagtatgtttttaagatcaaacgtccttctggcttcagcaaactttgaacgtgtacagaatctgggtatttgctatatcatgattcctgccataaaacggttgtatgcgccgggtccggaaagaatagaagctcttaaaagacatctggagtggtttaatactcagccctactgcgcctcccccatattgggtgttgcggcggcgatggaagaggaaaaagcaaacggtgcacagattgaagggaatagtatcagtggtgtaaaaatcggtttgatgggtcccttcgcaggtgttggagatcctattttttgggggactatcagacccgttcttgctgccctgggagcctctcttgcgttaaccggaaatatccttggcccaatcattttttttgtattgttcaacgcaatccgtttagcactgaaatactatggtttaaattacggataccagaaaggaagagaaattcttaaggatttgggtggggatcgccttcagaaactgacagaaggtgcatcaattctgggactgttcgttattggcgccctggtttgtaagtggacgacaattaatgtaccgattgttgtatcccgtgtcacacaggcagatggccatgtcacagtaacaacgctgcagaacatcttcgatcagttacttccgggaatgcttcctttggctcttacattgttagttgcaagattgctcaggaagaaactgagtcccctactattgattatgcttatttttgcattcggtattctgggttactgggctggaatattggcttaa

SEQ ID NO: 150263 - DNA, 738 bp, Enterobacter cloacae
gtgctggacgaagctcagacccaccgcccacttgtggtttgtacgctggtcgggatcgttctgggtgatattaaaaccggtattatcttaggcggtacacttgaaatgatggccctgggctggatgaacgtcgggcttgcaatggcgccagataccgccattgcttccgtcatttcaactatcctcgtcattacgacccatcagggcattgggcaaggtattgccatcgcagtcgccctggcagcagcaggtcaggtcttaactatttttatcagaacgatagcggtattctttgtccacaaggcagatacctatgccgagtccggcaatattcgaggtatcgagttcatgcatatcagtgcgctgtcattacaggcattacgcgttgcactccccacgctggccgtactgatgcttgatgttaccaccgttcagaacgttctcaacagtatcccggaagtcgtcacaaaaggtctccagatcggaggtggcattgttgtcgttgtgggttatgcaatggttgtcaatatgatgaatgtcagacatttgatgccattcctgtttgcgggttttctgattgcggctttcaccaatttcaatctggttggacttggagggatggggttagttgccgccattatttaccttcaggtaaatccaagattttctgcggccagtaaagcggtaagtagcccatcgaaagcaaccttgtctgatgaagacgatctcgattcctga

SEQ ID NO: 150264 - DNA, 162 bp, Enterobacter cloacae
atgaagagggtcgtaaacaactcacgaaatccgtcagcgcaactcctgaagacatcgcgtcgtttaaaaaactgcatgagaaaggtgttcagcttgaactacggcaattaccctctgattccgcggttgatttttattctaaaattgaataatgaaggttaa

SEQ ID NO: 150265 - DNA, 969 bp, Enterobacter cloacae
ttgaaggatcagatcacgcatcttcccgacaacgcagaccgttccgtggcaaagcaaaagttcaaaatcaccaactggcccacctacaataaagccctcatcaaccgtggctccataactttctggctggatgatgaagctattcaggcctggtatgagtcagcaacaccttcttcacgaggcagacctcagcgctattctgaccttgccatcacgactgtgctggtcattaaacgcgtattcaggctgaccctgcgcgctgcgcagggctttattgattccattttttctctgatgaatgttccgttgcgctgcccggattacaccagtgtcagcaggcgcgcaaagtcggttaatgtcagtttcaaaacgttcacccgaggtgaaatcgcgcatctggtgattgattccaccgggctgaaggtctttggtgaaggcgaatggaaagtcaaaaaacatggccaggaacgccgtcgtatatggcgaaagttgcatctggcagttgacagcaacacacatgaaatcatctgtgcagacctgtcgctgaacaatgtgacggactcagaagccttcccgggtcttatccggcagactcacagaaaaatcagggcagcagcggcagacggcgcttacgatacccggctatgtcacgatgaactgcggcgtaagaaaatcagcgcgcttatccctccccgaaaaggtgcgggttactggcccggtgaatatgcagaccgtaaccgtgcagtggctaatcagcgaatgaccgggagtaatgcgcggtggaaatggacaacagattacaaccgtcgctcgatagcggaaacggcgatgtaccgggtaaaacagctgttcgggggttcactgacgctgcgtgactacgatggtcaggttgcggaggctatggccctggtacgagcgctgaacaaaatgacgaaagcaggtatgcctgaaagcgtgcgtattgcctga

SEQ ID NO: 150266 - DNA, 603 bp, Enterobacter cloacae
atgaaaacgtcaccgtggaacaaagactgtatcatcggtcaaaaaaggccgcttcagatatctcatatctgggggatccggattcgacttgagctggaaggtaaaacacgcgatcttgcactgttcaacatggctttggacagtaagctacgaggctgtgacctggtcaaactcaaagtatcagatgttgcatatggcagttctgtttcaagcagagcaacggtgttgcaacagaaaaccggtagtcctgtccaatttgagataaccaaaggaacaagagaagctgttgctgcattgataaagcttggtaatttgcatagtaaagacttcttgttccggtctcgggttggtacttgccaacacatatcaacccggcaatacaaccgaatttttcatgggtggatagcaaagcttggtctcgaaaattcactttacagcacgcattctatgcgaagaacaaaaccttacctgatctacaaaaaaactaagaatctcagagtgatccaactccttctgggctacaagaaactggaaagtacagttcgatacttgggcattgaagtcgatgatgcgctggagatatctgaatcgatcgaagtctaa

SEQ ID NO: 150267 - DNA, 882 bp, Enterobacter cloacae
atgagaaacgcccacgatatacttgacaatattgtatatgattttgccaatgccacaggtctgggttctgttgccgtagatctgaatggcaaagagatatccccatggtataattttacttctttctgccagcaggtcaggcaaatcgcagcttaccatccctattgccaacaatgcgatcgctgtggtggttttgaaagtacgaaagcaaaacagattcaatgttatcgctgtcacgcaggactcgtagatttttccattcctattttcattaacggtaatctgacagggtttgtttcttgtggacaagcacgtgttgcagaaaacttaccattaccaaaaatagtggaaaacgataaaaacttaccaacagaatcaaaacttatcgaactatatcatgaggtgcctgaactgagcctgatgaaaataaagtctgctgcacagctcctgaaccttattatagagaactaccttagtaaggaatataatttacgtatagtaaaaaatgtcagtcctgttaaaaatcagaaactggagacattgggtcgacatcaggcaacaatggaaatgatactcaatcacataaatcagaatttctctgacaatctcaatcttgaacaaatggccagcaaagccaacctgagtatgttttatttttccagaacgtttaaggagttgacaggcacaggcttcactgcttatttaataaataaaagaatgacggaagctcattgtctccttgaacaaacaaactggagcattgaaaaaatagcacgaagtgtcggttataatgatgtccattatttttcccgtctctttaagaaaacgttcaataggtctccatcagaattccgaaatcattcttcaggcttttccatgtaa

SEQ ID NO: 150268 - DNA, 798 bp, Enterobacter cloacae; identical to SEQ ID NO: 86708

SEQ ID NO: 150269 - DNA, 432 bp, Enterobacter cloacae; identical to SEQ ID NO: 86707

SEQ ID NO: 150270 - DNA, 429 bp, Enterobacter cloacae
atgaccattaatctggtgcaattcactccgttcctgagtttcttagggggagtattgatcggctgtgcggcctggatattgatcctgttctgcggacgtattgcagggatcagcggcataatcggcggtgtgctctcacgaggctctcctgatcgtggctggcgtctggcttttctcgtgggcattatcatatcccccctcttgtatgctctcgtttacccgcttcctgcgatcgaggtttctgccccctggcctatcctgatcatcgctgggctgctggtcgggataggaactcgttatggttcggggtgtaccagcgggcacggagtttgcggtctatcgcgtttatccccccgttctctggtggccacactgacgtttatgggggttgcgtttatcaccgtctggctaatgggtttgcggatttag

SEQ ID NO: 150271 - DNA, 342 bp, Enterobacter cloacae; identical to SEQ ID NO: 86705

SEQ ID NO: 150272 - DNA, 861 bp, Enterobacter cloacae; identical to SEQ ID NO: 86704

SEQ ID NO: 150273 - DNA, 1668 bp, Enterobacter cloacae; identical to SEQ ID NO: 86703

SEQ ID NO: 150274 - DNA, 2133 bp, Enterobacter cloacae
atgaaaaatacccgtttctctttatcaccactggcaacggtgatgaccatgatgatcaccttacccgcgtttgctcaggctgaagacggccatgaggggcatcagaatagcgtggctaccctagacgatccgtcggtgatggtagttactgcaccggccatttctccattgacgatcgtgacttcacctaaaacaccgcgccagccggttccggccagtgacgggtctgattatctgaaaaccatcccgggtttttctcaaatccgtaacggcggaaccaatggcgatccggtttttcgcggtatgttcggttcgcgtttgcgccttttgaccaacggcagtgaaatgcttggagcctgtcccgcgcgtatggatgcaccgagttcctatatttcaccagaaagttttgatcttctgacgctgaccaaggggccacaaacggtactttgggggccgggtaactctgcaggaacagtgcatttcgaacgtgagcgaccttcttttgagaaagccggtattcaaggtgatgccagcctgctcggggcatcaaatagtcgttgggatcaaaatgcagatatcagcctgggaaatgagcaaggctatctgcgcctgatcggtaacaaatctcgatctgacgactacaaggatggtaacaaccagcgggtgccttctcagtgggataagtggaacgcggatatggcactggggtggacgccggataaagacacctggctggagctgaccgcagggcaaggcgatggcgaagcgcgttatgccgggcgcagtatggatggttcgcaattcaaacgcgaaagcctggggatgcgctttgaaaagtccaacatcggggacgtgttcgacaaatttgaagccagtacttattacaattatgccgaccatatcatggataatttctcgttgagatcacccggcagcatgttaatgagcggcatgggttcgtccatgggcgccatgcacgacagttcatcaatgagcatggggacgtcgtcggctatggacatgtcatcctcaatgaacacagcgagcagttcgagcatgaatatgagcatgcccatggctatgcaacttgatcgccggaccgtcggtggccgcatgatgggaacctggctgtggagcgatatcaaacttgaaagcggcgcagacatgcaacagaacacgcaccgtaataaagaaagcgatagctgggtgaaagatgctcgcttccgtaattatggcgtttttagtgagttgacttggacagccaccgatcaggataacgtcgttagcggtgcgcgtctggatcgtgtgttggtagataactttaccgacaccggccttgcaggacgcaacgatgtgttatatgccgggtttgcccgcatagaacactcgctggcagacatgccactgatgctgtatgccggtgtgggttataccgagcgtttccctgattattgggaactgttctctccaacctatgggcctggtggcaataccagcgcctttaatagtgtaaaagcggagaaaaccactcagttggatataggtgcacagtacagcaccaagaaactgaacgggtgggtgtccgcctacgttgggcatgttaacgactttattctgttccgttatgatcccaagaatgcgcgcgttagcgaagccgataacgttaatgcccgtattatggggggagagactggcttcagttataaactgacggacagttggaaaaccgagaccagcctggcttattcgtgggctgaaaatacccgtgacagcagaccattgccacaaatcccaccgctggaagcccgcctagggctgtcatgggaaaaaggggactggagcagtaccggtttgctacgtctggtcagcagccagaaccggattgccgagaatgaagggaatgtcgttggcaaggattttgccgccagccccggttttgcggtcttttctgcgaatgcggcgtacaaagtcaataagtacgtcaaagtcagcacgggtgtcgataacctgttcaacaaggattacagtgaacacctgaaccttgctggaaacagcagtttcggctattccgcgaatacgtctgttaatgaaccgggccgcaccttgtgggcaaaagttaacgtgaagttctga

SEQ ID NO: 150275 - DNA, 705 bp, Enterobacter cloacae; identical to SEQ ID NO: 124394

SEQ ID NO: 150276 - DNA, 894 bp, Enterobacter cloacae
atgagcaacatcaacaaacaggagctgcgtgaagcggcggagagagcagaatccgatagttggggttatgatcgcgatgaattcaatgaggctctaaccccgtccaccgtgctggcactgctagatgagttggaaactaaagattccatgatagcagcacaacaacatgagatccgtacgttactgaatgcgcttgagggcagaccatgccctaaatgcaacgacacaggcatggctgatagtggcggtacgcaaccctggggcgagccaataagcgttccatgtgattgcgccgccccgccagcgccggtatctgtgcccgctgcgatggaaatggatgatgactttgacagcgcgtttgaacacggaaaagctgtcggctggaacgcctatcgcgcagccatgcttcagggtgccgatcgaccacaaaacgaaccgcaaaatattccggaaaatattccagccacacagtttaagccggtagcagacctgtacggcttaacctcgccaaccggtagcgaaacttcattcacattcgatgctgttgaagctcgtgatttcattgatggaggatggtcgtgtcaggagtacgtggagcttgagcgctttcaggaggctgtgagcggcaactctccggtgattcagggttgctcatgcctaacctgccgcccagtgacttttagtgatagccgctttgtcgtctgccctgattgcggtaacaagcgctgcccgcacgccaatgaccaccggaatgcatgcaccggaagtaatgagccaggtcaggatggtagtgcgtatccagcagcaccgcagcaggaggttactcaggcgcttgccaaaggcatggaacgttatggcgatgccatgcaaaaactcgcagatagtggtgactga

SEQ ID NO: 150277 - DNA, 474 bp, Enterobacter cloacae
gtgattggcgcactggttaagcgttactggctgcaactgattgtggtgtcggtaatcggcgtgctggcgttcttcgttaaccactaccgcgacaacgccatcacctataaagaccagcgcgacaaagccaccaaaagtctccgcctggctaacgacaccattaaagacatgcagacccgccagcgtgatgtcgctgcactggatgccaaatacacgaaggaattgtccgatgcgaaaaaaaccattaacgatttgcgtcgggatgtcgattctggcgctaaacggctgcgcatcgccgcaacctgccatggagtgtcaaaagccacctccgccaccggcgtggatgatgcaggagcccccgaacttactccagacgctcgacggaattatttcgatcaccgagacggaatcgcaaccgctgacaaaatgattcgcggcatgcaggactacatcaaagagcagtgcctcaaataa

SEQ ID NO: 150278 - DNA, 597 bp, Enterobacter cloacae
atgaacaagatatttgtggcgctgggttttattgcattagtaattacatgcaccttcgcagcaagagagccactatctctcgtcttcataattgcaactttcattatcattggctttggatttggaaaaataggcgagaaggcggcgtttaattcccgtcttacacaggcggagaggcgtggaactttacgattctgcgccgttggttttttgtctgtatcattagctgccaatgtgggatttcttttttgggtcaactcccaaacccctatttttggtgatgcttacgcggaaagaaagcaatatgaagacctgaagagcgacttaaaaaaacaagaaacagctcaggaggaggggcgtgcaatccgatactacgatgcaaaagagtcagtgaagggattgctcaaagactcatcatctgctgagttctctggggagaagatcggcaagggtggtgcagtttgtgggtacgtaaatgcaaaaaatagtttcggcgcttatgcaggtaattcaaggtatatatctaccaacgggcactccgtaatagatgacgatagccaggagtttaatgactcatgggaaaacacctgcaactaa

SEQ ID NO: 150279 - DNA, 294 bp, Enterobacter cloacae
ttgagctttaacaacggctctttgtcgctcatcctgaattttaagaagttcgttttgctcctcaagattgaggataagcttatcgccctctttcgtggccggagaaatttgcagtgctttcggatcaaaattcttccctgcctgattggcccggtttatttcatcagctgtatcaccaaaggctttcgctacggcaccctgaacctgctcaagagaccaagatttttcgatgagttgatcatgaactcccatcgccgtgagcatgttgttcgtgagcgtgcgagtcgcctctga

SEQ ID NO: 150280 - DNA, 621 bp, Enterobacter cloacae
atgttagggttattgcatcgtcttaaactcatttgtgcacacccggcagtcgttaacccagaacctcgctatcgggaagcctcacccaagcttaattggatgttgaaaacattggatgaaattaagcacaccagcaaagacaaagtaatcatctttactgagctgcgcgatcttcagcgcgagatacaacacgctattcaacagcgatttggtttccgtccagtgatcatcaacggcgacaccagcactaaaagtcatagtcagaataaccgccagcgactgattgatgatttccaggcccaacccggctttggcgtgatcattctctccaccgtcgcggttggttttggggttaacgtacagaaagcaaaccacgttattcatttcacccgctgttggaatccggcaaaagaagatcaagcaactgaccgcgcttaccgtatcggccagacaaaggatgtgtatgtgtattatcccacggtaacggactctgaaatcacgacgtttgaagaaacgctagatgaactccttcagcgtcgccgggcattggcgagggatatgttgtgctctgcaccagatttaagcagtgctgattttgagaacattttaaaagggtcttaa

SEQ ID NO: 150281 - DNA, 1851 bp, Enterobacter cloacae
  misc_feature (1719)..(1759): n is a, c, g, or t
atgagaccatttatattaaactcaacaaaaagtaatgatgttaaaaaagcacatggtacaccttcggcttatgaaccagcgagtgaaggtgatgattttgcagagtatgaagatatttttactggtgaaaaactctacgctgaaaatggtgctgatttaattcaggtgattgaagataataatattcaattaccatccagagatttctttttaaagctaactgaaaatacagaaatagcaaaaaacagtagtgatttaaaaaaaatcattgataaatacaatgaagaaaatggaactaatttaaggggcgtagcttatagggaaagagctaaaaaagatggttcttttactgatgattggcatcatttagctttcgatttgtctaagtatgaagatcccaagaaagcaagaaaaataataattgatacatttgctaataacattggtgtgcaagtagacggaactcctttatatgggaaaagaggcgttatagcttggccagaacataaagatcaagataaaggaaaccattttcacatatgggttcatgaaggttctcttgcaaaaattgaagtgaatggaaaagaatatttagttcctgaaacaaaaataaacttcaatgaaaaagaaggtgattatgttaagaaagccatcattgaaaatttagcaaaagcagggttaaaagcagacttaactccaccaatggcattaaccattgataacacaactaaaattgataaatcagtagctaaagaagctattcaggggcaagaagaaagccttgatgaaatgcttgatttatctaaagtgaagtcgttaacagtggatgaaacaattgattatctaaatagaagaaataaaaaagatgaatctgattttgcagaacttgtaagtgttattagagagaaaaaagaaaaattacaggcttctattgcagttcaaaaggcaatggaagattacagagatattaattctcgtttggttaatgcaaataacaaaataactgaattagttaatcagaaagaagaaataactaaccttaaagagaaattctcagaatttgcagaagaaaaatatggtattaaaattgaaagcgaagatgatatagcggcatttattgccacacacaacacacgcttagaggaattaaaacaaagacatgaagcagaggttaaagaactcaacgatgaaaacgaagagttaaataatcttaatacagccctttctgattttgcacataataaattcaatgtaagcattaacagcattgaagatattaaaaagcttgatgaagcttacgaaaatgaagttaatgctcataaagtagaacttgaaagcttacatttagacttaaccaatttagagcagtttaaagattctgtatcttcaattgcaaaagaaaagcttggcattgaaattgaaaacatccgtgatttagaacaaattggtaaaaaattcgattctcttaatgacaagttagaagcgttaaatactaaattatctgatgcagatattgaaaacaaaaacttaagtaaaaaacttgaaacctacgaaagattaaatgatagattggttgaagaaaaaactactcttgaagtagagaataaagagcttaaaggtaatattgtcgctaaagataaagaaattgaatctttaaatgaaaaacatgaaaaggatttagaacaacttaaagcagaacttagagcagagtttgaaaannnnnnnnnnnnnnnnnnnnnnnnnnnnnnnnnnnnnnnnnagaaaaaaaagataatgatgttgaaaataaaaaccaacctaaaaaaccaaaaatataaaaatcgaaaggggaggaaactccccttcacatga

SEQ ID NO: 150282 - DNA, 912 bp, Enterobacter cloacae
atgagagatatacaaaaagaaatagaagaaattaaattaagaaatatagctaatgagctggcaggtctaccgcttgagccatacccagacgagctacccgcaacaacagaggcagagaacgcccctgtagccgttcatgaacctgtagatgcacaaactaccatcaccagtacagaaacccccatagagagccatacagaagcagatctgagctgggatgacatgataccggaacaagacagtgaatcggactacgttagaccaaagcgcacaagggaggaaaggctggcgatactcgctaaagtcaatggaaagagtaaaccagcaggatcacaacctaatcctaatgcagctaaaataaaacgctttcaaaaagatcaggctgatgcactgttaagactttcaacgaatccttttgttattcccgatgttattaaaaatttgggcggggttgtaatcagaactgataaaacttttcctgaaaccatatcgaaaaaatacattgacgaagaaaaattaataaccctttcaaatggggaaggtatatttaagtttaacagaaatgatatcgatattacgtcagaaaatttagatagttatatggatagatttttaaattcaataaaaaacactgtcaattcttggtctgatggttgctatatacaatccaatcttgacagaaaaaataatgaagacaatcaaagaaatttctataaatatacttatatctattcaataatacataaagttaatattttccctttatggactgacagaattaattttgaaaataccatttgtgattatatttttagcttgcatccatcacagcaagattcattatatgatgaattcgacgcaagaagaaaattaatgttgcatcttggtatgagaggtaaattaattaactaa

SEQ ID NO: 150283 - DNA, 2271 bp, Enterobacter cloacae
atgaaaatactaacaaaaggagagaaaagatttaataacaaatattggttgttagctcttttatcaataattttttatacaggtaatgcaaatgccgcatcattctttgaactatcaaaagatgatatggcttataaatatttcttagatccaattttttatagcggaacatcaccgctgcataaagttattgaatttttgaatacaacaataatgatggttgcaggtgtttttttcatttactttattattagtagaatctaccacaccgcacacgatggggtgatgttaggtaaatcagcaagcccagcttctatgttgcgttatgtcattgccatagcgttcatcttcccagcccccccgtctgtaagcgagaacaccgcaggatactcttcagctcaggttgccttcttatgggtagctaaacaggggatagcggcaggggggcaagcctgggcgctttacactgatgtagcgataaaccagggtgtctacgcttcccctaacatgtcgcgtcagataagaacgcttgcgggaaatatgctattaaataatatctgtgttgcaggtattaacaaaacgaacaatgagagtgaaaactcaagatggggttctaacaatagtaatttttcagctaaatcttttaaaaacattagttctgatggttctggtgtaattggttatgattacagttctgatagtaacggatcttacaactggtcaagatttggttcttgtggttctgtcagaatccagttaacaccaatggaaccaaaaatgaatagcgaaatgaaaagtaatgcttcatctatgcttgatagcggattctcaacaaaagaagtgaattatttacatgcaggtgaaataaataaattgcaatctaagatgcaatctcttgcaaataaaattgtagaaaaaggtgaagtgttaaatagcgaaatttcaagtgaaattgagagtgctgttagttcttatcaaaatacaattcaaaataaaggacaggaaatatttcagaaagcagttgttcaggattatgtagcaaaaatgaaagaagatgggtttattacagcgggtgcttatgcaatgcaggtagggcaggtaataaataaagttgcttcttctattagtaatgttccagcatcttcaacagtagcaacaggaagatactcacctttagaatatcatacaaaagtaaaatcactaatgagttcagttagagattatttaaacaatgaaatgacagctactaaagaaggtattgttcaaaatggtgaaaatgctgataatactttagcaggttctgtaatgagttggtttattcaggatgaaactaatttatttagttctgtagcagatggaacaggtaatttaataggtcaagatccattaatagctaataaaattcttggtgataaattgattacttgggcttggatttcttacacagcaggaatttcctttgccacggcgggaggtgctttaacaggtaatatagttggtagtacattaggtgcaggtgaagcattcgggcaattcatgtcttttatatcgccagctttctttatgctgttttcacttctcatgagcgcagggataatattagctgtaattcttccatcattaccgtttattatatggattggtgctgttatttattatttcaaagaattaatattagcattctatgcagcgcctgtttttgcattattccatatgacagcttcaggtgatgatttctttgtaagtcaaagaacagataaaggatatatggaattacttgtattagctttcagaccattattaatgatctgtggtttaatatccgcattactacttctaagaccaattggtacctttattaatacaatatttgttccgatgtttagtttaggtgttatgagtgatgtaagtgcattcggtatcactcaaatgttttgtggaatattattgtattcttttcttagctacataacaactaaaagaatactcatgctcattgtagagataccggataaaatctttgcgaactggatcggtcatgctggctcaggtggtatgacacaagaagcaagagagagcgacgcaacgccagcggcagccggagcgggtgtcattggtgcaatgtccagcggtcatggctctggtcttagcagaatggcaggttctatgagaaacaaaggcagagaccctaacggcggggggaacaatgatagtgtttctatcactcacacggacagcaacgggaacagctcaacaacaagattacgttaa

SEQ ID NO: 150284 - DNA, 219 bp, Enterobacter cloacae
atggaacacaatttgatttttgcaacgattttttttgttgtcggttttttatcatttattctttttattaagaatagtaaattcacttataataaaaaaagaatgtttgtgtatggtgcgatctttgtcgtatgtgtattaggatataattttggatttagcccagatagtttttcaaaagtatcatttacagctttatcatataatttgtttgcttaa

SEQ ID NO: 150285 - DNA, 297 bp, Enterobacter cloacae
atgatcgacgacatcaagcgcatcgactcaatgataaatgtgcttcgcaatatgaaacaggacatcaagcgccagcagaaactaagtgaaataaacagtttagacctgacgccgaagcaagctcaaaagcgcaatgccgatgctgactggattgcgatggaacagattaagcgccggcatgagctgcacgctctgtccgttgagcttggtttcgctgaacgccgggaaagttatgctccatttgaattaactgacgggtggcaccgattcaatcacaagccgcgcgaacctcaatag

SEQ ID NO: 150286 - DNA, 294 bp, Enterobacter cloacae
atgagcaacaatcaattctttgacgacttgatgacttctgttaatcaggctgtggccatcagcaaaggcgagatggaaccggcacgagtaacgaaaatccctgtacctgacgtgaaagcgataagggcaaaggctggatacaaacaaaaggacttcgcccagctcgttggcgttagcccttcacttgttgaagcgtgggaacagcacagaagggtaccttctggcagtgcgttaaagatcttgaagatgttagagaacaaccctaatctgatacatgcacttaaaacagcctaa

SEQ ID NO: 150287 - DNA, 336 bp, Enterobacter cloacae
atggagtatttagagtttatcgaaacccccttgtttactaagcaacgggcagagctactaacagaggatgagtatcaggaatttcagaaggaactcatcataaacccgtctgtcggtgcgataatgagagaaacgggcgggtgtaggaaggttcgctttgccacaggcaacaaaggcaagagcggcggagtaagggttatctactactggcaggaaccgaacggcaggatctggctctttactgtctatcctaagaaccagaaagacaaccttagcagtagcgagaaaaaccagcttaaagcagcagtaggaatgatcaaaggaggtcagctatga

SEQ ID NO: 150288 - DNA, 261 bp, Enterobacter cloacae
atgtgcattatcaatattcataatgacaaatttcatgaagtaatagaaaaaatagaagctatgggtaatattttaaattacacccctgaatttattagtgaaagcatcaaacaaggattcaatgaatatgagtttaataaatcaaatccagaaatgttttttgctaataaatccattgaggaaacggaggatataatttacaaaggggcagaagatataattacagacgtattcgaaaagctaaagaaaaataaaatttaa

SEQ ID NO: 150289 - DNA, 252 bp, Enterobacter cloacae
ttgcgagtcagtgaagtcagccacccaggcgtattctttctcgccaggagcgaatttatctttcgctgccttctccagcctccgctcacgctcgcgataggtttcccccaccagagcgccggaattagctttcagtggagtggcaagatcagcatttaccatcatccctaccccctgttctggcgtagctgcgccaacctcatccagaaggatggcgtcatggtccatcgcgtgaattttcgcaacccatga

SEQ ID NO: 150290 - DNA, 498 bp, Enterobacter cloacae
atggattggcggaacatcctcgcctttctccagcgcttcaagacgctcaaggaggcgctttccgtcatccgtgcgctttgccacttctgtatcgatccacttctcgacgtagacgcggttgccggacttcttgacgtttttgttccatgcccctacataacccacattcagcccctcaggactaaaagcagaaacaaactgaccgttgacctgtggatgtccaagcggtgccagtgtcccctccaggccactgtagtgctggtcaatctcactggccggatacagaccgccgttcatgaccacgttcgccggaagggtgtaagaaggaacaacccagtgctcgcgtccgttgtgctgttcgcgccggatggccttactgttcaccttcgaggtgacattaacttgcattggcatgagttaacccttagcccattggtagccacgggctttcattgtgttaaatgttttctgagctttatcgatgatggtgtcacttaa

SEQ ID NO: 150291 - DNA, 252 bp, Enterobacter cloacae
atgagcgcaggatataatttaaatactataaaacaagatgagtttgagtatatagaagatgctttatcatattatgaaagaatgaatgaaaccaacgacttaacaaacaaagacattgagagaaaagagaaaatggaagcattttataactctgaatatttcagtgaaataagaacaaaaaaagaaaaagacttcattaacagcaccattgaaaataatggtgaaatacaaaaaccaaaagcgaggatttaa

SEQ ID NO: 150292 - DNA, 411 bp, Enterobacter cloacae
atgcaaacatatatgacgaaaagagaaaaaaatctacatggttatttattgaataatttacacatacttcttgaattaacgcattaccagatggatataattaatttcttcgttagaatcaaagaaattaaacacattggcggtaagatagacgtgttagaaaaattaggggtaattgaatacaatggatgcgacacagatatatatcagttagaacacaacatatttaaaattacggttccacactggaattttaatagctcaaatcatgggttgattacactatatattttaagtaaagattacaatttcatcactgatgaatttttatcaatcgaagaagaaaaaagaacgataaccgaaagcctgttaatcccaccagaaataaagcgccctataagacgcctgtag

SEQ ID NO: 150293 - DNA, 252 bp, Enterobacter cloacae
atggtgaggctgttttatctggtctgggctgacttcgtggtgatcgtggtgatggtggtgggaatgttcactggcatcttcggtaagataacggtcgggatgggctgtaaatttactctcacagctggcagagcagaaataaagctgatggtcctggtatcgaatgctgctgtgcgccttgtcgggcaggaatgccatcccgcacacgggatctctcaccttatgcaatacgtggctctcgtccggggataa

SEQ ID NO: 150294 - DNA, 282 bp, Enterobacter cloacae
atgaatgatcaggccctgtcagccctgaaagaaaaatatgctgttcctgctgagctgagaagctgtcataccgcagttactggtaatttgatcattgaaggccatgtgcctgcggccacgatacataaggcaatgcagtctggttcagggatttatggtcttgccaccccgggcatgcctgcggggagcccgggaatggagatgggggcccgtaaagaggcttacgatgttatttcattctctccggagggcagtaaaaaagtcttccagcgaatcgaatag

SEQ ID NO: 150295 - DNA, 447 bp, Enterobacter cloacae
atggaggacccgcagcagcaatggatgatacgctttgatcagcacccggttcagggggttactggtctcggcaggaatttttccccggatccagaatcccatcaagatcggaatgacaatgatggccagcgcggccgctcccgccatggagtacgttttcgtgaatgccagcgggccaaacagacgtccttcctgaccttccagggtaaagataggaataaaggacagggtgatgatcagcaggctgataaacagtgcgggtcccacttccacggaggcgtcggtaatcaccttccagcgggtggcgttgtcaatctgctcacccggatgctgatgatcccactcctcaagccgtttatgcgcattctcaatcatcacaatggcggcatccaccatcgcaccgacggcaatagctatccctcccagcgacatgatattggcgtttag

SEQ ID NO: 150296 - DNA, 420 bp, Enterobacter cloacae
gtgccacaggaacagggcacagacgatggccaccacgaaaaactcttccagaagtttggaactgaggttatcaatcgcccggtcgatcaactggctgcgatcgtaggtggtcacgatttcaacgccttccggcaggctggccttcagcgtctccagtttatccctcactgccgtgataacgtcgcgcgcatttttacccgaccgcaggatcaccacgccgccagcgacttctccctggccgttcagctcggcaataccacgcctcatttcgggcccggtctgcacgcgggcaacatcccgcagataaaccggcacgccgttctcgcctgttttcaggacgatgttattaaaatcatcaatgctctgaagataaccgctggcacggaccatatactcagcttcggccatttcaacggatga

SEQ ID NO: 150297 - DNA, 585 bp, Enterobacter cloacae
atgaaaaatacaataacaataaacaaaagatacttgatactaataacaggattaatattaatatattcaggcaacgcaaacgcagcacccaccatcgcgcaaattttagctaatggttctaatctctggtttgaagtcgctcgtttagcttctggtttagccttcttctcaggtatcgttatttctggcatggcgctttttaaaatgcgtgatgtcagcgaagggcaggcaaaagtaagcagtgttttacttctaacgttcgtcggcgcttgcttgatgacattcccacagacaatttcatcaataactaattcaatggtgctgggtgatacggcagggatggatattctttcaagggttccggttcctgatggtattcccggtatgaaagaaggaatggacgctcttttcttattcataaaaatgattgggcatatcgctttcttccgtggttttttgattctcaaagatattgataaaggtcagggcggtttatcaaaagccctgactcataacgtcggtggggcaatggcaataaacatagatactgttgtagagatcatgacagaaacattcttaaaataa

SEQ ID NO: 150298 - DNA, 219 bp, Enterobacter cloacae
atggccgatatcatcgacacagcagcagagattgaagagcttcagcgtaacgctgccctttccgctcatcgcatcgaccgcaaagccgtatcagctgagcgttgtgaagaatgcgacgaaccaattcccgagccgcggcgcgctgccgttcccggctgccagacctgcgcggattgccaatctgttatcgaactgaagaataagcagagggggcagtaa

SEQ ID NO: 150299 - DNA, 153 bp, Enterobacter cloacae
atgactcacgctcacgacgacatcagggttggcacactgtgccttcccttcattggtaaaggctggctaatgccatggggtgaagtggtcagcaatccattaaaggcgcagcggctcgctgaggaatatcgggagagacaggaggcagcatga

SEQ ID NO: 150300 - DNA, 435 bp, Enterobacter cloacae
atgtttggatatgagcagcagacaactggtattggcaatcaatgcgacgaatgcgatagccatcatcaccagcgattcaggctcactaccgaatacaaagcgtctcaccacctctacgagcacgcccacagccaagatcagttgcagtacaccagcaagatgcgcggcacgtacctgcattttcacgctatgtccaaccgcataaagggcaagcccgtacaccgccgcatcggcaaaattgtccagggattctccaatcaggccggtggactgggcgatcagaccggcagtcatttccaccacgaacagaagtgcattgatgccgagcaaccagcgcagggtcccggattcttgcttagcagaagctgccgaaaactcggcggccttgatggtctccggatttgcagcgacggtttcctgaagcgaggcgcctag

SEQ ID NO: 150301 - DNA, 312 bp, Enterobacter cloacae; identical to SEQ ID NO: 128999

SEQ ID NO: 150302 - DNA, 666 bp, Enterobacter cloacae
atgacaggaaaatactcgcttatctacgctgatccgccttggtcttatggcaacacaattagcaacggggccgctaccgatcactactccaccatgaagttaatcgacattaagcgcctgccagtgtgggagcttgccgccgaaaacgcggtgctagcgatgtggtacaccggcacgcataaccaagaggcgatagagctggccgaagcctggggctttaccgtgcgcacgatgaagggctttacctgggtgaagctgaaccagaacgccgagctgcgcatcaacaaggcgctggcagagggtgaggtcagcgacttttacgacttcctcgaaatgcttaacgccgagacgcgcatgaatggaggcaaccacacccgtgcaaataccgaagacctgttgattgccacccgcggcgccggtctggagagaaagcacgccgggattaagcaggtggtctacagcccgctcagcgcgcacagcgaaaagccatgggaagtgcgccaccggctggaattgctttacggtgatgtgccacgcattgagttattcagccgcagcgcggcgccaggctggcatcactggggaaatcaggctgaatcaccggatgtagagcttttcccgggtaacattcaggccatttttaaagacggatggagggcaacctga

SEQ ID NO: 150303 - DNA, 624 bp, Enterobacter cloacae
  misc_feature (138)..(147): n is a, c, g, or t
atggttccattatcgcgtgaaatcaccaaatctattcttaacaagttgggctactggaaaaaacgtacggttattctaggttcaggcaggaatgcgcgtgaagcctattttgctttacagagccacgaagtctcaggnnnnnnnnnnaggataggtcgtcggggtgaaaaatttgactgttacaaattccgctcgatgaatatcaattcgaaagaaattcttgcgcgtttgctagaaaatgacccagaagccagggcggaatgggaaaaagattttaagctcaaaaacgacccccggattacacctattggccactttattcgtaaaaccagcctcgatgaattacctcaattgttcaatgtgctcaaaggggaaatgagtctcgttggccctcgtccagtcattcatgaagagctggaacgatatgctgatgatgttgattattatctgatggttaagccaggaatgaccgggctatggcaggtcagtggccgtaacgacgtagattacacaacccgtgtctattttgactcctggtatgtcaaaaactggtctctatggaatgacatagtgattttgtttaaaacggttagcgtggttctttttagaaaaggtgcttattaa

SEQ ID NO: 150304 - DNA, 354 bp, Enterobacter cloacae
atgataatcaaagagcaaactattttaggcaagaaatttattatcagcatagcaaatattaataattcacatattgccgattatgcaaaaaaagaaataacttatcgtttcttaaaagtagttagattaatggtcatggactctgattttaaattctcaaggtctaaccaaaagggcgttaagacgcttgtgaaattcaatactacaaataaagctaactataaccatgccatttattttacaaataaagaaatgaagaaacatatagatcagttaattgagaattctatgaaagaaataattgaatataaaaggggtgaaatatgtcaatattcaacaaatttaatacagtaa

SEQ ID NO: 150305 - DNA, 768 bp, Enterobacter cloacae
atgaaaaatataaatgaatcaagggaagtaaacagaaaaaaacaagttctttttaaaaataaaaacgggaatgtaattcttactattgctgttcaggcccctaaaggaggatcgggtaagagtacaaccagcttgcagttagcaagttattttagcgttgagtataaaaagaaagtaatagtagttgataaggatgaacaaggtacatcaattactttctataatacatataaagattcagaaaacggggttccttttactgtcgttaccgaattaacaaaagagttgattagtgatgcagaagtaattatctgggattataaaccaacatgggatcaggatgttcctgcaatggctgttgtaattcctttcgttccagcacctgaaagtattgctccgaccattaaacaagttaacgcatcatatgaggcgggaaaaaaagtattgatgttcgctaatatggttgaaatggaacattcaagaaccgcaacacagaaaaaagttcttgccatcatggataaaaataacgccccttatgtaatcaaaagacaagcttacccaacgtgctatatgttgggaacaactctatatgatgaatctacttctttaccttacatcgataaagcaagaaatgaattcaaacaagtaatcatagaattatttaaattgttcgatggtggtagagaaagcgattatttcaatacaaatatcgttgatgaagttaaagaaagctttggtaatcaaattgcgtttagtgttgacaattaa

SEQ ID NO: 150306 - DNA, 357 bp, Enterobacter cloacae
atgatagagggcttcatcaaggccttccggtgtgaacgtctctttacgggacaattccgggtgcgcttcaatggcatgacgcagatacatcagcatgaccacgccaaactctgctgccaccccggccagagcgataaaccccgttccggttgcgacagacatatggaagccctgccagtacaggaaccatatcccgccaaccagggcgaacggcaggctcatcaggatcagcagggcttcatcaacccggcggaatgccagatacaacaggatgaagatgatcatcaccgtcatcggcaccatcagcttcagtttcttgttggcatgctcaagcagttcaaactgtccggagaatga

SEQ ID NO: 150307 - DNA, 159 bp, Enterobacter cloacae
atgtggtcatacaaaacggaccgcatcaccggtgaggtgttgccgaaactggctgatggtgatgagcatacgtgggacgccatccgctattcccttgatggacatatcaaacgtaaacagcagggtgtcggcatgatgattccgaaacgccttcgataa

SEQ ID NO: 150308 - DNA, 297 bp, Enterobacter cloacae
gtggttaattacgaacaaaaaattcagtcagcctttaaggatgtttccgacacgcttgcgctgcgcgacagccttagccagcaacttgagtcacagcagcgttatcttgattcacttcagataactctacagcgtgccagaggattgtatgcaagtggtgctgtcagttacatcgaagtgctggatgcagaacgttccctcttcgcgacgcagcaaaccattctcgatcttacctattcccgacaggttaacgaaattaatctgtttaccgcgctgggtggcggttgggtagagtaa

SEQ ID NO: 150309 - DNA, 369 bp, Enterobacter cloacae
atgaaaattaaaaaagatgaattaataaaagacttactattaagcaatcacgaattacttaaacaaatcattataaataacgaaagaaaatgcacagagccagcagcggattatattataaagacaatgaagaatataagggtagtagaaataactgatgttatggaaaaatttatttatgattacaatcttaaagataatgatctatttacagtgtctatcgaaacacctcaagaaatatataaaataaaaattggcactcacaggaataaaaatataaaaagcacattagaacgaagtgagatattaaacagcttagaggatagtaatatcccagcacctttaccgcgccctataagacgcctgtag

SEQ ID NO: 150310 - DNA, 123 bp, Enterobacter cloacae
atgagccgtatcgcggcacccatgattggtgggatgatcacggctccgctgctgtccctgttcattattcctgccgcctacaaattaatctggctgcgcagacataaaaaaagcgtgtcctga

SEQ ID NO: 150311 - DNA, 123 bp, Enterobacter cloacae
atgagccgtatcgcggcccccatgattggcgggatgatcacagctccgctgctgtccctgttcattattcctgccgcctataaactcatctggctgcgcagacataaaaagagcgtgtcataa

SEQ ID NO: 150312 - DNA, 558 bp, Enterobacter cloacae
atgcaaattggctatgtaagggtgtcaacaaatgaccaaaatacggatcttcagcgacaagcgctcgaacgcgcaggatgtgagcaaattttcgaagaaaaaatgagcggaacagtggcgaaccggccagcactgaaaaagcttcttaagacgctgaaagagggagatacgctggtggtgtggaagcttgatcgccttgggcgaagcatgcggaacttggtactgctggtcgacgaactacggcagcgcggcatccacttcaaaagtcttacggacagcatcgatacttccagcccaatggggcgtttcattttccacatcatgtctgccctggccgagatggagagggagttgatagtggagcgcactcgcgctgggttagccgcagctcgggagaaagggcgaatcggcggcaggcgtccgaaacttacccaggaacaatgggaccaggcgggccgactgattgcgaacggtgtggacaggaagcaggtggcgatcatctacgatgtagctgtatgcacactgtataaaaaattccccgtttcaaaagcggcttaa

SEQ ID NO: 150313 - DNA, 129 bp, Enterobacter cloacae
atggcctgcgccagcccgtcgaccgagatattgtctgataccagaatgccatacttctggccactgagcgccggtgatgcagcaggcgttaccgtcattgacgtggcgctgttcacggatgaaatctga

SEQ ID NO: 150314 - DNA, 123 bp, Enterobacter cloacae
atgcagaagattgtgatcgtcgccaacggtgcggcctatggcaggaatccctttttaacagcctgcgcctggcaatcgcgctgcgcgataaggagagtgagctggagctgcgcctctttttga

SEQ ID NO: 150315 - DNA, 222 bp, Enterobacter cloacae
atggtcaatttttaccgggggctgtcggtggtgcagaccgcgaacgcgttgaagatgagcgaaaaaacggtctttacccataaatatatgatgatgcagaaatttaatctgcgaagcgattacgagctgatcgtactgttgagaaggctgatggagaaaaagagccgtccgaacctgcttcgcgattacctggaaaataattatgcacaacaaatagcctga

SEQ ID NO: 150316 - DNA, 1341 bp, Enterobacter cloacae
atgacggtatcaaccgtagttgaccataacgattacacggggaacggcgttacgacatccttcccgtacacgttccgcatattcaaaaaaacagatcttgctgtatcagttgtagatctcaacgaaaacatcacagtcctggttctggatactgactatacagttacgaacgcaggaggatacagcggcggtaatgtggttcttaccactccgttgacaaatggctggaagatttccattgccagagaactggagccgacgcaggaaaccgacctgcgcaaccagggcaagttcttcgctgaggtgcatgaagatgcctttgacaagctgactatgctgatccagcaggcatacagtttgttccgcctggctctacgcaagccatcgagcatcgcgaactggtacgacgcactgaacaactacattcgaaatttacgcgatccgagagacccgcaagatgcggccaccaaaaactatgttgatacgctggcaaacaacaatctaaatcgcacgttacgcgttcctgaggcaataccttcattgccagatgcagctacaagggctaataaaattgtcgcctttgatagtgcaggcaatccattccctgttcttccaccatcaggatcagcatcagacgttcttattgagctggcgaagccaacaggctcatcaaagattggttacggcgatcgcactgtagaagataaacttaatgagcggaaaagtcctttcgattttgaagcaataggcaatggtgaagatgatgacacattagcacttcaaaaatttatagacgaaactgatggtgatcttgatcttgctggtggcacatttctaataagtaagaattatgccctagctattcaatatccaaatgaagccgacttttctgacggtacttataactatagcccatgccttgcattggttggaaagaagggtatcaaaattcacaatggaacattgctggttaagacgcatggccttgatgcgttaagcctcatagcctgtgagcatgttactgttgatttaactatcaagggtccgggaatcttccctgcaattgataccacaactgggtatgcagagaaaggagaagccagattcgggtacgattctgctctagttcttgcaccaaataatgcccttgataccagcgcatatactggcggagcatacgctggtgttacaggtcaattccctaaatacaatgcagacggcagccaagcttcaggttggcagaacacgtggggcaagttccttggcggcaacatcggtagctgggcttgcggtgtgaaggttcaacgtgcatgccgtggtgaatcgccacggataatctag

SEQ ID NO: 150317 - DNA, 705 bp, Enterobacter cloacae
atgacagctcaaaaaaaacctaccccagacgcagtattcaaattcgagtcagccaccccagtacgcatgtttaacattgacggcaatccgtggtttgcggcttcagacgtttgcaaagctcttggactcacgaactcacgtatgtccctgaaggccttagacgatgatgagaagggagtaagttcaacttacaccgtcaaaggcgcacagaatgtaagcgtcataaacgagtccggcctctacacactgatccttcgctgtcgcgacgcggttacgccaggcactatcccctaccgtttccgcaaatgggtcactggcgaggtgctgcctcagatccgtaagacaggcagctatatcaaaaatgcaatccctcaggaagaccgcattaagatggttgcagatcaagttgcaacggctactgcatctgctgtaatgcaggctatgcaggtggagcaaaagagttatgacgtaccactgaagccaggctaccgcgagcacattcattcacctgaaggcgttctcggcctggctgagcattctctgctgatgaacctgctcaaccgcatgcaggatgacggtcacgacgtttccggcgctgcggcagagttcacaaccatggtgagttacatcgtcggcgtcagcaaatgcctgaacgatatccggacccacgcgcagtacatcacaaagaatgcagctgggttctga

SEQ ID NO: 150318 - DNA, 330 bp, Enterobacter cloacae
atgggctttccatccccgtccatggattacgcagaatcagcgctgaccgtttccaggttgtgcaactatgatgcgaactgccgcgcagttgagacatcgcagggatacgctgtgatcaacatatcaagaaaggcagcacatggtgatgctgttctggtttcctttcatggtcacatccagtttgccagagtacgcgggagagcgcttatcactgatgacggcgaagccattgaaggttccgcgctggacgatgcagttgtgattggtgtcctgacccatctgattaacagagttacgccagaagctgacgaagacattcccgttatgtaa

SEQ ID NO: 150319 - DNA, 186 bp, Enterobacter cloacae
atggtgaggtttaatttcataatgtgctttattggtgttgttttgatgtcagcatcagaccctgccagcggagatgcgggtgggttgatcttcggaatcatggtagtcatggtttcagctctggtggttgtgtctgaggcatacagaaaaatggatgcgattacttatattcgcgaggttcactga

SEQ ID NO: 150320 - DNA, 207 bp, Enterobacter cloacae
atggataagtgtcagggtattttcgggaaattgttcgggcactcatatcgcccagctatcaccaggggagcgccatcttctttaaaaattggagaagttgagggaagtagcagcgcagtaatcgaagtgatcaacagcaccaggccagagacgtatcacggtatttattgcaagcgctgcgggaaggtgatcaatggtgaggtttaa

SEQ ID NO: 150321 - DNA, 891 bp, Enterobacter cloacae
atggctaatcaatggctacgtctttggcatgatatgcctaatgacccgaagtggagaaccatagcgagaatatccggtcaaccgatagctctcgttcaggccgtttatgtccaccttcttgttagcgggtcacaaaatgtcacgcgaggtcacgctgatgtcacgaacgaggacttagcgtcacattttgacgtgactgagtgtgacatagacgctgttattaacgccatgcagggccgtgttttggatggaacataccttacagggtgggagcggagacagcctaaaaaggaggaccgtggcaatgatgaaacaggagcaaaatcagcaactcagagaaaaagagagcagcgtgaaaggcagcggatgcgacaacaagaaagcaatgagtcacggcaatgtcacgacaagtcacgaaatgtcacgacagataaagaagagataaagagaagagaagatataaaagataaaccccacacagggagcgagcaaaattcacctgtggataactctgctgttggcggtgaaccagatccggatgcgaacaacgcgatgctgaatggctacattgcgcctggcggaatgggtgagtttggaaaattccagatgcacgacaactggaagccggatcagcagttcaccagacgagcttctcagtggggcataaccctgaagacggacatcacgccgttcgagctggcagaattcatcacgtactggaaagcggagggcaaagcattccaccacgaccagtggcagcagaagctggcgagaagcgtgcagcagtccaggtcaaggccagtcgcccagcagcagagaagggatatcaacgacgttccggagccggacaaggccataccgcagggattcaggggataccagccctcatag

SEQ ID NO: 150322 - DNA, 189 bp, Enterobacter cloacae
atgaagatttttttctccggttccagtgctcaattatgcattgaagcagagtcagaagaagaaaaggcgatgctcattatgtggcaccggctgaacatttcagatcagacaatgtactgcgacatggttaatactggttgcttcgctgggttgcgcctttgtggaatcactgatctcgagaaagagtag

SEQ ID NO: 150323 - DNA, 216 bp, Enterobacter cloacae
gtggcggaagcctgcgcccgtcacgacttctggctggagccgaccgggggaatcgatctggagaacttcgaggcgatcttgcagatcgccctggatgcgggcgtgagcaaaatcatcccgcatatctacagctcgattatcgataaagccagcggcgatacgcgtccggaagatgtgcgtacgctgctggcgatgacgaagaagctggtgaagtag

SEQ ID NO: 150324 - DNA, 549 bp, Enterobacter cloacae
atgctcaaactgatagatggtgtcctgcagctgatcgtccagcacggtgcgatccgtcaccacaatcaccgagtgaaactgcttctcgccattttcatcgtacagtcgggaaagttggtgggccgtccatgcgatagagttcgatttgcccgaccccgcgctgtgctggatcagatatttattgccggtcccctccaccgtggcagcggtgatcagtttgttcaccacgtcccactggtgatagcgcgggaaaatcaggctctcgcttttgtacttcaggccaatggcatcttctttttcgacgatttgcagatgcacaaaactggcgagaattttcagcaggttgtccggcagcagcacctcgttccacaggtagctggtggcgtagtcgttggcatcttctgggatgtcattccccgcgccgccgtcatgggtgcctttgttaaacggcaggaagaaggttttatcaccctcaagtttggtcgccataaacacttcgtactggctgacggcaaagtgcaccagcgcgccgcgtttaaaggtcagtag

SEQ ID NO: 150325 - DNA, 150 bp, Enterobacter cloacae
atgcttccagcgctctaccgcaggtttgcagatattgctaatggccgcgttggatttgtttttgctgaagaacgcctcacagaactgctccacttcgttccacaggaaaataccgctggtacgcagcttttcataaagctcaaagactaa

SEQ ID NO: 150326 - DNA, 237 bp, Enterobacter cloacae
atgacgggcgaagagactcagcttttcaaggttcttgtcgtcataatctacgatttgcgacataaactcgtaaaagcggacaaaactgccgagatctttcttgaaaatatccagcttacttttttctttctcgcagtccttaaaggtgttttccgcattggtgatcagcacaacatcgccggtcttcttagtgcgttcaaacatctctttggccagcacataggcatcaatcgctga

SEQ ID NO: 150327 - DNA, 189 bp, Enterobacter cloacae
atgaataacaattatgaagatagggccgctttaatcatgggccaacttttcgcggtgcatctgacaccagaccgtttgatgaaaattggagcgtttgtggttcagtatggattgtttgaaacgacacttgagcgagcgatttggacattaactgaaactgatgtgcaagtgacctgcccccacgattag

SEQ ID NO: 150328 - DNA, 729 bp, Enterobacter cloacae
atggcaacaaaaccaaatcgtgctttaaagtatggagaccagccgataaggatcactactgttcaggtaatagagaagctgggaggggctgccacaataaagcaagtcgatgcttatcttagaggattgtatcctcactatcgggacaatacgcgctctaacttggttattaacaccgtcaattgcaatagaagtcattggccttgcaatgaagttgccagaagaacagatgacacggctcatcgctaccatgagtatgaccgcttattcaagcgagggaacatttttgaaatctatcaaccctctgtgcatggcatttgggagttgtaccaggataaacagggtaaatggtgttaccgtcaagtgaagtcggagtttgaagaagcagtagaggctgctgctaaattaccctcttctacacgggagaagattttagctacggaaagtaaaattccagtgataaccgaagtaacaacacgagtttataaacgaagcccgtatgtggttgccgaagttcttttaagagcaaacggtaagtgccaaagctgtcagcgtgatgcacctttcctgagaggtgatggtacgccatttcttgaggttcaccacattgagtggctttctaaagggggagaggattccgtggaaaatgctatagcattatgtccaaattgccatagacaagctcattatggtgctttggaattggtggcggttaaccagcaaatttga

SEQ ID NO: 150329 - DNA, 282 bp, Enterobacter cloacae
gtgaaaatcaccgcctatgactactcgatctacggcgggctggaaggggaggtgacgatgatctccccggatacccttcaggacgaggtgaaacgggatgtttattattatcgcgtttatattcgtactgacagtaaccatctgaccaacaggcagggcaaggaatttccggtgttcccgggcatgatagccacggttgatatcaaaaccggcagtaaatccgtcattgattatctgctgaaaccgttgaataaggcgaaagaggcgctgcgcgagcgataa

SEQ ID NO: 150330 - DNA, 315 bp, Enterobacter cloacae
gtgaccttacctttcgttatccagaacgggcaggtgtttatccgggaaaccttcattcaggacggcaccatcggcaacgccaaaataggaaactacattcagtcttcaacatgggacggcaccggaaatgttggctggcacatcaacaagtctggctacgcgacgttcaataatgtgaccgttcgtggctcgatttacgccacaaacggtaatttttctttcaatggctccggcaacacaacggtgattaatggtaatggcgtaaccattaatattccgggtggcggccgcatcgtactggggacgtggacatag

SEQ ID NO: 150331 - DNA, 921 bp, Enterobacter cloacae
atggagataactgcgggcctgcgatgcccgtcatttggagcctactttgacagtggctaccagaaagccaaatacgctgatgttgccggttatgtttccggggcgcaggtgctgtttatccctcacgcgacggcttaccttgattcagggctgcttcataaaatgaactcggtcaccatatccggtggccgcgtgacgcagaactccacgatgaaggacgtaagcatcagtgagcgtgagagtacgtacacgttccccggaagcatctggcagatatttcctcctggccagcgtaaaggagaaggcctgcttattgatgacagtactgacttcctggcgattaccaatgccacgcagtcagggcagtgtatctggaaggggaccgtcaatatccccacaggcggctggacagttcccacgatagcggggtacgacaagtccaaatatatcgtctttgggcgctgcaatagcggtaacaccgtcgatttcgatggcaacaccgtcaggttcttcagccctccatccaccaacgatgatgctccgacgaccggcacgatagatattgtcatctttgccagtggcgtggcgcctcagccgggcaccgggctcaacatcttcaatgcagccggggcctgcacgttttcaacgacaaagcggcctttcgtctacctcaaccagctatggacaccttcgaaaaatgccgtgagcatcggcagcggctatgttccgctgggcagattcgggctgatggctcacgaagtaaatggcatgtacgtgtatagaatgttcggaataaaaatacagaacggcagtgcttcagttcagggtgggaaatatcttgggcgcgagcggtatgcaatttttggtaatgacacggtaacgccactgaaccttcccgttctacccgatatgtacgtctga

SEQ ID NO: 150332 - DNA, 711 bp, Enterobacter cloacae; identical to SEQ ID NO: 126947

SEQ ID NO: 150333 - DNA, 1464 bp, Enterobacter cloacae
atgctgaactatatagcaaaaatcgatagtaatgctctttgtgcttttttcagagtaactcggcggaaagcaggtttcaaaaatggggatactcctgctgaaattttactagaacaaattgaaagcattgtcgaaataacgacaaccctgataagaaaaataatacaaagacctatttctaaattaacaagtcgggagaaatatgtttatccgagtgacaacacaaatattgatgatttgacgctgtcatggctatgtagcaacactgatgagctatttgaaacagattcatatgaaagtgcaattttggagtttaacgatgagctttatggggcgagaaagcttattgagcaccaggcagtagaagattctgacgtttatgaaaatcaagttttgcatggttttgttatgactttaattcaaaccacttcttctcttctttcaggcttcaaaaaccctgataagtatccaaatagaataaatggaagccctttagggtatgttagttttttctctcaaatacaaaaatttcagaagagtattaatgggcgaaaaattttaaaatgcaaatcaatattatcagatttacattctcttaaaaggataatggcagaggtgatgcctgcaaaaaaacatataatcggagtgcccacgtttacaatgaaagccaaaaaggatcctttatacctttctgttttcaaaaagatcgttgactggtaccgatttgggaaacctgattggagtgttcaagaagagttattatccatacaaagcattccaaaattgtttgaatactattctcttttctatataagagagatattaggacagcatataggctctaaatccgcgcccgaaccagttaatgaatcaatatcatttgtttttaatcttagaaaaggggctactctaaaattactatatgagccaaaatattggatggccacccatcccatggcagacctaagaggtttggttaacagtgaaggatggacaacttacaatggtatggtgactcatcgttcttcctcagggagattttctaatcgatctcccgactttgtaatacatattagcaatgggaatggtattgacaagtatctcattcttgatgcgaagtatacttctactgataaagcctttttacattatttacctgagttaacgcttaaatatcttcatggacttcattctatttcagatgcaaatagttccatcattggtttgattattttaaatcctgatgagaaactactcattagagatttccataattcatcatttgatatttattcggataggccagctatgccatttttattatgcgctaccatttctcctggggaagagtatataagtaataattgtttccaacattctcttttaaagatggtaactcttatggagcaacgtgttaacacagaaggtcaaggtcgctacttaatgaacgttttaagtgcttag

SEQ ID NO: 150334 - DNA, 234 bp, Enterobacter cloacae
gtgagccacttcagcaggcgcattggccgcatcaacgagctcctgtacttctttgctggcaccgtatcgacgtacgacaccagtgaattcttcgacgtcgtgtccgcgcagtgtaagcactggctgcccggtctctttgttgaacttaggcgcgccgaaatcatcggtggcctgggcgatatggtaaagctcatgctctaccagtgcgcagaattcgaggtcactgcattgtga

SEQ ID NO: 150335 - DNA, 1230 bp, Enterobacter cloacae
atgtattcctttattgcacgacaacctatttttgacagcaaaatgcagactgtcgcgtatgaactgcttttcagggacgggatgaataatgctttcccggatgtgtcacctgaatacgccacctcaaaaatgatatctgaccagtttttatgcatacctattcaccgcatagcaggtaaacacagctcttttatcaatgtgccgcaccagatgattatcagcggactcgtcgacactctgccaggggagaaggttgttattgaaattctggaagatgctgtgccggatgatgcactctttagcgccgttaaaagcatgcatgagaaaggctatcagcttgccctcgatgatttcactctggacagcgcgtggaacaggtttatgccctatatctccgtcatcaaattcgatgtgcgggaaaaacatcaaaatgaaatttttcagtacattaaggataataaacctctgctgaagggcatacaatttcttgccgagaaagttgagacacgcgaagagtatgaccgttactgccaggccggattttctctcttccagggttttttcttcagtcgccctgaaatcatgaaaaataaatgcctttcccagaacccgttaaccctgtccagactgatgatggaagttcaccgtgaatcgcctgattttgcaacgcttgaacggttattcaaaagtgatctcacgttatcctataagatcatgcgctatgtaagaaacattttatttaaaacgcatggtattaatcaatctgataacctaacactgaaacaaatgctgatgttccttggctgcaatgagcttcgtcgttttgtctccgtggccgcgttagccagtatgagtacctcgggggtcagtgaactttaccatcagagtatagttcgcggtaaattttgcgaattgatttgcggtaaaatcgataaaacgtcattgtcatataacgcttttatttgtggtttattttctttacttgacgttattctggaactcccgatggccgatttaattaagcaaattactatccctgaaaatgtcacggatgcgctatgtgagcaaaagggggagctttttaccatacttaacctgtccttatgctatgagaaactggactggaacgggaccactgaaatatgtcatgcgcttaatctgcctgagttctctgtaatagaagcaatgcaaactgcaactaaatgggctgatgaactttcactttattaa

SEQ ID NO: 150336 - DNA, 213 bp, Enterobacter cloacae; identical to SEQ ID NO: 25793

SEQ ID NO: 150337 - DNA, 303 bp, Enterobacter cloacae; identical to SEQ ID NO: 82781

SEQ ID NO: 150338 - DNA, 171 bp, Enterobacter cloacae
atgaccaaggaaacctgtttttatatcggggagagcagattttataattggaataaagtagcttttatcgagcctttctactttacttccaagtccaaaatgcttttgatgtcttgtattaattttccagtcatcatcattgctttcgtaatattcattaagaataaataa

SEQ ID NO: 150339 - DNA, 492 bp, Enterobacter cloacae; identical to SEQ ID NO: 131575

SEQ ID NO: 150340 - DNA, 216 bp, Enterobacter cloacae; identical to SEQ ID NO: 142298

SEQ ID NO: 150341 - DNA, 426 bp, Enterobacter cloacae
atgctgaaagccgcattcagcgagcacgagaagtctgtcagagcggaactgagcgaaagcgagaagagaatcagcgccgccatcctcgaccacgaccggaagctgtcctcagccatgagccagcgcacgaaaggcatggtgcggatggtcagccagacgtggctgaccatcgtcctggtctccgcgctgctgatagcctcgagcgcgggcattctgtggtggcaggggcagcggatgctcgacaattacatgagcatccgggagcagaaggacgcgctggagaaactgaacgcccggacgtggggcgtgaggtaccaggaagacaaccaggggcgctttctggtgctgccggaaggcgtgaaagcggacacgaactggacgttcgacagcggcacgaagatcggcatcagactggtacgggagtag

SEQ ID NO: 150342 - DNA, 303 bp, Enterobacter cloacae
atgagtaaaggtagaaagaagttcagaccagttgattttcacagcaacaacttggggaataactacataacgatagaaagcatgttatcaacgccattccatgagcattcaccggaacttttcgcaaagtgtttagcagaagtgccaaagattaacaggctactcatagacaggcgtaagtgtgataacgaagagcattatcaaagggtattggtcatggctgatgtgtgtttaaaaatggcaatgattgaaagaagaatgaaaatagtgaacgaagaaaacagttggtttaatcaaaaataa

SEQ ID NO: 150343 - DNA, 1050 bp, Enterobacter cloacae
atgactgtatctaaaaaatctaaatctaatattcttcatcttgatattgatgctttcattgctaaagcacgtaatattattcatgaagtctaccacaataaagctattctttctgttcctgattaccagaccaaaacagcagcaaacgatcaggactatatcacaaaaccacttacccccctttacgcatgggctggcggtaaacgtcgccttatcaaagcgtatcgcccctatatgccagattttaagcgtattcgatactacgcagagcctttctttggcgcaggcgctatgttctgtgaagttttcaatcagcaccgtgaacacatcagaagctaccatttgaacgacattaacccggagatcatcaaccttctgaacaccattaaacgggattgttctggcttcattgacgagctgaagaccattgaagaacgcaaccactataagacgctggacggtaaaaaaaacttctactatcgcttacgtgaagaataccgttccttaccagcaggagctgagtattcagtgagaggaaccgctatgttctacttcctcttaaacaatatgttcaggggcttatacagtcagaaaaacgggcgaattttcacgtcattccagacgaataaaaatggttttgattatgaaaatatcaaaaactggtcaacagcattacagaaagctgtgatcacatgtggaagctatgaagacgttaaagttaataaaaatacgttcctgttttgtgatccgccatatcgtgattgctcgattatgtattcaacagattttaatgatgaacagcataagcaatgctacgcatgggttcaggaaaaagtagaagagaaaaaaactgtaggtatgttgtgtaataaaaacctgaatgatggtttctttagttcactacctactacaacagatagcgaacatatcaacatccaatattcgcatacaaaagcaagagtaggcgcaaacagaaacattattgagcttttaatggtattcaaagaaaacaaagaaaaaatggctgttccggttcttaaagcagcttaa

SEQ ID NO: 150344 - DNA, 564 bp, Enterobacter cloacae
atgatagcggcattacttaaccagatccgtagcaccggctttgtgcttctctcccagtttgacgctgttttgtcttctccagctcttacgcaggaagaacaggaacagaaagacgcttcattaaagatgcttctcccgctgttagagaagaaccatgatgaaagatacctgataacccgtttactcgattacaccgctcaggatctgttagcggtctacctctcaggccgttccggtagcatgaaagcgtatgcgcttctccagctcatacagaacacatccaaattgtggccgtcaggtttctatcatgctgttgcccgttccggcctacgcctgaacgacgagctggacacatccgggctaacccctatccagttagcagcagcgaaaggaaacgtagagctgtttaagttgttgctcttggatggggcagatctctatcagaagaacaaagacggaatgagtgcttatgattttgtgttgaacagcaataacgcagagctgttaatgttcatgatccgctatgaaaatgctgatatttcgaactaccgccgaaaagcttga

SEQ ID NO: 150345 - DNA, 465 bp, Enterobacter cloacae
atggaaagacaacaaacaaaactttattttgctatatggaaattaaaaggaaatgaaaaactacaggctattaaatattttattagttgtggtgaagatattcatgaaagagacaaaaacgagttaacgccattacatcaagccgttggctgtggtgatgttgaggctgtgaagctgttgttaaagcttggcgctaatcctaatgctatagacatatacggaagaacaccgctgttctataccgctttcagccctaagtacaatggtcgtcagttagatgaagctctcatagcggggaatgctgataccaccatttacgatgttaacgggcatacacgcgatcagttcgtgtatagcttcaaaagctcgatgttctaccgtccagaaccagaagcagtagaagaacaaccggaagaggtagccccttcagctcctgtgaaaagggcaggaagacgtaaagcatga

SEQ ID NO: 150346 - DNA, 1923 bp, Enterobacter cloacae
atgagcatccactatcagtccacggtggagcttgccaggagcgagttgcttgatacgcctcttaaagacgcgattggtgctataaatatcccacggcttgaagaactgacggccttgtggggtttcgctgaagcatggcagcgagtggcaccacatattcagatgcgagactggctggtttcttatagccggatggatgagaagtgtcaggctctcgccgaaccgcaactcaaagtcgcagtgcaaatgctgaatcagagttatgctgtttcactcagagaaaagaatgatgaaggtttcgtattgagtctgcagaaactgatggctgacgggcggataagcctagagcctttcgtcgaaaggcaaatatcgtttattgtgagtaaacttgatgaaattcaggattcagaaaaattggaggctgaatccacgaagacgttgctgcaggaagctgattcatactctgttctggccggtgaatcactactgaataaaatggagaattttgtagatggcgtattttatgtggaataccttgtcaataatgaagagaccttgtcaaacctgaaaattggcacactagatatcggaaatcacggtcgggaggagatgttacgctatggagctgagcaacctcagatagacctttttaatccgggaattatccggcatatcaatattgcatcgaaggcggtacagaacgtaattggaaagaatgatggtacaggtggggctcaggttagctctgcaataatgacgcttaaaaatcgtcaggttgttgaggacgttatccatttcagaaaaattgttctgagcccggactggaataataatgttttaaatcaatattatcttaataatacggcgacgaggaatctcttccctgcggaatttgctgcacaggctgttgctcacatggtgctccatggtaactatgccggtatcgagtcgtacagtgaacatattggtgaggaacggtttgacctggctttggctgcatatcttcgttatctacgtactgccgagagtatctttatagcacttaaggataaaaatgttctgccgtacatcaaaaatgctgttggcaggattgttgatttaggtcttctggtgaatatacctgtcctgagctttgttaaaggtcagtatgacgtcatcaaagaagctacaaatgcaacctctcttttaatatttgtgcgagagcgtcaaaaagcactgtcagagaaaataattgagtctgatgtgaatgctatgggtccagtatttctccatgacgtatatcagtcaggtgagcagtttgatattttgaagaaaaagctgaacgccctggcatgtggagtatttagttcttctgaaaggcttattgagtgttttacggttcttcctgtgaacatgcgctttatccttgaacaaatgcaacttcaggggcagcatatccggatggaaggtagtgtgggtatctttgcatcatggttccgtgatgcagagccagacgttgtcacaaatgccgagaacattcattttctgtggtcttgcctcgacgatacccagagagagactgtacttgatgagttgcacgatgtcttacttgaaagacatattcgtattgacagccgtattgcgattattacccgttttcataatgagttgtcgtttattgaacctgagaaggccgttgaacgcagggctattgcggcgctgtttagcgcttctgttgataatgtattattgtctcaatggcttgaccgtcagacgttttcattttcatcatggtctccggaggacgcccgtacggcaacgagttgtataatgaataactcggagatttttcctctcatctgcaggaattcacagtatattaaaaacagaatgttaccagagaaagcggacgttacagaagatagtgatacgtttccggactga

SEQ ID NO: 150347 - DNA, 276 bp, Enterobacter cloacae
gtggcttctgtttctatcagctgtccctcctgttcagctactgacggggtggtgcgtaacggcaaaagcaccgccggacatcagcgctatctctgctctcactgccgtaaaacatggcaactgcagttcacttacaccgcttctcaacccggtacgcaccagaaaatcattgatatggccatgaatggcgttggatgccgggcaaccgcccgcattatgggcgttggcctcaacacgattttacttcacttaaaaaactcaggccgcagtcggtaa

SEQ ID NO: 150348 - DNA, 1197 bp, Enterobacter cloacae
atgaatgaacaatttttagataagttcgatagagctttcattgctgatccaacagaagcattaaaggccgttgacgacatggccacatctctaatgtcagagatagaacagaagagaaaagccggtgttaaagagttagatcccattatggtaaagctacaagaagaccatgcttatctctccgggctacatgaagaaaagagcgaagagctggcattacatcagcgcctacataagcaagctggcatcgagatagacaacccctttaatgctaatccagcgcctgcagttgatgctccaaagggtagaagaccatcattcaataccactgtagtaaaggccgttgtatctcaacagcctgtagttgaagatctggatgatgaagagctaaagggtgaacagaacttaatgacgaacgacgacatagcgaagttggctaaggccgtcagtgataagcagactcctgcagctccagtagaaccggaaggaatggacatatcccaattcaagccagaacctaagccactggatctttcaggacttgatacgttcaccatgcgtaaagcagaagaggcaaaacagaaagctaaaccaaaagtggatactgacgaactggataactttagtaatcgctatgcggggaatagttttattgaaaaagtgacaaaaaaactacaggagacattttcagcatcttctcatgctcctgttaactttgtaccagaacatgagataaaggctatgtttggtaattctctttctaaaatagttaataacaccaatagtagaagcattcattttgttgataaatctgttcttaaagaagatgcgcagggattatcaattgccacaaaggatagaaccttagccgcaagaagattaactctaatggctaaggctaaaggatggagcagcattagttttgatggtaatcagcttttccttgaagaagcatatgaagaagcaacaagagcgggtttggtagtaaagccatcatcagaagaacaagccagatttttcaaagaagttcatgaagcgaaaaagttagatagttttatgccttttggcggtatgaaggaaagcaaaaaaaaggatatagataaagatattgaaaatcccggacatagccatgaacaagcccctgttcctgttcaagcccctgtctacaacgcaagaataccaacaagaatgaaataa

SEQ ID NO: 150349 - DNA, 846 bp, Enterobacter cloacae
ttgaacaactggtcaccagagcacacaaaagacatcaagagttggtttaagattgatacatatcgcaaatttgaagacctctcattgctccagttttaccatgagatatgggctcgtaacttgttctttaaggagtatcgggaagagtttgagagcagaactcttatgggttacttctcaaaaattttcagtggcaatccttttttaattgaagaagggcaactgggatacatgactcctgccaataaactttttcagcctccccatttttttctaacaactcttgatcgccttgctgaaacgagcatcattgctatgcaacgcggaggttttgtttgggatggtgatgacaattattcaataaacagagatcttcgggaagaatcactttcagatattatgccagatcagttttcacgaacagtcatgttcgagattgatttggcaagtggcacagacgaagagattgcagagtcgcttaaagctgcattaccgcagtggcgtaaaatcaaaggtatcgaaccagatcctttagaatcagttcgctttgggtatggaactatcaagaaactcatcagttatcgtgtgatacctatgctggatatcctggtgtgggcagccgttaaaaaaatccgtgtctctgacgacaggttatccagactgctatatacagacgatgacgaagaaagcgaaatgaggcagtctagccaaatcaaagataccgacaggcctttggctcttaaatcctgcacaactgactttatccgacaattccattacttcatgaacaaaaatagccatttgaagcaaatgaaagtctctgatgtaatgaaactatctgattag

SEQ ID NO: 150350 - DNA, 828 bp, Enterobacter cloacae; identical to SEQ ID NO: 120235

SEQ ID NO: 150351 - DNA, 345 bp, Enterobacter cloacae
ttggcagataaacgcagtaaaatgctcacgatgtgggtaacggaagacgagcaccggcgtctgctggagcgctgcgacggtaaacagctcgcggcctggatgcgccagacgtgcctggacgagaagcccgctcgtgccggcaaacttccgtcgatttcaccggcgctgcttcgtcagctcgccggcatgggaaacaacctcaaccagattgcccggcaggttaacgccggtggtggtaccgggcacgatcgcgtgcaggttgtcgccgcactgatggccattgatgccggactcgagcggctgcggcacgccgtgctggaaaagggggctgatgatgatcgttaa

SEQ ID NO: 150352 - DNA, 279 bp, Enterobacter cloacae
atggcggccgggtgttgtgttatgtggtgcatgcgttataatccttcacaggccacgcgcctgcttttggaccccctgatatctgtgtcttccgccaagatgatgacagatgtcggggggtttgtgcattcaggctccgggaaatcccgttacctgctcctgaacgttttactggacacgtcctgtccctgtctgtttccggaagtccgcattttttccgtaaaaccatcttttgccacccgcctgcctcaccacaaagcagtcaaaccgtcagtttga

SEQ ID NO: 150353 - DNA, 366 bp, Enterobacter cloacae; identical to SEQ ID NO: 120069

SEQ ID NO: 150354 - DNA, 165 bp, Enterobacter cloacae
atgaagatagcttttttccttgcacttgttgcttcaatcaatttaaatgtattggttttttttccgaagtactctggttggttaggcatgatggatttttacatagtgattttttcattaggatgggttctttatcaagttaaatatagtcgcgtaaataaataa

SEQ ID NO: 150355 - DNA, 147 bp, Enterobacter cloacae
atgtcagaagactttatcactcagattaaatggttaaataacacgattgaggtttatcgtggtgaagttgatgaagacactataagaagagttgaatacacggttcaacagctcagggaaagtttcggtgatgattatgaggtctga

SEQ ID NO: 150356 - DNA, 402 bp, Enterobacter cloacae
atgggctttccatcaccggctgcagactacactgaaaaaccactctcactggatgcgttatgcatccataaaccgcacgctacgtactttatgcgggctggacaggcatatttaagggctggcatacaaaagggcgctacgctcgttgtagacgcttctgttaagcctttcgatggaagcatagtgatagtggcgttagggggggagttcgtagtgaaacggctaagacttcatccagctccggcgctgttgccattggactacgcaggaaccccggtaccgatcgatctcgatgatatggacgagaacaacgctacccggatttttggcgttatgacgtattgtgtaaacgacatgcgaacaggcgagttcgacgacaccccatatggcatagacggctaa

SEQ ID NO: 150357 - DNA, 366 bp, Enterobacter cloacae
atgcagcatagaactgattttgaagggtgcatctggttaaaaccagaagcagaagcaagcttaaagaaatctggtatagcaattgatgaacttatgaaagcagcaaaagaacttgatttgttgcctaaaacaaaacgtggtgagttgattgataaacagaaacttagtggtcagaaaaaggattggttagaaaataaaacatcttatgccattaagattttgctttatccattccctgaagagaatgaacttaataatgagtttgaggatgaagtgttttattcaaacgtggatcgtgaggatatagattcccttgttgaacaaaacattaatgctcatatgttcgatttacctaaaattgattaa

SEQ ID NO: 150358 - DNA, 183 bp, Enterobacter cloacae
gtgaacagaagcatcctgtgctacgtggatgttgtttgcgattactggacgtttaccacggaaaccgcgaactgtgttatctccgttgctctgagtggattctataacatagtttgggttagcatgagctttaacgatggttctccagtagtcaacacggatctcgtctggaacaccggataa

SEQ ID NO: 150359 - DNA, 336 bp, Enterobacter cloacae
atggaatactacgagtttgtagaaacctctgtattcacgcgagagatgaaaactctactcagtgatgatgaatacaaagagtttcaaacgttcctcatagagaacccggaagcaggtgatctgattgtaggtacaggcggttgtcgcaaggttagatggtcacggcagggaacaggtaaaagttcaggtgtccgggctatttactacttctacaacccggcagggcgcttatacatgcttatcatctatccaaagagtgagaaggacagtttgacggcagcagagaaaaaccagctcaaagcggttgtagcgggttttaaaggtgaagagggctaa

SEQ ID NO: 150360 - DNA, 366 bp, Enterobacter cloacae; identical to SEQ ID NO: 120069

SEQ ID NO: 150361 - DNA, 522 bp, Enterobacter cloacae
atgagaaaaggatttaaaaaaggttttagtctcatagagctgttgttagttcttgccgttgctacaagcgtagtggcggctacgttctatgtctatggtaaggttcaggcgcataacagggtaaaccgggctacgcatgatctggcgagtatcagtaaagcaatgaatgccattctgacgacaaggccaacgatagctgaggctaatactatgctgaccagctcaaagactttaccctcttctatgctcgataaaacaggctcgttcgtaaacgcctacgggggaaagctcactataaccgctcatagcggctcaaatgacttctatgatgtttcctactacaacgtaccacctgatgcgtgtatagagcttgtaagcgccagcagagcgatttaccgcactataaccaacacttcctatagcccgaagataacagccgcttcaggcgtgagtgatatagcttcattctgttccgggtttacctctaccagctcagtgatggtctttactgacgcagcctga

SEQ ID NO: 150362 - DNA, 459 bp, Enterobacter cloacae
atgctcaaggcaatggttgtttgcgatgatagcctggcctccaccatggaagtcaatacacttgcggcggcagttacgaatcatattctcagtaattgttacattacggattcttcggtttcgaccatgtgtgataccgtaacctgggtcgtaacttgcgttcagtacatcatccccatcagggtgaccgatgtcttcgatgttattcgccatgtagttcaggcgatatccagagaggacgtagatgcctgcactgtagcacttgcgaatacgtgtattaataaccatcacgccatcaggtacatctgcatctgtggtgtaatcacttgcaccataggctgctgctgtgttacggatgccaatacctaccgcaccaaagttaaacccagagatgtcacagtcattgataagaataccatgaatcgccacgggtttaacagacacctcagagtcatttaa

SEQ ID NO: 150363 - DNA, 162 bp, Enterobacter cloacae
atgacactaactgccactatgagaaaaaaagacggcgaaatatttgagtctcctgtattaagcattcgcaattgtgaccaatgtcattttttcgttgactatgacaaagatcaactaagaaattacacttgggttcctgactatgattactttaattactga

SEQ ID NO: 150364 - DNA, 258 bp, Enterobacter cloacae
atgaaactgaacaactacctaagcaagttctttgatgttgtagcggatgaagtggagaacgatgaaggtgaaaaaatcccttctctgtggctctatgagaaaggggaagactctgaacctgtagttatcctgaaacaaacagaaaagcccggagaatggcgcgtaggagatatttactccgctctaacgaatgatgcccggctatccgaagagcagatcaagaagctggcaaaagctggaatgatcaccaaaaactaa

SEQ ID NO: 150365 - DNA, 210 bp, Enterobacter cloacae
atgatgagtgcgaaggccggactcgaacatcgcagctatccttatgatcttaagagagtaaaacttatcatgttgggcatgatcccatcattgataccatcagtcccgattggtgataatcgaacaaagagtatatcaatcttgtttgcttacactaacttcgactttatctatatcataaacacttacattgcctccagtcgcatttaa

SEQ ID NO: 150366 - DNA, 474 bp, Enterobacter cloacae
atgtgtataagagacagtgttcatactggatttgtagaaattaacaactaccccatcgaattaaaagatgttgatacttttaaaaattccgcattttacaagtttttctcgccattgactacagtaggtcctttttatttcgctatcgataatgttaaatggaaagatcaagttttcattttggaactgaggccttcagcattttctttttctccatcattattccttactagtaaggatggaagtttttataaaacgttagaggattgggataaaagggctagtctgagtaatttatcggatgagcagcagcgtttgacagtatgggttgagaatgaaataacatcaaagcctaatcttaaaattaacaatcccccatatggatttcaatggaggcatgaatggggaaatattgttgtacagtctaatgaaaaaagcttcgattgtggtgtttatatagaatggaatgtttga

SEQ ID NO: 150367 - DNA, 855 bp, Enterobacter cloacae
atgagtgaaaaaacagatacaaccaggactttagagttaaagtatgacgacaatggaaaaccttcatggcgttcatgcccttctcataagaatataaaggtccgcggaggacgtgatttacctcctcatctccctggtttgataatactcgtccatggggttaactcaacaggtgaatggtatcaaaatgcggaagagtctctctgcaaaggattaaatgacaggttagggctcaatggttctcaatttgaattgaagccgaacaaatatagtacagattgtgagaaggaggaagggaaaagtaactcgtcaccttcacctttagctcgtagaaaacttattgaaaattctgagcgctctccaatcattcgattctattgggggtattcttctgtgaggggggaagaggataaatatattatcccgttagctaatgcggatggtgaagattatcatgaaatgaaaagaacaggtataaaacaagatgacattcaaaaaaaagggccatatatatggggaggtggcccattccaaaatggcacgaataacttacactcgctttggagtgactatggattcgatgagaatctggcgggaatctctggagcaaaacttcagtatctcaatgaagataaagatagacttttaacaaatgctccaccaagaaaatactattcacatgcagctaagagattagcagatcttttagaccttatccgggataaatatccaaatgatacggttagtattatctctcatagccaagggacaatgatttcgctagccgcagtcgcattagcaaaaaaaaggaccagatactctttttatattaaactccccttatgcaatgcataa

SEQ ID NO: 150368 - DNA, 666 bp, Enterobacter cloacae
atgtttctgcgtatgaagaaaacgggcgtggaattgtattgcatggctgcaagacgcagtgtggttcgagtgtcattgcaagttatgcagctatcagtcagtgataatcttacgctgacagcgggtaaacagctggatgttggtgcgcagaaggactttacgctggcggccggtaaacaactcagcctgtacagccgtgaaggggcaaaactgttcagctcgcaaaacgatattgatattcaggcgcagggcggaaacatcaccacatggtccacacaggatacgcatatttcaagcggcaggaaaatagtcattacagcacaggacgagctgacgctgatatgcggtggcggctacatcaaaatcaaaggcgggaatgttgagattggtggtccgggtaagctgccgattaataacgcgggtatcaggaaagcggacataggcagtatgcagggggtgatgaagtcgtttgaaccttctacgtttgatgagaaatttgtcatcagaaatgcgctgacaaaagaacctataccaggtaaagcgtacaaaatcaccatgccagatggttctgttgtttccggtattacagatgcttctggagcaacgtcactcaattcttctgatgttatcggcaatatgattatcagcttagtaaaggcgaattaa

SEQ ID NO: 150369 - DNA, 1935 bp, Enterobacter cloacae
atgaacaataattatgaacctgttcgggaacttgaatgtaagtttgatgataatgggcatccttcctggcgttcatttccctctcataaaaattgccaaatcagaggtgggtgtgatttacctccacatttgcctggaattattattcttgtacatggtgttaactcgacaggagaatggttttcaattgctgaggacaaaatttgtgaaggcctgaataagagacttggattaaaagggactgattataaactggtggctaataaatatatttctgatgaaaaaatagagattgaacctcttatagaaagagatttgcctgcgcctaagaaggaaacctctccagtcattcgcttttactgggggtatgcttcacctaaaggtaatgaagataaatatgatataccgttagccaataggaaaggcgttgattaccatcacttaaaaaggcaaggcatgcctcatgaaaatattattgctcaggggccatttttctggggcggcgggccattccagaacggtacaaataatctgcactctttatggggtgagacagggtttaaagagagagtagcaggtatcaaagtccagtggtttaatgaagacaaagatcgcctgttaaccaatgcgccaccgcgaaaatactacgcgcatgctgcaaaacgccttgcagacctggttgacagtattcgtaataaatatcccaaagatacagtaaccattatttctcacagccagggaaccatggttgcaatggctgcggtagcgatagccaggaatgcacctgatgcattatttgtacttaattctccttatgcactggatcataacgatcttaatggggcgtcacttccggcagatgagtgcatttcgccagaagggcggcagaatacgttatctgccatcattgataaggtggcttccagaaaaaatcatttatcatcactgggctatgaagggctttgtgtcggacagacggcagataaaaagaactggcgaccagatgtcgctcttgccagtgaaagtggcagcagtcttgccgaacgagataaccacggacgcacttatatttacttctgtcctcatgatcgagttatggggtcacgtccgctacgctcaattggctggcagggattacccaataattctcaggggcagcctcatcctctgctgaaaaagcatcagggaaatttatttcagcgcatgctggctcgcagtactccatgtggcgaagcgccaaatcccgcaacaccttttgcaaaattgccggatggtaaaccgttctgggatgataaaggcgacaagtatcaaagcagtagtttcacctatccagatcctccggaatggcaaacggtttttattaatgccgaaaaggtacctgaacctatagatgctgcaaaattagctaattttgatgtatcacgtgttggagctgaacaggatgacagacagatagatggctggggggaaattaatccggataaaaatctaaaaaacgacaatacctatgacaattacatcaatttataccccaatcaggatattgtgattggatttaaaaatgtgggaactgaatctgagccccgaatggtgcctgtgacccgtaaggagacatttgaagaaaaggatcttcgcataagaacctatgtttctcagcccacggatcatagtactcttcctatgcgtgctgatttcatgtctcaggtggtggcatatgatttaccgattgggtattgcgatgcaacctgggataaagaatttatggcagatttacggcgaaaagcggactggacgcagggagaggatccttatctctccagtggagagccagacaaagtacctgaacctgatttaattagtcaggacactgttgttgatgaattttataaagagcaaagtaagctgccagcatatagagctgtaaataaagcataa

SEQ ID NO: 150370 - DNA, 177 bp, Enterobacter cloacae
atgctcaccgatgagctgcgccaggggatttgcggtcgctgctttcgcacgttcagtatcgtcaatgattttaatcgcgaggctatatcgattgaaatagacctgaacctgccgtctcagcgagtacttcgtgtgctttcgaatgaacttttaagttctttgcccaacctcatgtaa

SEQ ID NO: 150371 - DNA, 807 bp, Enterobacter cloacae
atgacaacgttagttgcatggataggagtagatactcatggtcccgcttcagtctacatagcttctgatagcagaatcagttggaaaaacgttgctaatacatgggattcagtaagaaaagtatttgcaacatattcttatccagagctcttcggttatagcggacgtgttgagtttcctgtacatatcctaaatcaattagtgaataccatagataacggctttctattctctttggatgccgactttgatgaaaaattagaagcaatatcaaaatttattcagaatagtttttcagaggtaccccataaacaaagcggttttggcacaataatttatgcaacacgtattgggtttaaaatgcgctcaaaattccatgtcgttgaaataaagtttaacaatgggagcattacattccaggagcaaattctccctacttcatcagacattgtaacatgctctggttctggagttacagaactaaaatcaatgcatgaaaaatggcttggcggagtgaaagaaataggttttagtagatttgtttttggtgctttgtgcgattctttgaaaaaggggaatgataaattttcaggcggcgctcctcaattagtgggcttgtataagcatactcccggattaaactttggaatcatattcaatggccgaagatattttaacggcaagctgatggatgattttaatagcttgcttccaaaaattgaatggagaaatgagctctttgagcgttgcgatggtgctaacatgtctaagctaacagacgctcaagctcaacctcgcttacaatag

SEQ ID NO: 150372 - DNA, 708 bp, Enterobacter cloacae
atgaaagtgctgaacaaaacgctgatcgtcgagtatgtggataatgacgtcgaacatgcagcttcggtagatgatttacaacggcaatgcgccgcggttgtggtgttcggaccagttgtaccgggcagtggcgataacgtgatttctttcgaccgacccgtggtggatgcgaaaagtcagggctacgatttcgcatttgctacggagagcgcctgccgctacatgataggtaaaggccatcgcaacatcgcgctggttatcgataacgagacggatgacgcaagcaagcgaatggtcgaaggttatcgcaacgtgttgcagaactactcatttccgtttaaacgccagttggtattaacagccaatgagaatgtcgaacgcgcgctgttgacgcttattaatagtctgagcaagttctcttccatcgtagttaagcgtgatgcttatgctgcagaggccatgcgcctgttccgcgaatttaatattgccgtgcctcaggaggtttccctcctcagtcttgaggattcaccgttggccacgcagttatacccgcaactgacctgcatttcctggccaatggaatccctcctgcaccagtgcgtacagcgcattaaaagcatcgttgagggtcgtccgcttcgcgaaacggaactgccaccgataattggtaagcttacgcctcgccagtcggtgctggaaatgagttaa

SEQ ID NO: 150373 - DNA, 579 bp, Enterobacter cloacae
atgcaagtaggggcttttggggttggaacataccaggctccaaggccaaatgatgcaaactcatcgtttatcagtgatgctgacggtaacaccagttgggctcctgccaatggctgtggctaccaaagctcttataacactcagcgcatagcgcaaatgtgggttaccactggcggagctggctattgccgttttctgttaaacacgaatcctcaaactacaaaaacagatgctccgtggacggtatttcagtcagcaggaacatcggacattaactttaagaaagtgaccggggatctggatctaaacgaatcgctgtcaaacatcgaggcaatggatttcaagaccttctactaccttgctgatgaagagaaagccattcggcgcggcgttattgctcaggagttggaaaagatagatccgcaatatgttcactcggctgaggagtcgggaaaaatgacactagacctcaatcctctggtgctcgatgcgctggcggcaatcaaagcgctggcaatccgcgtaagcgcattagagggagacgctaagcctcccgctcctggctcattcgctggttaa

SEQ ID NO: 150374 - DNA, 129 bp, Enterobacter cloacae
atgctggccatgccatcgaaccaagactgcaagggagcgcctccggtgaaactcggccagtcagcgcatggggagggggggatcaaatcctcaaccccttacgcttttaaggactgccgctcccggtag

SEQ ID NO: 150375 - DNA, 681 bp, Enterobacter cloacae
atgtcctttttaactgattttctagatagtcctgagaaattatattcatttttaggtgctgcagcagctatatctattccgctttttgtaaacaccatcaaagacttttattttgattttaaaaagagaagcgttgagaaaaattatattgttgtgcagctcatatatttacttgatgattttgtattcaagtgtggggaggtgtcatgggatatgggttatgatccattcttccctccaccgaacgaaaatgattacagcccacaaactaaggtgccagactttgacttgtcttcagttaaaggggatcaaaagtacctcgaacctatgatgctctataggttacaaggtgttattttagagatggccaaaacaaaggaaaagttgagagaatttacaaatcatcctgaatttggtccagagagaatggatgattatttcacaatgcgtcgaagagaatatgccgaaatcggtttgaaggctgcaaacatagtcaaagaattaagattgcatttcaaaatcccacagagggacgactggaatccaagtgatactattatccaaagtattaaccaaatgaatcgtttaagggctttcgagcaaataaacaaaatggagcgaaaagcacgtagggtaatggaaaaacactacaaacgcactccattgacgcataaagcatag

SEQ ID NO: 150376 - DNA, 189 bp, Enterobacter cloacae
atggctatttccaaatgcattaaccccgagtgcgaaaaagagttttctttttccatcattggcgagggtgttccgggaggtaaagagcttgaagagttatgctgcccatactgcggaactgtagtcgatagagaaatgatgagcggttcatttttgacatcgaaaattccacccgaacaaaaacactaa

SEQ ID NO: 150377 - DNA, 1005 bp, Enterobacter cloacae
atgaagagttttgttttctttaataacaaaggtggtgtaggaaaaacgactttgttatgtaatattgcagccttatactctttagaatataacaaaaaagttttagttattgatgccgatccacagtgtaatactacaacctattgcatgagtgaggatttggtagacgagatttttgccaaaaccaaaagagatacaatagactcttttttcgaaccaattaaaaaaggcaaaggttttttaccctcaccaattaaaccaataaagacgaaaagatttggattcgatttaatacctggagatcctcgcttatcattaagtgaggacttattggcatcagattggaaaactgcaacgggtggagacgcaagaggtctacaaaccaacttcataataaaagatatattgctgaaatatgaaaatgagtacgattatattttctttgatgtaggcccatcactaggagctcttaatcgagccattttaatttcctgcgattattacataatgccaatgtctgtggatatgtttagcttagcagctatagaaaacatttccacatcgctaaataaatggaaaaaatatattattcgaagcttagaaaatcatgaggaagaagaaggttctgcatttaccatttcaggccatccaattcaatggaaactgaaatttcttggatacgccgtacaacagtacaccgctaagaccgtcgctggaataaaaagacctgttagcgcatatgaaaaaataaacagaaaaataccatcacttatttttaaacatctcgtcgaggatcaaaatctagatagccaactctttaagctgggtgagatacaaaatctacatagtttagtgccactttcacaatctgcaaactgtcctatttttaagttgaaatctagtgatggtgtagtaggtgcacattttacaatggttaaagaatcaaaagatattttcacctctattgctacaaagattaatgctcaagtggagttactgaaatga

SEQ ID NO: 150378 - DNA, 867 bp, Enterobacter cloacae
atgatcaagtggcctgaggatattattaataatattgccagaaggaaaaccataatctatttgggctctggtgtttcacgtaacagcaagaatgaaacaggacgcaggccaaaaacttggttcactttactaaaggatatgcttgacgaaaccactgctcccaaagcacatattaacaaattacttaaagagaatgactatctaacagcctgcgaaatactaaagaaaaaattgggacttgcaaaatttgtcgcccttcttcgcgatgaatatcttacacccgaatatgaccctgcagatatacacaagcatattttcgctttagattcaagaattgtaatatcacctaactttgataagatatatgatacatatgcaagtacacaaaccagaggctctactttaattaaaaatcattatgatgatgacttgctctcagccgtcaaggaaaatgggcgcttaataattaaagctcatggcacgattgatactcctgagaaattgatttttactagaaaggaatatgctgaagcccgatcaaaatatagtggtttttatgaaatactacaagcactggcaataacacataatttcgtttttatagggtgcggtgtaaacgacccagatattagattacttttagaagatacattttttaaacatggaagttataaatctcactttttcattttggcaaaaggctccattcacaaagaccaaatagatatcattgaaaatactatgaattcgaaagtcataacttactctccgaataataatcatgaggaattaaccaaatctttagaagatttggtgtcattggtaaatttgcagagagacaatctcaaacttactggaaattggtaa

SEQ ID NO: 150379 - DNA, 228 bp, Enterobacter cloacae
atggtgaaacaaaaagaagaattaccgagcaagggctacgcggtcatcagatgtcacgatggggttatcgttgcaagactgcactcatttcctgagagtgaacgagcgctaatgtacagacgtggtgatgaagtatccttcatgccgttacaggatgatgagatggttggaacaccgacactctttacgcagatgctcatacgggctggttaccgtgttcaagtctaa

SEQ ID NO: 150380 - DNA, 357 bp, Enterobacter cloacae
atgagcaagtcactgaacaacatcaacaaaaaggcgctgattgcaaaaatcaaaaagcagaccgatagctttgacacagtggtacttcacgaggatgaagctaatgcactgctggatgagctggaggttgctactgatgcatgcaatggctggcagagaaaatttgcagaggcagatgaaaggctggaagccgcagagaagcggattgctgagctggatgcgcgggaggtgaaactgcctgaacgctatgacattgaactatgtccaatgcctgcgccaaacggtgaatggtatgcacgggatgatgtgttggccgcgctagcaactgctggtgtccacatctacgaggaagggtga

SEQ ID NO: 150381 - DNA, 312 bp, Enterobacter cloacae
atggcgagcaataacctctggataatcattcgcgccattcagcacggtggcgagatcaccccgcggcaagttcgccagttgctgggctgcgacagcaaaaaggcctgtcgcctgctggagcatctcgtttctgctggcgccgtgaagaacatcggtaagccgcgtcaccctgttttcgttatgcagccagacggtgaatcgcgcatcaaaccaatatcggtgacgcgccagaatcctggtatcgccgaagtttgccgacagaactggcagggctatcagattcacaaaattatcgggagtgcgcgcgcatga

SEQ ID NO: 150382 - DNA, 858 bp, Enterobacter cloacae
atgagatttagcacacccttacgctatccgggcggaaaaggaaaattaacaaattacctaatcaagctcattgatatcaatgggttaggtggctgcgagtatgtcgagccatatgctggaggagcgggtgttgctatcaaccttttgttgtctgagaaagcatcaaatattcatttaaatgatttaaataattctatttattgcttctggaaatcagtattggagaatactgaacagctatgttctttgattgagaacacatctgttaatatggatgaatggtacaaacataaagaaattattagtaatcaagagcgttattctgccattgaggttggttttgcaactttctttctcaatcgtacaaatcgttctggtattcttcttggtggtgtaattggaggtaaagatcagttaggtaaatggaagctggatgcacgattcaataagaaggatttaattcaacgtatctgcaaaatttcagcatataagaataatatttttctgtataacaaagatgcgaaagagtttttagaatctacggtgtcaaatttccctgaaaaaacgttaatatatcttgatcctccttactacatcaaaggaaaaggattataccaaaatcattataaacacgacgatcatgtcgatgtggcaaaaaaaatcatcgctaatgatatacattcttggatcgtttcttacgataacactcccgagataaatcagatgtattctgggcttagaaaaattgagtatgggattaattacagcgcccagtcgcgttatcagggaccagaggttatctttttctgcgatactcttctcattccggaagtttctgatcccactaaagttaagtga

SEQ ID NO: 150383 - DNA, 1707 bp, Enterobacter cloacae
atgtccaaacacatcacgaagattaaacagattaaaataattaactttcgcggcttgaatgattgcactgtggcttttggagagcgaataactgctatatgcgggaaaaacggaacctccaaatcaaccatacttggtattgcagctcaaatgtttaactttgaaactgactatacaaagcaacctgtggtagatctaaagaaatataaatcattggcagggaaaccattttcctctcagtttagcgaacatttcagactatctagcactcacgatactcccagctcaatgaatgttgatgtttctatctatgatggtgctgaagaaaaagacctagataaattgaagctgggcttatatttgagaagtaatcactcatctccacgagctacagttcgtaataatactactacaaatggagctagtgatagccgaaaagtaacacaccccgttatttatcttagtatgaaacgtcttacaccggttccggatagacaaaaatataccgtctctgatattgacaactatatgatcgagaataaaaatgaatttatttctttaagttcatatatattaggggtgaggggatcaaatgccttaactaaaactggtgggactattaactcaatggttgttagtggcgtaaaatatgatcatcagtctgtgtcagtaggggaagataatttaggccagattttacaagctatattttctttcaggaagttgaaggcagagtatccagattaccatgggggtatgttattgattgacgaaatcgatgctggactattccctgctgcacaacgtcgccttctcgaaaaaatgacttcgttctccaaggaattaaaccttcagattatcttcactacccactctcctgaagttattaataatatcgctagattaagtaaaaacgatggtaccaactataagttggcatatttgactaatacctatggaaaacttgaagtaaaagaagactacacttgggcagatataaaattagatttgttcaatgagaccgtgcattcgagtgataaagataagctacaaagagtaaatgttttctttgaagataaggagaactttgatttcttcaccgctctggtcacacgacgagatgtcaataaattattgaaccttcacaaagatatcactcttggctgcaaaaattatcttcaactgttgtctaaaaaggttcctggtttttataaatcggcaatcatagttttggatggtgatgtaaaagactcaaaatatgagaatgttgttaaactccccaaagaacttcctcctgaccaattgatatttgaatttttgtataatctcgatgcatctgatgatttctggaaaaataacattagatatacaaaaccatatttcctagaaaaaacggtgagaatcatcgatgtattggaattgacagaagatgaaattgatttggctgcaaaaatagcaagtatggataaaactaaacttcaaggaatagctctgcgaaatctatttaaaagttttgttgaggaaccttcatttcaacaactagtcaaaaatggtggtgttaattataatccctataggcgctgggcactcaattacccattattagtggataaatttaatacatcattaattgaatcactgagatttgtaattggtgaagagttaggtgtggaaactgataaactcaaagatacgctttcaaaataa

SEQ ID NO: 150384 - DNA, 273 bp, Enterobacter cloacae
atggcgcgcaaaaagaaagaagaggctcaaaagacccgccagcagctgattgaagccgctatcaggctattcgcgacgcgtggcgtggccagcaccacgcttaccgacattgccgatgcagctcaactcactcgcggggcggtttactggcatttctcgagtaaagcggaaatatttaacgcaatatgggaacagcaattgccgctgcgtgaaatcattcgtgacaggctaatgctttccgaaaatgacgacccatttgttaatgcttcgtga

SEQ ID NO: 150385 - DNA, 285 bp, Enterobacter cloacae
atgaagaaaccctctaatgatactgcacctttccagatggtattcagtgagctttatcagtattcagaattaactctgatggatgcatatatttattcatttctgtttgttaagtcttgctattataaatccattcataagcctttctgtccttcagtgcattacatcagtattgaatgcaagatctcagaaagtagcgtattacgttctttgaagttccttaaaaaactggggttggtaactgtggtacgcaaaggaaacaacatcacaggtcacgtctcttaa

SEQ ID NO: 150386 - DNA, 210 bp, Enterobacter cloacae
atgaaaatgaatatggcctctagcgagttgcctatgccagagcatttcttgctatctaaaaactttgaatctctcaatatttgggattggtttatttactctgccatgctatcaactactgattataacgatttgccttgcacagttaatgtgagctttaaagagttagaaatttattgtaaatgttcgcatgtgactattcgtaaatga

SEQ ID NO: 150387 - DNA, 813 bp, Enterobacter cloacae
atgaagaagattatgatgggtgctgttctactggctgtgtgtggtagtgcatttgcttcagagctaccacctacagattacacatgcatcagggaaacagaaacgggcttcaatgtaattggcattaaatacgctcaatatgaaggtcaatatcctttcatcctttttggtgaatcagacacaagccttgcatattatcgctatgactctctgaacgatttgaaagaaggtgtttatgacctacagaagaaatctgttatttctatttccagtgacaatagcaactaccctctgaaggttcactataaggatgaaaagaaaatacttgaatatagctgtcagctagacgctgaacagacagaaagtgatttagaagattggcatagaatgcatccaactaaaaaggaattagcagagagaaagaaagctgaagctgttaagaaagctgaagctgctgctcttgctgctctaaaaaagatggaggctgagagggctgctgaacaggctggacagaggaggcctgagagcgtttctagcagtgcatcaggtgcagatataaataattatgtcaacaccatcagagcaacgatacagaggcgtttagatgcatctaaatacgctggtcagcgctgctctctgacattgcacctaagcagggatggaactgttcaggctgtagaccatctgacaggggatgataatctctgcaatgatgctcttgctgctatttatgaaatagataagtttccctcaccacctagcgatggggtgtatgcagtattcaaagatgcaactttgagcttgcggctatag

SEQ ID NO: 150388 - DNA, 204 bp, Enterobacter cloacae
atgaagattttaattttaattacctgtgttattgttttcattctggcttctcgctctcttgagcgtgacaaacaggaagaagcagcacgaaagaaagaaataatagaccgtgcaatggatgaagcctctgaaaccatcaacaaaagaaagcttgaagaacacgaacagtttaagcgtgatttgaaaaatggagtgtttaattaa

SEQ ID NO: 150389 - DNA, 543 bp, Enterobacter cloacae
atgaataagattttattggctgctttactggttgcttcatttagtgctgtggctggtaattgtacttaccctgatgatattgcgtctgatggttctatctgtggtggtcgtgctgcttctgttcgtgcgggtggtgaagttccaccccctgaatatgttcagcctgtaagtgataattctgcatcagatacatatgttcaaaaagctgattgcactaacggttattcagtgatggaaactactgtaatgacgggtgaggagcctactcagattatatttatgcacagtggaaaggttgtggctcaggaatcaggaacaagtgcaagcattgattccaccactgataatgtagatggaattaatagcactactaattcaattgctcggacgggtaatttaaattcaggcacattgaaattctatacgctggcttatgagtttaatcgcgttaacttcaatgcaaaagatgttaataagggcgtgattatcattaataaagatgttgtagcccaatgctctgtttctatgataagtggtgattaa

SEQ ID NO: 150390 - DNA, 363 bp, Enterobacter cloacae
atgattcatacaaatgtaaaacaaacttcatacagcgctaagaacggttatgtgtggcgaaagctgtaccagaaacaagcgctcagcgcttccatacaagcacgtgatgaagaggaagcggctaaacgttctgcactgatggaaattcgattcatgcaacttgctcagcttgccgtgccattcgtggcaatccgtgaaacgctcaagcaatatagaaatgagcttgtgatgcaaagcaagattgctttcttagcgagcgtagcgggaaatcccgcttcggtttcagaccgctctgcatttttgcagaccgcaccagaagccccacaagcgacgtttgcaccacaggcaacccaatcactctag

SEQ ID NO: 150391 - DNA, 282 bp, Enterobacter cloacae
atggaaaacttttatatcccacgtgcagacgtgttaaacctcccttcatttattaccactcttgatttagttgttttcggttatctggtaactgctgctaatggtgaagaaaaatctgtcactgtttcactgaacgaattagccaaacgcctacgcacatcacgccgcgtattaactaccgtaatgcagcgattagataaagctggattggtaagccttaaatcattcaccagtgaatttaaacctacctattacattcattccactgacagcttcatttaa

SEQ ID NO: 150392 - DNA, 240 bp, Enterobacter cloacae
atgaaagaggaaaaatataaagtccgttactttgaatccttttatgcattatttgaacgttgcgaaaaactctcattagtggaggcagttatttattgccacctgcaaaacgatggaacgttttacggcgctgagtatgcacctacattgaaacgtcttgctcgtctggctaaatgcactacccgaacggcaagcacagcaatggatagccttgaaaagctaggcctgatgatactttag

SEQ ID NO: 150393 - DNA, 633 bp, Enterobacter cloacae
atgcttataaattttgatcccttacgagattttgaacaagacagacgatctcatccgtggggaaaaactgcttacaacgaaagggccggtttttactcaaacttcattcaacacccggaactcataaccgaagtccttgaagactttaagcctcacgaagataaaaaggctatccaaacattctatacattcctgaaatggataaacggtgctgaatcagcttttgaaaccaatgattgtgcattaagggaaaatgtcatagcgaacactgattcgctgttcaaattctcccacaaaatagatggccgggtagagttctttcttagagaacatcaatataactgccacaaagatatttctacatggctgatgagaatgtcatctctttatttgcaggtagaaaggcccgatttcttcaatgcccttatcgatatccagctcgcaccgacagacttcatcacactgcctgctgatcaacgtgatggctacagaatcaggctggtcttcaatgcgtatgggaacggtgatgttgaggtatgggaggcgctcaacactacgtttaacagcatcttcgaatccaccaaacggttgaataaggctctctctgaaggagccagccccacatttccttga

SEQ ID NO: 150394 - DNA, 588 bp, Enterobacter cloacae
atgcaggaagtaatgacccgcattgagcttggcggtgtgctcgggaaaacattcggtaaagttcaccaccgcctgatttcccgcgtgaacgaagcgagtgttgcgctggcaaagactataccgggctttgagcagtttatgatttccagccaacgccgtgggctcacatactctgtgtttaagggtaaaaaaaacatcggtgtggatgaccttggcttcccggttaccggcgaggttattcgcattgtcccggtaattatcgggagtaagaaagcggggctggtacagacaatcctgggagcggtgctggtgattgcatcgatctggatgccaggtctgagtatagctgccagcaatatgatgtttgctgctggtgcgtccataacgctggggggggtagttcagatgatatcccctcaggctacagggctggccagcaaacagagctcagataaccgcgcatcatacgcgttcggcggagtcacaaacaccgctgcgcagggctatcctgtaccgcttctttatggccgtcgacgcataggcggcgcgattatttctgccgggatttatgtcgaggatcagcagtag

SEQ ID NO: 150395 - DNA, 423 bp, Enterobacter cloacae
atgtttctaaagagcgaactgcttgaatgcaacggcagcagcgtcacattgttccagctttcggcgcttcagcgtattgaatacctcgaatacctgaagcagctggaggcagttgaagctggcgattttcaggcggccatcaccctcaccgtaaaaagtggggcgttcctcgtggcgatgtcactctggcacggccacgaactgaaaggctcccagggagaaaatgcggcggcagaagtggcaaagattcaggatgaggtcatgcagacatggccgaccgaactggttgccgaagcggaatataaggtgaaactcctgtccgggatgatttctccggtaactgatgaccaggcagcatccggagaagaagataatgaacccgctgaacccgttactgcggaaaagtcctcgccagtgagctga

SEQ ID NO: 150396 - DNA, 417 bp, Enterobacter cloacae
atgacagagaaagaaaagctgatcgctcgcctgaatgaccttggcactcagcttaaccgcgaggtcagcaccagcggcacgattcaggaacttacgatgcgtattgctgagctggaagaggagctggatggtgatgccagttcgattgacggtgaaaacggagagaagaatgctcccgatagcaccgacagcaccgacagcaccgacagcgatgtagatggcacggaaaaagtaaaaacggaagcggtcacaacggatgaccgggtatcagtagaaacgctggctaccctgcatgttgacgcgctgcatgccacgcgtaacgaaccggtatccatcgttgagcccggagtgattatccgcgtatccgaacaggatgccgatgagctgatcgcaaaggggctggctcgcgaagtctga

SEQ ID NO: 150397 - DNA, 1023 bp, Enterobacter cloacae
atgaaaggcttatttatccctggtgtgactgagcttggcgcatcatcagatagttttccatccggcatagttatttccggtgctaatgttatgacgctgccgcctggcgagtgggttgaccttagcgatatcgatcttacctcctctgcactggattatcgggtttcgttcagctgtgcaagcaaccatgcatactactcagctgacggaactattcagttcgctgcacctgacgtatggccgcttgagtaccgagatggagtggcagttggaaggcataagcctgaagtgcagtctgataatattgttgtctatgcgatggatttttcaaaatggctcttgattagcacaagtgtctctactgacgaaagcgaaagaattatctcctcaagttatgctcagagaattacagcaacaagaacagataacttttcaagggttatgataacccccacgctaaacccaactgaatatacgcttaaaattgtagttaagtcgggaaatacctcctttttacatggtacaatcgaagataataatgctctcagcaacacattgcgtttttatgtggatatgacaagcctgaattcttcagcagttgtatcgaaggggactataagtgcattagtaaattcaaaaaatatatttaatggctgggtggaggtaattcttaaagttactataccagcagcaggcgcgtacaaagtattctttggaccaagctcttcttttggtagtacaagctcaaacaacggtcagtatatactttctgcgtttgcccagctggagcgctcgacaataagtacatcgctaatcaatacgaatgggatctcagccaccagagcggctgctttcgcgacagtgaaaaatcccggagggctggcgagtgcaatcatggtccactattcagacaataccagtgagcaactggaaatcccgactaacagtccgtctattcagctgccacagtctgttaatgactggggtaagcgctacatccaacgattcgagtacataagataa

SEQ ID NO: 150398 - DNA, 279 bp, Enterobacter cloacae
atgagcaatcaagagttaactgaagttatcgtaacaaagtacgcgctttcaagtggtccgtttaaagttatggccgatgtatcacatggcggaacaatggcttcgtacaggcttcctgggtgctatttaacaactgctcacggtaaggatttttggctgaatgaggctgatgctttagctgattgcgagcgtcgtcgactggcgaaaataaagtctcttgagaagcaaaaaaagaaactcgaaagcatgactttcctcattgaaggagccgcccaatga

SEQ ID NO: 150399 - DNA, 546 bp, Enterobacter cloacae
gtgcgcattgagcacttccagggcgcgctgaataaaggcccgcactatccgctgaacgttctgaaagacgtgaaggtagagattgaaaacaacgccgagtttgccgagctgaaaagcggcagcgtcagcgtgcgcgtcaccaaaggcgagttctgggcgctggatttcctgcgcaacggccagcgcattaccggcagccagctgaaaaacaacggctacgtacaggacagcaataccgatcgcaactatgtgtttgaacgtctggatctgggcgtgggggaaacggtctacggcctgggcgagcgcttcaccgccctggtgcgcaacggtcagacggtcgaaacctggaaccgcgacgggggcaccagcaccgagcagtcctacaaaaatatcccgttctacctgaccaaccgcggctacggcgtgctggtgaatcacccggaaaacgtctcgtttgaagtcggctccgagaaagtgtccaaagtgcagttcagcgtggaaggggaatatctcgactactttgtgatcgacggcccgacgccgtaa

SEQ ID NO: 150400 - DNA, 186 bp, Enterobacter cloacae
atgaaaatcagtgatggaaactggcttattcaaccgggcctgaacgtgacgtatccggttcaggtgttcgacgtggagcagcagggcaatgacctggtggtgtatgtcgcgccgcgtgacgtgcgcgaacgcacctggcagctcgacacgttgatgttcacggtgcgcctgtttgccccgcagtaa

SEQ ID NO: 150401 - DNA, 198 bp, Enterobacter cloacae
atgggcatactattgacaatggcgaacgatgacgtttatgacatgaatcatctcgatgacactgttgcccgtggcttcaatacctctcactcatcgcatcaatgctcagtcatcgactttgaagttgagcttaaaaagaaagattacattgaggcaatggaaaggattgcagctgctgaagatgaatttgattggtaa

SEQ ID NO: 150402 - DNA, 168 bp, Enterobacter cloacae
atgatcgagaagaaaaccaaactaccgccgtccacatcgttaatgatcccggatgccacattccagattctgttcaaagaagcaaagcgacgaaaaatgagcgtaagcgcactacttcttgaagagtgtcaaaacctggcggttaaatattcgaaagctggcgcgtaa

SEQ ID NO: 150403 - DNA, 237 bp, Enterobacter cloacae
atgtctcctgacgagatgggcgcattacaggatattctcaatagctgccctggtgcattctggaaacccaggaagatgaaaatcttcaatgtggattcttcaaatctccacaaatggcaaattcttaatttctcctcatacgaacattattgcggctggctttcggttaatcaccttaacaatttaacccgcgactttgacactctatttgataccaaggaacattatgactcttaa

SEQ ID NO: 150404 - DNA, 369 bp, Enterobacter cloacae
atgagttggaataaagatgttgctgtttcgtatctccgttcacacgcgctgaggcactattatagtgaatgtgctaagtttacccgtctggcgattctggctggaggtgttaaggtgcctaatacagattatgcaaaagattatggggcggaattattacgtgctggattccgtgagctgccgcccggttcgactttaatagctggcgatgtggctgtgatacagccatatcccggaggaaacggcataggtcacatgactatgtatgacggcacgcagtggatttctgattttgttcaaaaaagcatgtatccggggcctgggtaccgcaaaatgcaaccatcatttaaaatttacaggatgcattga

SEQ ID NO: 150405 - DNA, 213 bp, Enterobacter cloacae
atggctacctataagcagatccaggaatacgtcaaagctcataatggtgtaagcgtaaaaacatgccatatcgcacatgttaagcatctgcatgggttccagatgaaacaggcaccgaaccgcatttctcctgactcaagggtgtatgaatgccctgataagttcgtcacctatatagagcaagcgatgaagcatttagggatgatcagttaa

SEQ ID NO: 150406 - DNA, 1191 bp, Enterobacter cloacae
atgggcatcttattgaaagatgttttcgatgttacagggcatctcagattcgatgggcagagaactctacagccagatgaggagcacatttattgtgtcggcatagcaggtggtgggcggttcgacttcactcatgaaattaaagatattaaaggcgacggattttatgtttctcaatctgactggttgtcaaatagtgccattactaatggcctgcgcctaagaggaacgatttccaacggtgttattgacggccgtaacgccatctcagttatcagctgcaaaaacttcaatattgatgtctctatcaataatgttggcggcattgtaggcgggattcagcagcctggcggagttgatttggagcctaatttcgactatcaaattattgatagcggtttcattaatatagttgcagataatagcgcatttggagtatgcatattaggtaagtcgtataatgtcaataatcttaaaatcaaggccatccttagtaataactgcaaaccatatctgacacgtttcaaaaattgcgacattgatattcaaaataaagatggaggggttgctgctgaagttgatacatgtgtggatagcaagatcaaaattcgacaccataattgcaattctggtgctatttacggctttaacgggcaagtattgggatgtgagattgagacaatcgggacgcagtggaaggattcagttgcaggacattacgacattcaatcatgtatatttaaggtttcagcttatgattgcctgggcacaggcactgggttcgcctggatcatcggcattcctaatgggaaaacatcagcgtacatacctgcgtataatcgttacagtattgactgcccaaggcagaccaatgcagtgtatgcaattcgtaacgcaagccatcttgtattaacccggtgtattctatgtaacagcaatcttggtggatggaataactggggggatgcagtacttggtcaggttgcgaacgttattgaaagtacaatatgtaacactctcagcagttcaaacgccatgccaggttctggttattatcctcagggagttatcgttaaagcaaactctaatacggttacctcagggcaggtgctctatggatggctgagactaacaacaagcaatagtcacattttagatacagactggaaagccgtgaaatttttgtggtga

SEQ ID NO: 150407 - DNA, 1461 bp, Enterobacter cloacae
atgaaaacaataaaatataaagattacttaatcgctatattatttctttctcttccaatatttttgtcttctcaatattatattgacgatatggggagggcaacaaaaggttatactaggtggggggttgatggcagaccagtttcagactggttaatgcagttgctatcttttaatcatagattaattgacattttccctttacctctgattttgtcatgctcattgatagccttagcactttatatgtttcataagaaatatatagtctccggaggtatttattttatcgttcctcttggatatgtgttgacgccctcactcccagagatactttcttatagatttgatgtgctgccgatgtgtgtttcattatgcgcaccacttctactgatcaatgcaaataagaatgactataaattagactttttattatcattagccactgtaattgtggttttttgcacctaccagccatctataaatctttacattttttgcagcataatacagtttatgcacactattgagcataggaatgagcataaatatgcgttaatgcttgctgcatccagaattttggcccttgctttatcagcattcttatacttgaaaattatcctaccgaatacattttcagggtcacacaattccagccatccaggaatagatggaggtggcttgtttagtaatgctgtcaacaatctcactgcatattataacttcgttgatagatttttctttcatggtatggcggcaatttatttcttagcagttacatgcttaatattgctttgttgcatcaagcttgcaaagaaaaaaaaggggactcagaaaagtgtttcattaatattcacatacctagcattagtttcactaccttttgtttctttgattgccacgatgggctccctgctacctcttgagagtgccgtaccttatttttcacggttatacgtagggtttggtggattaaacctgcttgtcttttattgtgtttacgtattaactaaaaacactcaagcaaaatatttaatccttttgctgctaattccactcacttattttgccgtgtatatctatgcatttggcgctgcatccaaagctcagtccgaatatagctctgttattattaatgatataaagcacagcttaagaggaatagattataactatattgctttcaatggagcatatgcgaaatcgccggttctgctgaattcagaaaataacttcccgattttcaagttcaacataccaaattatttttacaattggtcgtggccttacaatagattcaactttgaaggcttgtaccttccaagggtacctgataaagatacggtaaaaaatgcattgagcgagatgtgtacttccagttttactcgaaatgagagattatttgacctgcatatcgttaaagatattgcaattgttgatttcgacaagaaatgcaaataa

SEQ ID NO: 150408 - DNA, 2694 bp, Enterobacter cloacae
atgataacagaaaagcctcaccgcccgtattatcaacagaccgttgatgaaaccctgacaaatatccaatccagcctcgacggactcagcagtacagaagcgaccgccaggctggaaaaatacggcgaaaacgccttaccgcaaaaaccgggtaaacccggctggctgcgctttctggcccatttcaacgatgtccttatttacgtccttctggcggcggcgctgctgaagctgataatgggacactgggtggatatgtttgtcattcttggggtggctatcattaacgccctgattggccatattcaggagagcaatgcggagaaatcgctgcaaagcattcgtaatatgctctccagcgaggctgtggtcatccggcagggcaaccatgaaactatcccgacgacagcgctggtgcccggagatatcgtggtgatacgcgccggggatcgcattcctgccgatcttcgcgtgatagaggcgcacaacctgcgggtggaagaagctattctcaccggcgaatccacggtagtggagaaaagcagcgatgtgctcagcggcgaactcccgttaggtgaccgttacaatctgctgtattcgggcaccaccgtcagctccggcgggggaaaagggctggtggtggcaaccggtggggagaccgaactcggccatatcaaccagatgatgtcagacattgaaaaacaccgtaccccgttgatggtgcaaatggacaagctcggcaagaccatttttatcaccattctggtgatgatgctggcgctgttcgttttcagcctcatcttccgcgatatgcccgtttcagagctggtgctgtcgctgattagccttgcggtggcggcggtgccggaaggattaccggccattatctcgatcatcctctcgctgggcgtgcaggcgatggcgcgtcgcaaggcgattattcgcaagctgcctaccgtggaaacgctgggggcgatgacggttatctgctcggataaaaccggcaccctgaccatgaatgagatgacggtaaaagcggtgattaccgcggacaccacctaccgcgtggagggagacagttacgagccggtgggcgctattcaccctgttgacgatccaacaccggtcaccgtgacccaggggtctgtgcttgagcgctatctgcgcaccgtcgatctctgtaatgacagccagctgatcaaagatgagcaggggctgtggaaaatcaccggcgggcccaccgaaggcgcgctgaaggtgctggcggccaaaatcccgcttccgacaattgacgccgaattgcgcagtaaaatcccattcgattcgcaatataaatacatgtccaccctttatcacctgggcgacgaagaggtgatgttaatcaccggtgcgccggacgtccttttccgtctttgccagcaccagcagacccaaaacgggctggagccgttcaacctgcactattgggaagagaagattgaagagtatgcgcgcgagggattgcgcatggtggctgcggcctggaaaccggccgccagcgggcagcgcgagctgacgcatgcggatctgcaagaaggggtcatactgctcggcattgcgggcatgatggatcccccgcgcccggaagccatttcggccattgccgactgcttgcaggcgggcattcgcgtgaaaatgattaccggggatcatccacaaacggcgatgagcattggacagatgctgggtattggcaacgcggcgagcgccattaccgggcgcgagctggaggcgatggacgaccaccagctgagcgaggcggcgcaaaaatacgatatctttgcccgaaccagcccggaagataaattccgcctggtgcaggcgctgcaaagtaagcaggaagtggtcggaatgaccggggacggggtgaacgatgcgcctgcgctgaagcgggcggatgtcggcatcgcgatggggatcaaaggtactgaagtcaccaaagaagccgccgatatggtgttaacggatgataactttgccaccattgcccgggcggtccatgaagggcgtcgggtctacgacaacctgaaaaagaccattttgttcgttatcccgagcaacatcgcccaggccctgctgatcattattgccctgctggcggggaacctgatcccgttaacaccggtactgatcctgtggatgaacatggcaacctcggcaacgctgtcgtttggcctggcgtttgaagcgggtgagaaggacatcatgaaccggccgccgcgtaagtctaacctgcatgtgatggacggatatgccatctggcgagtggtgtttgtcggactgatgattgccatcagcgcctttgtgctggaggcctggctgcaaccacgcggttactcgccggagttcatccgcaccgtgttgctgcaaacgctggtcaccgcccagtggttttacatgctcaactgccgcgtcaccgacggtttctccctgagtaaaggtctgctggctaataaggggatatggatcgtgagcggcgtacttctggcccttcagcttctgatcatctatgcgccgttcatgcaaatgctgttcggtaccgaagcgctaccgttccgctactggatcattacctgcctgattgggtttgcgatgttcatgattgttgaagcagaaaaagtccttacccggagatggcgcacgacgaaaagatga

SEQ ID NO: 150409 - DNA, 345 bp, Enterobacter cloacae
gtgggtttcaaaggcgaaacgcagatcacgaacgacctgacaggttacggccagtgggaatataaaacctacgctaacgataccgaaggcgcaggcgacacctcttttaaccgtctggcctttgctggcctgaaatacggagaatatggctcattcgattatggccgtaattacggcgtcgtgtatgacgttgaagcctggaccgatatgctgccggtatttggtggcgactcctatacctggaccgacaactatatggttggccgtactaacggtgtggcgacctaccgtaataatgacttcttcggtctggtcgatggcctgaactttgcgctgcaatactag

SEQ ID NO: 150410 - DNA, 528 bp, Enterobacter cloacae
atgcatcatttttatgaactggcttataggtgcacctatttttcgttaaatgcgataaacgaagccgatgaaagaaccgtcgacgagttgtcagaaaccggatcgacaccgcctgtcaaaaatctccaggcactcaatctccagaagatgattcatgcagttgggttgttttcaatttttgaagctcatttacagcggaggttgggtgccaaaaacggttacagagaagcagagttgatacttgaacaagcagggcaattagcattgaaggaggatttccataattgttatcttgctatcaatgccttaaaacatggtgatggagcgagttataggctcttgctaggtaaaattagctcattaccttttgtggtggaaacaccaaatgtacctgttttcgaagagggtgatgtgtccggcattgatgggctggtgaaggttgatgatgcctttatcgaatattgtcttgaattaattgaaaaagtctctgtttgcatttcaacccatcgccctgctttcatgctttga

SEQ ID NO: 150411 - DNA, 198 bp, Enterobacter cloacae
atggacggagaaagctttaactttgatgacaatgatattgaatttattgcttcaatgtatgcatcatgtaaattatcaggaagtatcgcccccataatgcatataatggttagcattccaaaaaataagaaaaaacaattctacgaacgagttgagcattattgtagtttatattccaataaaaacccaccttcttaa

SEQ ID NO: 150412 - DNA, 1005 bp, Enterobacter cloacae; identical to SEQ ID NO: 31749

SEQ ID NO: 150413 - DNA, 255 bp, Enterobacter cloacae
atgcacaacagaaagccgctgaaatttctgccagggctgctgatctgtctgatagtgttaaccagctgcgtgccgaagcaacaaaatatgccatacgccttgacgcagcgcagcataccgcaaatcttgccgctgccgtcagaggcaaaacaaccaaagccgccgaaggaatgctcaccaacatgctcggagatattgcagcagaagctcagctttatgctgaaattgctgacaaacgctacatcgcaggagtga

SEQ ID NO: 150414 - DNA, 534 bp, Enterobacter cloacae
atgaacacaaaaatcagatacggcctgtcggctgccgttctggcgctgattggtgctggcgcatctgctcctcagatacttgaccagtttctggacgaaaaagaaggtaaccacacaatggcataccgcgatggttctggcatatggaccatctgtcggggtgccacagtggtggatggaaaaaacgtttttcccaatatgaaactgtcgaaggaaaaatgcgaccaggtcaacgccattgagcgtgataaggcgctggcatgggtggagcgcaatataaaagttccactgaccgagccacagaaagccggtatcgcgtcattctgtccctataacattggccctggtaagtgttttccgtcgacgttttataagcggcttaatgccggtgatcgtaaaggcgcatgcgaggcgattcgctggtggataaaggacggtggacgtgattgccgcattcgttcaaataattgttacggtcaggttattcgtcgtgaccaggagagtgcattaacctgctgggggatagaacagtga

SEQ ID NO: 150415 - DNA, 312 bp, Enterobacter cloacae
atgactcaagactatgaactggttgtgaaaggagtccgtaattttgagaataaagttacggtaactgtagccttacaggacaaagaacgctttgacggtgaaatttttggcctggatgtcgccatggaccgtgttgaaggagctgcgctggagttttatgaggcagcagccagaatgagcgtccggcaagtcttcctggaagtagcagaaaaattgtcagaaaaagttgagtcttatctgcagcatcagtactcctttaagattgaaaatcctgccaataagcacgagcgtcctcatcataaatatctatga

SEQ ID NO: 150416 - DNA, 216 bp, Enterobacter cloacae
atgaaatccatggacaaaatttcaacaggcattgcctacggcacctccgcaggcagtgctggctactggtttttacagctgctcgataaagtcacgacctcacagtgggcagcaataggtgtgctgggtagcctggtatttggcctgctgacgtacctgacaaatctttatttcaagattaaagaagacaggcgtaaggctgcgagaggagagtaa

SEQ ID NO: 150417 - DNA, 429 bp, Enterobacter cloacae
atgggttttcgtagcgcatcaattcttacgttgattattagtgggattattatcgggtgcagtgatgctgtatcgacaaattatcatgaccgtacatcatattactccgataaagcaatagagacacagtatgtgagttcatctgaacgtacttctgatgttagtgaggatatccgtctgtatgcccatcaaatcaagagcgccatcgaaaaacagttcggggatgcgagtaagtattcaggaaaagagtgtacactgagaatgcatatggccccgaatggccttctactggaggttaaaagagaaagtggagacctcgatttatgtcgtgaagcgatgaatgcgataaagaatgctgatatacctgcccccccttcgccggaagtatataaagtatttcaaaatggggtgctggattttaaaccctga

SEQ ID NO: 150418 - DNA, 822 bp, Enterobacter cloacae
atgaaactggaagatttaccgaaatactactccctaaaatccccttgcctgaccgatgcatcggcttcaacgtcaaaagatgcgctgagtatcactgatgtgatggccgcgcagggcatgacacagaatcgggctgagatggggttttctgcgttcctggggaaaatgggcatcagtatgaatgacagggcgcgggcaacagaattactggcagattatgcactcagtcggtgcgatcgtgtggcggcgttgagaaaacttccggcagaaataaaaccggtagtgatgcgcattatggcttcgtacgcttttgaggattatgcccgcagcgcagcgagtaaaaagcagtgcccttgttgcgatggggaaaaatttattgaaagcgtagtttttacaaacaaggtccagtatccggatggtaagccgccggtatgggcaaagtgtacgaaaggtgtgtatccgtcttactgggaagaatggaaaaaagtcagggaggtggtaaaagttgcctgtccggagtgtggcggaaagggtgaggtttccaccgcctgtaaggattgccgtgggcgtggtgtcgccattcaccgtgaagagtcggtaaaacgtggtatgcctgttatcagagactgccagcgttgtggtggtcgtggctatgaaagactaccatcaacggaggcatttaatgctatatgcgaggtgacaaaccagataacacgcgcgtcatgggaaaaaacagttaagaaattctatgatgcgctggtgacccggtttgatattgaagaagcatgggctgagcggcagttaaaaaaggtaactaggtaa

SEQ ID NO: 150419 - DNA, 375 bp, Enterobacter cloacae
atgctcatagatttggttttaccttacccgccgacggtgaacacttactggcgacgccgtggcagcacatattttatctcggaggagggaaagcgttatcaccgggctgtggcgcttattgttcgccagcagcggctgaaattaagcctgtccggaaggctggcgataaaggtgattgcagagccaccggataagcgtcgtcgcgacctggacaatatcctgaaagcaccgctggatgcgctgacgcatgcgggagtgttaatggacgatgagcagtttgatgaaatcaatatcgttcgtggtcagccagtatctggtggacgtatgggggtgaagatttaccccataatgcatgaagagcaggtcaaaaaatga

SEQ ID NO: 150420 - DNA, 1050 bp, Enterobacter cloacae
gtgcgggtattacttcgacctgttctggtaccggaactcgggctggtgatcgttaagccgggccgtgaatccatgccggtattccacaatacccggttactggtggagccggaaccgaaaagcatgcgtaatctgccgtccggggtcgttcctgccgctcgccagccgctggtggaagacaaaacattgctgccgtttttcagtaacgcacgggtgattcgtgctgctggtggtgctggtgcattgtctgactggctgttgcgccatattaaatcctgccagtggccacacggcgattatcatcacagcgaaaccgtcattcaccgttatggtaccggcgcaatggtgttgtgctggcactgcgacaaccagctgcgtgaccagacatccgaatcacttgagcaacttgctcatcaaaacctgtcagcatggatgattgacgtcatcggtcacgcaataagcggtacgcaggagcgtgaattatctctggctgaattatcctggtgggcggtccgcaatcaggtggcggacgcgctaccggaagcggtattacgtcgttcgctggggttgcgtgcggaaaaaatccgctcaatgtaccgtgaaagcgacatcgtaccgggagagcagaccgccaccagcatactgaaacagcgcacaaaaaatcttgcgccgctgcctcacgcccaccagcaacagaacccaccacaggaaaagacggtggtcagcattgccgttgatcctgagtctccggaatcttttatgaaacgacctaaacgtcgccgctgggttaacgagaaatacacacgctgggtgaagacacagccgtgtgcgtgttgtggtaagccagccgacgatccccatcacctgattggtcatggtcagggcggaatggggacaaaatctcacgatattttcacgctaccgctgtgtcgggagcatcacaacgagcttcatgcggatccgctggcgttcgaagaaaagcatggttctcaggttgatttaatttttcgttttcttgatcacgcctttgcaactggcgtgcttgggtaa

SEQ ID NO: 150421 - DNA, 1026 bp, Enterobacter cloacae
atggatacttttcataatattttgcttgagcacatagacagccttttaaaagagagacttgatttatctggtgacgctgatatcgaaaaagaaattaataacctaattcctaaaatagccattgtcgttaaaaaatctcttattggctcggccaatgcaatgcttagagaacatcgttctctttgtgatgaatttgttgagagaaatatttcaagatgggcagaggcttttgatttgctcgaaacacttatagtgatatgcacggagtccggtgaagagttcaatcgttcttatagaccacaagctgcctctgaagaggatgtggtttttgatttagtcgttcggcatcacgcaagagcttgccacatcgccaacgaaattttgtgtctcttaaagaatggatttgcagatgctgcccaagcgagatggcgagcacttcatgaggtagcagccacagctatgtttatagcaaagcatggaaaagagtgtgctgagcgcttttactaccatgaagtggttgattcatatactggaatgttggaacacaaaaagtacgagcaccggttagaagcaaaaggtccaactattgaagaaatagctgagtgtaaagttcaatttgatctattaataaaaaaatacggcaaaaaatatgcagataattatgggtgggcatcttatattttccctaaccataataaagtggggtttggagctattgagaaagatgttcagttagaacacatgcgcccttattataagtgggcgagtcagaatgtacacaccggttccaaggcaatgagaaataggcttggtctctgtgaaactggtgatgatatattattggtcgggcaaagtgattcaggaatggctgatccagcccatgctactgctattagtttgatgcagattactgtgacacttttattcttaaaaccaaccattgatcatgccgtcatttcaaaaataatacaggattattctgatgagattggaaatgtatttcttaaaattgataagggtaattaa

SEQ ID NO: 150422 - DNA, 426 bp, Enterobacter cloacae
gtggcaaaagtttttacacaagaagagcgggaaaaaattaaagggcaggttgttgaactcgtacgccagagtgggcgcgagacgttacgacaactggaaactaaaactggggcaacaagatatctgatgagcgttctggccagagagctggttgccagtggcgatgtatacaactctggttacgggttattcccgtctgaacaggcgcgtaaggactggcaaaatgcccgtaaaaagctctcaagggcaaagctgaagaaaccatctgcggttgatccggaccttatctggtcattacctgacggagaaatacgtcgctacgatagttgtctaaacataatctgtcgcgagtgccggaagagcgaagttatgcagcgcattatggcattttatcagggaaatgttaggtattttagacgttactag

SEQ ID NO: 150423 - DNA, 1071 bp, Enterobacter cloacae
atggctaacgcctggctcagattatggcatgacatgccaaatgaccctaagtggcgaacaattgccagggtgtcagggcagccaattgcaacagtgatggcagtgtatatccacctcctggtgagcgcgtcacgaaatgtcacgcgaggtcacattgatgtcacgacagaagatttggcaagtgcgctcgacgtgacagaagaggtaattgattcaattttgcagacgatgcaggggcgggtacttgatggtgatttaatcactggatgggaaaaacgccaggtgcttaaagaggacaacggcaatatttcgcaaaccgcaaaatctcctgcagagcgcaagagggcgcagcgagagagggaaagaaagcgggaacaaaatggcgattgtcacggcgcatcacgaaatgtcacgcacatgtcacgacgagtcacgacatataaagatacagataaagatacagatcaagaagatcaaaacactatggtccatggcgtaaaaaacgccacgaaccaggcaggggatgttcagaccgtcaatcctggtcagccagcaggcacgacaccggaagccgattcagcgtatgcgctgaaagccgattcgggcgctgtgcagcaggtgatgacccaaaggccggaacaatcacaccaactgcagcagcctgaagccgattccgccattcagcgggaagccgatcgggtagtcccggaaaacaccgggctgtctgtgggacgagtggattatccggatgtgttcgaacaggtctggcgggagtacccgttgcgtgccggagcaaacccgaagaaatccgctttcagtgcctggaaggccagattacgcgagggggtgccaccagaggccatgctggatggcgtgaggcgttacgcaagatacttggcggctaccgggaaaacgggaacggaatttgttcagcgagcgacgacgttttttggaccggaccggaattttgagaacccctggttgctcccggtaagcggcacgaacaaccagcgttgtgtgaatcatatttctgaaccggataacgaaattccgccgggcttcagggggtaa

SEQ ID NO: 150424 - DNA, 426 bp, Enterobacter cloacae
atgaaaatcaagcatgaacacatccgcatggcgatgaatgcctgggcgcatccggacggtgaaaaagttccggcagctgaaataaccagggcttattttgaactgggtatgacgttcccagaactgcatgacgacagccatccggaagccctggctcgcaatacccagaaaattttccgctgggtagagaaagacacccctgatgcagttgaaaaaattcaggcgttgttaccagcgatcgaaaaggcaatgccacctttgctggtggccagaatgcgcagccacagttcagcttattttcgggagctggtggagacgcgggagcgactggtgagagacgctgatgattttgtcgcagtggcaatcgccggtttcaatcagatgaaccgtggtggcccggcaggaaatgctgtggcagtgcattga

SEQ ID NO: 150425 - DNA, 282 bp, Enterobacter cloacae
atggaagaattaagaatatttctcaattctctttcgtcagatgaacagcgtatgtttgcatgcgagtgtggtaccagcatcggttatctaagaaaggcattgagtaaaggtcaagtgttaggggcatcgttatgtgtccttattgaacgagccagtaatggtgaagttacacgtcagcaactaaggccttttgattggatgaatatttggcccgagctggaagataccaaaacgttaacacaaccactttctaggagcttgattcatgaaaatcaagcatga

SEQ ID NO: 150426 - DNA, 420 bp, Enterobacter cloacae
atggacaaatatgaatttagacgacagcaactcatcaaaattcgtgatgagaaatgcgatggtaaagcggttaacgtggccagaaagatcgggcgcgagccttcttatgtatcaagaatgttgtacccagaggggaaaaagggaaaaaaacggatcgctgatgatatggtggagattatcgaagagtcctttgggttaccccggggatggatggatggtatcgtttcatcatcaacgaacacagcctccagttatgaaacaagggttctaacgccacgacaacgtatttttttagatctcttagacgaactgccagaaagtgaagcggataacttattaaaaactcttgaagagaaaaaacagtattacaatatgatctacgaagaaatccgtaaaaagaaagcacaaaacgcatcatag

SEQ ID NO: 150427 - DNA, 237 bp, Enterobacter cloacae
atgacggcagggtacaactttaataactatgcagcaggtttttgttccgctaccccggcgttaaggggaaatgaggtcagcatggatactatcaatcttggcaacagcgaatctctggtatgtggcgtgttccccaaccaggacggtacgttcaccgcaatgacgtataccaaaagcaaaacgtttaaaaccgaaaatggtgcccgtcgctggctggaaagaaactcaggtgagtga

SEQ ID NO: 150428 - DNA, 576 bp, Enterobacter cloacae; identical to SEQ ID NO: 17322

SEQ ID NO: 150429 - DNA, 189 bp, Enterobacter cloacae; identical to SEQ ID NO: 31533

SEQ ID NO: 150430 - DNA, 192 bp, Enterobacter cloacae; identical to SEQ ID NO: 31534

SEQ ID NO: 150431 - DNA, 2472 bp, Enterobacter cloacae
atgagtaaagtctttatttgcgccgctattcctgacgaactggcaacaagggaagaaggcgctgtggctgtagccacagccattgaagctggcgacgaacgccgtgctcgagcaaaatttcactggcaattcctggaacattatccggctgctcaggactgcgcttataaatttattgtctgcgaggataaacctggcataccccgccctgccctcgattcatgggatgctgaatatatgcaggaaaaccgctgggatgaggagtctgcttcttttgtcccggttgagactgaatccgatccgatgaacgtcacttttgacaagctggcccctgaagtacagaacgctgtcatggttaagttcgacacatgtgaaaacatcaccgttgatatggttattagcgcacaggaattgttgcaggaagacatggcaacattcgacggacatatcgttgaagcgttgatgaaaatgccagaagttaacgccatgtatccggagcttaagttgcacgccattgggtgggttaagcataaatgtattcctggtgctaaatggcccgaaattcaggcagagatgcgcatctggaaaaaacgtcgcgaaggtgaacgcaaggaaaccggaaaatacacgtctgttgttgatctcgcccgcgccagagccaatcaacagtacactgaaaattcaacaggaaaaatcagcccggtcattgctgccattcatcgcgaatacaagcagacatggaaaacactggatgacgaactggcctacgctctctggcctggtgatgtggatgccggaaacattgacggcagcatccatcgctgggcaaaaaatgaagttatcgacaacgaccgcgaagactggaagcgtatctcggcatcaatgcgcaaacagcctgatgcccttcgctacgaccgccaaactatttttggccttgtccgtgagcgtccgatcgacattcacaaagatcccgtagcactgaacaaatatatctgcgaatacctgacgacaaagggcgtgtttgagaatgaagaaacagacctgggcactgttgatgttctccagtcatcagaaacacaaactgatgcagtggaaactgaggtatctgatatcccaaaaaatgaaaccgcgccggaagctgaaccatctgtagagcgtgaggggccgttctatttcctcttcgcagataaggacggagaaaaatacggtcgcgcaaacaaactttctggtctggataaggcactggctgctggcgccactgaaatcacaaaagaagaatattttgcccgaaaaaatggcacatacacgggcttaccgcaaaatgtagataccgctgaagattcagaacaaccagagccgataaaagttaccgctgacgaagtaaacaaaattatgcaggcagccaatatcatccagcctgacgccgataagttgcttgctgcatcacgtggtgaatttgttgaagggattagtgacccgaatgatccgaaatgggttaaggggatccagacccgcgattctgtgaaccagaaccagcatgaatcggaacggaactaccaaaaagcggaacaaaacagcccaaatgcgttacaaaacgagccagaaacgaaacagcctgaatcagtggcgcaacaggaagtggaaaaagtctgcaccgcctgcggtcagaccggcggcggcaactgccctgattgtggcgcggtaatgggcgacgcaacataccaggaaacattcgatgaagagtatcaggttgaagttcaggaagatgatccggaggaaatggaaggcgctgaacatccacacaaggagaacactggcggcaatcagcatcacgatagcgataatgaaactggcgagacggcagatcactcaattaaggtgaacggtcatcaagaaatcacatccaccagcaggacgtgtgaccatctaatgatcgaccttgaaaccatgggaaaaaatcctgatgccccgatcatctcaataggtgcaatatttttcgatccgcaaaccggagatatgggaccggaatttagtaagactatcgatctggaaactgctggcggagtcattgatcgggacaccattaaatggtggcttaagcaatcacgcgaagcgcaatctgccattatgaccgatgaaatcccgttagatgatgcactgttacaattgcgggaatttatcgacgaaaactccggtgaattttttgttcaggtctggggaaatggagccaacttcgacaacacgattttgcgccgttcatacgaacggcaggggatcccctgcccgtggcgttactacaacgatcgcgatgtacgcacaatcgttgagctggggaaagccatagacttcgatgccagaacggctattccattcgaaggtgagcgccataatgcacttgatgacgcccgttaccaggcaaaatacgtttcagttatctggcaaaaactgatcccgagtcaggctgattcttaa

SEQ ID NO: 150432 - DNA, 237 bp, Enterobacter cloacae
atgattgtctctcccggcaaatgggtatccgaagagcagttaattgcgctgaaaggaataaaaaaaggtacgttaaaaaaggcccgggaaaaatcgtttatggaaggaagggaatataagcatgtcgctcatgacggtatgccatgggataacagtccatgcttttacaacctggaagaaattgatcgctggattgagcgccaggcatcagcaagaccaagacgtcatcttacttga

SEQ ID NO: 150433 - DNA, 1281 bp, Enterobacter cloacae
atgaaatatccgacaggcgtggaaaaccatggagggaaattacgcatctggtttgtttataaaggcgtaagagtcagggaaaacctgggggttcctgacacagcaaaaaacaggcgcgttgcaggtgagctacgcgcctctgtttgttacgcaataaaaactggtgttttcgactatgcaaaacagtttccctcctcacgcaatctggaaaaatttggtgagacccgacaagatttaaccataaaagaactggctgaaaaatttctggcactgaaagaaactgaagtcgcaaaaacatcactcaacacataccgtgccgtcatcaaaaatatcctgagcataatcggtgaaaaaaatcttgcctcatcgattaataaagaaaaattactggaggttcgtaaagagctactgactggataccagatccccaaaagtaactatattgttacacaaccagggagatcggctgtaactgtaaataattacatgacaaatcttaacgccgtgttccagtttggtgttgataacggttacctggcagataacccgtttaaggggatctcgccattaaaggaatcaagaaccattccggatcctctttcgcgggaggaattcatccgtcttatcgatgcgtgcagaaatcagcaagccaaaaatttatggtgtgtttctgtttatactggcgttcgccctggtgagctgtgtgcacttggatgggaggacatagatctgaaaaatggaacaatgatgatcaggagaaatttagcaaaagaccgtttcacggtaccaaaaacacaggcgggaaccaatcgggtcattcatcttattaagccagcaatcgacgctctccggagtcagatgacattaacgagactgagcaaagagcatatcattgatgttcacctcagagagtatggcagaacagaaaaacataaatgcacctttgtttttcaacctgaagtgtcagcgagagtaaaaaattatggtgaccattttaccgttgactcaataaggcagatgtgggacgcagcgataaaacgtgccggactccgccatcgaaaatcatatcagtcgagacatacttatgcctgctggtcgctgacagctggtgctaacccggcatttatagcaaaccagatgggccatgcagatgcgcaaatggtatttcaggtatacggaaaatggatgtctgaaaacaataatgcacaggtagctttgttaaatacacagttaagcgagtttgccccaaccatgccccataacgaagcaataaaaaattaa

SEQ ID NO: 150434 - DNA, 912 bp, Enterobacter cloacae
atgaaacgttcactaatagcttttcttgtattagcttctttcggcgcgtctgcacatggtcataatcatggtggaaatatgggagggcatagttttaacggtcattcatttaacggtggtcattttggtcatggtcgccacatggggaatggtcattcattcactggatttagccgcggctctatcaacatgactgatggaactaaatcattcactggtaagaatggtggaacagcttcaatcactgtttccggcgctggtacatctaccgcttcaattagcaccaccgtaaacgctcctaatttcactgcttcctcatgggctggcggcttaggaaacggacaggtagaagcacagagaagtattcagactgcgcattacacaaaaaatgtaagtgtgctaactgataacatgggcgggattagtcggaatgtttcaataaacatttccagcgctacaaatattagccgtccgttcgtggctattaatcgtgatgcttactattcccctgtagctggttcatatatcagttttgataaacacgttgcattaccgaacgccgattataatcacgatattgtttacagcactcagcaagcagacagaacactttcatttgaccgttcactagaacatgacacagggagctatgtaaatgctttcagcgtttcacacgtggctgatttagacgcgcacacgttcactgttactcgtggtttccatgactccaaccggagcacgtacaaacaacacccctacgctattttaaccagcgtctatagcaaggatggtgtaatacgttcgctagacacgaacatccacatcacgccacaaccagcacctacccccgctgcacctgctaagacatatgatgatagcaaaggcgatacaatttctttctggtggatgtga

SEQ ID NO: 150435 - DNA, 126 bp, Enterobacter cloacae
atgaaaactttgattatagcgctgatgatgtttagcgctggtgcaattgcttgccctcgtggggagcatatccacggaggatataacaatcaccataaaggtggttattgttcctactacaaataa

SEQ ID NO: 150436 - DNA, 375 bp, Enterobacter cloacae
atgaataaaacaattatggggctgtgcttaattgccctgagtgggttagccaatgcacatatgactaattacacctgtgttaagaacggctctgtgaaagtgccaatgcaaacgagtatggcgcaaggtgattgggctattgatatagacggtaaatcagcctctatagatactcaatatgctacgccaacaaagaaccttaaaggaggtgaggtttatcataacgatggtgaaggtggaggtaatttaaatatttattgggataaaactaaacctgatgattactttattgaataccagaaaccagagcatgaattttctgaacaggtttctgatgatgtttactactgcacaaagaacgctggagaatggtaa

SEQ ID NO: 150437 - DNA, 363 bp, Enterobacter cloacae
atgaaacgtttaattatcgctgctgcactattcgccactctcggtgctaatgcttctacgcatatccttcacaccatttatcaatgtggtaatcatgttgtggataaacatgccatgaaaacggatggtgaagcacactggcatactaccgataaagccaccactaatgggatagttgtgtataacggtagctctttggatatcccttatcatggaacacctgataacgacacaggattttataattttgatggatttgtgtttgctaccactgtatctgataattcatcagcgtattcaaatgacggtggagcgcacttttataaatgcactcagcacaccaccgaaaagactattcaataa

SEQ ID NO: 150438 - DNA, 462 bp, Enterobacter cloacae
atgaaaaagtatttattagtggcgcttgctgctttggctctctctggctgtgataatgctccagccaataaaatatttacctgtatggatagcgctaaagagtctatgcaatttggtttcagtgttgatatgagtgctttccctgcttatgtgacactgagcggtaaacgtttatatcctgatgaaacaatagccgtgaataatatgagtaatgtcaccatgtattcattcaccaaaactaaaacagatgattcaggttatttcacctctgatgaaattcagatgcagaagtctaatcagaaatggacagatatttttaacgctctgagaacaggtgattttgaaagagcatataacatctatcaaacagggtttactttcggtacttattcccacgtggaattgaacggattgcagaccgtagtaaacaacaatatttcaggttattgtgaggctaactaa

SEQ ID NO: 150439 - DNA, 606 bp, Enterobacter cloacae
atggctatcgaactaaccactattgaacgtgatgcacagactcgtaacgttgatttagaactgatgctgaaaaatggcgctgataatgccgttcgtaaagctgaactggctaaactgttagaccttatcaataacgaacagacaagcgagggtaatgattatcttgctgctctgtatcgctacgctaagaccaattacaaaacaggcattgtgtcacgtatcacgctcacaagctggacggacaaactgaatgaaaacgatggtgtagcacctgcacctaaagctaaacgctctgcttctgttcagcgtaaacagaatgcttcacctgctcctgtggctgatggtgggcgctggttatctaaagctgaggcttatttctttgacgctgtgttagcgagcatgagcgattcagatattgaaaattgtcagttaatcgcacaggcacgtattgcacaggaagcattagcagcgattcaggaacaggccgctaaagaagtgaatccacttatggagcagattaaagcccgtcgtgctgcattacatgcctcaatgagtgaagcacagaacgacacagacgagccacagagcgctcctgaggctgagtaa

SEQ ID NO: 150440 - DNA, 870 bp, Enterobacter cloacae
atgaacgctaaacagttaaatgcaatgacactgatgaacaacatcaaacgctacattgaaatgctgactaatactaaagcaaccatgaaagcagtagtgaaagattggaacacttacattgaacaatcaggtgcagacttccttacctttgatttccctgtagagggctggacacgtaaagcgcaactgattgctgaatttgaacgtgtagctgttcaactgaataacatcatggaaggtcgtgaagctttagagaacgctcctgtgaagcatgaaacgatggtacaggacattaagaagggtgatgtggttatgtgccctgctcgcccttctcagtgtcagacagtgacaaatgtagacgatttctcttgttacttcatcattacgtttagcggtgatatggggcaacaatactttgaccgtggagaaacgttaattgtgtgtgagcctgtgaatggttcacaaataactaatgtttcaactactgaggtaaatgatatgaatgaagcaaataaccagctagtgccagcaatcgattcagaatcatcaatcatggaattacgcgccaattgtttatacatgcttttccggtcgtacaaccctacccctgaggcaatcaatcaggtgactcgtgcagcaattaccacggcaatgattcattaccagaacgaaccatgccagcacacgctaaactcaatccttctaatcggtgatatcattgctgatggtcgttattcgcaaacactaaacggcaatgatgatgctgcgcgtgaattttaccgttcattcgcccttattgtatctgccaccgaaccagaagcattaagaagcattcttagtaatcacatggcagaaaccctaaacgtttaa

SEQ ID NO: 150441 - DNA, 465 bp, Enterobacter cloacae
atgaaaaacggctacgtatggcgtaagcgttgccaatcagggatgatttctatcagcatcaaaacgcgtgaaccacaggaagcgcttcaacgtgctacccgtatgcacttacgttttcttgagcttgagaaagcgcagcttaacagggctgagattcagggagccttaacccgtttccgtgatgatatgattcgtgaccgtaaaatagaagccctctctgctgttctgacaggttcagtggcacagcctaccctatccagcgttgcagcacagataacgctacaggaagccgtagcagagcaaatagggcatctatataaactagcagcctcacgtaatatcaataagttacctcagtgtgcatctatggatgtgtatgtgtcacgcttacacttgagaacactcctgagaatggttttcactaccattagcttgctgctggctggtatgccctgtgacccttaa

SEQ ID NO: 150442 - DNA, 762 bp, Enterobacter cloacae
atgcaggtaggcgcattcaaccttggcgctatccagggggacggtccaacccttgataatatggacatgttcacgcctaccggatttacttcacatcaaaatgatggtctgtctcagttgggactgacatcgaatactggacttacttccatcattcttaaccggggcaacaggccaacccggatacatcaggcatactctctacgacgtacctggttttcatattacagcgggagcgcatgggcctatcatgaagcttacactactggtaatacgacaaaatcaagtgatggcacactgaaggcagcgtctcctgttgcccgtatcgtagtgagccaggaagcgtgccagcgcgccgatatagcggaggatggttttgactggtgcggctgcggtactgcgaacgccgaggctgaaggaatcaaaatctcccgcctggatgttggtgtatatgccctgttcggttccgcaggcttggcatcagaaggctggcagttactgccgccaatggaccctggcggcatgggagaactgggtgtggctgaagctgaacaaaccgctgacggcgagctgactatccgcctgtttaagcgaaaatacatgctgagcgatgaaggggagatcgtcaaaacaaaaggggaaccgatggacgtgccggtgaacagctggatcgatgttcgcctggatatgcctgatgattctgcctttaatcagcggatgagacaggaagcacagcttgagcctctttctccagctctctga

SEQ ID NO: 150443 - DNA, 459 bp, Enterobacter cloacae; identical to SEQ ID NO: 128930

SEQ ID NO: 150444 - DNA, 858 bp, Enterobacter cloacae; identical to SEQ ID NO: 118087

SEQ ID NO: 150445 - DNA, 951 bp, Enterobacter cloacae; identical to SEQ ID NO: 118088

SEQ ID NO: 150446 - DNA, 3249 bp, Enterobacter cloacae
atggcaaagatgaccgaatccgatattgaagtaatggcgattgagcacctgcaagggatgggctatgaatatgtttacggcccggacattgaaccaagtggaatcaatacattacgtagctatcagcaggttatccttgaagataaggtgcgtactgccctacaacgcctgaatcctcacctcagtgaacaaaagtgtgaggaagccttgaaacagatgatgcagatcagcacacctgacctaatgacaaacaatctggcctttcatcgcctgttgaccgaaggaatcaatatcgaagtcagcaaggatggtaatacacaaggagagctggcctgcctgatcgactttaacgatcccactaataatgaatttctggtcattaatcagctcaccatcaaagaaggcaaccatacccgccgaccggaccttattttattcatcaacggtctaccattagtcgttatcgaacttaaaaatgccgctgacgaaaatgctacggtaacaggtgcctataatcagattaaaacctatcagaaccaaatccccggtctgtttaactacaatgcttttaatgtgatatctgacgggctggaagccaaagcggggacggtttctgccgatttcagtcgttatatgacgtggaaaactgctaacggtaaaacgcaagccaccagtacccaaccacagcttgaagttttattacaggggttgcttaatcctgtaacgctgctggatatgatccgccactttatcgtgtttgaggccagcaaacatgaagacagcaaagggattatcagtatccgtactgttaaaaaaatggcagcttatcaccagtactacgcggtcaatgcagcagttctttccactattcgtgcctcagcggtgaatgcggactccccctctgccgaagtggcactgcgccagcagggacgtaacagtaaagatcttgttaatgcgcaaaaaaccggagatcgcaaagcgggcgtagtctggcatactcagggttccggtaaatcgctttcgatggtgttttataccgggaaaattgtgctggcgctggataatccgacagttgttgtgatcactgaccgtaacgacttagatgatcagctgttcggtacgttctcttccgcgacacagctacttcgtcagacaccaaaacaggccgacaaccgggaagaactcaaagaatatttgcgcgtagcctctggtggtgtggtgtttaccactattcaaaaattccagcctgatgatggcagcaatatctatgagttgttgtcagacaggaccaatattgtcgttatcgctgatgaagcccaccgttcacaatacggtttcagcgccaaagaagtcgacgtgaaagacagcgaaggcaacgtaacaggtaaacgtaccgtttatggctttgccaaatatatgcgtgatgccttgcccaatgcgacctatcttggctttaccggaacccccatagaaaaaacggacgtaaacacacctgcggtttttggtaactacgttgatatctacgatatctcacaggctgtagaagacggtgcaaccgtgcgtatcttctatgaaagccgtcttgccaaaattgccatcagtgacgaaggtcgccagctaattgaagacttcgacgatgagtttaacgaagacgagctgacgcttacccagaaagaacggtctaaatgggccagaatcgaaggtttgattggcagttcaaaacgtattaaagctattgcggcggatatggttcagcactttgaacagcgcttaaaatctaatgccgatcatggcaagggcatgattgtcaccatgtcccgtcgtattgctgctgaactttataaagaaatcatagagttaaaacctgaatggcacagcgataatctaaatgatggcgtgattaaagtcgtcatgacctcttctgctgctgacggaccagaaatcgctaaacaccacaccacaaaaaaagaacgtcaggttctggctaatcgtatgaaggatgacgacgacaagctgaaactggtgatagtgcgtgatatgtggttaaccggcttcgacgctcccagcatgcatacgctgtatatcgacaaaccaatgaaaggccacaacctcatgcaggcaattgcccgtgtgaaccgtgtgtataaagataagataggcggtctggttgttgactatctgggcattgcctctgatttaaaagaagccctctccttttactctgatgcaggtggacgtggagatcctgctgaggttcaggaagaagctgtaacgctcatgcaggaaaagctggaaatcctggaaggcatgatgcatggctacgattacaaagcttactttgccgcaactacttcacaacgcctgacaattattcttgaatcagaaaaccatattttagggctggataacggtaaaggtaaaatgcgtttcctggctgcggttgcagccttgtcgcaggcatttgcattggcgacaccgcacgataaagcaatggaagcggcacccgaagtagcattcttccaggccgtaaaagccagactgaataaatttactgaaaactcagccggatcagaagaagaacacaatgacagtctggaagttcgggtaaaacagactatcgatcaggctctggttaccgataaagttgttgatatttttgacgctgctgggatacaaaagccagatatttccgttctttctgaagaattccttcaggaaatgaaggattaccaacacaaaaatattgctttggaaacgcttaaaaaactgctttctgacgagattaaggttcgctcgaatcaaagtatcacccaaggcaaaaaactgattgatatgctgacctctgcaatcaatggctaccagaacaaggtactgaccgcagcggaggtaattgatgagctaatcaagcttgccaagactatccaggaatctgacagccttgccagccagttaaacctcagcgcttatgaatatgccttctattctgctgttgcagataacgacagtgctcgcgagttaatggaaaaggaaaaactacgagaactggcagtcgtacttacagaggctatccgcaacaatgtcagtcttgactggacagtgaaagaagcagcaagagcaaaaattcgcgtggtggtaaaacgtctgctcaaaaaatatggttatccacccgatatgtccttgctcgccacagagaccattttgaagcaggctgaacttttagctggagaattaggaaaattattcccctag

SEQ ID NO: 150447 - DNA, 1200 bp, Enterobacter cloacae
atgagtgagtgggttgttaaaaacttagatgaagttgttgaatacttcattgattatagaggaaaaactcctgataaaaaagattcaggtataccactcatcacggctaaaattataaaagatgggcgtttaaacactgctaccgaatttatttcggttgaggattatccactttggatgacccgcggctatccagaagtcaacgatgttgttttaaccaccgaggctccactgggtgaagttgcattaatcaagaataaaaatatcgcgcttgctcaacgaattattacccttagagggtataaaaacatccttgataataagtttcttaaatattggttgcaatcagagcaaggccaatatgaacttgaatcacgagcttcgggcacaactgtattcgggattaaatcatctgtccttaaaaaaatcccaatatctctgccaccttataatgagcaagttgctataagttctgtattgtattctattgatgaaaaaatagacctgcttcatcgtcagaataaaactctggaatctatggctgaaaccttgtttaggcaatggtttgatgtggatagcaatgatgaatggcaagaaaaaaatgtcctagatatattcacattagttggaggtggaacgccaaaaacttcagttgctgaatattggactgatgagataccttggatttccggaggagatatttcagcagctcatcaaggctatctgtatagcacagaaaagtctataagcttagcgggacttcaaaacagttcagctaaattgctgcctaaaaactcaaccgttataagtgctcgtggtacagtgggaaagtatgctcttttagcaagagatatggcttttagtcaatccaattatggcattgtttcaaaaattggaaactatcctttcttcatatatcttctggttggatttattgtcgatgatttgctgacagcagcttatggcagcgtatttgacactattacgacaagaactttcgagtctgtaaacttgaagtttccttctttaaattcaattgagaaatttaatgaagaaatatctccgatatttagtaagaaagagacgaacactcagcaaattaaaacactagaaactctccgcgacaccctgcttcccaaactgatgagtggtgaagtacgagttcagtatgcagaagaaaaacttgaatctgtagcataa

SEQ ID NO: 150448 - DNA, 966 bp, Enterobacter cloacae
atgcttgaaccttataaaggccgtgtctttgacccttgctgcggttccggtggtatgttcgttcagtcagaaaaatttgttgaagcgcatcagggaaatattgacgatatttcgatttacggtcaggaatccaaccagaccacttggcgtctggcaaaaatgaacctggctatccggggtatcaattcagaacacgtccgctggaacagtgaaggctcattccttaacgatgcccacaaagatctaaaatctgattttatcattgccaatccaccgtttaacgtgtctgactggtccggtgagcagcttcgtggcgatgcccgttggcaatacggtatcccacctaccgggaatgctaactttgcctggatgcagcattttctgtatcacctgtcgccaaaaggtcaggctggtgttgtactggcaaaaggggctttaacatctaaaagttctggtgaaggtgatatccgtgccgcactggtaaaagatgccaatgttattgactgtatcgttaacttacctgcaaaactgttcttgaacacccagatccccgccgctctatggtttatgcgtcgagatcgtgtaaacagcagccactatcgtgatcgcagtaaagaaattctgtttattgatgcccgtaacttaggccatttaattaatcgtcgaaccaaagtcctgtctgactacgatattaaaaccatagccgatacctaccataactggcgtaacaaaggtggcgactacgaagatgtggctggtttctgtgcgtcagtagacattgatgaagttgctaaactcgattatgtgctgactccgggtcgttatgtcggccttgctgatgaagaagacgatttcgacttcaaagaacgttttacgccccttaaagcggagtttgaagcccaactggaagaagaagcacgtcttaataaagctatcgctgataatctggcgaaggtggttttatga

SEQ ID NO: 150449 - DNA, 387 bp, Enterobacter cloacae
  misc_feature (371)..(380): n is a, c, g, or t
atggccagaaaacctaaagaaatcaaaacagacccgttagaggtcatcctgtggaaagcggctgacaagctacgtaagaacattgatgcagccgagtacaagcatgtcgtgctgggcctgattttccttaagtatatttctgattcttttgaatctcattatgagttgctgaaggctggtgaaggcgagttcgcaggcgctgacccggaagataaagacgagtacaccgcttacaacattttctttgtccctgagcttgcacgctggaactatctaatatctaaggcaaagctacccgaaatcggtaagctggttgatgatgctatggagcttatcgaagcgggtaacccacagctaaaaggtgtgctgcnnnnnnnnnngaactga

SEQ ID NO: 150450 - DNA, 438 bp, Enterobacter cloacae
  misc_feature (421)..(430): n is a, c, g, or t
atgaataacaacgcaataaatgcattactctcttgtaaaactcccaaagacattcaggcttgcattaatgcaggctccgatattaatacactggattcgtttggaagaaatatactgttttactgtaaaaacccaagaatgattgacactctggttaaagcaggaatagattttaaccatgctgacaactatggtcacaatgttttgtttaaccagcgaaatcctcacatactgaaaaaattgattgattccggcgtagatatacaccacaaaaatggtctcggccaaacctgtttatgctcgttagctgataatatatcctgttgcaaaaccctgatcaatgctggaattaatgtcaacaatgtggataaatgcggaagaacaatacttttttacgtaaaaaatcactctatctttgatnnnnnnnnnnatctttga

SEQ ID NO: 150451 - DNA, 174 bp, Enterobacter cloacae
atgaacattgaagagttaaaaacaaaaacagaagcagatatttctgaatatataacaaaaaaaatcattgagcttaagaaaaagaccgggaaagaagttaccagtatccagtttactgcacgggaaaaaatgactggtcttgaaagctatgatatcaagattgatttaatctag

SEQ ID NO: 150452 - DNA, 207 bp, Enterobacter cloacae; identical to SEQ ID NO: 8715

SEQ ID NO: 150453 - DNA, 528 bp, Enterobacter cloacae
atgtcaaatgtgagcgggatcggtgatgcttattactggagtgtttttaaaatcgccgaggcctttgggcttcaccgggacacagtaaaaaaacggctcctcgcggccaacactcctgtggctgcgactgtcagggggaaccccgtttacgccctgcagcatgtcgggcccgccctgtttagtgtgaagcatgaggcagcagactctgttcatgatccatcccgtatggagccgaaagagagaaaggactggtaccagtctgaaaatgaaaggatcaagctggaaaaggagcagcgaaaactcatcccagttgatgaagtagtcatcgtctattcgtccatgagaaaggctgtcgtccaggttctggagacaattccggatgttcttgaacgcgattgcgccctgactcctcaggccgtcggcgttgtacagcaggccattgatgacctgcgatacactcttcaggaaaaatcctacgaggcttgtgctgctgaattaattcctgatgaggaaggagagagtctctag

SEQ ID NO: 150454 - DNA, 567 bp, Enterobacter cloacae
atgggtttttcatcagcccgaaatttgggaagggacatatcggcaggattttccccaccacgtcgcatgccgatttcggaggctgttaaaaaattcatgcgtgttcccaagggggctggtaactcggtgccatgggatcctgaactgacaccctacatcattgagcccatgaactgcctggcatcgcgtgaatacgatgcggtgatttttgttggtcctgcgcgaacagggaagaccattggtctgatcgatggatggattgtctataccatcgtttgcgatccttcggacatgctcgttgtgcagatgaccgaagataaggcccgcgagcattctaaaaagcgcctcgacagaacgttcagaagcagtgcggcggtaaagaaaagaatgagtccacgtcgtaacgacaataatgtccatgataagacgttcagggatggctcgttccttaaaattggttggccctcggtcaacattatgtcgtcgtcggattaccggtttgtcgccttaaccgattacgaccgttttctggtgttgagtttgatggttccaaagatattactttaa

SEQ ID NO: 150455 - DNA, 804 bp, Enterobacter cloacae
atgaaggcgcattacagaaatggtggtctgttctaccgttcttcaagagacggttatggttttgaggaagactgggcagaagtttatacctcgaaaaatcttccaccagaaagctacccagtcggcgcaccaatcccgtggccatcagataccgttccgtctggttatgccctgatgcaggggcagacttttgacaaatctgcctacccgaaacttgcagccgcttatccgtcaggcgtgatccctgatatgcgtggctggacgattaagggcaagcccgccagtggtcgtgccgtattgtctcaggaacaggacggcataaaatcgcatacccacagcgccagcgcatccagtactgatttggggacgaaaaccacatcgtcgtttgattacggcactaaatccacgaataacactggtgcgcatacccatagtttaagtggcagcacgaatgcagctggtaatcacagccatagagatggccgtcgatttaaccccagtgtttttaaagatacttatcaatatggttatacaagctcaggtcaaaatacctggggtgtacaaggctcagtaggtatgtctacgggggcgttagctaataccagtacagatggtaaccatagccactcactgtccggcacagcagcatctgcaggtgcacacgcacatactgtcggtattggtgcacacacgcactccgttgcgattggttcacatggacacaccatcaccgttaacgctgctggtaacgcggaaaacaccgtcaaaaacatcgcatttaactatattgtgaggcttgcataa

SEQ ID NO: 150456 - DNA, 582 bp, Enterobacter cloacae
atggcattcagaatgagtgaacaaccacggaccataaaaatttataatctgctggccggaactaatgaatttattggtgaaggtgacgcatatattccgcctcatacaggtctgccagcaaacagtaccgatattgcaccgccagatattccggctggctttgtggctgttttcaacagtgatgaggcatcgtggcatctcgttgaagatcatcggggaaaaaccgtctatgacgtggcttccggcgacgcgttatttatttctgaacttggctcgttaccggaaaatgtcacctggttatcgccggaaggagaatatcagaagtggaacggcacagcctgggtgaaggatacggaagcagaaaaactgttccggatccgggaggcggaagaaacaaaaaacagcctgatgcaggtagccagtgagcatatagcgccacttcaggatgctgtagatctggagatcgcaacggaggaagaaacctcattgctggaagcctggaaaaaatatcgggtgttgctgaaccgtgttaatacaacaactgcaccggatattgaatggccagtagcacttatagggtaa

SEQ ID NO: 150457 - DNA, 633 bp, Enterobacter cloacae; identical to SEQ ID NO: 30074

SEQ ID NO: 150458 - DNA, 681 bp, Enterobacter cloacae; identical to SEQ ID NO: 30073

SEQ ID NO: 150459 - DNA, 732 bp, Enterobacter cloacae
atgaaaaaaataattgttgcctctatggtttttttgagtggctgcgcttctgatgtgaaagttaaacatgtagaacctgtagatgatgtgaagaaagaatttgtttcaggtgagggaagtaacgttgactgggatgtagagtacacttcaggaagtgaacttttgaagttgattgactcaggagaggtaaagccaggatatatatttaaatcatatgtaagtgttgagatggatctcatacctattgttgatggttcgaatgtaagaatgaatgcccttgcctatggtgggattgaatatgagttgatagcagggaagttagggcaagattatttggtttttgatatgccagggcgagtgcaaaagaataatggtagctatgtgggttcgaactcctttggtgttagaaagaaaatagataaagtttctgttgttgagtatatgaatgctgttaaagttaataacaaaagcgattccccttatggaattaaaatagagagatgcattattccatcctatgacgttaaagatgatggaagtaacttaaaaattgaatacgtagctaagttgctcactaattcttatttatcagacaagggtagaatggagccaaccatggattttactattgatgcgaaaatacaaaaatatttttttgagtcgaaagtgatttctgcaagagttgttaatatcaagacaaagaaaatatataactgctcggtggttatttag

SEQ ID NO: 150460 - DNA, 303 bp, Enterobacter cloacae
atgaagcaaagactccctgcttacctttaccagaataaattatcagatgaacaacgcaatctgaacaatactgctcacaatgtgttttggcttctcacattaatcgcttcatacacaccagataaaaacactgtttacctgaactttcaccgtgcaacatccatcgcacaacaggaagatatacatattacgccagcccgattttatcaggccatcgataaactgattgatacaaatgttattatttgtactgagtttaaataccagtatcgtttaaatcctgaatttttcagttttctttaa

SEQ ID NO: 150461 - DNA, 381 bp, Enterobacter cloacae
atgtctagcgatgaagaaattataacagccttacaaacgatgctacccattctcaggaaagattatgaaattgagccagtaaaaacagaaaaaattggactggcaaagataagaaaacttgtcgattacaatattatcccaatgatggatctattgatttgggcaaaatttaaaaaagtaaaaatctcaaatatggtcttgtctcgtgtcttgtatcccgactttacaagtgagatcagaggagaagatcacattaaagatacagacaggcctgttgcagagaagtcattgaatggagaaacaacccgtagtctcgaatactttattagcaaaaacagccatctcctcaacataccgatttctgaactcggctctttctag

SEQ ID NO: 150462 - DNA, 1287 bp, Enterobacter cloacae
ttggagtcattaccaggaaagggcagttttaaacggaaagacgcccaaaatttcactcactggcatgggatagcggcgggacgtcttgacgaagcgattgtcagtaaatttattgagggagaaaaagacgatgtcgaaacggtcgatgtcatcttgcgcccaaaagtttatttccggttactgcagcatggtaaggaccgttccgcaggcgcgcctgatattgttaccccgatagtgacgccagccttgctaagccgtgagggttttttatatccgacgccagcgacctccattcccagagacctgcttgaacctttgccaaaaggagcattttcgattggtgagattgggcagtatgacaaatacaagacaatccatacctcattctctatcaactttgatgacggcattgataagactgccgaaacggatgaagaacgggaagcacgatatgcagccttgcagcaggagtggcgtcaatatctggatgattcagagaggctgctgaagaacgttgccggcgactggattaaaaatcctgagcaatatgaactcgctgagcacggttatattgttaaaacggcgcaatctggcggtgccagtttccatatcctttctctttatgatcacctgcttgtttgcaagaaggatgtgccgctcttcaatcgcttcgcctcgcgagaggttcatgctgcagagtctttgctagccccaggcgcaaaattcagcgacaggcttggacactccggagataagtttccgctggcaaaggctcagcgcgatgccttaagccattttctggatgcaagacatggcgatatccttgctgttaatggacctccgggaaccggaaaaaccacgctggtgctttctatcatcgccacgcagtgggccagagcggctctcgaaaaatctgagcctccggttattatcgcgacttcaacgaacaaccaggctataacgaacattatcgaagcgttcgggaaagatttttcacagggcactggtgcaatggccggacgatggttacctgagctgaaaagcttcggcgcttattttccctcaagcactcgtaaagctgaggcagccaaaaaatatcaaactgaagatttcttcaaccaggttgagtcaaaagagtatgtagaggatgcactgctgttttatctggagaaggctaaggcagcctttcctgaaaaagattgttcatcccctgaaaaggtcattgaactcctgcatggtcagttggcagcaaaatccgagcaactgataagaggctttgttgaataa

SEQ ID NO: 150463 - DNA, 798 bp, Enterobacter cloacae
atgcattcaagtgttatcgatcatatattatttatgaagtgtcaatcactcgctagacttcatgatagagagttttttgctgcggttaggaatgtctccgagcctgaatattcgttcttgcatggtttttattacaggatcacgcgacagcgtccaaaagcaattgagagttataagcgagtattaaaccaaaggccaagtgattatcgttcaaaaagtgaattggttttgttatatttacaaaatgacgagcatgagcttgctttaggattagcaaaagaagtttatgaaagacagaaaaacaatccaatcaatgctaataattatttgaattgcctattttacaaagatgatgctaatattgagcccggtttggtagaggaaattcttgaacggttgcattcgaatcaagctcaacgtgctcaagagatgtattgctcagctaaagcgaaagctcttgcaaaatttgagaataaagttgaagaggcttttgaactcatagagaaaggaattgtggattttccggatattaaatatcctgttctgacactttgtgacttagcaattcagtatagaagaattgataagcttgaatatgctctaaatattcttgaaaaaacagactcaccaaaatctcaaacatatggaagctttatacgatttaaagccatatggttaactttgacttctagatttgatgatgctgtccgtatttgcaaaagtgagttaacagaacttacatatgcagaagtggagcagtttattgaaaagctaaagcagtaccaagtaaaggtttga

SEQ ID NO: 150464 - DNA, 210 bp, Enterobacter cloacae
atgtcggccaaattcaaacgtacatttattattgctaatactcagcatccagactctcttactgatgaaaatttttttaccaggaaggacggtttgattgttagcaatgctcgcaaagcgttggagctgaagcaattcaaaaaatctagtccaaaaacaaatcagcttatccgttttttagccgcaaataaagaaaaacagactatctaa

SEQ ID NO: 150465 - DNA, 273 bp, Enterobacter cloacae
atgaaacataatcttggcgctaaagatatgcatcttccgttagggaaatctattaatatcggctctccatttagattgtattatgtttatcgtaattgggttttttcacttcgagagcctcaattcgaattagcctataaacttaaattattgattttgatgcctattaagttcattattttcgctaacgtttcaccacgcaaatcaaggatgacctttatgctgcgtggttttaaagatggcgtgatgaaaaaacattcttttttaaaataa

SEQ ID NO: 150466 - DNA, 465 bp, Enterobacter cloacae
atgacaacatcaggccagctcataggctgtgaactgttaacccgcttccactgtgaagatctaccagtactgaacagcaagtacttcatcatggctatggatattgaaaggaagagggaactactcacacgacaactacaggccatagaagtacatgcgtcatggttcagagctaaccggcttttctgtaccgttaacgttgataccgtactggcacggctatgtgtctttgacagggatattattcagctaatggataagctggagtttgtcaggcttgagatctcagaagactttgatggtcttgaaaagggtattgaacatccgatactcagaacactattaactttatggaaaggaactgatcggtacaggtatccttgtactgccgttactccagcatcgcgtaatactggtagctcttggcgttgctctactccctccacgatcacatacgggcagtag

SEQ ID NO: 150467 - DNA, 216 bp, Enterobacter cloacae
atgatgtctaacaaaatgactggtttagtgaaatggtttaaccctgaaaaaggttttggtttcatcacgccgaaagatggtagcaaagatgtgtttgtgcatttctcagctattcagagcaacgatttcaaaacgttaactgagaatcaggaagtcgaatttggtattgagaacggacctaaaggccctgcagctgttcatgtagtggcactttga

SEQ ID NO: 150468 - DNA, 171 bp, Enterobacter cloacae
atgcgtcagggggttgtgcgtgtcctttccagcaagtcgttcgaggtggattaccagcagacgatcgcagttgtcataatttcattattgcgtacagatggtaaaagacttttaaatgctcagagtctaatatctaaagactttacacttaaaagaatgagcatgacgtaa

SEQ ID NO: 150469 - DNA, 228 bp, Enterobacter cloacae
atgagcaacaaaaccggcggtccagcgttcccttactcaggggtccataagggtgaaaaagaaaacctgatagtcgacagccatggcatgacgatgcgagattacttcgcggctaaggccatgcagggtcgattagcgaatcctgactggttgtgtagcgatgaccgcacggcaaccgaagcataccagatagctgacgcaatgctccgcgcccgggaggcatcatga

SEQ ID NO: 150470 - DNA, 543 bp, Enterobacter cloacae
atgcattcacttgcgtatcaacacaataccgtaatacacgcgggagcgatgataaaccgcgctcaagctaaagcggcgccagaccacgaaaagatccgcgatgcggtccgggcatggtcgtcggcgctggacaatcaggacgtcgtttcggcgctgatcatcaacgaataccgggagcagggcgggaccgccatcagctttccggaagatattagccgggcgcgccagaagctgtttcgcttcctggataaccgtttcgactccgaacagtaccgcgagaacgtgcgccagctgacgcccgcaatcatgtccgtcctgccgctggagtatcgccatcgacttcttcctgaggacagtttcatgtcccgcttagctcgacttgagaaggaaacgagcgaggcgaaagtggccgttgctatgaacgctccgcgtcaccagaagctcaaggagctgagcgaggggattgtagagatgttccgtgtcgacccggacctgaccgcgccgctgatggctatggtcacatcgatgctgggggttatgtga

SEQ ID NO: 150471 - DNA, 480 bp, Enterobacter cloacae
atggctgcgttaaaaccagaagtcaaagccttcatcattcaatcacttgcatgctttgacacgctggcaattgttggtgaggctgtccaaaaacaattcggcatcaaagttacacctcagcaaattgaatcgcacgatccgacaaaggcaagcgggaaaggtctggctcagaaatgggttgatctattccacgagacccgcaagcgcttccagacagaaattagcgacattccgatcgccaacaaggcttatcgtctccgcgcgcttgaccggatgatgaataacgccgagaagatgcgaaacattgctctggcgaccgaaatcattgagcaggcggcgaaggagtgcggcgatgcctacaccaataagcacaagtttgaacattccggcccgaatggtggcgccatccagacgatcaccatgagcaaagaggaatacaaatccgcacggcaggagatgatggaggatgacgactgctga

SEQ ID NO: 150472 - DNA, 1479 bp, Enterobacter cloacae
atgacgactgctgagcaaagggcatttgcccgtaaggttgaatgcgaagaggatgggctctattacgctcgttacttctttaagcagcgcaccggaggaaagatgattgtcgcgcctcaccataaggtgattcagcaaacgctggaccgcgtcattgatggtgagattcagcgcctgatcatcaacgtcccgcctgggtacacgaaaacggagctggctaccatcaacatgatgggccgcggactggcactgaactgccgggctcgctttatgcacctgtcctactcgcacaacctggcgctgctgaactcctcaaccgcgcgcggcatgattaagtcgcaggcctaccagtcaatgtggccgatggcgctgcgcgatgacgctgacagtaaggcgatgtggtggaccgaacacggtggcggcgtctacgcgtcgtcagctgccgggcaggttaccggctttcgtgccggacacatggagccaggctggcagggcgcgctgattatcgatgacccggttaagccagatgacgcttactcggagatcgtccgcgaaggggtaaacaaccgctttaacgagaccataaaatcacgactggcgatcgagacgacgccgatgattgtcatcatgcagcggatccactaccacgacttgagtgggtatctactgcgtggcgggagtggtgataagtggcaccacctgaatctgccggtgattatcgacaatagtcagccatacgcagcgcagtaccctgaaaactcacacgctataccgattgaccacggactgcctgatggctggctgtggccgttcaagcacaatgaatcgcaccgcgtatcgctgttctctcacagacgcactgccgaagcgcagtatatgcagaggcctcgcaggtttaatgcagaaggcgctctgtggacagaggcgatgatcagcgcggcacgcgaactgcaaattcatcacgataaagttcgcactgtcgtagctattgacccgcaggcaacaaacagcgccgaaagcgatgaaacaggtattgtcgctgccagctcatatggtgctggtgataaaaagcagttctctgtggatggcgattacagcggtaaatattcacctgccggatgggccaagaaagccatatcggcctatgaacaacacgaagctgacgcgatagtcatcgagacgaaccagggcggcgacatggcggaggagacactccgcaatgccgggttcaagggtcgcatcattcgtgtccatgccagcaaaggtaagtatgcccgcgcggagccgatatcggcgctctacgaacaggggcgagtggcaaatcacggcaacctctacgtgttggaaaaccagttgatggaatacatccccgccaccgcgaagaaatcacctgaccgcctcgatgcgatggtttacgcactgactgaactgaatggatcgcaacctgtggggatgatgattccgaaacgccttcgctaa

SEQ ID NO: 150473 - DNA, 291 bp, Enterobacter cloacae
atgattaaagatttagttaatgaattaaagaatattgaacacagaataagctcgaccaaggaaaatggagctagtttctctagcagagattttgatcaaataatcgaagacttttccaagtccagaacagaattcaagaaggcagataaaaaagacaaagattaccaagtagttagagagttaatagttaaaatagatggcatgttaacctcagttcaagaacatgaaaaaataagcgattcgatatttaatgaaaatcttgtggaaagtttgccacctaaaagactctag

SEQ ID NO: 150474 - DNA, 717 bp, Enterobacter cloacae
atgggtttgcctgttccgaaaagaaatttacggatttacgacctgctgaaaatggccggtatgtcattagatgactggccacatgctaactcacccaaccacaatcaacgctgggcttggcttgagggtgatatcgcagtggttaatgtgtggaccgataacatccagatatcgaccggctcggaagatatatacacgaccagttaccaagctcggcgtcaggacaggaaaggaaaggaaaccgatgacatttataaggagattattcgccggagattaccggtccgcgtgctgctgaaggtacgcaatacgagcaagcgcattctggatacagaacagtggtctgcggcctacgacgatctgacaggtgtattattccttacccgaggtgaagtctctcaatacgaagatcagcatggtgattttcgtgatgacagcagtatagagaaatcagaagcagcccgcaggagcagtgggttgcgactgcaggcattaaaaagaagccgtggaatttgtgagtattgcggcgagccgggatttttgacgagcaaagggaccctctttgctgaggtgcatcatattcagcctttgagcgaagatggtctcgatacactggctaatcttgtagtactttgtcccaatgatcacaggcgagcgcaccattcaacagagagcgacaaaatgaggctgtttttcacccaactccgtaatgcctag

SEQ ID NO: 150475 - DNA, 381 bp, Enterobacter cloacae
atgaaatggtgctgtggattaaaacacttctttttcctaatgttgttattcactcaatttgcaaacgcaaaatccccctgctacaagctggcgactacggcatttttcaacagcagccttgcaccgaccgtttcaacacccgatagcttgaaagatgcaaatcttgaaatgactgatggtgaaacattctgcaaacgtcttgttcaggccgtcaaaacgaagaaaacaacaaccgtgatactgagacaaaaagcggatgacatgcttaaggctgcaaaagacgactttgagcacaatggcgatatggatcagcttgaacttgcaaaatatcactatgagctgaccgttggctctgccagtattgcagaagaacagccttaa

SEQ ID NO: 150476 - DNA, 327 bp, Enterobacter cloacae
gtgtggcgggaacgatctcatcatgcctggcagctggatatctcatggctcgggacgcaggggattaaactccagaatgagacagcagcagagggcggcaacattcctgcagaggatcagctttcgcttgagcttgaggttccgcctgtagcgacggagagcattgcagtgtccgccgtcgtggaacaagaaagcaattctggcgagatggggcaaatcctgaaggacaaacctgtatcccgctcatcgtccgcatggccagcgttctggtcaatctgccagcggaagttctaccaggtgaaaaaggtaattcgcgagcagtggtga

SEQ ID NO: 150477 - DNA, 1365 bp, Enterobacter cloacae
atgtgggaagaaaagtatatttgtcatcagtgtgtgggtgatgcttacgtcagacaacatatcaaaaatatcgggagcagtaatcagacctgcttttattgcaaacgaaaacgtataaatattcacgtcgaacatatcctcgcgatggtgcatgacgtatttgaatattattttgaagcctatgaggatatttatgattgtggccgcggggacagcgcacaggaggtcatttataaagaactgggtgtcgaattcgaggtggccgaggatatctacaatctactggctgaaaagttcaatccgcataatgattttgacggggtacggtataacgatgcctttgtctaccgccacattacctattccacaggaaagctccgttccacctggcgcagagccacagattctctgctgaatgaaacacgatattttaaccgggaggccaatgctgttctggattctcttttccgggatatcaataaactgaaaaccctggatagttcttctccggtaaaaatgctgacagaagaaattcggctttatcgtgccagggtctttgaaaaccaagaggaagtcaagcaagccctggagcaacctgaaaaatactttggccctccccctccctccctggcacgctccggacgcatgaatgctcagggtatttccgtgttttacggtgccacatctgtcgatgtggctattgcagaggtcagaccaccggtcggcagtattgtggtgacggcaccatttgttccgctgcgggccctcagggttctcgatatttccgccctggattcactcagcttcggttccggtagtaagtttgatccccagacccgaaaaaccaatgaacgagcggtatttttcagaacgctttcccgaaaacttactctgcccacctttggaaaaagaaaggacagcgattatctgatcactcagcttgttgccgactttctaagtgatcgggaaacctttggtcttgatggcgtaagctttaagtccactcaagtgcaggccggaacaggttgtaatattgtactgttcaataagtcctctgccgtcaggcatgcagccgatgaatcacggcgttttaatgttgagctttatgaatacgcagaagacaacccgtataatttcggccccgaaattcagcttatagtcggggtgccccaaaaaaaacattatgtgggttcgaggcctttcgcgcgtattcctgagcctacgttaagacttatcactgacggcatgacgtaccataatattaccggggttacgttcataaccagtcaagcgcctgtcaatcagggggaagacctgatacaacccatgcctcccgaacctttcgacgatctctctgacttttag

SEQ ID NO: 150478 - DNA, 249 bp, Enterobacter cloacae
atgcccgtttaccggccgggtatccgcagtgagggcgaatgtgacgagctgggattgtggccactcatctacatcgggaatgtggatcgtgctgccggcacgttcaccctttctgttaacggtaaagcgattgcccatctcctggagcctttcgtgctccgtgaagaccctgcatatcttgaaattcgtgacgaagcgatgaaggtcatctccgaggcttcaacgcggtctgtgctggcaactatatag

SEQ ID NO: 150479 - DNA, 162 bp, Enterobacter cloacae
atggctttacgcatgaggccgtttggggatattcagggagtggagtccattacgtactcgctcatggccgtgcaactccacgctgttgtgctaatggcgggcatccttcatgcctcaacgccgtcttacctgatacgcatgcatctttccctgaatatctga

SEQ ID NO: 150480 - DNA, 276 bp, Enterobacter cloacae
atgagagaaacagctgtcgtgatgttttctcggccttttgacgttaatgtttgccatgaccatgaagacaatgagtgggtggcacagtgcgatgctcctggacttgttacagaagcaaggacatacgaagaactgaccgaccgagtatgtgaaatagccccggagctttatgtaatgaatggcctgggtagtaaccctgcacatctcagcctttcgtttactctgaattgcgaagataagggaacgaggaacaacctgcaatcagagcactgctga

SEQ ID NO: 150481 - DNA, 1320 bp, Enterobacter cloacae
atgattgagaaagcttctgagttattagagcggtttatagaaatcgaaagaagtaaacttaatgaagttgaaatgcctcatatgcctacacttggttctgcttatgaagaaattacaaagcaaagtattgatcaagagtttattatccctagcggattagagcttaaagtagtttcggggtttatctctatacgtgataaaattttatctaaccaaatggatggaatgcttgttcatggagaagggaaaaggtatggattaactagtgactttatttatcctatagatcaagttttatgtgtttttgaagtgaagaaaactttgaataagtcagattacgcagatgcttttgaccatctaaggtttattaggaaggaatttgctaaatattttgaacttaaattgagagatccaacatttaatcctaatatttctattgcaagtaagcactattctcaaataacaggaagagatgcaccgactttttatagagatattcattccttatccaaaacagatgccattcttttctatgctttggtacaagaaagtctggccccatcaagcattatccatggatatggtggatatacaactgaatatggaatccggaatgcctttgttgatatcttaattgagaaaagtaagttatctggggaaggcttcggagtacccagctttcctacattggtgacaactaataatatcagtattgttaaggctaatggcatgccttttcttgctatcaataaagatcagcaatggtcggcgttggtatcagtgagggacaatgctgcaagaattatgttggaaataatctggtcaaaaatatcattttattttgatgtaaaaatgccatggggaaataatccaaaagatgaaattctggcaccgttattgtatgctatacccgtacatcaggacggacgtactggttggaactttagatatgtagaaatgaaagaaaatgaattaaaaaagagagtatttctaaaagattgggagccggaacgtatagacaaaaaactactagctgtttttcatatcatgttaataaatggcggttatattcatgaggatcatttggcatcgattgctgaaaattatcatgttacgcagaaagagttaatgggagaaatgatgagtttgtttttatttaaacaagttgagcattacattcgtccgatttcttcctgtttattgcttgttaccgatattgatggttttagctatttaacgtcaaatcgagagaatttggatatatggtgtgataaaaaaggggtggcaaaagattatattcatttgattgttatagagtga

SEQ ID NO: 150482 - DNA, 1605 bp, Enterobacter cloacae
atgaaagtaacatttccactacagattcaaacagcaaagaattacagcggtaaagtcacatccattaaaaagaaattaaatacttttacggatgactctttttttaaaaatatgtatatgcactttcaaactattcgacaaccaaagacaggaattgtgtctaatttcccgtggtgttgctttcttgctttgaaatggaagctatctgagcctattcgtcataaatgcatcgaaatggaaatgaaggactttattgatattatcaataggatttataatttgcagagtgaagttgaaggactttatgacaataataaaattttactcagcataagaagaatgatcgtaaatcagaaattgtatcaagttcccatgaaattggaacttaacacacttgcacggcaatactactggtatgctaattatggtggcggttattttcggcgcaacttcgaaaagttgtatggtctaactcttgaagaatattataaaataagtgcttactttgcattattatcttgtgtagaagattataaggaatctgtatatatcgcttcaaatgtctatataatacacctaataccttactttagccccgagacacttaagaattatctaaatcttgtttcggtgaaatggcctgaacttagagcattcatggttcagtttaaagatgagcagcaaaaagatatagaatattttcttgatactccaatgttgtccaaacccttcatacaaattaacgaaggtttggtagtgttgagcaaacacattttaagagcatcactctctggcctagttccttcattacttaaaaaagatttggggtcggcttacaaggataagttcggaaaggctatggagaattacatagaaaccctcctaactgaaatctttccaaatgttaaaacagaaaggcaaattaaagagttatatcgaaaacatcaagtttctgaaaaaactaaggtcgtcgatttcatcctcgaagaagatgaagggaatgtttatatagactcaaaggcaattgagcctgataaaacggtaaaatattcaaacactgctgttgtaattaaacagcgattaggtaatagctttatgaaaggagttttgcaaggattggattgcgctcgaaccataaataaaatcaatggtaataaaaaatctaaaagagattctttgattataatcactcacatggatcattatatatctacaggtaaaacgattgaggatatgcttgataattcattttttaagatgattgaggaaaagaatggtgaattaccaattgataaggaaagaatttattatatgacaatagatgaattcgagttcatggtagaggtttgtcgtttaaaaaaaataaatataacctctataattgatgcatgcagtaaagatgactcctcaagtagtactcaaaaattcaatgtaatgatgcacattcacaaaatatatcctgaaggtattccagatagagaaataattgttaaaattagagattatttattcgaggacctcattgaatcgatgaaaagttctaaatcatactgggatggtagggtaagtgattatttgaccattaaacagtttcttttaagttag

SEQ ID NO: 150483 - DNA, 342 bp, Enterobacter cloacae
atgaatcttttcgctttcataccgctttttgttgctttcgctttctatcttttggggccgtatttcggttttacggcggtgcaatcactcggttacctttcattagtctatacgcttgcagctggatttaatttagtaaaagggaaatatcagttagcaaaaatcggtaagcaaacaattgatgttttcacatgtactagtattgctgttagcttaagtgctataggactaggtgtttatactcgtacgattgatcaacatgacaccttagtatacttaataattatattcatgtttgtctggttagtagctaaagagtacaaaaataaaaaagccccgtaa

SEQ ID NO: 150484 - DNA, 480 bp, Enterobacter cloacae
atgccgcttgcaattgatgtaaaatgttgtgaaaaactcgccaatgacggcgagtttttgcctttttatcaagagtttgaagattacaagcgcaaaagcgacgactcagaacaaccccgcccaagtaacaagatgcaacaaagctatgcttcaatctccggattgtttggacgcgacagggcaaatgttgacgagacaagccctttctatcaaaggcaagaagggctaagccatctccatgtgcgtcaagaagacagcatttgggaagatgatgctggtgatcctctcatccagtggaagtgtactagcaacagttacattatatattcatactttgtccataacttggttcgctattactttgtcgtcgactttattgatgatgaagcgcacgcgaattgggataatcaagaagcgattcaaatgtggattgctgacgctaaagcctatcgtttatctataaaagaaatcgcagcctag

SEQ ID NO: 150485 - DNA, 702 bp, Enterobacter cloacae
atgacaaccgagacagtagaaactaatcagccagacgaacaggacggcacttttgatcgcacttataccgattttaagcgactgactatcttaatttctaagaatggggtggaaaaggtgggcaagggtaaggattccaaacttgtgcctgtgcctgatgggaccgagataatgttaactccgagcatgaaagacgtttacagctacctctacaccttccagacgaacaaagaccgcagaaactaccctgagccaatttatcctaatatggaaataatcgcgtgggaaaatggcattactaaacccacggcgcaaaaggctgtggatgatttgatgcgggcgggggtgttgattaaggaccaaattcaggttgggagcgggtttaagtccaacaattacgttgtgttgaaaccctcgaaagtggtggcgcgtggcgtcactccaccgcatccaaatgcttctaaatattcaactgccgaggagagcggtaagaatgaacaaaaacgtgctgtggtggaacctgccgcgcctgttgctggaaaaccagacggcatacctgttgtggatattcctgtcgatgctgatgtacctgccgatgatgatgcggtgatcggagactttagtgatccttaccttgatgctgaagtaaaagaatggcagaaacaaaaacatagtggaggattgaattgtgtgaacacgtaa

SEQ ID NO: 150486 - DNA, 177 bp, Enterobacter cloacae
atgaatatttcattcccagatgagacctaccgcgcattgcttaaagaggctaaccgccgcgacatgccaatggcaaaattatgtagtgaattgctgcaaacagcggcaaaaatcattgaaaagaataaaacagataaccagcgaggatacaatgacaaccgagacagtagaaactaa

SEQ ID NO: 150487 - DNA, 786 bp, Enterobacter cloacae
atgacaaaaaaaagaacaccaatatcaccggatctatctgcacaaatcctattcgcatctgatagaacatgctgtgtctgtaacatcaggggcaaaagggtgcaaattcatcatatcgatgaagacccaagcaacaataccttccagaatctaagtgtgctctgtttcgattgccatgacgaaacacaaataaggggaggttttgggaaacatttaacagcaccggtagtcaaaaaatatcgtgatgactggttagtaagggttaaacaacgtcgagaaaaggcagatagttttgccataagtaaagtaattggcgaaagtgttaccgaggatcttccaatgcgtgcatccccttccgataatgacctctacgcatatctggactcacttccagcaattcgtcatgagcttttgtcccgggcccagccagactgggacactgggattactgctgtgatgaatcaagcaaattatgactatatcgatggtttacagggaatccttgtaggattagcgaaattttactccccaaacgcattcgacaatcaagaacctcatgagtttttctcagagattatttctagccgctatcgttggcatcgtgcgcagcttgaatcagagggaccagggacaggtggaacgattattacaaccttgctgggtggtgcagtctctgctgacgtagaaaaaatgatagaagaaatggtgtcatcattaatcggctataacgatgactatagcctgaagcactggttaaggctttggaataactcatctcagagttaa

SEQ ID NO: 150488 - DNA, 432 bp, Enterobacter cloacae
atgtctggaatgttagcaagtacagccgccgctgttgggatcattgataaagctgttggtatcgcgaagaagctcgctgatgagagtgacgagcttgataaggcgacgcttaaacttgagcttgcaaacctcatgacagagcttgccagcgtcaaaatagaagttataaccacccaagctttactgtttgatgcagaacaaaagatcaaggatcttgaaggaaaactgaaggataaaacagcattttcctttcgggacggtgtattttggactgaaggtgatgacactgcattctgtccgaagtgttacgagagcgaaaataaaaagattcacatggaatcacgtgaaagagcatatgctgggcttggctcatttgtagagaaaccaaactggtattgcagggtgtgtaaaactacctttaatcgaaagtga

SEQ ID NO: 150489 - DNA, 603 bp, Enterobacter cloacae
atgtcggatagttatgctggtcttattggcacggttgtgggtgcaatcattacaggcggctttgcctggtttaccgattggcgtaagaaccgttcaaagaataaaaaagatttagaagtgttatccctaaaactgacttataaactagagcgttttgttgcactgtgcctggagtgttcagaagatgatgggcgtgagtattatcatgaagatgaaggtagatgctctggatcgttgttcagaggttataacatcgaatttccagagtttaaccttgggaagttcgaagacattgactggaagttgttacctgtgaatttaatgcatgaagttttcacacttcccacaaaagttaataatgcaaggcaacgtttcgccaaagagtggaatgaatttgatgaacatttaaacgatgattatcctacaacaatacgtgccaaggaattgacagaccttgcgatttatttttacaacgtttcatccagcttacgaaccttggcaggactcccgcttcctgaagattcaatcatcattgatacactcaataaaaataaaattaaaaatgatgaagattacgatagattatttatacgaaaggaatga

SEQ ID NO: 150490 - DNA, 903 bp, Enterobacter cloacae
atgtcacaagttactcaaaataaagtggtcaccgcaccggtgccaatgacgccgatgcaggagttctggcactacttcaagcgcaacaaaggcgcggtcgtcgggctggtgtatgtttccatcatgatcctgattgcggtgtttgcgaacttccttgcgccgtataacccggctgatcagttccgcgatgcgctgctggcacctcctgcatggcaggacggcggaagcctgacgcacctgctgggcaccgacgacgtgggccgcgatgtgctgtcgcgcctgatgtacggcgcacgcctgtcgctgctggttggctgcctcgttgtcgtactgtcgctgatcatggggatcgtactcggcctggtggcaggctatttcggcggcatcgttgataacatcatcatgcgcgtcgtcgacattatgctggcattgccaagcctgctgctggcgctggtgctggtggcgatctttggtccgtcgattggtaacgccgcgcttgcgctgacgtttgttgcgctaccgcattacgtgcgtctgacccgtgcggcggtgctggtggaagtgaaccgcgactacgttaccgcctctcgcgtggcgggtgctggtgcgatgcgtcagatgtttatcaatattttcccaaactgccttgcgccgctgattgttcaggcgtcgctcggtttctctaacgccattcttgatatggccgctcttggcttccttggcatgggtgcgcagccgccaacaccggagtggggcaccatgctctccgacgtgttgcagttcgcgcaaagcgcctggtgggtcgtcaccttcccgggtctggcgattctgctgacggtgctggcatttaacctgatgggtgacggtctgcgtgatgcacttgatcccaaactgaagcagtaa

SEQ ID NO: 150491 - DNA, 471 bp, Enterobacter cloacae
atgtctaaatggcgatggagagttttaagtgcattgtatattgcagtcttggcagtcgcaacgtattatgcaatgtactatattcaaaatttctatgataagaagataattccttgggcaatagcagcaatgttggttattctgttctcatccttaagtaccatttctagagacatgatgaacgaacttgataaaaatagttcgcttaataccataagaaatgagaaagatgccataatttctgatttggagcaaaaaattagttcgctgcaaagtaaacttaccgaaaaagataatatacttcatgcttttaaaagttcatttacgggaagttttgtctcttgtgccgatgaaaaggaattagtgataaggcttaagggattagcaacaaaaatgattgataatcctgaaatgaataatcttgctcccgcagggacagatgcattagctcttatgatgaaattaagataa

SEQ ID NO: 150492 - DNA, 945 bp, Enterobacter cloacae
atgcaaaaacagcctgatgtcgtcgccggagtggatatgggggccactcatatccgtttttgcctgcaaacggccgacggtgcggtgttgcattgtgaaaaacagcgcaccgcggaggttatccgctctggtgtggtgtgcggcgtgacggaaatgatcacggctcagctgcgtcatttacaggttcactgtcgcggtctggtcatgggctttccggcactggtcggcaaagacaaacgcaccattatttcgacgccaaatctgcctttgcaggcgaatgagctccgcgatctggcgggaaaacttgaagatgcgctaggctgcccggtcgaattttcccgcgacgttaaccttcagctttcgtttgacgtggtgcaacacaatctccagcagcaagaggttctggcggcctaccttggcaccggcatgggatttgccatctggctaaacggtgctccatggacgggcgcgcacggcgtagcgggcgagctcggacatattccacagggggatatgacgcggcactgtggttgtggcaacccgggatgtctggaaacggtttgttccggtatcgcattgaaacagtggtacgaacagcagccccgcgagtatgcgatgggagatatcttttcagccgtacccgatgaccccttcgtacagcaactcctgaatcatgcagcccgcgccattgccaccagtgtaaatctgttcgatccggatgcggtgatcctcggaggcggcgtaatggatatgcctggctttccgcgcgaagcgctgattgtcgggataaagcagcatttgcgccgcccgctgccgcatgagtccgtgaaatttatccctgcctcgtcgtcgtcttttaacggcgctcagggggccgctaccctggctcgctgccggttcctgccatcaccttgcgcagcgcctgcgccagctgtgcgcgggtga

SEQ ID NO: 150493 - DNA, 993 bp, Enterobacter cloacae
  misc_feature (961)..(970): n is a, c, g, or t
atggagtctttaggacaaaggtttactgtaaccttattgagagatgattttaatgttttcgttaataatgagttggtaacagaaaaacaatcattgccagaattttcatatcgagagccaactacagggtttgtggaagaaacaatcaatatcaatggaatagaacgaaaagttagacattgggttggctttgtaaaagaggcagaatggcctcaagatcaagctggcgtgggtgtttatgcccatgggaaaattgcacaggatcggccttttgtatttggcttgaaaggcagagaaatttcttctcgatatatgtatggtgtaattgaagctgattggctggatgaattagatgaggatattgtatccactgaccgtacaagcattaactggaataacgattatacagaggaaatgtataattggggtagaaatttggtttcaaaatggatcgcaaattatagaaaattccaaaaagaagaaaatgctggaaaagtgttacgcaaaattaaagaattacctgacatacctaaaattacagaagaagaaagagaagccatcaaagatatggtctgtaatatgagtcccaaaatttataaagatgaacagttgcaaaatgaagttatcacacagttaacttcagcatggactcacaggccaacgagaagcatcataaaatcgctctgggacagaatagaatcttcagaggggaatgaagatgaatttatccaaacactcaacgatatcactaagtatttagtgccagagtctctttccctttcagtaagtgtatcacaacgaatttatgccctaacgaaactgcatgaactaagtctagtcggtactgaaaatcaattacaggctttattggagagttttccttggattctgggttccgataaaggaaaagtgtatgcaaatactgctctaaaagaactagcacgtaaggctgtcttggatnnnnnnnnnngggcttttaccggctcacggtga

SEQ ID NO: 150494 - DNA, 183 bp, Enterobacter cloacae
atggcacgtaaagcattcaaaagtggatcagaacttaaaagtaaaaccattacagtacgcattaccgaagtacaacaagcctacatcgataagctaattgtacaaggtaaagcaaaaaacaatgcggctactttacagtatctaataactaaacacatggcgttatttccagaaggggaataa

SEQ ID NO: 150495 - DNA, 546 bp, Enterobacter cloacae
atggcaaggaaacttaatcatctaacagatgaacagaagaaacttagaactaaaattctaacctcacgtagaaatatgatttatcgcgtaaacaacgatcctaactataccaatgttactatatgtgatgaatggttgaatgatccagaatcatactatgaatggcatttagctaatatggttgaaggatgggatattgataaagacattctttctggtgattcaaaaatttatagtcccgaaacgtgtatcttcacaccacgtgatgtaaatctaatgaatagaaaatcatgcggtaagtctggtttgatgttcaagggtatcatgaaaaacggtactggttattgtatgaaaacaacgtacaacggtactaacatttatggtaaaacacatcaaaaacaagaagaagcatatgctgattatttacagttcagaagtgaacgaatggaagagttcatagtgaagtattcaggacatgaacaactatgtgaggcactaaaacatgatacacaacaatgtttagaacaagtccgtagtattcgctaa

SEQ ID NO: 150496 - DNA, 1107 bp, Enterobacter cloacae
atgctttataacaccggcaccatcgcaattaacggaaataccgcaaccggcaccggcacgaactggacggcacccgccagccaggttcgcgctggccagacgattatcgtcatgtctaacccggtgcagctgtttcagatttcatccgtgaacagcgccacgtcaatgacggttacgccagctgcttccccggtgctgagtggccagaagtatggaattcttgtgtcggacattatctcggttgatgggctggcacaggccatgtctcagctcattaaagagtacgacgagaacattggcgcgtgggagacgtttgccactacctcagcaaaccagagcatcacagttaccatcaacggcacccctgtaacgatccccggcatcggcaaactggcgcagaaagggagtaacggagccatcccgattgcacagggcgggaccggggcaacgactgcagcagacgctcgctcaaacctcggtttgggaagtagcgcgacaaaggacgtcggaacggctgccgggaacatcatgcaagtaggggcttttggggttggaacataccaggctccaaggccaaatgatgcaaactcatcgtttatcagtgatgctgacggtaacaccagttgggctcctgccaatggctgtggctaccaaagctcttataacactcagcgcatagcgcaaatgtgggttaccactggcggagctggctattgccgttttctgttaaacacgaatcctcaaactacaaaaacagatgctccgtggacggtatttcagtcagcaggaacatcggacattaactttaagaaagtgaccggggatctggatctaaacgaatcgctgtcaaacatcgaggcaatggatttcaagaccttctactaccttgctgatgaagagaaagccattcggcgcggcgttattgctcaggagttggaaaagatagatccgcaatatgttcactcggctgaggagtcgggaaaaatgacactagacctcaatcctctggtgctcgatgcgctggcggcaatcaaagcgctggcaatccgcgtaagcgcattagagggagacgctaagcctcccgctcctggctcattcgctggttaa

SEQ ID NO: 150497 - DNA, 741 bp, Enterobacter cloacae
atgcaggtaggcgcattcggtattgggtctatccacggcgacggaccactactggacgctatggatgcattcacatctacctgtttcacctctcactccaatgatggtcttacccagcttgggttaactgcaaatacgggtattacgtcaatagtcgtcaaccggggaagccgtccgacacgcattcatcaggcttacattctgaggagaacgtggttttcgtattacggcggttcgtcttggtcatatcaggaggcttacaccacgggcaataccacaaaggccagcgatggcaccctaaaggctgcgtctccggttgcccgtatcgtagcgagccaggaagcctgccagcgcgccgatatagcggaggatggcttctcctggtgcggctgtgggacggggaacgctgaggcggagggaataaccatttctcgcttcgaggtgggcgtttacgtgctggctggttcggcaggcctggcgtccgagggatggcaactactgccaccgatggaccccggcggcatgggagaacttggcgtggttgaggttgagcagacggaaagcggaggcctgacaatccgtcttttcaagcgaaaatacatcctgagcgatgaaggtgagatcatcaaaactaaaggtgaaccgatggacgtgccggcgaacagctggatcgatgttcgcctagatatgcccgcagattcactttttaaccagcgaatgagccaggagcgggaggcttag

SEQ ID NO: 150498 - DNA, 273 bp, Enterobacter cloacae; identical to SEQ ID NO: 150384

SEQ ID NO: 150499 - DNA, 546 bp, Enterobacter cloacae; identical to SEQ ID NO: 150399

SEQ ID NO: 150500 - DNA, 186 bp, Enterobacter cloacae; identical to SEQ ID NO: 150400

SEQ ID NO: 150501 - DNA, 1581 bp, Enterobacter cloacae
atggctgaacccgctgaagttattattatatcgaatgcaaacgacagtgatgtttatgaacaggacaaccgtagaattgatgaaaaaataaaagatagaagatcacaagaattaattataggtttatgtggggcaataggttctggggtaaaaaaacttaaagattctgttataagcgaattaaaaggggtgggctataaagtatgccacattagacttagcgatttaatagcagatacgcaaggtgataaagccagagaaataaaatcactaactggttttgaaagatataaagtattgcaggacctaggagatcaacttagaaatacagataaaaataatatgacagtcgtagctgagatggctattagagagattgtcactttacgtaatgcagagtttaaagatgaaacaactaaaggtggcttagctaaaacgaaaaaaaaggtagcttacgtcatagatcagctcaaaaacccggccgaggttgaattattcagaacagtctaccgaaataacttttatctcattggtctattaagaaataaagaagaaagagtccaaaaccttcgcgatgaacctatgtcattagaacaagcaaatattctgatggaaagagatagaagcagtaaagatgttaatggcaaatcggtagattcaggacaacaagttgaaaaaacactttatttagcggactacttcataaaaaacattgatcaagtagcagatataaatgcttccgtaggtcgttttttaaagttaatacatggcgttggaaatctaacgcccactcatgatgagaccggtatatttactgctcattccgcatcgtttcgttcggcatgtttatctaggcaagtcggttcttgtataatggatgataacgggaatatattggctacaggatgcaatgacgtaccaaaagcagggggaggactttatacttctaatacgaatactgatatgcgttgttataaccgttctacttgttttaacgataagcataaagacatcctttgtaaggaaattgaagtacttctcaacaagctaaatgttgaatcatcagctacaattgcaaaaaaaataatgtctgaaactaaagcaaaatctattatagaatattctagagcaattcatgctgaaatggattccattatggcattagctagaaatacaaacataagctctgtagacaaaataatgtattgtacgacattcccttgtcataattgcgctagacatattgtggccgcagggatcaagaaagttatttatattgagccttatgaaaagagtcttgcattagacttacacaatgatgcaatcactcaatcagataccgagagcacccaaaaagtaatattctgcaactttgaaggcgtatcgccttctcggtacgagtcatttttcaaaataagtagaataagaaaagaagaaggcaaaatcaagaactatgaaataaccaactctccacatgttgaccctatatatttggatagttatatttcttatgaaacaagaatctctaaagaggtaacaagcaagttgggtaaacaatctattcctgattttgataaataa

SEQ ID NO: 150502 - DNA, 828 bp, Enterobacter cloacae
atgatggaatatttcttagatgaaagtggtaacacaggtgatttgattaataaaaaaaatgacatgggatttgctaatcagccccttttcactcattcatgcgtgggagtagcagaagggaaaattagtagaatgaaaggttttgtacgtgccttgaagaaaagacacggcatagatgaatcaattgaactgaaatcccaagattattatattaaaaatccagaactagtatacgaattagttgatttcgtaattgatgaaaaatacactttagtatgtgaagtaatggataaaaagtgtaacgtagcagtttctatagtaaatcaacttatagtacctgcaatggagaatgaagacagcaatgaattgctgttagtaagaaacatattggtagacataataagtacatttgcaccagaaatttgtttcactacattctctgagttatgtaaagacccatccgaagaaaagttgaacatatgtattgagagcctgaaagaattcttttctagtgaaagtaatccactagatgataatggcggcacatgcagaatgttcgataaaactttacaagaatttgaatacagaaaaagtagatactcagcagatgtagaaaaaacaaatgccgaagggcagatagaaactaacaaagaagagattgaaaaggtatcattccattggcgtaatgctcttggctttgtgatcaccttaatcattctctataactggatcatagtaccagtactggatgcttttggtattgtggttatccaagtaccattaggacaactactgcaagtacttctaatcatggttggtggttcataa

SEQ ID NO: 150503 - DNA, 213 bp, Enterobacter cloacae
atgaaaatattctggtcagtgttagcagcactgatagcgtttagcgctctgtgtggcttaggattctttgtttatcaggataacgcttatcaggccaaagtagataaatgcgttaataacatgaataagctaatcattcagaaaggcgattatgatttactaacttcaatgaaaactgaaatattgaaagaatgcagagaagcaaatgaataa

SEQ ID NO: 150504 - DNA, 591 bp, Enterobacter cloacae
atgagaaaatttatcagagacgtcccacttaaatctatttttcatctttttttagttagaggcagtatttatctctttccatttatcacattaccagtaataacacgcagccttggtgtaacacaattcggtattttatcaatgtttttggctgctcaacaatatctgataatgctggtggaatatggttttacattaacaggcgcaagggatatttccagagcggtacacaaatacgacgaaaacaaaatactaagcgaaattttaaagtgccgctttttgatttttctggtttgtactatctttgttgtttctacttattttttactccctgagtatggatattcattctgttacctaatattattaatggcagttttaagttctgtatgtaaccaaactcacttttttattgggaaggagaggacaggttttatagttatatcaactgccatagcaagaattctatcaatcttaattgtggttctatttgtaagaaataaagatgatatatatattgcgatgctcgcatattcattaaacgctgtctcttatacacatctgacgctgccgacgactccttacgtgtag

SEQ ID NO: 150505 - DNA, 846 bp, Enterobacter cloacae
atggcaaacgactggcttgagctgcgtcagcatgcagaaacaggtattgagacaattaaggcgcatttcgaaggacatgcctttgatccccactggcatgatagctatctggtcggaataaccctttccggtacgcagcagttccactgtcgccgtgaacgccaccgtagcctgccgggcgatgcttttttacttgagcccggggagatccatgacggtgatgcgccggtagagggcggctttacttatctgaccttttatctggatgaacactggctcacccatacgcttcaaggcctgtatgactctactcccgggagttacactctccactttgcccaaacgctgacgcgagagcctcagttggtgcgcgctatcggtgatacatttgcctcgttgcataacgatgagatgaagatcgtccaacagagcacaatggataacctgctctctcagataactacccactgccactggcgtaagaaactcccgtcgcaattacaaagctccgctgtggcgcatcgtgcccgcgactatctctatgcgcatatcggcgagaacgtggggctatcagaccttgcccgcgagacgggtacggatcgctttaccctcacccgctgttttaaacgcgaatttcacctggcaccgcacgcctggcttatccagctgcgactggcaaaggcccgacagatgctggcgtgtggggaactgcctgttgatgttgcgacggcagtgggttttgccgatcaaagccatcttggtcgctggttccagcgtgcataccgtatttctccggcacactaccgccggttgtgcacaaaccttccagacgtttccagaaaataa

SEQ ID NO: 150506 - DNA, 924 bp, Enterobacter cloacae
gtggcaaagcaaaagttcaaaatcaccaactggcccacctacaataaagccctcatcaaccgtggctccataactttctggctggatgatgaagctattcaggcctggtatgagtcagcaacaccttcttcacgaggcagacctcagcgctattctgaccttgccatcacgactgtgctggtcattaaacgcgtattcaggctgaccctgcgcgctgcgcagggctttattgattccattttttctctgatgaacgttccgctacgctgcccggattacagctgtgtcagcaggcgggcaaagtcggttaacgtcagtttcaaaacgcccacccggggtgaaatcgcgcacctggtaattgattccaccgggctgaaggtcttcggtgaaggcgagtggaaagtcaaaaagcatggccaggaacgccgccgtatctggcgtaagctgcatctcgccgttgacagtaaaacacatgaaatcatctgtgcagacctgtcgctgaacaatgtgacggactcagaagccttcccgggtcttatccggcagactcacagaaaaatcagggcagcatcggcagacggcgcttacgacacccggctctgtcacgatgaactgcggcgtaagaaaatcagcgcgcttatccctccccgaaaaggcgcgggttactggcccggtgaatatgcagaccgtaaccgtgcagtggctaatcagcgaatgaccgggagtaatgcgcggtggaaatggacaacagattacaaccgtcgctcgatagcggaaacggcgatgtaccgggtaaaacagctgttcgggggttcactgacgctgcgtgactacgatggtcaggttgcggaggctatggccctggtacgagcgctgaacaaaatgacgaaagcaggtatgcctgaaagcgtgcgtattgcctga

SEQ ID NO: 150507 - DNA, 237 bp, Enterobacter cloacae
atgggtaatggcctccggatgtccggcggcaaaggtgcgcgctatcgtacgcccgcaggcatcgtagcgatactgcgaggcctcgccatcgagtcccacctcttccagcagcagcgagtccgcgccccagcggaactgatacgcttcgccgttttcgttttccagggcaatcagacgcccgcggctgtcccagcggcggcgcacctcttcaccctgcgtattacgggtggcggttaa

SEQ ID NO: 150508 - DNA, 807 bp, Enterobacter cloacae
atggtatatgcagcattagatgcaagtaataatattatttcaaatgttgctgagggtatcgctgttcctattaaaattagtggcgacattaatacacttgatttaaatataaaatcatcagatcttgaagggctatattatagcggatttcatgaagctagagaatttttcgactcgcataaattaacatatttatataagaacactttgactaagaatgatgtaggtatgcttttatatggaagagctgaaacattactttattatttaggtagggagattccagcggcagccacgactaaaatatggctttatacttctatcagtgccaccgatcaggagataatttcaataggaaaatggtcccagggggtcttgaatgtacataaaatattaaatgtaatcgctgatgatttgaaacctcccatccctcatgcttttaattacgtacaccaaaaagatcatgtttttagctataaaggcagagatatacgacatttggataatgattgccttatatcatggactagtaagtccaggacagtaacatgtactaacaataaaactagaatatgttttccaatatatcaatatgaaaccaatgaagtatttgcgttaataagcatctctataaactcaaagtatacagaatgcagcttaattgaggatagaacgttaaactgttccaaggacatcctccttgacattgacaaaaaatttgctattatattagaggagtttggagaaatagttagaagctccttgtatgggcagcaacacaggttcatgcattttattcgtaaatag

SEQ ID NO: 150509 - DNA, 480 bp, Enterobacter cloacae
atgactatgacttccgcaagccgaacgcgtggctgttccaggcccagcagaacccggcgtcaccgaaaccgggcagcatcgacgtgtacgactggccggggcgctttgtggagacgggccatgcggaattctacgcccgcattcgtcaggagcgctggcaggtggagcatcagcagattcaggcgacggccacggcggcgggcattgcgccgggccacatctttaccctcaccaacgcgccgttcttcagcgataacggggagtatctggtcacggcggcgggctaccatttcgaggagaaccgctacgcgagcggtgagggggagaccattcaccgcaccgatttcagcgtcattccggcatcggtgtcctaccgtccggcgcagagcacggcgtggccgcgcacctacggcccgcagacggcgaaagtggtggggccgcagggggagagtatctggacggacaaatacggccgcgtga

SEQ ID NO: 150510 - DNA, 129 bp, Enterobacter cloacae
atgaagcattttacccgtattgctaaacctgatggtggacagtacctaaccgcagatatgcgtatgatttccgattatgggaataatcacctgtaccaccatcattataaagtgctggcagatcgttaa

SEQ ID NO: 150511 - DNA, 765 bp, Enterobacter cloacae
atggcttcggtaatggaagaactgctggacgatagcgagaaagcagaacatctccagttaatcatgattagcactgcaacgaacggcacaacgcctgctgatgattatgcagagttgagaaattactttcttgataatccgctctataagtcattagtgcccagctttgtgcgtaaaagcagatctctcgatcagttctggcaatttatcaaaagcaaattcccctcatatgctgagcgccgtacctacatctgggccgaattcacccctttgctcgacttcatagaaggcaagaaccgagccccagcagatgaagtaattacggatgctttcaaatcttttgatactgacggggtccatgctgtttggacaaaagctctagagcgcagactaacagatccagacggagcaataacttcggccagaacgttgctagaaacagtctgtaagcacatcttggatgatatgaacgtcccctataacaataaaaatattgagatgtctgaactctacaagctcgtctccaaagagttaaatctttctagcgatcagcattcagaaagtatttttaagcaaatattaggcgggtgttccgctgttgtgaacggacttggtactctccgtaaccgtttgggagatgcccatggtaagaacagagcggccgttaaaccctctccgcgtcacgctgaactcgcagtgaatctctctggctccatggcgctctttttgataagtacctggcaacatagaaaggactctgattaa

SEQ ID NO: 150512 - DNA, 255 bp, Enterobacter cloacae
atgaacattgaggtaaaaaaagcagtgaaatgttgggccgaccgaccaacttggtttagcccccatccgatggatgcggctgaatttaaacgtgcggtgtcaaacctcaagcgcctatcccctacacctactttcgaagaaatcaaagatgcaataatgttctttgtatccgatgcgccaacgatgttaggcaccccttcggatattcctcaggcagttcatgatttcgcagcaaaaatgtacaacaaactgtaa

SEQ ID NO: 150513 - DNA, 402 bp, Enterobacter cloacae
atggtaacgctggagaaggccaaagagtatttgcagggccagggaataaatcttcctgacttcatgcttcagtcgttagtggatgatgttaacagcattcaggaatgccttgattctcactatccggcatcaaaggcgttggcaatccagatgtatttgcttgcactgatgggcctggggcaaggcgataagtacatcagctcccagaccgcacccaatggtgcatcgcgttcattccgataccagtcgttttccgaccgatggaaagcatcagtgaacctgctgcgcgggctggataaatacggttgtgcaacctcccttattcctgccgaccctaccgccaccccggcattcgctggtatctggatcggtaagggcggctgtatgtgcgggggcaagtga

SEQ ID NO: 150514 - DNA, 201 bp, Enterobacter cloacae
atgttaacagtaaaagtgatgtcgccaggtggtggcgaagagattcattgcggcctgagtgttggcttcaatcccacccagcagagcatcgcggtatcgggaatggacaaaaatgtattcctgaaacccggcgaggtcgcctacgtgatgaatcagaacggaaagacggtttctcgctacgagcacgttaaccgccagtag

SEQ ID NO: 150515 - DNA, 249 bp, Enterobacter cloacae
atgaagcacattaccgtagacattgagggcgcagcatatggcaaatgcaatggcgaaccagatgttgatgataggcattttgatgaggtttgcagagagattggaattacctatgagcgaatgaagggaatagccatagctggaaaggtctatctgtataactgcaaaattactggcgatgtggcgttgccgaaatactggagctacggaattgatagcttcattttgaatcaatacttcggtggatag

SEQ ID NO: 150516 - DNA, 261 bp, Enterobacter cloacae
atgcctaaattcaagagaataatcattagttacatcaatggagagccaaaagagttaatgaagaaggcagggtttacatggaagttttcaaggcctgttcctatagccgacactgttgagttttactgttgcgagcgtaagaaaaaaggtccattgccggaccactttcatagtgtcggatggggtgataacggagcattttcccacttcacagaagagcagattaaggcatgcaggcagtgggaagaaggagccgtgtga

SEQ ID NO: 150517 - DNA, 714 bp, Enterobacter cloacae
atgagcactattaccagagaacgtctggagcaattagcaaatttccgtggtgcgcctgtcacacgacaagaagagcaggagctggcgcgtatcgcgctggcatcgctcgaagcggaggctgtggcgtggctactgtcaggcggcggcgcaaaaaacaacgtcagcttcgatagtggcaatgcttacgtcgacccgctgcgagaagtaacgccgctttacaccgccccgccagcaccggtatctatgcctgatgaatccgcgatgttcgatgcggcgattgatatctgtcgcaagtctgatgcgattgacgagcacgtatggaatcatggtgtactggcggtgatgtctgctttcagcgactgtcgcgccgccatacttaagcactctgagccattcatagtaacgagcgatcatcgcatgatggagatgcctcaagttgaggctatcaacgctgtcaccgccatgcttcagggtgtcgatggcaacgctccggcgcacttccgtagccgaccagcgcaaagcagcctctctccggcgcaaggcggcaactctccggtgattccggaaggatgggtgatggtgcctattgagcctacggcagatatgcgtgaggcataccatcaggcgcaggcggagtatgaagatgtcgatggattatggagccctgaccaccaatggcaggcaatgctcgcagcagcaccgcatcaggagtaa

SEQ ID NO: 150518 - DNA, 411 bp, Enterobacter cloacae
atgagcaacatcgacaaacgcgcattacgcgtattagccacggctttagatggtgatgactggcacgctgaagggaatagtgtttatggcggtcgttacgatgtaggtgacaatgtttgctatgaccacatcgcgagctgcgaatctgttaatgggaaaagccctcacgctgacttcatcgccgcagccaaccccgccaccgtactggcgctgctggatgagatggaagccgtaggcaagaggattgctgagctatcacaccatctccagtgcgcgcacggttttatcgaacatacagaggcgtttggccacgcagcatcaaacgggattctgtgctgtggtgatgtgcagtggaatattgatgcgtctaagtctgttctgtccgcagtcgataaaggagaggcatcatga

SEQ ID NO: 150519 - DNA, 864 bp, Enterobacter cloacae
atggatgacggggtattacaagatataaagatatcactaagatatgacggtaaggacgctgaaaaccatgaaattgatctcaattgccttggggagtctctaaagggattctctaaagttttatctacagcagcatcattttcagccactcagaaatacagcaaaatatccacatatcaagacgttaaggtatatgcgagagaggcaagggcaaattgcttcactttagaagctgcgctaaatttcgttactcagaatcagttgttctcagggatcgccgcaactatactgggtgcgatacttcaatatatatttgcgagaaattcgaacaagaaagatgaaatgaaagctctacagcaggttctcgaaaaggccatagaggcgctaggtaacaaggactctggaaccatcgataagttaatctcagtgattgataagatggctgtagaacttcgccccgcagttcggcaggccgtttctccgattggaaacacatgtgatcaaatcagcatttccactaacaaagatgggtgtcttttaaaggtggacgcggcggataaagagcagatagacaagcttgaagatgatgaggttgtaggattaagagagtatcgagcttaccttacggagtttgacgcacagaatatgacagcaaagatcatacttgaaggagatgattcgaagaaaagaataacttctgaaatcagtgatcctgctgcaagcaaaaagaacaacccctacctcaatgcccttagcgcctatatctcaacgaagggcgacatatcatccatattcacaataactgcaaaggccactgtgaaaaaagggcaaataaataggctatttatagtggatgccaaatag

SEQ ID NO: 150520 - DNA, 321 bp, Enterobacter cloacae
atggaaaacctgctgatcgtcaatgccgatgattttggcctgtcaaaagggcagaactacggcattattgaagcctgtcgccggggcgtcgtgacctctacaacagcgctcatcaacggtgaggcggtggaacatgcggcgcagttaagccgtgagctgcccgagctgggcgtgggcatgcactttgtgctgacgcttgggttgcccctttcgccaatgccgggcctgacgcgcgacggccagctggggaaatggatttgggaaatggcggagcagggcgctctgccgctcgatgagattgcccgcgagctggattgctag

SEQ ID NO: 150521 - DNA, 741 bp, Enterobacter cloacae; identical to SEQ ID NO: 150497

SEQ ID NO: 150522 - DNA, 579 bp, Enterobacter cloacae; identical to SEQ ID NO: 150373

SEQ ID NO: 150523 - DNA, 522 bp, Enterobacter cloacae
atgaatagccctacacagaaacgtattgaaattgaaaatcattacattccgaaaattaaatcagctctcgataaagttgatgatgcgaaagatatttatgaatccgataaacttaaccgtgatttattggtggctatcaaaacaaaacaactgattgcacaaccagttgaaacgtatggattcagaatccgccaaatcacaagtccggcaatgattaccccagttgttcaaagcatgatggagcagggattcactgtttatgagatgaaagagggttttattaagttcattcagacgcccaaatctacaaaacataatcctttaaatgaaattgagaaagctgctaaatcagacgctgagaaatttgttgatgcaggaatcactgagaaagcaaacaagataaataaggccatccatgctcacaacgtattggtgaaacaggctgaagaggcgttatcggggattaaaccgctcgaatcctatctgtctgtgatggtcgctgatggggtgagtaatgactaa

SEQ ID NO: 150524 - DNA, 336 bp, Enterobacter cloacae
atgactaacaaagtcacagaggccaactacaaagctcagattgccgctttacagtctcaattaatgcaacgccatacagtgactgctatcgacgctgtacagcctttctgtgaagcaataggcattaatcctactgattacgttaaggccaccagtgccatgagcaaccagcataaagcattctgcgacgggattctgaaaacagcgtcttcaaaggtcatccgcttgcagcgtgatgcaactgtacgaattctcgaagcgcagacaaaacgaaacaaagccataacagcagcctcagaagcgattgaagttgttcagtcgatgggagggctttaa

SEQ ID NO: 150525 - DNA, 180 bp, Enterobacter cloacae
atgcatcaactcttcaatgcttatggtcagaaagtacgagcaaacatagctctcaaccttcaccctttttatttggagaaactggaaaggctggcaagccgaatcggtagcgggattcagtcagaagaacagcgtctaatactggcaattggtgagatgctccgaaacgtggagacttaa

SEQ ID NO: 150526 - DNA, 216 bp, Enterobacter cloacae
atgaacctttacgcattcaacccactgaaacaaaatgataagcaagaggtgcttacccccgtagcctttaatttggtcttatcgctacctgagcagctactgaaaaggctggacaaggtcggctatgaactggttaagcgttacggtattgcagggtgtagtgataagcagcgacatcacatcgctattgttcatctgcttgaaaaatcctcttag

SEQ ID NO: 150527 - DNA, 696 bp, Enterobacter cloacae
atgaaaatcagtgaaatgaactggcaacagcttgaaaactggctgcagaaagatgatcgggctattctgccattaggtagcacagaacaacatgcatttctcagtctgtctgttgattccatcctcgccgaaaaagtcgctgaagatgctgccgcccactccggaattccggtatttccggttttgccatttggtatgacccctgccttcacagcctttcccggtacggtacatatccgtatcgaaacataccgccggctgctggttgatatgctcgatagcctgaaacgtcagggattccgtcgtatattactggttaacggacacggtggaaacatgcctgctcagaatatcgctcttgaatgggtgatggataatcctgatatgaaggtccagttgcataactggtggtgtgcaccagcaacatggaagaaagtgatggaaaccgatcctgttgcgtcacacgcctcctggatggaaaatttcccctggacgagattacctggcgttgtgcaacctgctgaacagaagcccatgatggatttgtcctacttacgtacattgcccccagaggaagtaaaaagagtactgcaggaaggaaattatggaggtttctatcagcgcagcgatgaagaaatgttggcgatctggcaggtagctgttaaggaaacgcgtacgctgattgataatctttaa

SEQ ID NO: 150528 - DNA, 999 bp, Enterobacter cloacae
atggattactgtcttgatcgcacactaaacattcctctgggtattcaattgagaggcctcattgaatacggcattacgtttggtgcattacaggcgggggaaaaactcccttcagtacgggaaatggctgagatggtcggtgtcgcaccgatgaccgtcgcacaggtctacagggaactgaaggatgcagaattaatttacagtaaacccggatctggtaactttatttcgtatgccggtcgtttaccacagcacagtcaggagaatgtgttgcggcttcatgggatggctgatcaattcattgaacacgccagaatgatgggcatgtcagtgactgatatgactacccttatccagacacgcatcaatcttcatccacgtcatgtaaagcacaaattaatcatggtcggaaattttctgtcttccactcaggattatgccatgctaataaaccaggtacttgacgatctggttacggtagaagccaccactgtggcgatccttcgcgagaatgatatttcacgggatttagccaaaaatgccgatatgatcctcacgtttgcgcaccgtcgacgggaagtaatggaactactgcccggcaagcaggtcgtctcaattagttttatcccttcggaagaaacacgacgggctctggcttctgttaatccactatcacatatcgtggtggtttcaatatttccagaatttacactattaatgaaagccggagtagaacgatttgcatctcatgtacagtcgataactgtcatcaacctggatgatcccaatctgccggagttactgacagaggctgatgtgctggtgtatgccaccggcgctgaatcactctccgcacagatggcaccggaaaaaatttgtttcgaataccggcatataccggacagcggtgaaattcagcgtgttatccggccattattacaacactcaatgacgccatgtcatgatactcccaacagaggctcctatgaaaatcagtga

SEQ ID NO: 150529 - DNA, 1596 bp, Enterobacter cloacae
atgcatgttaaaaagtacatcacagtggcagtgttactggccgggagtatgatggattcaggggccatgactttcgctgcagagatgccacagcggggaggaaccttggtgtatggtcgttatgccgacagtaattatctcgaacccgtgctgatggaaggcaataacaatatatggatcctgtccaacatttacgatacgttgctgctgccttccagggatgggaagagtgttgagccgggacttgccagcgcatggtcattatctgcggatggtaaacaggtaaccattactttgcgtgaagggatcaaattttctgacggttcccctattacagctgaggacgtgaagtggtcccttgaacgagccagtaaacccggaaatggtgcatggcagtttactatagaatctattgataatgtcaccctgacggacaataaccatctggtgattcatctgaaacatgctgatcccgccatcctcagtgcgttaaccgtgtttaacaccgggattatgccggaacgtctgtttgaggctacaccggggaagacggatgcggaaaaagccgcgatatttgcagaacaccctgtgggctcagggccctttattctgaagtcctggcgtcataatgccagtatgacactggtgaaaaatccgtattactggaagaaaggggccgatggcaaaccgctgccttatctggatgccgtacagtttgagattattcccgatgatgccacacgtattctgaagctgaaatccggcgagctggacggtgcagaatttattccttattcccgcgtgaatgaactaaaatcacagccggagattaacatgatgctatttccgtcaacacggacggaatacataagcatgaatgtccgaccagaattacagggtgtgaaaaaccctctgtcagacgtgaatgtccgtcaggcattgaattatgcgacagataaaaatgccatcatccagctggtgacttacggtattggtactccgatgagttcttatatttctagtgccacaccagggcatatcggtaactcgcctcttttcccggttgatatggaaaaagcaaaagcgcttctgataaaagccggatatccgaatggatttagtacccatattatgcttttgtccggtaatgaggatgaaatcagtattggtacggctttacagcaaatgtgggcgcagattggtatcaatcttgttttggatcaggtggataatgcaacacgtaccgatcgttaccgtaagggggactttaccatgcggcttggggtctggacagatgatattgcagatcccaatgaggtaacatcttattttgcttattcaaaaaatatcagtgcattgcattcaggatggcgtaatgaccagctggacaggctgttcgaagcctcacaaagcgagatggatccacaaaaacgagcaagtgattatcgccagattcaggacatatttaaccaacagggaccggttgtcccattatatgagagtccttatccggttgcattacaacatcgtgttcatgattttgtacagatcccgttgggaaataacctgtttacagaaacctggctgagcaaataa

SEQ ID NO: 150530 - DNA, 939 bp, Enterobacter cloacae
atgcctgaatttacgtatattctgaaacgcattttgctgattattcccactctggttgtgatcctgctggtgacatttgtgcttgtgagactgttgccaggcgatccggccagtgccatgctaggtgaccgcacgctggacgcggatgtggtacgtattaatactcagcttggtctggacaaaccactaccggttcagttcctgtattttgtccgtaatgtcctgacgggccatctcggtgaatctttttttcttcaccagccggttactcaggttattgctgaaaggttacctgtcagtctgatgcttacctgtatggccgggatattatcactggttctggctattccgctggcttttatttccgccgtgcggcgtaacagtatagccgataccaccatacgcggagcttttcagataacactgtccatgccttctttctatatcggactgttgttgttgactctgtttgccacgcattttcactggtttccggtcggcgggtatggcagcacatttgttgataagttgtggcatctttttctgcccgcactgactctggctctgggcctggcagccgtattaatgagtaatctacgcagttctattctggccgtactggatgccgagtacgtttcttttgcccgggccaaagggttacctggctatgtggtgttattccgccatgtactgcgtaatgcccttctgccgatgattacgctttttgcactgaatataggcacaatcattggcagtgcagtgatcactgaaaccgtttttgcggttccgggaatttgccgactgatggtggacagtatcatgagccgggattatccgatggttcaggggctggtgatcgtgctgtcggtattggtttcgctgatatttctgataacggatattatccagtcagttattgatccgaggagagcacagtga

SEQ ID NO: 150531 - DNA, 843 bp, Enterobacter cloacae
gtgagtgcaacgatgattatccgcagatggcaggccgctaagttgagccctccggctgcgctgggatgtctgattatagtattaagcctgctgattgcttttttcccgcaatggtttgctccgtatgatccgctaacgtttgactaccgggccatactcaaaccgccctcagcagctcactggttcggcacggacaatttcggtcgtgatatgctcacccgggtgatttatgcctggcaggtggatatgcagattgcctttttcactacgttgtttccgatgtttttcggcacggtgatggggctgattgtcggatactacggtggctggctggaggttctgtttcatcgactggtggacgctgttattaccttccctcttctggttcttgtgattgtgattgtggcagttctcggacccggtctggtaagtatgtatattgccgtcggtattatttactgggtgttctacgcgcgattaatttcaggtgaagtcagtgttcaaaagcgtctggattatgttgctgccggaaaagtgatgggatacagcgatttgcgcattatttttcggcacctcttacccaatgtcatcaatgtgactctggtgtactggatgacggatatggctctggctatcctgctgggctcaagcctcggatatctgggactcggtgcccagccaccggcagctgaatggggtgtactgattgccggggggaaaaacttcatggacactgcctggtggatcacagtttttcccgggctggcgatcgtgatgacaggactgggtttcagcctgatgggggatgccctgactgaattcctcaagtccggtaaccaataa

SEQ ID NO: 150532 - DNA, 999 bp, Enterobacter cloacae
atgagtggagcatcgttactggaggtgcagagcctcacaacaatattgccagcagcccgtggtcaactgacggccttacgtgacgtcagtttttccctgcaggagggggaaatcctgggactggtaggagaatcgggatccggaaaaagcgttaccctgaaatcattgttgcagctgttgccggcagattcgcagattcaggggaatatttgctggcgcggtacccctgtcagtaataaggggacacaatccgtcagaagcctcagaggtcgccatattgccatgatttttcaggagccaatgagtgccctcaaccctgttctgaccgtaggatgtcagattgatgaaagtctacgagcacacacagctctcaaccgtcgtcagagactgaaacgtaccgttgaattactggatatggtgggaatccctgcggcttctgccaggataaatgattatccacatcagttctcagggggcatgcgccagagagtgatgatcgcgatcgctctggccggtgaaccggaactgttactggcagatgagccgacaacagcgctggatgtaactatccaggagcagatcctgaaattgttgctacaactgcgaaccgaactcgggatgagtattatttttgtgacgcatgacctggcagtggtcgcacagctttgtgaccgggtttctgtgatgtatgccggaacagtggtggaaacgggacctgtggatacggtactgcaccagccattacatccctacacgcagggattgctggcgtccattcctcaggaaggaacggagcgtacaccgctggaaacgattgaaggaacacctccctcattgaaaggtatgcctgaaggatgcccgtttgcaccacgttgtacttacgccacagggcaatgcaatgagcaccgcccttcgctggttgccgccagcaccgggcatcatattgcctgttatcatccactcacctcccggttaaccggagtctgccatgaatcataa

SEQ ID NO: 150533 - DNA, 990 bp, Enterobacter cloacae
atgaatcataaaactgaaattccggtattaacggtagatgatgtctgtgtgacatttcctctccgatattcgttgtgggaacggttacacgggtatccgcgacgagctgtccaggctctgaacggcgtacatctgacactccgtcccggagaaacgttagggattgtcggagagtccggatgtggtaaatcgacgctggcacgtgctctggtggggctgaatggtaccagtcacggtgaaatccattttcacggtcagaatattgcttcattacgtggtagagcgcggcgtgactttaaccgtcgggtacagatgattttccaggatccgtatggctccctgaatccccggatgactgtagggcagattttaacagaagcgctgacggtccaccatatttgcccgccagtagagatcccctctcggatcaggtcgttgctggaactggtacgcttacctgctgatgcggtaaataagctaccaaaagcattttccggtggtcaacgacaacgtatcggtatcagccgggccctggctgttgagccggaagtaattgtggcagatgaactggtttctgctctcgatgtgtctgtacaggcacaggtggttaatctgttactggatttacaagcccggttaaaactgagcgtgatttttgtggctcatgatttgcgtcttgtcaggcatatttctcatcgtgttgccgtgatgtatctgggggaagttgtggaaattgctccggcggtcagtctgtatcaacagccattacatccatatactcaggcacttttacgtgcagcgccaggatttgatactaccctgcgttcccgcccggtgagtctgaaaggggaattacccagccctctgtctcctccatccggttgtcgcttccatacccgatgtccacaggcgacggaacgctgtagacaggaacacccggtattatctccccggcagggagagcgtgccgtagcctgtcattatgcctga

SEQ ID NO: 150534 - DNA, 957 bp, Enterobacter cloacae
atgaatacagtagcactggcaatacatggtggttgtggcgtcatggccctggaggatttatcgttagaggaatggactgaggctcgacaggatttgcagaaagcactccagacaggatggaagatactaaaatcaggaggaagtgcattagatgccagccaggctgctgtcgtggtgatggaaaattcagttcactttaatgccggatatggtgctgcgctgaatacggcaggagaacatgaactggatgcctctatcatgtcgggagtcgatttggccgctggtgctgtatccgctgcccggaagatccgcaatcctgtgttggctgcccggaaaatacttgatttgagggaaagtgtgttgttaacaggagacggggctgatgcttttgcccgtcattatggtctggatatggtggaaaatacctatttcaccacaccacgccgtgtaaaagcgctggaggttatgaaacaacatcagcttgccgggacatataaaacagcgcgtgagtcagagaagcacggaacagttggagcagttgctctggatttggagggacatcttgctgccgcaacttctacgggagggtataccaataaacctgtagggcgggttggggacagttccgtgatcggtgccggaacctgggctaaagataatgtctgcgcggtttcttcaaccgggcagggggagttttttattcgttatgctgtggggcatgaaatttcctgtcgtattgaatatgcgggacaatcgcttgaagtggctgcggatcagatggttaatcatatattaaaggcacatggtattggtgccggcctcgtggcgatagatagtaaaggcaacgttacagcgccatacaatacactggggatgttcaggggctggatacatgctgaaggggacggtgttgtcgctacacatgatgagtatttcgctttccaggcaatactttga

SEQ ID NO: 150535 - DNA, 123 bp, Enterobacter cloacae
atggtgctggacgactggacaatcacctcgcaaggtatcgcactctattttccacaaaaccggcacatgcccgtcgcgttacgactgtttgtcgacaccgtgaaagccacaacgcgcatctga

SEQ ID NO: 150536 - DNA, 912 bp, Enterobacter cloacae
atgatgcggctccgtcacatagaagtctttcaggccatcgtacagaccggcagcatcagcgcagccgcgcgcctgctcaacgtatcgcagcccaatatcagccgcgtgctgaatcatgcagaacagcaactgggctttgcgctgtttgagcggcgtatccagggcatgagcgtcacggcagaagggcgacggctgctgccagaggtggaagatctctaccaacgcttacaatccatcacccagctcactgaacaactgcgacgcggcgaagggcagatcgtccgtgttggtgcggctcacgctttcggtcaaatggtgttggcaccggcattggtcacctggcgacaacaggtgccctcggtcagcgttgaactggtcacggaacactttagtaccttatgccaaatgatcctggagaatcagcttgatttcgccctggtctttggtcagcaggtggatgcagcgctgctggcggaaccgctgtttcagtcgtcaatggtggcgctactgccgccaaatcatccccaacatgagcccgttacgctggcatggttatgcgcgaataacctgctgatgatgcagacccaggatccgcttgggcgcgtcctgcaccgcgcgctacgcgataaaaagctgaatccggcagtgtcgttatcgattaaaacctactcggtgattgcggatatggtactggcaggcggcggtgtgggcgtggtggatctgttcacggcttgccgctatgccgaacagctaaaattactccccgtcgcacagccgttgccgtttgaagtgatgctgatcagccgtcgtgatcaaccccagtcccagtccacgctgcaacttaagcaggtcattcgcaacaggctgtgggaaatcgcccgccagtgcgaagcgcagtttatttgtgactga

SEQ ID NO: 150537 - DNA, 822 bp, Enterobacter cloacae
atgaaaatttttatttctgccgatattgaaggtatcgcgggcgttatgcgtccggagcaatgcacacccggcaacccggaatatcagttggcccgtggtctgatggaacaggaagtgaatgccgcgattgagggggcgttcgcgggaggcgcaacggaggtggtcgttgcagacagccatgcgcaaatgaccaacctgcgggcggaaaatcttgatccccgcgcccggctggtgcagggcaaaccgcgcggcttgtcgatggttgaaggcatagaacagcagacgttcgacggattatttctggtgggctatcacagcgcagcaggcgaacccggcgtactggcgcacaccattaatggccgtgcattctggcgtatccatatcaatggcctggtgatgggcgaaaccgatatttacgccgctgccgccgctgagcagggcacgccactgtggctggtcacgggcgacgatcagctgcagagctggatagcagagtattacccaacggttgactacgtttgtgtcaaacgcgccatttcccatacctgcgcagaatccattagtcccaaagcggcacaacgtgccataggcagtgctgcacgcgccgcgcttgagcatcagcgcgatacgcgcacgacccggttgaccgcgccttatcatatgcagcttcaggccagtaaacccgtgttggccgatctgttcagcctgatccccggcgtcacgcgcatcgatgcggttaccgtgggatatcaggcagagcggatggagacgttgatcagcttgctcagtgcattttcttacctggcgagtacccagtcgtag

SEQ ID NO: 150538 - DNA, 1044 bp, Enterobacter cloacae
atggactttcaacaactgcagtgcgaactgctgctggatcgctggcgtaacgagcgtcagttggggcagccgcgtagcgcatgcggccccactaatcgcatcagcgatgtggctggtgtgcgcgtcggccacgtcacgctggctgagggagagcggcagactggcgtcaccgctatcgttccgccgggtgataacctgtatctcacgccgctgccgtgcggagctgaagttctgaatggctttgcgaaaccggtcggactgacacaggtcgaggagctgggtgtgttacacacgccgattctgctcagtaacacgctggcggtgggcacgctgtttaccgcgctggtacgggatgccatccgtcgtaacccggaactcgggcggacgctgccgacggtgaacccgctggccctggagtgcaacgacggctggctcaatgatattcaggcgctggccatcagtgaggcgatggcgcaggaagcattgcatacagccgcagcgcacttttcccgcggcagcgttggcgcaggacgcgggatgagctgttttaatctgaagggcgggatcggcacggcctcgcgtgttattccgtcgctcaatgccacgctgggagtgctggtgctggcgaattttggcgcgctcagcgcgctcacgcttgacggtgtgcgactcggtgaagtgattgcaccgctgctggcaggagaggcaccgcaacgtgatgccggttctgtcatcatcgtgatggcgacggatgcgccgctggatgcgcgtcagttgaagcgtatcgcgaagcgtgccggtgccggcctcgggcggctgggcagctactggggccacggctcgggcgatatcgccgtagcgttttcaacgcaaccgctgccgcaaccgccgcaggacgccatgctggagccgctgcttgccgccgcggcagatgccaccgaacaggctgtactcgatgccttgttgagcgcagagcctgttaccggctttcggggtcaccatcgcccctcactgactcagattctggacaggttaaccacatga

SEQ ID NO: 150539 - DNA, 885 bp, Enterobacter cloacae
atgagtcatcaatcgctgactgataacccgcctcaggttattcgctcgccgtggcgcgatttcctgcatgcttttgtgcgcaatcctctggcgctggtttcaggcggatttgtcctgctgctgattctggtggcgatctttgcgccctggctggctccctgggatccgatggcacccgactggatggcgttatcctcgcccccttcggcagcacactggatgggcaccgatgaactggggcgcgacctgctcagccgtattatctatggggcgcgtatttcgctgtatgtcggcgtgctgtccgtgacgctcggcatgattgtcggcgtcgtgctggggttgctggcgggctattacggtagctgggtcgatatgctgatcatgcgcggtgctgatgtgttattcgcgtttcccggcatgctgctggccattgcggtggtggcgcttctgggaacgggcctgaacaatgtcatcatcgccgtcgcggtgttcagcgtgcccgtctttgcccggattgttcgcgcctccacgctgtcattgagacaggctgcctatgtggaagccgtgcgctgtgccggtgcacccgaccgaatcattatcctgcgccatattctgccgggcacgctttccagcgtcattgtttattttacgatgcgcattggcaccagtattctcacagcggcaggcttaagctttattggcctcggaccggagccggatgtgcctgaatggggcaatattctggccatgagccggagcatgatgatggcgggcgcgtggcacatgagcgtgtttccggggctggcgatttttatcacggtgctggcgtttaacctgctcggcgacgcgctgcgtgacacgctcgacccgaaacttaagggctga

SEQ ID NO: 150540 - DNA, 933 bp, Enterobacter cloacae
atgtttgcatacatcattcgccgattgctggagatgatcccggttttgctggtggtctcgctgctggttttcggtttcatcaagctgctgccgggcgatccggcgcgcatttatgccgggccggatgcaccgattgaagcggtcgaagcggcacgtcagcacctcgggctcaacgactcgttgccgcagcagtatgttaactggatagacagcctgttacatggcgatcttggcaccacgtaccgcacccagcaaccggtgctgcaggtgattaagcagggcttcctgcccacactgtggctcgccttagccggtttcgcctggtctgtgcttctcggcctgatgcttggcgtactcgcggccctgaaacgagggaaatggcaagactggacgctaatgagcgtggcggtgggcggtatctcgatgccggcgttctggctggggctgctgctaatccagttcgttgcgatgccttttggcctgttctcggtcagcggctttaacaaggccagcgatattgtcctgcccgccatcacgctgggatcgtccgttgcggcggtcatggcacgctttacccgctcggctttccttgaagtggcacaggaagattacgtgcgcaccgcgaaagctaaagggctgcgtaaccgtctggtgacgtggaaacacgtgatgcgtaacgcgctcatcccagtaatcaccatgctggggttgcagtttggttttctgctgggcggttcgattgtcgtggaaagcgtcttcaactggccagggttaggctggctgttaattgagtctatcaaagcgcaggatcagccggtcattcaggcgctggtgatgctgtttgtatttgaatttatcgtcattaatctgctggtggatctgctttacgcggtcgtcaatccggcaattcgtctgcgacaggagccgagatga

SEQ ID NO: 150541 - DNA, 1542 bp, Enterobacter cloacae
atgaaaacgctgttccgccgtacttcactcgccctcgccttaacgacgacactggtcatgaccgcgcaggcacaggatctgcgcatttcaatgtatgccgatattacggggctcgatccgcacgatacctcggataatgtcagctactcggtgcaaagcggtatctttgagcgcctgtttcagtttgatccccagatgaagctggagccctggctggcgaccggttacacctccaacgacagtgcgacggaatttacgctgacgctgcgtaaaggcgttaccttccaggacggtacgccttttgatgcggaagcggtcaaagcgaaccttgatcgtctggctgaccagaaaaaaggactgaagcgcaacagcctgtacaaaatgatcgataaggtgacggtgctggcacccgatcaggtgaaaatctcactcaatcagtcatttggtgcttttattaacacgctggcgcacccttcggcggtgatgtggagcccgtcggttctgaaacagtatccggacgaggcccagttgcggctgcatccggtggggaccggaccatttaaattcgtaaactggacaccgggcaaagcggtcacgctggcgaagtatgacggttactggcggcagggctggcccaaagtcgatcaggtgatcttctcacccagtccggaagatgcgacacgggttgccgcgttgaaatcgggtcaggtggatgccatttggcctttgccttcggatctgatcgcggcggtgaagcaggacagcaacctcgcgattcagcgcgatccgagcatctatctctattacatggcgatcaatacgcagcataagccactggccgatgtccgcgtgcgccaggcaatcaactatgcgattgaccgtaatctgtggttgaaggtggcctttgccggtttgggtaaaccggccacctccgcgatgccggaaggggtgcagttctatgagaagcagagcgatcccgattaccactatgcgccggataaggccaaagcgttgctgaaagcggcgggctacccgaatgggctggatctcaagctctgggtcaccaatgcgaccgccagcgtgcgcgccgcccaggtgctgaaggcgcaactggccacggtgggtattcgcgccacggtgacaccgatggattccggaacgcgcaacgcgaagctgtggggcgttcaggacccgaaaaaagccgaatttgacctctattatggcggctggtcgacgtctacaggcgatgccgactgggctctgcgtccgctgttcgccaccgaatcctgggtacctacctcgtacaatgtctcctatttcagcaatcctgatgtcgacaaggcgattgctgccgggctggcgacggccgatccggcaaaacgtggtatcgcctatgcacaagcgcaaaagctgttgtggaaagaggcccccgtggcgttccttggcacgccagacaatctggtaggcaaacgcagcaccctgagcggcgtttcgatgctgcctgatggcaatctgttgtttactcaggcgtcgtttaaataa

SEQ ID NO: 150542 - DNA, 1866 bp, Enterobacter cloacae
atgacggacacacgactcacttcttctgccacacgtgctgacggtgcatcaccggtgcttgctgttcagaaccttagcgtctcatttcgtggacgcagtggtgagaatcaggcgctgaaaggcatcagtttcgccatttatccaggcgaaattgtcgccgtggtgggcgagagcggctcaggtaaatcagtcacgtcgctggccgtgatgggcttgctggcgagcagcggccgtatcgatcgcggcagcatgcagtttcgcgatcgccgcggagaagttcatgcgttagaaacgctggatgacagtcagcgccgcacgttgcgtggccgtgaaatggcgatgatctttcaggagccgatgacctcactgaatccggtgctgcgtatcgatgatcaactcaccgaagcgttacgcgaccatcatcagtgcgacaagaaacaggctcatgcgcgcgtacgtgaactgctgcgacaggtacgtattgccgatgtcgatcgcgtcatgaaaagctatccgcacgcgctgtccggcggaatgcgccagcgcgtgatgattgctcaggcgctggcctgtgatccgcaactcctgattgccgacgaacccacgacggcgctggacgtcaccgtacaggcgcgcattttacatatcctgcgtgagttgcaacgcgagaaggacatggcggtgttgtttatcacccatgatatgggcgttgtggcggaaattgcggatcgtgttgtggtcatgctgcgtggcgaagtggtcgagcagggcaccgtgtcagagatttttgccgccccgcagcatgcatataccaaagcgttgctggcagccgtgccaaaactgggcgacatgcgcgaatacgcgtggccgcaacgctttcctctgttgggtgcacaacaggtggcgcaacacgaacagctgacggcgcgctacgacagcgaaccgctactcgatgtacgtgggttaaaagtgtattaccccatccgcagcggcatcttctcgacccatacgcatcatgtgcatgcggttgagcagattgatttcagtctgtggccgggtgaaaccctggccatcgtgggtgaaagcggctgcggtaaatcgaccaccgggcgtgcgctgatgcgcctgatcgccagtgaggcggaaagcatccactttgaaggaaaggaaatctctcatctgaaagagacggcattccagccgctgcgccgtgaaattcagatggtgtttcaggacccctatgcgtcactgaatccacgtctgacggtggggtttaccattgccgagccgttgctgttgcatggcatggtggactcactggaacaggcttctccacacattgatgcgctgctgacaagcgtcgggctgttgccggagcacgcgcgccgttatccgcacgaattttcgggcggtcagcgccagcgtattgccattgcccgcgcgatggccctgaaaccgaaagtgattattgctgatgaagccgtatcggcccttgacgtttcaattcaggcgcaggtggtgaatctgatgatggatctccagcagcaaacgggcgtagcctggatattcatctctcatgatatggcggtcgtcgagcgcattgccaaccgcgtggcggtgatgtacctcggccagattgtcgagctcggaccgcgccagtcggtctttaatcaaccgcaacatccttatacccaacgtctgctggcctccgtgccggtggcagatcccgagaaccgtcagcctcgccgttttgatgacagcgaaatcccttcgccgttgcgaaaggtgggcgaaacggtcacgaaaccccgttatcggcaggttgcaccgcaacactgggtcgctgacggcattgcattgcgataa

SEQ ID NO: 150543 - DNA, 966 bp, Enterobacter cloacae
atgagacaggtgcagatcaacgtggtggaactgccgctggcgcgaccgtttgctatctcgcgcggtgtgcgtaccgccgtgacggttatccgcgtcacgcttgagcaaaacggctttattgggcagggcgaatgtacaccaacggcgcgctacgatgaaacgccagacagcgttcaggcccagcttgaggcggtacgtgctgacgtggaagcaggcctgagccgcgatgatctgcaacaccgtttgcccgccggttccgcgcgcaatgtgctggactgcgcactgtggcgacttgacgccgcacgggccagtcaaacgctctggcaacaaagtgcatgcccgccgccacgctcggtcgtcacggcggaaaccctcagcctcgatacgctggaaaacatggcgctggcggcggcggatgccgtctcgcggggtgccatcctgctcaaaatcaagcttgaccgcgatgcggttctggaaaaagtggcggcgattcgtgcggcggccccgcgtgcgacgctcattatcgatgccaatgaagcctggtcgggaatggatctggaaagcctgctggtggcgcttcaggcctttaacatcgcgatggtcgagcaaccgcttcccgctggtcaggatcatgacctgcaacgcttccgtcatcctgttcccgtctgtgcggacgagagttgccacacgcgagaggacattgccagcctgcgtcatcgctacgagatgatcaacatcaagctggataagtgcggaggtctgacggaagcgctggcgatggtcgatgaagcgcacaagcagaacatgcgcatcatggtcggctgcatgctgggttcatccctggcgatggaagcggcattgcccgtggcggtgcacgcagagcacgtcgatttagatggcccgatctggctggcggctgacagctctccttttttgaattactccgatggccgtatctggctgtaa

SEQ ID NO: 150544 - DNA, 1008 bp, Enterobacter cloacae
atgctaatcccacaaccctatttactttttcttggcgatgttaccgatcccctcgcggcaaaaacggcgcgcggtattcatatctggcgaccggaacagtgcgttggcgaaattaaactgccgggctgtacggtcagcctggggctggatgaacttgatatcgccagcgccaaagcgcgcggcgcgaaaacgctggtgctgggcaccgccaacgcagggggatatctgcccgaacactggctggatacggtgaaaagtgccatcaaagccggcatgaacgtggccagcggattacatcatcgtctggtagatgagcccgagctggtcacgctggcagagacgtttggtgttgcgcttttcgatttacgtcatatgcgtccgaagctgagtgttggcagcggtaagaagcgttcaggcaagcggatactcacggtggggaccgactgctcagtgggcaagatgtacacctcactggcgctggaagcggcaatgcgtgcgcgcggaatgaaagcggattttcgtgccacgggacagaccgggattctggttgcaggggaaggcattgctgtggatgcggtaatcgcggactttattgccggtgcggcagaagccctgtctcctgccaacgatgatgatcactgggatatcgtggaagggcagggatcgttgttccatccctcttacgcgggcgtcagtatggggcttatgcacggtgcgcaaccgcactggttggtgatgtgccatgaaatgggccgtccgcatatgcgccatttgccgcatcaaccgatggttagcctgaaagactgcgtggaagccaatctgcgcgccgcccgggtgaccagtgagtccgttcaactggctggctttgcgattaacacctcaaactacacggaagaagacgcgcgcgcctattgtgctgaaatctgtgccgaattcggtttaccggcaaccgatccggtgcgttttggtatcgatgacatcgccgcgctgcttcaggagcggggctga

SEQ ID NO: 150545 - DNA, 1209 bp, Enterobacter cloacae
atggacgaaaaacagttgcaggctctggctaacgaactggccaaaaatctcaaaacccctgacgatctcaaccagttcgatcgcctgctgaagaaaatcagcgttgaggcggctctcaacgccgaaatgtcccaccatctgggctacgataaaaatcagcccaaactgggggctaattcccgtaacggctatttcacaaagaccgttaccaccggcgatggccctctggaactacgtaccccacgcgatcgtgatggctccttcgaaccccaactggtgaagaaaaaccagacccgcattaccggcatggataaccagattttatcgttgtatgccaaagggatgaccacacgcgagatcgccgccgcgttcaaagagttgtatgacgcggatgtctcacccgcgctggtctcaaaggtcaccgatgcggtcatggagcaggttgtcgaatggcaaaatcgtccgctggatgcagtctatcccattgtttatcttgactgtatcgtcctgaaagtccgacaggatagtcgtgtcatcaataaatcggtgttcctggcgctgggcattaatatcgaaggccagaaagagttgctggggatgtggctggccgaaaatgaaggggcgaagttctggctgaatgtgctgacagaattgaagaatcgtggcctgaacgatatcctcattgcctgcgttgacggcctgaaaggtttcccggacgccatcaacgcggtgtatccggaggcccgcatccagctgtgcatcgtgcatatggtgcgcaacagcctgcggttcgtctcctggaaggactacaaagccgtcacccgcgacctgaaagcgatttaccaggcaccgacggaagaagcaggccagcaggcgctggaagcgttcgccgcagcctgggacagccgctatccgcagataagccgaagctggcaggcaaactgggccaacctggcgacgttcttcgcttacccggcagacatccgcaaagtcatctacaccaccaacgccatagaatcactgaacagcgtgatccggcatgctatcaaaaagcgtaaggtgttcccgacggacgacgcggtgaaaaaggtggtgtggctggcaatccaggcggcctcacagaaatggacgatgccgctgagggactggcgtatggcaatgagccgctttattatcgagttcggtgaccgcctggacggtcacttctga

SEQ ID NO: 150546 - DNA, 471 bp, Enterobacter cloacae
gtgatcctctacaggctgacgaaaacaaagtatctttctacggcctggaccggatatggtgcgaaagaggctggtgggcgctggaatagcgtgggggtgtcaatggtatatgtctccgaaacggcttcactaacgatgctggagacgctggtacacctgcatgcggcacagataatggactctttcacgctattgagtatcgatgtgcctgatgaactgatccaaagcgcaaacatggatgaattaccgggcaactgggctgatgaggatgcgcctcaggaactggctgattacggagatgcctggtcatttaccaggagctcggttgcactgcgtgttccctcagccttatcgccggtagagttcaattatctgttaaatcctgagcaccctgagttttacgggatcgtgctgaaggctcaacagataccgttccggtttgatagtcgtcttaaacctgacaggaagtga

SEQ ID NO: 150547 - DNA, 444 bp, Enterobacter cloacae
atgaaaacttttagtttgtcctcaactccagccagaccacagcgcctctggcaggttgccgggttaaataatgctgatggcgtagcgcttctgggccaaatcaatgaaggcctggacgggaaggtggcgaaccggatcactgactgggccagaataacccagaatgacctgagaaaaatgtccggtatcccgtcaaccacatttagccgcagtgtgaaggcacgttttaacccggaacaaagtgaacgtctggtacgtattatccgcgtcattgatcgggcggtagatttgtttgaaggcgacagggaagccgcacagaagtggttgaacgaacctaaccgggcattgagctggaaagtgccagcagacctgatggcatccgaaacgggagcctatgaggtcattaagctgattacgcgtctggagcatggggtgtactcgtga

SEQ ID NO: 150548 - DNA, 420 bp, Enterobacter cloacae
atgattaccgacactgcaaaagccattgaagcaaccaaacaactcgtagctgccgtccccttcctagggggcagttcttccgagagcgattaccgcgaagcgatggagctggtggattatctgatcgagaacgacgacgagaacccacttattgacttcctggcgagtaagattgccgactatgaagataacagccctcgtttcgctgagttcaacaaagctattgctgaaataccagtcggcgttgcacttctgcgaaccctgattgaccagcacaagctgtcttattcagaccttaaggatgagatcggatctaaatcattggtcagccaaatcctgtcagggcagcgctctttgaccatcactcacataaaagctctttccgcgcgcttcggtgtaaaacctgagtggttcctataa

SEQ ID NO: 150549 - DNA, 312 bp, Enterobacter cloacae
atgcacgtaatttcaaaagagccttttgaggaagcggcaaagcgatatcccaacgattcgttagccattcgggcgttgtaccgcttagtgcgcgagacggacttctcttctccagctgagatgctaactctgataccgagcctggataattttaagtacaggaataagtggtgggttttggatgtagggggcaacaacttgagggttatcgcctatatcaatttcgtaaataagcgcttctacgtgaagcacatcgcaacccacgctgattacgacaagttgacccgctattacagggagaacaaagaatga

SEQ ID NO: 150550 - DNA, 3543 bp, Enterobacter cloacae
atggcagtaatcaggggttcgaaagggggcggtggcggcggtgataaaggcggcaatcgcggtaccgagatcgcctccgtagcgtacatgaaaattctgctggcgctgaccgagggggaagctgcaggagactttaccggaaaagatatttatctcgatggcacgccactgcttgatgatgctggcaacgaaaacttccctggcgtgacgtgggagtggcgcagcggcacggtggatcaggattatattgctggcttcccggcagtagagaatgaaatcagcgttggcacggagctgaaatacgggacgccgtgggttaaatccattaacaacacccagctttctgcagtacgcctgcggcttaaatttcctaacggcgtttataaactgcgcgacagcggcgggaaggatggctaccggatagcgttcgctattgatatttcaaccgatggcggttcctacgttgaatacggcacggatgaggcggacggcattgccgcagccggctatgagcggagctatcgaattgacctgccggcagcgacatccggctggcaaatccgcgtccggcgcctgacggaaaataccactgatggtcggcatgcggatacttcgcgcattgaatcaatgaccgatattgtcgatgccaagctgcgctatccgcacacgtcgctgctgttcatccagtttgattcgaagctgtttgacggcagaacgccaaacgtcaccgtggaaatgaaggggataattgttcgcgtaccggagaactacgatcctgttacccgcacctacagtggaacctgggacggaatctttaagtgggcctggacaaacaaccccgcctggattttttacgatctggtgctgaacaaacgatacggtctgggaaaacggatcaccgcagatttagtcgataaatggaccctgtaccagattgcacagtactgcgatgcgcaggtttcggacggtgcaggcgggaaagaggcgcggtacctctgcgatttgtacatttcccagcgtaccgatgcatggactgtgctgatggatttagcgaacatcttccgggggatgatcagctggtccaacaatcttctgtccgttgacgccgatatgccccgcgagctggaccccgattttgtgttcaacaagtcgaatatcgtgggcgcgtttaacttctccagcacatcggaaaagacgaactactcgtcagcaatcgtcacctacagcaacccggccaacggctatcaggacgatcaggccagcgcctgggtgccggaagtctctaaccggttcggctttaacaccatagagctgtcccgtatcgggtgtacgcgggaatcagaagcgcagcggcacgggctttacgccattgaaaccaaccgcgatgacaatggcgtggagtttaaaacagggatggaagggcgcatcccgcgtataggcaaggtggtcggcatcagtaacgccccgctggccggtcgcgagaacggcggtcgcgtagctgcagcctccggaacgaaggtcacgcttgaccgtattacgactgctaaagcgggggacacgcttatcgttaacctgcccactggcaaatccgaaggcaggaaggtgaaaagcatctccggacgcgccgtgaccgttgagacagcgtacagcgtaaccccaaatgctgaatcagcgtgggtgcttgaccagtctgatttagccattcagctgttccgcgttaagcggcttatggttaattccgataacacggtcaccattaacggcctgccttacaatccgaacaagtttccgcgcgttgatgacggcgcggtgattgaagacaggcccgtcagcgttgtgccgccgcgcggacaggggatgccggaaaatatcactctctccagcttgtaccgtgttgaacaggggataggcatcaccacgatggttgttacgtgggataccgtgaaaaatgccgttgcctatgaggcgctgtggcgtcagaacaacggtgactggattaacgttccgcgcaccggcaacacgcgctttgaggtcgacgggatttatgccgggcgctacgtggtccgaatccgcgcggttaacgcgctcgatatcgcatccctctgggcaacgtcagctgagacggagcttacgggtaaggtcggaaaaccacctatgcccgtgaatctcgccacgcagccgttggtgttcgggatcggcatttcctggggatttccatccggggcgcaggacacgcaaaagacagaaatccactacagcgccacggcgaacggtgattctccgttactgctggcagacgtgccttatccctcatcgtcctaccagcaaatggggctgctcgccggaaaatcgttctggtaccgggcaaggctcgttgatcgcctcggcaatcagagtgtctggaccgagtgggtatttggccagtcgagcacggacgtatctgatatcaccgattccattctcaaggagatggaggaaacaggtctactgaaggatgtggttgagaatgccgtcgacagcaatgaaaaaattactggcatggttaatgacatcaaacaggctaatgacgaactggagctgcaggcgaaggatatcgccaaaaatgcccaggacgtcgggaaggtacagaccagcgttaatgagctttccagcacggtcgggaatgtttcgtcttcactcagtcagcttgagcagaccgttgcgacggctgataccgccctgggccagcgaatcgacagcatcagcgtatccatggacggcatgacgggtggagtgaagaactcagccatcgccattatccagaacgggctggcgcaggtggccacgcgtaaatcgttgtcggcttcggtcgccggtaacagcgctcagctggaccgtattgacgaggttatcgttaacgagaaggaagcaacggcgcgctcgctgctgagcctgcagacggacgttaacggcaacaaagcatccatcaacagcctcaatcagacgttctccgattaccagcaggctatggccacgcaggtaaacagcatcacggcgacggtgaacgggcatacctcagccatcaccaccaacgctcaggccatagcgaacgtaaacggcgacctcagcgcgatgtacaacatcaaagttggcgtctcaagcaacgggcagtattacgccgcggggatgggtatcggcgtggagaatacgccatccggcatgcagtcgcaggttatcttcctggctgaccgcttcgctgttactcaccaggccggagcgaccgttacgcttccgttcattatccagaacgggcaggtaattatcagagatacggtaataggcgatgccactatcacgcgagcgaaactggctgaaacaatcagctcggttaactacgttcagaaccaggctggcctgtccataaactttagaacgggcacgcttgagaactacggttcgacagctggcgagggggccatgaaacagaccaaccagacaatcagtgtacgggactccaataatgtgttgagggtgcagattgggagaatcactggtacatggtga

SEQ ID NO: 150551 - DNA, 1221 bp, Enterobacter cloacae
atgccgaaggtagcaacaaaactcactgacacagagatcaaaaaggccaagcccacagagaaagagttcacgctatgggatggagacggcttgttcctgcgtatcaaaccaagtggtaagaaaatctggcatctagcctatgccgctccagtgtcaaagaagcgctcgaaaatgagtcttggattttatccgcacttaacgcttgctcaagcaagagctttgcgcgacgaatatttatctttgctagcgaatggtatagatccacaatctcataacgaacaaaaagctaacgcgctaaaagatgcggctgaacacacactgcagacagttgcgaagcagtggcttgaagagaaggtcaaaacttccggcatctcagaagatcacgcaaaagacatctggcgcagccttgaaaaaaacatcttccccggtcttgggcatcttccaattaaagaaatacgtccaaagcttttaaaacagcatcttgaccctatagaacagagaggtgtgcttgagacgctacgccgcatcatttcccgactaaatgaaatattccgctgggcagcaacagaagaactcatcgagttcaacccagcggataacctcggtcaccgtttcagtaagcctaagaagcaaaatatgccagctctacctccaaatgagctaccgcgattcatgattgctttatctaacgcctctatccgtcttgagacgcgtctgctgattgaatggcagttgttgacttgggttcgtcccggtgaagccgttcgggcgcgttggggagatattgatgtaaagaataaattttggaacatcccgccagagttcatgaagatgaaacggcctcataaagttccgcttagcaaagaagcactacgcatcctcgaaaaaatgcagccaatcagcgggcatcgtgagtgggttttccccagcatcaaagcacctcttaatcatatgcatgagcaaacagctaatgccgccataattagaatgggattcggaggtgaactggttgctcacggtatgcgttctatagccagaacagccgcagaggaatctggtaagttcagaacagaagttcttgaggcagctctcgctcattcaaaaaaagatgaaattatcgctgcttataaccgtgcggaatatttagttgaacgtgccgagctaatgcaatggtggagtgattacgttcaagcacaaaaatataagtttatggttgcttaa

SEQ ID NO: 150552 - DNA, 378 bp, Enterobacter cloacae; identical to SEQ ID NO: 124682

SEQ ID NO: 150553 - DNA, 1059 bp, Enterobacter cloacae; identical to SEQ ID NO: 118104

SEQ ID NO: 150554 - DNA, 1479 bp, Enterobacter cloacae; identical to SEQ ID NO: 118501

SEQ ID NO: 150555 - DNA, 828 bp, Enterobacter cloacae; identical to SEQ ID NO: 105721

SEQ ID NO: 150556 - DNA, 426 bp, Enterobacter cloacae; identical to SEQ ID NO: 23459

SEQ ID NO: 150557 - DNA, 1290 bp, Enterobacter cloacae; identical to SEQ ID NO: 105722

SEQ ID NO: 150558 - DNA, 321 bp, Enterobacter cloacae; identical to SEQ ID NO: 105723

SEQ ID NO: 150559 - DNA, 705 bp, Enterobacter cloacae; identical to SEQ ID NO: 105724

SEQ ID NO: 150560 - DNA, 1404 bp, Enterobacter cloacae; identical to SEQ ID NO: 118507

SEQ ID NO: 150561 - DNA, 228 bp, Enterobacter cloacae; identical to SEQ ID NO: 105755

SEQ ID NO: 150562 - DNA, 708 bp, Enterobacter cloacae
atgaaacccgaaacactcatcaccgccctgcaagatgttgccgccaagcagtccgcagagaacagccagcgcatcaccgacaagctgagcgtattcactacggccagagacacccacgcggccagcatgcaggttctgaaagagattgatacgtccattgaacgctgtaagcaggagcggcagaccgccctcaatgagagcactgaggcggagcaggactggcgcagccgctttcgcaccctgcgcggcagtctcacgcctgaaatgaaagctgagcacagcaggcgtatcgccagtcgcgagctggccgacgagttcaccggcctgattgcggagctggagacagaccggacacgcgccatgctgaatgcctgcgccaccgccaataaatacctgtcagcgcatgaagatgcctttaccgcttatgctggtgcggaatgggctcaggctgtcaacgccgttcctgtcgccctcatccgcgctttcctgctgcgcattcgtgccctcgaaatgaagggtgaaagtgccccgcagtccgtggccaccggcgagctgcgcgacgcgctgagccgtcagggcagcatgtatcgcttcgacatgacgcaggagcctgtattgtccgtgacgggcatgcaccggccgcagattactgacgttgatacggagctgttagtaagcgtcgtctcagcaccgtctggcagatcctga

SEQ ID NO: 150563 - DNA, 1209 bp, Enterobacter cloacae
atgacttacaagcgtgacagatatctgattctcgaccattgcggggtttacatggtgcgaatcgttataccttcctacatgaagccttacttcaacggtaagcgctactacatgaaatcaacagccaccaaagatatcaggcaagcaaggcttttcagggatgctgtagcggtagagttcatcaagctaagggaacagcttaagccaaaacaaaacggctcaaaggttgagcagataatcaatgaactacgtggtatcagcaactttgcaaaggaatcaccagtgaattacggggctaatattgagcgctgtcctacactgatacaaatacgtgacctttatttgctgcaatatagcgataaacgcaaactaacaacgctttcaaagataactaaagccgttgagttaattctttctcacattaagcaacgtgattcacagcttcaggatattaaccgaacggtagtaaccggatggcttgaccaactgaaaaaagagaaagcaactcaaacgctacaaaactatataagcgcactggctcaactattcgattttgcaaagaatcgctatcacgatgcgcctaaagataatcctttcagagggcataggttagaggccaaaagttcacatgatagctatgagcctttccttatttctgagttaagcaaggtctttgagttactcaatgatgagatgaaacaggtaaccttaatcggcctttattcagggatgagattgaatgaaatttgtagcctcaccactgatgatattgtgacagaggaaaacgtaaggtgtttacgcatctcaaaaggcaaaacaaagaatgctgcccgattggttcccattcatccttcaattaacggacttattgacacgctgattcaaaaccatacggataagtttcttttcagacatgcagcgttaacagacagggctgatggtaagcgctctacatggcatacacagcaattcaccagagcaaagagaaaggctttaggcgagaaggaaacagagaggaaggtctttcactcgttgcgtgggatgttcatcaccgagcttgaccgcctcaaagtgcctgaagaccggatagcgcttcttgtaggtcacgagagggggagtacagagtctttcaagacttacagtcaaggggcttcactaaaagagcttgctcagtacgtggaacaggtcaattttgacgctatgacctga

SEQ ID NO: 150564 - DNA, 180 bp, Enterobacter cloacae
atggatggccttcataaggctttcaaacgacttcaggcaatcattaagacactctttgaacctttgatgcctgtagtgctcgtgcgcagagaggaactcatcattagcccctgcgaattcttgagaatcccccaaaatctggagggtaggtttaacaacatcggaatgaatgaattgtga

SEQ ID NO: 150565 - DNA, 492 bp, Enterobacter cloacae
atgggcgtggtggaacagcgtcagcagcaaggaattacggataatgcgggagaagacgcatcctcttttcctgagaactggaatgcccttgaaggtggcacgcaaaaccagacgcgtcttatcgggaaacccgtaacaggcccgctatttacctttgcgcctgcaattgaccagttccttaaaacgcacctgtttggtgatattttccagcgtgacaccctgagctggcagacgagggagctggccaccatttcgtttctggctgcaattcccggtgtcaccagccaactgaaaagccattatgccatcagtctgaatgcgggattgacggctgagcagctgtgggcatttacggcaattctgggtcaaaaatgcggtgctgatatggcagacaacgccaggcccgtgctgggtgagctgctggatgaaacaaaaacgccccggcacggtggcttatccacactgtactgcacccattttgttggacgatga

SEQ ID NO: 150566 - DNA, 126 bp, Enterobacter cloacae
atgaagtatgcagaagggcaaaagatccaagccaatttgcagtttgcctcaaagacaccgacctccttattggccatctgtttgcagaaaatagtggcgagccagatgctaatacgtggtccgtag

SEQ ID NO: 150567 - DNA, 234 bp, Enterobacter cloacae
atgaaagttgaattaaccattgatcgcactaaagaacttccagagggcgcagtcccggcacttgagagagaattattaaaacggctccagagtcagttcgatgagtgcaatctgattgttcgtcgcgcaggttccgatgggttaagtgtttacggtggcgaaaaagaagctaagaagaaggttgaggaaatcctccagcagacctgggaaagcgcagacgactggttttattga

SEQ ID NO: 150568 - DNA, 1155 bp, Enterobacter cloacae
atgcgcgcaaaatcactccatgagatttttcctgactatcaagacgtaaatggcatttatcaacaggctttgaaaactatcggagaagacccgtatttgctgcaacaaatggcaaactttgaaagaatacggccaaatgggaatttatcacttgcgatcgaattgcttgaaagtgctaaggaaaaagcaccttatgatagtagcataattcatacaatggctactgtatggcgagataaagccaatattagcaatgaagcctacgaccggataaagtttcgtggagaggctcgtcatttattacaggaagcacaaagacgttggggtggaagcccatatatttctacaactcttttagagttgtctatcgataactttgaagataatatgaaggatgacaatgtttctggtaaagttatcgatgatcttattcgaaggattgaggaagaaattactattagtaagcaaaaatatccagacgaaacaatgctttctaacttagaggctagatttgctgggattatgaatgatgatggaagaattttaagttcacttatttctgcttttaatgataactccagagatccttttatcgcaatacgactttcaaaaatttatattgataaaggtgattttaacgaagcctcaaaggtacttacgcaggctttagaaagaagaagaagcgatcaccgattgaattaccaatatgctgagcttctcagaataatggatccctcgaaaagatcttcgttaatttattattatagaagggcgtttactccaaacgaccagaattttcaagcgcaattctggtttgcacgtttcgcatatgagtcaaatgatatcaaagatacttctttatctgctgatattttcgattatctccgcaccgctagaatatcaaaagatgatcggtttaaaatcagagattatataggtggacaaatttgtgcaactattttcagagggagtttgaaaggggttaatagtggatttgggtttgtgacagtcgatggaagtggaaaggatatttttttccctcgctctgaggtacaaaacgatctttgggaggcattgaaggcaggcgacaggttgaaattttatataggtttcaattatgcaggccccgtagcatgtaatatcatcccttcttag

SEQ ID NO: 150569 - DNA, 240 bp, Enterobacter cloacae
atggcgccgtcgcccggcgcagccggctgccgttttgataggttctgcctcaccgccccgcttcactgtaaagccatatccgctcaaaacgtctcagtggcctctgtacgcggtcggagtggtcacgacaaggcgacagccgcagtcggggcgtatctccgcgttagcgccgttgaggcgcttacgagcgtgtaccagatgacttaccgcgggactacctacagcgatgaagaagaatag

SEQ ID NO: 150570 - DNA, 567 bp, Enterobacter cloacae
atgatgaatgatgatgtaggtttaaaccagacgtatgctcaagattttattttccgttgggatgatcaggctaacatagccgtaaatgggaaaacatttgctgatttcttcaaacactatgaaattcgtgtgtatgaccgatacaggaactacatcacatcgtactacaccactacaagcaactggacgtactcatattcaatgaataccagtgatggccttagccgttaccgtgtgtttgggatcatcgctcatggttggggtacaggtatctatagtgaagaagttcagattgaagttagtaacccacagcatccacagttgttagggatcaatttgaagagtggttatgattccgtgttcattgactggacagaatcaaacgtaccggattatgcgggggttgttcttcaaatcgcacttgatgaggggtttagctcaggctcgaagtactttagtagtgctaaccgctattcagcatcgtttggtattgtcgattgcggcatcctgaattttcgcacgggaaacggaaaggttatttatcatagcctcattgatgctcgctga

SEQ ID NO: 150571 - DNA, 450 bp, Enterobacter cloacae
gtgttcggccaggatgaactggtatggtcgcctactatcggttttaaccaaaacacgaaagtaccgtacagtaaattgaacgaagacgttattgatagtctacttaacagtgatacggctactggcattgttgagaaacagatcgtagatgaacttggttcacgctggcagctacaggtatcaaacaacggtaacgtaacgggcattgccttagcagcagatgaaaaaacatcggtgtttaccgtcatggcggatcgctttagcatcataagtacagacagtgccaagctatcagacagggtatatccttttgtggttcaggggggtaagacttatatcaactcagcggtgatagcatcagcgagcatcaatgaggctatgataaataacctttccgtttcccgtgcgaaaattcaggatgccgcaatcgacaataccaaacgatgctga

SEQ ID NO: 150572 - DNA, 558 bp, Enterobacter cloacae
atgatttatggctatgcaagagtatcaaccaaagagcaaaacttagaccgtcagttaactgctcttgagcctatgtgtgatgtggttaaggttgagaaagtttccggtaaagatttgaaccgtccagagcttcagaagctgtttgagttcatccagtctggtgacacgctcatttgcaaaagtatcgaccgtctagcaagaaatacgaaagatttgctcgaagtggttgattcactgattgccaagggtgtgattgttaagtttctggacaactcaatgagctttgacaatacgccagcttcaaggctggttttaacgatgatgggtgctgtagcagagtttgaaagaggcatcattgctgctcgccgtgatgaaggtatcgctattgctaaagacgcagggaagtacaaaggcaagcaagctaatcaggctcttcatagtaaggttgtaaagtaccttgaagcgggaacttattcacctgatgagatagcaaagctatgtgaatgcggtagagctacagtgttcagaatcaagaaagaatggaaagcagcagcttaa

SEQ ID NO: 150573 - DNA, 303 bp, Enterobacter cloacae
atgaatgtttacgattacttcaataaacaatcccagccttcgtacaagattgcagtgcttgacatgcctgaattacgtaaggaatttttcaagcatcacggaggccgtactgctgacaatgatagatctcaattcgaagaatatttcagaacattaatgaagatctaccgtgaccgtggctatttaattattgatgcaacgcttgccgttactgtaccggatagtgttgaaatcgtcacttatatggaacttgaagatagctctgaagcggtacaatcaagttcttataatgcaaagaagtag

SEQ ID NO: 150574 - DNA, 537 bp, Enterobacter cloacae
atgagcgatgaagaactattagcactaatgactaatcgtccagacttgcttgaacaaatgttaaataaaagcgacgttgaagaacaacgcgaagaagtacaagaaagtactgatgattctgaagtagaagattctacagaagaaatggaacgtaaacgtgaattggaatcaatcggcgtagttctaaatattgatgtgtctgaagcaattgaaaatggaatttcagttgaggacttcaaacgcacactaaatacaaaaacaaatccaaatcatgataaggaaatcaaaatggaaaaatccgtattaaatggcctaattcgttcactaagtgaaggtaattttgctggtaaaactgaaatccctgcgggtgatttcgtccgtacttctactactgttggcggtgctactctagttaaagaggtatacgcagattcttatattgatgtgctacgtgctcagtcagtatttgctactctacctgtacaagtattcgcaaatctagaaggtgaaggtaatctagttctacagaaccggtaa

SEQ ID NO: 150575 - DNA, 186 bp, Enterobacter cloacae
atgaagaaacgcttttataaagtggtggggaagacctgtcataagattcatttagaaatgaagagcatcagtgatttggtggatttaaagcctaacaagatttattccattcctcgtctaattacacgagcaagacgttatattatgattaaaaagatagccgaaagattaatgaaaagtaattga

SEQ ID NO: 150576 - DNA, 855 bp, Enterobacter cloacae
atgaccaccaaacctgaaatgctgaaccgtatcgaagccaccttcagccagctgacgcccagcgaaaagcgtgtggcaagctggatgctggcgcacgccgcgctgataccgtttgagacggcagagagcgtggcgctgactaccggcaccagcgggatcaccgtcgggcgcttcctgcgcaagctggggtatcgcaacctggacgatgcgaaaaaaagcctgcgcgatccttatcagccctggggaatgaacgaacgcctggactcctggcaacagcagcgcccgctctcggatcgcctccagcactccctttcgctggaggtggacgcaatcacccatgtttatcagctggcacaaaccgatgtctttaagcaaatcgtccatcagctcacccatgctgaggcggtgtttgtgctgggtattcagtcaacgcgcgggattgccaacgccttcttcagccacctggaatacctgcgcccgcgcgtgagctactccgaggggttatccggcagttgggttgaatcgctcaactccggttttgaccacccttatgtggtgctgaccgatacccgcgcctattccgccattgcccggcagtactgtcgtgtcgcaagtgagaaaagtattccaatggccctgatcaccgatatctggtgtccgtgggcgcgggattaccctattgatttattgcaggttaaaaccgataccggccacttctgggattcgctggcccctgttagctgtcttttcaacctgctgctgtcaggcgtggtccaggcgctgggtgatgcgcttgcagaccgtctgacgataaaccgtgaattacaacaagagtttggacaattcgaacgctaa

SEQ ID NO: 150577 - DNA, 534 bp, Enterobacter cloacae
atgagacgacatttcgtggtggaattttcttctgcaaagcggcatgcttcagccttcatcgcccggtggcggctacgccttaccgggcctacagcccacgcggcggcatcattcgaaggcatgttgatatggaaatcgttttgcgaaataaattcagttcattgggtatgttgctgggaggaattgcactcattctctcaatgccggaattattctcgctgttatggctctggggctttcgttcatcggagggatgtgcaaggagagccgttgggggatctccggggcacttcttttctccgggctaacgctaacgttccatgctgtgctacttgcattcggattgatcgtcgcggtgctgttgctgttatttattctctctctggtaaccggaggggcagtaagttgacattaaagcccggtggcggctacgccttaccgggccgacaggtgctcgaacgtaggtcgggtaaggcgaagccgccacccgacaaaatcaacggcgcgatctcaccacctgataccgacgggtaa

SEQ ID NO: 150578 - DNA, 1533 bp, Enterobacter cloacae
atgagaatcattgattcacaggcacatgatgcgctaactcagattgagcttttttgggcagtatcctggaaattcccacaaagggttgcggttaaagatctcgatcatgagatcagctatggcgagctcagagactggatgctcaggattattcagacactgaaggatgaaggtgttcacgcaggtgacaaggttgcaatagagctgccaccaggtgctgagttaatcgcctctattctggcgattcagttcattggtgctgcttatgtaccaatagaccgtaatgcgccagtagcgcgtaatattctgatattgaatgattctcagcctcgcatgattatcaatgagagcggtcattcaaactttgccggctttcaggcaaaaagcatataccagatgttgtctgtctctgttatggcggattcattactgaatatggccgttccggaaggattggcatatattatttatacttcgggcacgacaggtaacccaaaaggtgttccgatcacccatgctaatttgcgtgctctctttcgtgcaacggaacctgtgtttaagtttaacgaagatgattccactgtgctttttcattcctatgcttttgatttttcagtatgggaaatgtggtcagttttagcttatggtgggaagcttgttattccagataatgaaacacgtttaacccctagtaaacttgcacaactcgttcacgatcaaaaaattactttacttaatcaaactcctggtgctttttccgttaatgcctcttggctctgtcaattcccgaagggatcattggctttacggtttattatttttggtggcgaaaggcttaattttcagatgctcaaacaatggcagcagcattttgggctgatgtctcctttactggttaatatgtacggcattaccgaaacgactgttcattcaagttggcatattatcagtaatgatgatctggagcacacagagtctataataggtgaattattgcctggattcgattacatcattcggccccttgatgaaagtgatctgcgttcaggctatggcgaattgcttctctgtggttcgcaagtcacgccgggttatctgaaccagaataatgagaccaatggtaaatttattttggctgaaaaaaacaatattaccaagcggtattattgcacaggagatcttgttcaatataattccacagggaagttggtttatatggggcgttgcgatcaacaggtaaaaataaatggttatcgaatcgaaattggcgagattgaatctgtgcttgcaaggcttgaatctattatcgacatttccgtcataacgtctcattcagaaacacttggtcatcatctggtttgttgttttgcatcaaatgacaataaagcagatgttattgaacagttacataaattggcaaaggagttattgccattttatatgcgccctattcgctatcgtggttttgatgctataccaaaaaccattaatggaaaaatcgataaacaacacctgaaactttctgtggagtaa

SEQ ID NO: 150579 - DNA, 252 bp, Enterobacter cloacae
atgaacgaagttgatttagatgatgtcaataaagaacaggtaaaagtacttgcattacaacagtatatagtttggctgcaagatgttttagaaaaatcagtcagcgcggaagataacttccttgatattggtgggcattcaatgattgccattgcactgaatgaacgagtacgaaatgaattcaatctaacgctatctatggaacgtctatataacagcacgcttagcgaaacattttacagtactaaataa

SEQ ID NO: 150580 - DNA, 942 bp, Enterobacter cloacae
atgtcaaataatattcatttgtctgaagaagaacttgccaacttccataaaaatggttatatcggcccaattaccatttattctccggaagaaatggcggaaatttggagtaccgttcgtcggcaattaccagatcgttcgaatgctgcttacccttcagactcgtacggtgcggcaacgaatatatcgaattacgatcgccatcttgatatcaataaacttagccaacatgtcactaatcccaaaattgtggcaccggtatctgatatccttggcgatgatgttttatgctggcgtacggagttctttcctaaataccccggtgatgaaggtactgactggcatcaggctgatacatttgctaacgccagtggaaaaccgcaaattctttggcctggagaaactgaagatcagtttggaaaagggactttaacggtctggacagcttttactgattcaaccattgagaatggttgtctggaaattatgcctggcacccatcataaaatgaattatgatgaaaagaaatcaatgcaatatcaaagcgacattattaataacattgaaaaggagggtaagagtcgtggattctttggatatgattaccgcgacctgcaaatagatcctgactggcatccggatgaaaaacaggccgtcccgttggagatgaaagccggtcaatgtgtcatcttttggtcaacgttaatgcatgcttcctatcctaatatatctgataagatatatcgcatgggctttgctacccgctacgcccccagctttgttgatatttatcccaataccgatcatgtgcatgagtatggtggcaatatcccattggataaatttggctgcgtgattgttgctggccaaagtcgtaatactaataatcgtatagcaacccataatttgctcggaaatccatttactcccctttctatataa

SEQ ID NO: 150581 - DNA, 681 bp, Enterobacter cloacae
atgcaacaaaatcagtgttatctggaggatacttatcgctttaatatattaagcgatgtcattgctaccggtgctgatgaaggagggcaatggattgccctgcaggataatatttttcatccgcagggaggcgggcaacctgcagatctcgggtgggtaaatgacataccggtggtggtaaaaaaacaggaatcaggattagtggttctttatccgcagtctcctttttcgccgccggttgaaacaaaagtatcatcagttgtatcagcggatgcccgcgcttaccatgctgcactgcatactgccgggcatttactgaactgggaaatgcgccagttcgggtggatggctgtccgggggcatcatttccccggtgagtcgcgtgtggaatttagcgccattgatgcttcagctattccagctgatcgcctggaggcggctgaaattgaacgaattatttgccagcgtctgcaaaagggagcggaaatccgcagttggttcgagggcaccacccggctatgccagattaaccaatcagaggctatgccttgtgccgggacacacactgatgatttggcaaaaattagctcatttaacattaaggcgataaagtttaaaaagggcactctacggatcagctatgatgccgggcatgtcccgctaaaggaatgtcatgtctaa

SEQ ID NO: 150582 - DNA, 918 bp, Enterobacter cloacae
atgtctaattattctattctggctccacgcagccgactttggataattgatctgggattattgaccgttgccctctcatggggggcaagttattccttgatgcagcttattatccaggcaggggtcactgttcccctgtttttaatgctgagattcgcactggctgttcccttcatgtttgttggcactcgtgtcagattaaacagcttcactcgtggtgaagtgattaatgggatcgtatttggtgtgcttctttatgcgatcctaacattcgaaacgtttggtgttaaacacacctcagctgcaaatgcaggtttcttgattgcattatcggtggtattagttcccttttttgaacgttttatcggcaagagaaaacaaagcaaattcatttatttcacctgttttatgtcccttgcaggtggcggcatgttgagctttacggccaatggaaatattgagttcaatcaaggcgatattcttatcttatcggctgcattgattcgcggttttcagatatttatgtttggtcggcagactgctggtaaggattactcgctaatcaatatcacattgattgaattactggttgtcgcggccctcggcttggttactattgtgctgaccgaacccactgcgttgcaatatatacctgaaatatctatttcgacatggggcttgattctctttctgagtctgctggcaacggcatttgcattcctgatgcaattatatgccgctaaaataaccagtccgacgcgcgtcgggttgatcttgtctctcgaaccggcctttgcagctatgtttgccatcaccattatgggcgaaacccttggtgtgctgcaagcaatagggggcgggatcattatatgtgcagccctgttggggcgcattgctgaagggaagcgttatgaatga

SEQ ID NO: 150583 - DNA, 717 bp, Enterobacter cloacae
atgaatgagcagccacatattgctatgtttcatcatgccggagggaacgctgccgctcttgatgtactggaaaagcatttttcaaacttcaatgtgagtaagtttgaaatgcctggccgcggacgccgccgtcaggaagcgttactaacagatatcaataaggtgattaaggatttttttccacaattgccacgccattgtccgataatttttatggggcatagtctcggcgcctatgtcgcatatgtaatggcaaaaaaataccgtttcaatgatgctcgacaaaaaagtatgctcgtggtgattggtaatgaaccaatccattgccgtcagttttttgatttaactgaatccagtgaaattgcaaaacattcattacttaattttgcgaatcatttcaggcaattacctgactggctgcagagagaacccgttttgctgaagcaatttttgcaggtgctatctgctgatttgcaggttgctaattctatcagtgaagaagatagcgctgcgcttgacgatattccagtattagcattttacggaaaagaggaccccttatttctttttcccccggaacgatggcaagaatgtaccctccagccattcaggctggaggggatctcaggggggcattttatttcagatacacaagctcgtgagattagtgaactaacaatggattttatacggaacaacaaggtctttaatatataa

SEQ ID NO: 150584 - DNA, 573 bp, Enterobacter cloacae
atgagtaatgcacaacagagcgatcgcttaaaaagaacgtacaccaacattggtaataacgtaaaaaagttacgaatagctcgaaatctttcacttaatgaactggcaaaactttccggcgtctccaaagctacgctgtccacgctcgaatcgggcggttctaatcctcgcgttgatacactggattccatcgccagcgcactaagacttacattaggcgatttgctcggtaataataatgaacgctatccctatatcgaaaaaaattctgactacaaaggtgattattcccaggtaatgaagttccgcatcggccagggcaatatcacagaaatatggcatttacaaatgaaaccaggtgtggtaataaacagtccggctcatgtttcagggacgcatgaacatatcatcgttcaccttggcacattacttctgaaaatatctgacagtgaaagtattattcttcaacctggagatttttatgccttctcaggtgatgttaaacatgcctatatttgtgcagatgatgcggtaagtgcgacggttataatgtcttacagtacacaaggttaa

SEQ ID NO: 150585 - DNA, 597 bp, Enterobacter cloacae
atgttactgaatgactgcattaaaattatgggttctggcatgttgttgcttgtaatgcctggcccaaccaatactcttctccttttctcagggtacgccagtggtatcaggccaagtataaaaatgattattgccgaatgggggggatacttttgtgcaatcaccttttggggagttattgtgagtgtcttagctcaacatggcacgtttttactcggtattattaagttattatcagcattctatgtcgcctggctggctgttaaagtctgggggttttcattacagtctcgaccgacaaaaattggaatgaaaaccatatttattaccactttgtttaaccctaaatcattcgtatttgcgacatatataattccttcaattgctttcagagagcttcagtctttcactgccgccatgctgagtgtttttgtcgcgctattgcctctttcttttatatgggttgcctgtgggaaggggatagccaggcaaggcaagctgcaatcacgattatggccaatgtttttttatcgcggtctgtcgctggcgatggcgagtttcgctgcttctatggtttaccattccgtcgctgtttga

SEQ ID NO: 150586 - DNA, 699 bp, Enterobacter cloacae
atgaaaatttgctggtatcaaacacaacgactaatgaaagtcttacccgattacatccatttcaccgtattgcgtttctccctggatggtgtgctggaggatgctttccgagtttatgatataccgctcccgcgccggttggcgaacgcatcagatcaacgccgggctgaatatcttgctggacggattggcgctcaaaagttactacaacatttcgattcctcgctatgtgcgccgctgatggcagatgatcgcgcaccctcatggccttcttccttttgtggggcaatttctcacgatcgcgattttgcttctgccgccgttatcaaaatgcaccatggccgggtcggaatagatattgaatcgctctcaccgaaaatagctctcgatacgataagccagcgcatagcctctgccagggaaattgacacattggccaactcccgcgatttgctttcggaccacgtcctgccattgcttttttctgctaaagagagtgcctataaggctttcccacgtgatcttcaacagcatctggactttcacagtattgaattgcgcgagattgatccccacttgcagcagtttacttttagcctgacacttacgcttaatcatgaatatgaggcggggtttcgctttaacggctggtatacttttctgggaaatcgggttctgaccttggttcatttgcattga

SEQ ID NO: 150587 - DNA, 168 bp, Enterobacter cloacae
atggaggggggatttctcgaaaagaatggctcattgagcatgagagaaataacgtttaatggcgtgatgctcacttgtagccggaaaattttacgggctctgcgggataaattacaagctcagaaaagcctgcagggctttaaggacttcatcagtcgactctggtga

SEQ ID NO: 150588 - DNA, 438 bp, Enterobacter cloacae
atgtttggaatattctctaaaggtgaaccagtgagtatggaaggtgagttggtacaaccatcatccattgttatcaatgattatgaggaagaattgcatttgcccttatcctattgggatattaaagattacaaaaattcttggttaaagtctctcggcgaagggctatccaataagactcactcagcattagctgtttcaatgtatgagcctgaaaaaactaactttatatttacatgggttttatattttgaagatgagaaagtttacgtgcaaaataacgtcatttttttagaggaatgccatggtttttccccggaaaatataaataagtttatagagagccgtactacgcatgacggagatggcatgaaaatatctgaatggcatacagatctaaatagtgttttagatttttatcatagtcttaacaactga

SEQ ID NO: 150589 - DNA, 435 bp, Enterobacter cloacae
atgcgtagcttaatatcattcgcaatatttttagccttctctggcttcgtgctaccagagaggtcttatagttccgattcatattcagaaagatattcaataccggacagtctatatgaccagttggatcaaattggtttcaacgaaaacgagcttgaagaaatcgcagtagatggcagtgtgctttctattaaatttgactctgaaaaattgaatactaaaagagcatacaaaataatatccgtcatttgtgactacacaagaaacaatccagcagaatggcaaggcctcgaattcgctacaattgaaatcatggattttttacaatccaaccgattaattttctttggtggtattaaaggctgcttacgactccctgcgcatccaaacgatgagcaaattaaaccttatacggaaataaaaagaggttattag

SEQ ID NO: 150590 - DNA, 438 bp, Enterobacter cloacae
atggagaccggtgcatcactcgactggttagtttatgggcgcggagaagtgcccgattttgccgccgaaagcgaaaaaacccaaaatgaacatgatgcagataaaaaaacccttttgagatatacaaaaattcaaaatggagtcattcaccatcaaaagcagattgtagtctccaccgaactgatccctgtcggcacgacctcccctcagttcgtcagttctgacggtctgatctgggtagtcgatgatttctctggagagcttgttgatggtttttggatggttgaaatggatggcgtgatcagtattcgtgaaatatatcgtcttcctggtggacgtgtccgtgttgagaatgggaaggcctcttttgagtgcagcgcttctgatatgaaagttcttggtaaagtagttagtaaaacggaactgttaaatgcgtag

SEQ ID NO: 150591 - DNA, 810 bp, Enterobacter cloacae
atgagaactaacagcgaacgtatgtccaatgcgcccgtttactacgcattggtgcaagtaaagtttactccagtagctgcaatgagtaagtatgttccagacatacaagatgcgctaagagttgaaggatttcctttatttgaagtttccaatacaactcagctgaaatttgaaatgaaaaaccccaatgagccaccggtacattcatttgagcctgtgacaagttggttgatgattgatgcagatagaaggtctggttttgttttaggcaacgatttcattacgttccatacaacagattatgataatcatgtacctttcatctcgtcattaatacttggtctgagcaaagttcttgaatttgctaagccatcgttggtaagccggattggtcttcgatatttggatgctgtgtttcctgagaaaagcgaaacaattgagcagtatcttgtaaaggaacttcatggtgttgattttggatggacgccaatacagtccatacaagagtctgtatatcagacatgtgttgagccattgatctctaatggatttatggtttcacgcatacataagatgaatggtcaactaggttttccgccagatatgattcctaatggtttactgccgctgccgagatttagtaacacagagcatcgtatgcacgcaataattgatacagatcattatgttgaaggcaacatgtcaactgatttgcagttaattgaaaaacagattctttcgttgcatagtaaagttaaagaagcatttgaaggcatggtttcagattttgcccgtgctagatggcactga

SEQ ID NO: 150592 - DNA, 663 bp, Enterobacter cloacae
atgtatgcaattcctactggaagcataggctccgtagatcggtatactccagattcgcagtcaagctcatgtgtatcaggtgttgttgctgtcgccgcatctttactattagttggtacgggggcttcataccctgtaaatgcttataagcaatggcgtcagtatgttcagccaagggttcagtttgcatttgattccttagagtcaacgtacacgcctgcaatttctcctgaggttgatgtcaggaatgttgcccaacatttggctaatattcgagaagtgctgtctccatcaatgtcagaactggctaaggatttggggataactcggcaggctctctataaatggttgtcaggggagaaccagcctgatgatgcttcaaaagtccaattcattaccaacctcagtaatgttgctgactctttttccaaagctggactcaatgatgcgaagctattggtgaaaatgaaagcattcaatggtaggtcattgatggacttagtaaaagaaggtgaggattggaacaagccagttcaggtactgattgatgaagctaaagcgatgaatgcagctgctgaatcggccaattacttagcaagcaaggcgaaaccgacagatgattggaagtcatctatttcaattcctggaacagtagaggaataa

SEQ ID NO: 150593 - DNA, 849 bp, Enterobacter cloacae
atgttggtacgaggaacatcatggcgtcaggggcatgttcttaaacatgatgatgccgtttcacttggacttctgaagcctgatgaaacgaaccataaagttgtagttataacgcatgattgtgatttacagagtaattctgaaaaaaacgtggaactgatgtttggccccttgaaaaaggggtcaagcaagatgaaaagagctaagcatccgagaatcctcgatctatgctttgaaaacccagaaagtgctaagaagaacgcagtagagcttcggcatgaaagaaaagtcatcatttctaaagaagctttccgttgtgaggaaaacgatccggcattctccattagcacagaagagaaacaagctcttaagcaatggttagcagctaagtatggtcgtccagcgtttcctaactcgtttgaagagcgcttgcgggcttacgacgaggataaaaagtttattttcgaaaaagaagttgcggacattatcgccacaaacgcagagcatttgatcggagtttttttcgatttgggcgaagaaagatttaacgatcttgaggaaggcataccatatgagctttctatcaatgttgtttatgatgcaactgaaggtggccccgatgccagaggggcggctgaacaaacctgttctgatctaaaggcattgttttataagttttatggtgatccaatcttgggacattcagagcttatagaattgaatacgtgcattgctgttgccgatactcatttctccctgtatgcattgaggcggatggatcaatggagggtggaatacatcagccttgaagaagattcatatggcgatttcattggtgccggtgtttaa

SEQ ID NO: 150594 - DNA, 1257 bp, Enterobacter cloacae
gtgaataactctacatcgcattctttagcggtaaagacgccgctttccaggctttacctcgctctattttccgcgccgctgttactgctttcacctgccgatttcgcgcgtgcagccgatgccatttttgatggcgactcacgtattaccgaaacgctgggttacaccggagacgtttacgttggacgcaatcaacgtggaaacctgctgatcgataatggcaaaatcaccgcctataacatcaatatcggtcggctgttcgacggccaaatttatgaaagcgtggtcacagtccgtgggccaaacgctgagcttaacgcggtgaacgatcagtacgtcctgcgcggcgacctgaatcttggcctcggcaccctgcgagtcgaagagggcgcgctggcgagcgcaaaagagatcgttgtcggcaccacccgcggctacgacagccaccttatcgccacgggcgccggatctcgcgtaaccagtaatttccttagcgtaggtaccgatctgggcgcacgctccacgctggctattgaggacggcgccgcgctcaataccacctacgatgcgcgcatcggcaatggtaccgggccagatgaaaccgacacactgagcccgaaagccaccgtcacggggagcggctcacagtggaatgttggccgtacgctgacgcttaatggcgacctggacgtgctgaacggcggagcggttaacgttggcggcgtgcaggtggcgggcgtctccggggccgggaaaaccgccgagctggttattgcaggcaaagactcgcgctttaccagcgacagcagcgttagcgtgggcgattatggcaatggcgtgctgtcggttattgacggcggttcattttccgcaggcagcaatgcgctgattgtagggacatcgggctccggttcgaaccggggggcgctcatcatcggcagccgcggcaacatggacaccggcacgggtataactgagccaacgcttggtacggcaggcggcgcgggtaccctcgatgcgaagacggcaatcagcctgcgtggcgggctattcggcagttatgtctatttcaaccataccgacgaaaattacatcttcagcaacaagatgagcggcgaaggtgaggtgataaatacctccgggcagacaacgctgaacggcgatctttcagcgcttcaggcgaacgtgaccgcgcgcggtggcaaagtcattattgccagcaacatcaacacccagccagaagacgatattttttaa

SEQ ID NO: 150595 - DNA, 354 bp, Enterobacter cloacae
atggacagggactatgttgttgagcgttatcggacccgtgacggcaaagtgccgtttgaggagtggataaccaggatgcgtagaaagggtccggagactgttttacggatccttatgcgtattaaccgtgcaataaagcataattttggtgattacaaataccttagagaaggtgtttgggagatgcgaattgatagtggtcccggttacaggatctattttgccgtagagcatcagagggtcttgttgttactcatcggtggtgacaagaagagtcaaaaacaagatgttaaacaggcggtagatttcttgaaagatcatctatctaaaggaaaaacagatgagcacttctaa

SEQ ID NO: 150596 - DNA, 192 bp, Enterobacter cloacae
atggacatcatcgacacagcagcagagattgaagagcttcagcgtaacgctgccctttccgctcatcgtatcgaccgcaacgccgtatcagctgagcgttgtgcggaatgcggggatccgattccggatttgcggcgcatgaaggttccggctgccagacctgtgcggattgccagagcgtcatcgaattga

SEQ ID NO: 150597 - DNA, 147 bp, Enterobacter cloacae
atgttggcggtttacaacattacctcattggatgctagttgtgagggtagttctgacgaagtaaaagctaaaatgaacgccgaactgaaatcgcaatgtgcggcagctaaagaaatctcggactacctgaaaaatcaaacacggtaa

SEQ ID NO: 150598 - DNA, 366 bp, Enterobacter cloacae
atgatgatttatgattgttttttatattacgatgaagatatgttgctagatattcgtcttaatactctaaatgatgttgttgattacttcgttattgtagaatccacacacacattcactggcaaacctaaaaaattaaatttcgatatttctaaatttgaaaaatttaaagataaaataatttatgtgatatataacgatctcccaaaattgaaaaatggtattgcgggtgagtacgacgcctggaaaaatgaagcagctacccgtaatgcaatcatgcgcgggttaaaaaatgcaaaagataatgacatcatattaatttcagatgttgatgaaatttttcgcccgaagttatcaaaaacataa

SEQ ID NO: 150599 - DNA, 297 bp, Enterobacter cloacae
atgaatactcaactaattttaaatagcgttcagttcagtgtctttaccgataacaaccaaatctggctcacatcttcagagcttacccaagtcctctgcaatagatcagacgactcaattgccagaatctataaccacaaccacaaagagttttctgcccgaatcactgagaaggtcaatttgaccgtctctgtgaactataataaacagtgcgatctttctccctctgtagtgcacattttatcgccatgtttgtcggaacgccgaatgcaaaagaattctgtaggtacgtattag

SEQ ID NO: 150600 - DNA, 762 bp, Enterobacter cloacae
atgaaatcgttcttatcaggctggataatgctttgtttgattttaatggttcaggggtgtaaacaaaatatggatttaaaaccagataattactttagcggacaacagctcacattagctcgtgcaatcgagaatggcgaagttgatgaggtaattaaattagcgtcagggacggatttaaacaagcccggtaaagaagatatgacattgttattttgggctgtcatgaattcgatcaataatcagaaaacaccggagcggttaaatgttatcaccatgctgattaaagcgggtgcagaccctctgcaaccgaggccacaaggaaaaaatagtccagctgagtttgttttaatggcagacaacgcggactggatcaaggcgatgttaaatgcgggtttatcgccaaatgccgttgataaaacttttgggaaaccaattattttccaaacacttgaagccaaaaacaccaagacgttgcaggctatgcttgataaaggtgccgatataaatatcaccgattctttgggaaatacactacttattgatgccctggatttccactcgtacgatcatgttcttcttttacttgaacgcggggctgaccctgaaatcaaagctgataatggttggacgatgggtaatcagttgcagcgtttcctcgatagggcgaaggtaggcagcgacgaatataaaaaacttaacgaaattaaagatgtgcttattcaacatggcggaaaatggccaccaactccggttaaatag

SEQ ID NO: 150601 - DNA, 489 bp, Enterobacter cloacae
atggccacttgcggcagtataataagagataaacaggtcatgactgtaaaagacaaagttttctttttctggggtggcatggatactcttgccatcatactttattgtctgaattcagtgcagaagggaagaatgcctgtcatttcggatgctttatcatttattgatttatggtctgcacacagcactttggtgcctggtgcgctggtgttacttctttttgctttggatttagggctactgctttcttttgttctctcggcaatttttttctttaagcggcaacgctgtgcagttaagttcgctctgtttcaagaagtttttcggttgatctcatttcgctgttccgttgcgtttttcccgctgcttgcagatgttactggtatatcgaatgtttgggttaatcttgttttgtttatgatctccgagacgctgaaattgtactccctaatatattataaatatgctaagaaaggggttcgtgcgtag

SEQ ID NO: 150602 - DNA, 789 bp, Enterobacter cloacae
atgcttgcgatctcccggtacgtgaaaaagccctatattccattctgtttagggtgcattgtcgtcattggaatattacaaattttatttttaaaactggtcgaatgggttccctctttctcaccgcttttattccctacactcaccatttttttactggtattccatctgtttattgcctgctttatggccatgaaatactggtgtgacagaagacggttgtacctgattgctatcgcttttgcctttgccggttcggccatactgatggtgggtacgcttaccagtttcccggcctggcttgatctctaccagctcaacgtcgtggactataacgatacgatgatcttctttatgtaccgccatctgttaatggcggtgctgatgattgcgtcggccctgctgtatatcgtcagggataatccgctttcacgtgcggcgcatatcaccattgttgccggtacatttctgtttatggtgggcatggtgctgttggcctggcttagctccagccactcatcattaatgtcgttagacctggtggataatgaaacccatcaatttatggttctctggagccatgcaataaatatcgtcttgattattctttgggtggtgacattagcaacgctaatggttattacccgcgtacgcaatattttttgggtgggcggtaattttttatgtgtctgttatatcgtgacgctcgcgatgctattagcaggcggacacgcggaggatatttcctggtatcgagcgcgcttatttgaaactgtgcgacgttattga

SEQ ID NO: 150603 - DNA, 1740 bp, Enterobacter cloacae
atgaaacttgaacggattgaaattcaaaattttagaggaataggtactgcatcaattaatctagaaaatttcacaacattaattggttctaataacattggaaagtcaacagttttaaaagccatcaagattttagtggatactacaaatccgactacagaggattggccttttagacaagcaagtgatggagagcttattattgcaggctattttattgatattcaagattgggaaagaacaaaaccggcaatttcaaatctcattcttaatgataagttggcgataagggtaagggctacttgggatgaagataataattgtatttccctccctatttatgaggcctactgtcgtagggaaattattgaaggatttacaaataaaattacggaggccagacgagtaccatatcttttagaaattatagagcgtcttgatgtaaatagttcagaggcgtataaagcaaacttacagcaagtgattgagataataagaacggaatatcctgacaaagttacaacagaagaaggatggtcctcggaaaatattaactttaaaaacagcctccaacaagccttacctcatatattatatatacctgcatgctttaagatagaggatgatttaaagtcacaaaaaggaactccatttgggcatttattttctaatcgaatctttcctgcgctacaagctgactcttctttttccggttatctagattctgctaattatatgcaaagaaaaatgaaaggggaaatcgacggtgagacaattgaaggtttaatggaattgatggattctatatcagaatcacttaataaagtaatggacatttcttcaaaagtaaaactatctgttggcgaaattgacattaattcagtatttatgaaagctgcaggtttagtgattgaagatagactggaaacccaacttgaatatcaggggagtggtgtgcaaagagcacttgcatatgctcttcttgaatcgaatgctatttttgaagtaagcgaatctagacgctcaacaataatcctctatgaagagcctgaattgtatatccatcctcacttaatgagattactaagagatacattacgaagtaaatcttcaggttctgaatggcaggtgattgtaagtactcattctccatttttaatagatattgcagaaaacccttcatcattgaagctactcaaagatcacgataatggtacaagaacggtacacgaaattaatgaggatatctttagtgtcggggggcaatataatgaaagagatatgctgagagcagccttagattttcaccccacagtatgcgaggctttttttgctaaaagagtagtagttgttgagggcgataccgaagtcgctattttgcgttttgcagaaaatctatgtgataaatttgaaattaataaaaggcttgtcaaagatacaactatcgtttcggcaggcggaaaatggaccataccagcaattgcgagaattctgaggaaacttaatataccatttaaagtgattcatgatacagaccgaaaaggtaggacagaccaagagcttgaggctctctcaccaattagtgaatataaagctaacgaaaagattgaaagtatcgtaggtgcagatgatgtataccgtgttgatgatacatttgaacacgttttatggaatttagaaacagatggtgaggctccaacagatggtggaaaaccattcaatgcttggaagagaatgtga

SEQ ID NO: 150604 - DNA, 471 bp, Enterobacter cloacae
atgaataaaaaaactcatatcgtgagtcttttcatccttattattgccgcctttatctttggcagaagcacatatactgaatacctggcatggtactatgggagcaataatttaatatttagcgaagtgaacagcgccttattatccagtttatgcaacgggttcttcttcgttctttcagcatgtattatttatgcgtcgctcactctattaaaaagaatccccagaaatatcgttgtttcatgtctgcttcagttctgtattaatatcggtctctatacgcttttcgttgccgtagagagaggatatagtaaattgcatactttaggcccgggtgctactgacattacctacggctattttttaggggcgttgctcacgagcaccctcctgaccgtcgcgatcgtgagcgttatacatgctaagtttctttcttcaaagcataaagatgggctacataaaggcgtttga

SEQ ID NO: 150605 - DNA, 249 bp, Enterobacter cloacae
atggttagctggaaaaaagcgctggcttctgcatacgaagcctgtttttatgcggtacttaacacttttaaaaggtgcaacccgtataaatgtgagcgagtgcaacctataggaaagacatataaaaccggggatgaatttgatgtaaatgcagtgttaaatcgtttgtgtgcgagcactgcttacggcaggatacgcgcggccaacagaaacacagatacccatcaccccgttccggtgatgacataa

SEQ ID NO: 150606 - DNA, 921 bp, Enterobacter cloacae
atgcgattaagtacgctgtatatgtataaaaatagcgcggagaccatgacgaagcgcatgagccagagcaacgacgtctatctgcggatgtcggcgggcaagacgctgctgaaagcgtcggatgacccggcggcggcaaccgatgcggtgaagcaccaggacgcgctggcgaagctggagatgtatagcaacgtgcgttcccgcgcccgcggcgcgctggagtaccaggacaatattctcaacggcgtggggaatttattaaccaccaccctgaaggaaaaaattgttgcggcgaaaacgggttcttactcgccggaggatcgtcgggcgctgggggaggagatcaaaggcatccgcgccaatctgatggatttggccaataaccgcgacgccagcgggaactatattttttcgggttttaaaaccgatacgcctgcgtttgatgaagatggcgtttatcagggcagtacgaatgctgaccatgttcgcaggctaacggtggcagacggtaccgggatgcaggtcagccatctgggtagggacatttttggtgatattttcacggtgctggaagacgccgtggcggcattaaccgcggatcctggcgacgctgattatgacgctaacctggaagccgcgctcagcgcagccatggttgaggttgatgaaggcatcaaccgtctgggtaaagcccaggccgagctgggcaccaacctgcagcagcttgatgcgttggatctctccggagacgtgctgatcaacgacaccattgtaaaagtgcaaaacgctatcggctccgataccagcaagctggtgacattggtctctgaatctcagatgtcggagctggcttttaatgcgtcgatgttcgtctacaaaaaaatgcagtcgatgaacctctttaatatgtcccccagttga

SEQ ID NO: 150607 - DNA, 1638 bp, Enterobacter cloacae
atgaataacttatttaacctggcgagaggcggcctgagcgttgcgcaggcggcactgcgcgtgacgggcgataacctgaccaacggcatgtccggcacctacagccgccgcagcctgatcattggcgaactgggcggtatgactaccgggcagggctttttcggctacggcgcgcgcgccggtggcgtagagcgcgcctatgacgcctttgccaacaatgagctgcgcggctcgctgtcgcattacgcctctctcaatgggcggatggaacagctgagcgatatcgacaacatgctggccgacgaatccgataacgtctcggtctcgctgaacgatatgttcaaggccatggcgacgctgagcggcgatgcggcggacggcccggcgcgcgcggcggtatttaacgccctcggtacgctggcgaaccgtttcaacgccagcgccaaacgcctgaccgcgcttgagaagagcaccaatacgcagattgagcagagcgccaaagacatcaacagctatacccagcagttggcagaggtcaataaacagctggagcgcgcccaggggaatggcgccccgccggcggatctgctcgaccagcgcgatgcgctgctggaaaagatgagcgagcatattggcatcaccgttacggaagacaaaaccacgggccgggttgacgtgcttctgtccgacggacgtccgctggtctcccgggatcgcgcgtataaactgcaaacctcgccgtcggatgccgatccgaacaaaaccatcgtctcctacgtggatgcgaacgagaacgcctcgccgttggatgaaagcagtatcaccaaaggccgcctgggcgggctgttcaagttccgtaatgaagacctgaccattgcccgtcaggagctggatcagatcgcctttacgatggcgaaccgtatgaacgagcagcatgcggaaggttatacgcctgatggcgataaaggcggtgacctgttctccctggcggatattaaagcttacgccaatgcgaagaacaccgggaccggcaagctgggggcgattaacgttaccaactatacagatgtgaaatcggaaaactacaccgtcaccagtgatggcgcagggggatggacggtcacgggtgaagatggacgcaccgtaccggccaccctcgttggcgataacctgacctttgacgggattgagatcgatgtttcggggggcggctttgacgatggcgacagctttacccttaaccccatagcgggtgccgctgaagggatggcccgcagcttaggcagcgcgcaggagtttgcagcagcgggggataaagacggcggccctggcgacaacactaacctggaagagatgctgaaaatccaggatcagaagctcatcggtgacaacacgctgaccgaagcctacgccagcctggtgggcaccatcggtgaccgcgcgcgcggcgtgaaatccgcgctggtcagcgccgaaaccgacctcaggaccaagtacgacaccaaacaggccctctccggcgtcaatatggacgaagagtacatcaacctggatatgtttaagcagtattacaacgccaacgcgcagctgctgaaaaccgcgaccgatatgttcgacgccctgctgtcaatccgataa

SEQ ID NO: 150608 - DNA, 1476 bp, Enterobacter cloacae
atggtatcaactaatttcttaggcatgggctcaggcctgccgtttgaagaactgctggcaaaggagcgtgcggccagttcagtcaagctgaacccctatctgcaaaagcaaaaaacctataacgggcaaatctccgcgtggggctctatttccagcgcgctgagcaccctgaaggataatcttggcaagctggaagatgagggctttaacggcgtcagcgtcagcgataacaaaacctttaaggccacggcgggtaaaggggccattcccaacagctactccatggccgtggagcagttggcgaaagcgcaccagctcggggtggcgcgagactcacgagataaggatatcggtaagagcgccgcgaccgtcaccatcgagatgaaaggcagtgacaaaccgctggtggtggaactcaagccagacgaaacgtccctcgatgatattgctaaaaaaatcaatgcgcagaagggcgacgttgcggctgaagtggtcaccgttaaagagggggagcacaaactcgtcctgacctcaaaaaaaaccggtacagacggtgagatgacgataaaggtcacgggggataccgaagtcgaaaaggcgcttgagggggctaatgacgtcactaaacctcaaaatgccattgtctggctcaacggcgatatggttgagcgcagctcgaataccataaaagatttgataaccggcgtaacccttgaactgcgtgaagtgtcggagaaagaccctgatgccgacccattagctccacaccccttcaaaaccgaatcccttaccatcaccgaagacacctcgaaggtgaaatcactgattgaggagttcgtgaagaactacaacagctacctcagcaccgtcgccagcgccaccaaatacacggcgcccgatcgcgacaagctcgcagagggcgaaatcccactgcctgatgccgacaacggcgcactgttcagcgacggctccctgcgccgtctgaccagccagctgaaggccaccgtcggcggtgagtacagtgatgccggggatgtgatcacttcccttgggcgtcttgggatcaccgtcaccttcgacggcaaaaccggtgaggatcgtagcggcacgcttggcaccctgaccatcgacagcaaaaagctcgatgccgccctgaaggacaatccgaaagaggtcgaggcgctgttcctcggcaaagggggaaaggaggggattaaggatcgcatggaagggatcttcaatacttatcttggcgataaagactccattgataagaaagagggtgcgatcgaaaccacgctgcagtccctgcgcgagcaggaaaagcgcgttggtaaacagataacggcagtgcagagacgtatcgatgaggccatgctgcgcagcgaaaaagaatatcaacgcctcgataaagccatgagcgatatgaacagcatgagcacccggttgcagcagtcgctggcagggttaatttaa

SEQ ID NO: 150609 - DNA, 1515 bp, Enterobacter cloacae
atggcacaggtcattaataccaacgcacttagcctgatggcgcagaacaacctgaacaaatcccagactcagctgggtaccgcaattcagcgcctctcttccggtatgcgtattaacagcgccaaagacgatgcggcaggtctggcaatttctaaccgcttcacctcttctatccgcggtatgacccaggcggcgcgtaacgccaacgacggtatttccctggcgcagaccaccgaaggcgcgctggaagaagtgacggaaaacatgcagcgtattcgcgagctgaccgtacaggcgaaaaacggcaccaactccgccagcgacctggactctatcaagaaagagatcaccacccgtctggaagagattggccgcgtagcggaaaccaccaacttcaacggtgtgaaagtgtttgacggctcgaaagagaaaattaccattcagatcggcgataaagacgaagacaccatcgatatcaagctgagcaagctggatatggaaaccttgggtctggataaatttatggatgatttcgcggatatcgggattactgtgaatggtgcggggactgcgagcagccagtatgacaaagcagcaacgaaagctgttgctggcacaacaatgattgatgttgggcaagctgcgggggggtggaaatatgttacaggtgatgctaccaccctgaaaaataccattaaagcagcagatgctaatgatgttgaggtctacaccctggacgataaggtatttgcttacgacaaaacaaagaagaaaatgtttgagctggacgttagcaaaatgtctttctcgcaagacgggacaaattcatgggctaaactcgacgctgcacctgaagctgcagcaacagaagttaccgatcccgctgatgtcgatatgctgttgaatggcccgagcaaattgaccaacccagtgaaactgaacctgggcgacacaattaaagcggcagacaatgctgatgtggtgctggatgaaactcagctaaatgccattgccaattcagctttcggtcaggacgccgaagcagctggaatgcagcttttctccgtgacagagggtgctgcaactaaagtcttcgcctatggtaagaacgcagcaggcgatacaattgttaccgaggttgaattcgcaactggtggtgcgacaccaggcggtctgaatacaccagcagcccgtcccgctgacgttgaatttatcagaaaagaagcgggcgattcgctggccgatggtctgctggccaagctggatgaagctctgaccacggttgcagacttccgcgccgatctcggtgccgttcagaaccgcttcagctccatcattgcgaacctgaacaccaatatcatcaacaccaccgaagcgcgctcccgtattcaggacgctgacttctccgtagaagtgtccgccatgagccgcgcgaacatcctccagcaggcaggtgtttccgtactggcccaggccaaccaggttccgcagaacgtgctgtccctgctgcgttaa

SEQ ID NO: 150610 - DNA, 1164 bp, Enterobacter cloacae
atggtttttatcgttattttagtcgttatttttattaccctggtgattctggtgcaggctggggttatgccctggtttattcgtaccgagggacagcgtctgcgcacgcaggttgatgccctggccacccagttacgtgagcaactcgacagggttgaagcgcagcagcgttcaatgaccgaaagtgtggtcaccctgaaaagctttgcgctggacaaaggagccccaggcgataccgatatcgccgaagagacgggtaccagccgtcaattcttcaattcactggtcaaagagatcggcgagcgtcttggcggccgcgcctggatggtggatgacaccgggcgcatcatcggtgatgccgccggtgcgccgacggtgcaatcactcaacgatgccagcctgccgatggcggttccgctgcgtgggctgctggcccagccgggcgaagggttacggcatacccgttttcgcagcgccagcggcgaacatacgctggtggtgacgcccattgctgagacaccgtggctgctggccattgatgttcccacccgtaggctgggcgaacgcccgggcatactcctgcataaaccgtggccgctggcggccttgctgctggtctccacattgactcttctgcgcagcgttaacctgcacctttcccgccttaacgaagaacttccgtcgcagctgaaaaccgagcagggtgcgcacttgccgccgctgatgcaggagattggcgaacaggtgagggtgattgcgcaggcagccagcacgattgctgaggaaaacgagcgtctgctgcgggtacctgaagcgaacggtaatctcctggccatgctgagcgaaagcaccacgggtgtggttcaggcgatgaacgccctgcacgatgccgcgctgcagattgccgacagcagcggcgcgctggtgcaactggccagccgtgcgtacagctattcgctgcataacgaagagggcatttttgccgtcgagtcgcgcaatctggccagccgctgcgcgcgttcgtcgaaagaactccgggcgctggttgacgatgcgatgatgcaggcgcaaagcggggcaccgtcggtgacgcagaataatagcgtgctgattgaagaggtttatacggtggcgaatgccttgcttcagcgcacaggcagctag

SEQ ID NO: 150611 - DNA, 561 bp, Enterobacter cloacae
gtgctggcaaaacaggtgattatcggtgcggcgatggggctgacgctgcaattgctgtttgccgccgtgcgcatggccggggagatcatcggtatgcagatggggctgtcgttcgccaccttctttgacccgggtgccgggaacagcccggtgatctcacgctttctcaacctgctggtgacgctgctgtttctcgcttttaacggtcatctctggttgctggcgctgctggcggacaccttccagacgctgccgatagacgccacgccgctgcacgcgggcgggtttatgtacctggtcacccatgcggggatgatcttcagccaggggctgatgctggggctgcccgtcattgcgctgctgctgtgcatcaactttatcctcggactgttaaaccgcctgacgccgcagctctctatctttgtgattggcttcccgctgacgctcaccttcggcatgctggcgctgtttctgattgccgaaacgctggccccattctttgagcgcctgatggctaccgggtttgatatccttgccgggctgattcaggcgctggtataa

SEQ ID NO: 150612 - DNA, 369 bp, Enterobacter cloacae
atgaacgccactgattcccttccggccactggctcgatgctgatgacggttaccggcgcgctggcgttgattatcctgctgatggtggtgatggcctgggctgcccgccgtagcggactggcgcgtcggcttaacgacgcccagggcaacatgaccctggtggcgacccagtcgctggggccgcgtgagcgcctggtgctggttgacgtgggtgaacagcgtctggtgctgggcgtcaccgcctcgcagattacctgcctcgccacgcaggcgcgcccggaaaacgccccacaggcctccgcgcccgcgacgttcccgctgatgctggaaaagctgcgtcagaaataccgtccaggaggtgagcagtga

SEQ ID NO: 150613 - DNA, 1062 bp, Enterobacter cloacae
atgaacatagatattgccgccctgttactgggtgggggagcacagggcaaaccgaagggcggtttactggctgacgacggcttcagcctggcgctggatgacaagctggctgaactggtgcagcttttcccgggactcgacccgcaggcgctggcagccatgccggaagccgcgctggcggggttgtccgcagatttactgccgcaacagcttgccgacgacgcgccggtaacggatgccgacggtatgctgctcgccgcgccgccggggctggcagaggtcctgaacggggtttcgctcaccaacggtgagggtgaagagagcccgcagtggcagctgcaacagctggtgacccgcagcgtcacggggacagaaacggtcaaccctgcgaagggcgtagcgaacgggaaggctcctgagcctgagggcaaaaccgtttctccgctcatgaccgccgccgataaaaccccggcggccaatgccacgccgctgacggcgcagtctgcaccgctcaccagtgagacgatggtcacgccagagatgcctgcggccacatcggcgaatgccgtggcgctgcctgccgccgtacgcaccagcgtcgcgcacgccccgcagcaggtggtcaccgttaaccatccgccagaaacgccggagtggaagcagtcggtcagccagcatatcgccatctttagccgtaacgggctgcacagcgcggagatccgcctgcacccggaagagctgggatcgctgcagatttccctgcgcgtgcagcaggatcaggcgcagatccatatcgtcagcgagcatgcccacattcgtcacgccatggagcaggccatgccgcagctgcgtgccgcgatggcggaatcgggtattcagcttggccaggccaacgtgagcgcggaaggacagcagtttgccgccggtgagcagggccaaaacgcatcgggtgacgagcacggtgcccaggaaggggaagagcaatcggttgaagaggagatcgtgcctactttattaaccactactcccggaaatatatacggaataaatacctttgcctga

SEQ ID NO: 150614 - DNA, 405 bp, Enterobacter cloacae
atgagagcagtgcttgcgctgcttctggtgtcgccgctggctgtcgcggcggacggttcctggagcggagagagctttggcggcacgctgacccgggggcaaatggtactgaaaagcaaaccggtgcaaagcccctcacccctgcccgctggcgcagtggcctcgcgcgtgtactggaagattcagacagacggcctgacccccgccgggtttcgcattcgcctgtgcagcaccacccgctgcctgaggctgcccggctttgccggggagctgcccctgcctgccgggataccagccgccgggccgtttcgttttgagtattattccgtggcgggggggcgtttcgacgcgccgctgcatgtgctgagtaatcaggtgacggtgagttatcgcaaccggggttaa

SEQ ID NO: 150615 - DNA, 228 bp, Enterobacter cloacae
ttgcagcctgaaaaagcgtggcagccccgcccgctggcagaagtaagagcacaaattcttcaactggataacaccatcctgaacctgattagccggcaaatcatgaccggtggcggatttggtgaagagcaggaccgccagctctccgggttgctgaacgataagcagatctcagcgctggagaaggcgcaactgatcgacgcgctcggggaaatcaaacgtcgataa

SEQ ID NO: 150616 - DNA, 1437 bp, Enterobacter cloacae
atggatacggataattttttgaataaatataacccgttgctatgcaaattttttctggcggcctcggattttatattttttaacgtttcactcgcactttcaattggttgtgtgtattggatttttaacgatctctatcgttttatccccgataaccaacttgagatgcgtatcatttcccacatcatattaagtataatttgtgtgggatggttctgggttcggttgcggcattattcctatcgaaaaccattttggtttgaattaaaggaaattatccgtactatcgtaatttttgctgtttttgacctggcgcttgttgccttttctaaatggcagttctcacgatatgtgtgggttttttgctggacctttgccttaatcctgcttccattctttagagccatgacgaagcatcttcttaatcgtcttggtatctggaagaaaaaaaccatcatcatgggaagcggaagcaatgctgttgaggcttacttcgcgttgcagagcgaagaaatgctcggtttcgatgtcgtggccttctatgatgaagaatctacggaatcgatgctccagggactgcctgttttgcgtgaccccgaaattctttggcagatgaagaaaacaggggatattcatttcatcgtcgcatttgaaatggaaaacagcgataagaccctaaactggttgcgagaactgtcaaagaaagactgtcgttctgttacggtgataccttctttacgaggtttaccgctatataataccgatatgtcatttatcttcagccacgaagttatgcttcttcgaatccataataatctggcgaagaggacttctcgtttcctgaaacgcacattcgatattgtttgttcgtcactgatcatcctggttgcgtcacctttgcttatttatctctggtataaagtgacacgtgatggtggcccggcaatctatggacatatgcgcgtcgggcgacatggtaagcttttcccatgttataaattccgctctatggtcctgaattcacaggaggttttgcaaaagcttcttgattcggatccggcggcccgtgaagagtgggatcgtgatttcaagttaaaaaatgaccccaggatcacttcggtaggtcggtttattcggaaaactagccttgatgaactgcctcagttattcaacgtccttaaagggcaaatgagtctggttgggccgcgtcctattatttctgaagaactgcctcgatatgatgataatgtcgattactatctgatggcgaaacctggcatgacaggtttatggcaggtgagtggccgtaatgatgttgattacgatacgcgcgtctactttgactcctggtatgtaaaaaactggtcgctctggaatgatatcgcgattctgttcaaaactgtgaaggtcgttcttcatcgtgatggtgcatattaa

SEQ ID NO: 150617 - DNA, 579 bp, Enterobacter cloacae
atgcctaaagaaggctataccgagatggtcgcaaaaattctcgaccatgagatgattgaggtcagaacggatactgagttttctgcggcagaaagcactgcgtatgaacatgtgttctggtcaggagccctggatggatactttaacttcagcgaagggcggcttggctatcgcacattggactttgaaaaattctccgcggaaggcgactatcagggtacagcagtgatcaactattgtgaagaagacgtaccttatactcgtatcaccgagcataagcatttttcaccctgggaatcacacgaaaatactacctgctatcgtgagtttagccgtttttgtaccgaaaacgatgtgccttattacccgattcgtatggtaaaagagaaagaattattaaaccgctatctcgacaaggccatggcactccgtaatacaacttttgttggccgtctgggtacctatcgctatcttgatatggatgtcactatccgcgaagctattgatgtggcaaacaaatatctcgaatgccaaaaaaatcaggagccgatgcccgtatttaatataaatccgcgataa

SEQ ID NO: 150618 - DNA, 366 bp, Enterobacter cloacae
atgacacgcagaacagctttcaatggctcagcatcaggtcgtcgtcgtgagcgtcgtgcagcgcttcagaatgcggtaacggcaagctcagaagtattgcatcgccctactctcagccgtgcacagattcaggctaaaggcactcacgaaacacctaagcgcattgaagacgctaagccgatcaagttcatggtgcaggacgcattctggcagcttgaagagtacaagcgcaaccttgagcgtgcagcgattgtgtatgcgaacgaattcgggcgtaagcaggatgtgagcggcgcagtctgcttgccggaagtggcgattttcgcagctggtcatcgtacaagtaaacaggttacagcgaggtga

SEQ ID NO: 150619 - DNA, 303 bp, Enterobacter cloacae
atggcatttgtttcgcagagaaacataaacggttggcaaaagtcgccgagcgtacgcttcagaaaaacaaagtctggggcgggtggcggcagcattagtaaggccgttccattgcgtggaaagcgcattgacattcagattgatgaggaaacaagaaaggtaaggctaggaatcgatcagcaaggcgtgtcatgcaatgcaacaggctccttttcatgctcactgaatatcttccgcattgttggggataagaaaatcgacctgacttatggtgatgatggttggtggtatggggattattag

SEQ ID NO: 150620 - DNA, 195 bp, Enterobacter cloacae
atgaaaaacgaatcagcatttccaattccagctacggaataccatggcatggattcaggcatgacattgcgtgattacttcgccgctaaggcaatgcagggaattattagtagcgattgcaattacggggcgtttggtgatttggcaagcgatgcgtactgcattgctgacgccatgctggaagctcgcgaatag

SEQ ID NO: 150621 - DNA, 387 bp, Enterobacter cloacae
atgagcactgaagaatatgtaattgctgatgaaagtctttttgattttacggctggcgtatattgcggagtcttaatgcctgaagatgtgatgaaaaaactttctaagttgcaggctaaatacttacaagacgttaagcgacttcttcttgaaaacaaggatagattgcatccttcctcatggagtctttattaccctgacggaaagcaaacatcatttaagtacattgataccagctatcacattgatatcgaggacagaattaagcacgcaacaatgtcacatcagccaaagcatgagcctgtcgtctttatcgcgaatggtcatgaagatgcagagcgaatggctaatgcacacttcgaagcaactggcacaacagccgcttaa

SEQ ID NO: 150622 - DNA, 132 bp, Enterobacter cloacae
atgacatttgctatcgcgggcggtgccgtcgtgtccgcctattacccaaccgaatccgaattatccaaacgtgttcgccgtcttattcgtgctgccagtaagcacctggagggtttatgtcaccagttataa

SEQ ID NO: 150623 - DNA, 147 bp, Enterobacter cloacae
atgtcaccagttataaatcacagcctgcttaaagcagcgcagagcaaagctgtcattgctcgctatctcggtgatggccgcatgtggcaagaggctcatgaagccatgaagaccgcaatcaatcatccgtggtaccgaaaatcatga

SEQ ID NO: 150624 - DNA, 171 bp, Enterobacter cloacae
atgcagccgacaacaacagtgaaagagagtcagctacagcgccgcatgacaacgacacaggctctgtggtggcgtcacaagggtgacagagagcgtatgcgtatgtatctcaacctgtcgcgcttggaagtgcttaatcaacgttatttcctgggcggatgcccgttctaa

SEQ ID NO: 150625 - DNA, 873 bp, Enterobacter cloacae
atgaaatttgaaaaagccatgagaaagaaagccaagctacggctggcacttaccgggccaagtggttcaggtaaaacttacagcgcattactggttgccaaagggattggcggcaagattgctttcatcgacactgagaaagggagcgcatcactttattccgatgtggctgagtttgacgtgctggaacttgacccaccattctcaccagaacggttcatagaggcgattaagtccgcagaggatgctggatatgattctctggtgattgacagtatcacgcacgaatggggcggcgtaggtggctgccttgagctggtagacacaatcgcaaaagcaaaatatcgcggcaacagctggtcagcatggagcgagattaacccgcgacaccgcctgttccttgacgcaattcttcgttcgcctatgcacatcatcgccaccatgcgcagcaagaccgaaacagcccaggttgaagagaacggccgcaagaaggtcgccaagcttggcatgaagtcagagcagcgtgatggcgttgaatacgagttcactaccgtactggatatcgcacatgaaacacatcatgcgatcgccagcaaagaccgtacaaaactcttctctaactcagaccctgtaatcctcagcgaggaaaccggcaagcagcttcttaactggctggagtcaggcgtaaaccctcacgaagaaacgcttaaatcattcgttgatatggctggaaatgcacaaagcatggatgaacttaagccattgtttgaagaggcatggagaacgcttcgcggcacagaataccagtcaaaagcaaaagaggtttacgacgctcgtaaatcagatttcgaaccagcagataaggcggcataa

SEQ ID NO: 150626 - DNA, 450 bp, Enterobacter cloacae
atggctagtagaggcgttaacaaggtaatcatcgtaggtcggttaggtcaggatccggaagtgcgctatgcgccttctggtgctgcatttgccaacatgaccgtagccacatcggagcagtggcgagacaagcaaactggcgagcagaaagagcagaccgaatggcatcgtgtggtgctgagcggaaagctggctgagattgctggagaatacctgcggaaaggatctgaagtgtatctggaaggaaagcttcgtacacgaaaatggacagatcagtcaggcgcagaaaaatacaccaccgaggttctggttggcgttggcggaacgctgcaaatgcttggcggtaagcgagaagcggatagtcagccaaagcagaacaatagccagccgcaacagcctaagcaggctagcgaacctccgatggacttcgacgacgacattcccttctga

SEQ ID NO: 150627 - DNA, 345 bp, Enterobacter cloacae
atgtcactgatgaaaatggttattggttacttccgtgcgcccaaaaaactggaatctaaggacgaagttattgccagggtatgtgctggtctggagctttactaccagcaaaaagagagcggaactcttcctaaggatgaacgcacacctgagcagattcaggatgcacaggacgattactggatagaaaagctcacaaggaaacgtgaagcacagctctggcatgacaacttcatggcctcattctctcccggctgggcaacagtcggaccgaaacaacccaccttcaacagcgacatctaccgcgacacttatggacgccttggcgctgtcaaaagtaactga

SEQ ID NO: 150628 - DNA, 615 bp, Enterobacter cloacae
atgtctgaccagagcaaatattatgactactacatggttgaaggtgatgatgtaaaagcgctcatcaagtcatacgatacaattcgagacaagcgtaatgcactacttccggaagcggttaaaaaggtaggcgctatagcatggactacaaccagtaactggggtggtggtggtggactcttagagaactttgtttgggaaaaggacttcaaatttccttgtccaatgacgattaaaagagaggattttttcgatgggaagcgcgtagtaattgctcgcgggaaaggaaatacaaaggaaggcagggaatttaacaaagcgcttgatgcggtgcgtcaagaggttaacaaggaattgaagtctttgcctgaatggtcagatttcatcattaaccactatggaattatgcgaactggcataggtggaccatcagggaaaggctttggatttgccatgctgtcaactcatggtggtcgctatccaggccgagatgatgctcttcttttcagaattccgaacgataaaagcgataaccatatctctgcagtcataccagaaaacttcaaaaaaatgacgtatgggcagttttacgacatcgttaatacagacaaatag

SEQ ID NO: 150629 - DNA, 153 bp, Enterobacter cloacae
atgaccaacgaatttttagcatggtttgcgcagcacatcggagagcgccctttctttagcgaagaggaaaaagaagagctgaaaacttacacatggcttgcgtggagggattctcgacgctcactggaaaaggaaaatttagaaacctactga

SEQ ID NO: 150630 - DNA, 156 bp, Enterobacter cloacae
atggaatcacacagcctcacactcgatgaggcctgtgcatttctcaagatatcaattggagacagcaatgagcgatacactcatgccgatcaccgatgtgtgcgcggcaaccggatacaagaagccaaccatttacgaatggatgcgagacggtaa

SEQ ID NO: 150631 - DNA, 1188 bp, Enterobacter cloacae
atgccattaaccgacacaaaaatcagaaatgcaaaacctcaggagaggccttactcgcttcaggatgggcagggtctctatcttgatgtcaggcctaccggtgcaaagatatggcgataccggttctggattacaccaaaaaaagacggtcgctacacgattggagagtaccctggagtttcccttgctgatgcacgaagagaaagagagtgggctcgtgagcaggtgaagcagggaaagaatccgaccattgtcaaagatactgagaagctgatggtgatgggtgacgctgagaacaccttcaaatccatcgctgaagaatggtatgagcgcaagtgtcagacgtgggcagagaagacgcagatagttaaccgcgggttccttgacaagcacatcctgccgtccattggaaagataccagttaaggacattaaggcagcgcacatactcgccttaatgctctcactggagaaagctggtaacgcctattctgccggaaaggtgagacagatatgttcggctgtattttgctatgcggtagctacgctgagagcggaagttgatccttcttatgcgctacggggggcagtgatgcagaagcctacaacgcacgccaggccagcgacaacaggagagttgcgtcagctattcgttgcgctacgtaattataaaagccccgttatggtcatctgcataaaaatgctggttatgacattcgtgcgtcaacaggagcttaggtttgccaggtgggaagatatcagctttgaaaaggctgaatggataatcccgaaagaggtgatgaagaaacgccgcgaacatcgcgttccgttgtgtgagcatgttatctcattgcttgaggaacttaaacctctgaccggtgataaagaatatctcttccccagcccatcgaaggctggacagcctattgccaaaaccactattaaccgtgctatcgagtatcagggatttgcaagcggtgagatcaccggacatgacttccgtgccacggcatccaccgctttatatgagcaaggcttcaggccagaagtgatagaggcacaactggcgcatcagcaaaagaatagagtcgctgccgcgtataaccatgcggagtatatgaaagagagaagggaaatgatggaatggtggggcggtgttattgctgacctgatcgcggacaagaagtga

SEQ ID NO: 150632 - DNA, 222 bp, Enterobacter cloacae
atggcgggcgaggctgccgtgtccgaccccatcggcctggcactggcatgggcagcctccctggcctcgatcgcggtggcggtcgtggccgcaggtcacgcgggcgtctacaagcgtgatgagcagtccccacggcgtggggactgctcatcagcggcggcactgccctcccgctcgctggccatccgttcgcgtgacggcgcggcccatctgttcacctga

SEQ ID NO: 150633 - DNA, 297 bp, Enterobacter cloacae; identical to SEQ ID NO: 144913

SEQ ID NO: 150634 - DNA, 309 bp, Enterobacter cloacae
gtgcgcgactacctgctgcgcggattgctgcgtccggtggcgtgcaccccgggcggctatggcctgttcgatgatgccgccttgcaacggctgtgcttcgtgcgggcggccttcgaggcgggcatcggcctggacgcgctggcgcggctgtgccgggcgctggatgctgcggacggcgatgaagcggccgcgcagcttgccgttctgcgccagttcgtcgagcgtcggcgcgaagcgttggccgatctggaggtgcagttggccaccatgccgaccgagccggcacagcacgcggagagtctgccatga

SEQ ID NO: 150635 - DNA, 237 bp, Enterobacter cloacae; identical to SEQ ID NO: 121649

SEQ ID NO: 150636 - DNA, 285 bp, Enterobacter cloacae
atgtaccagtttatactgggaaaaatctccaccctttgcgcggacccgctggcgtcaacgctcgcagatatggcacctcagggtgcgcgaaaccgttcctggctggcaggcaggacgctgctcgcccggacattatccccgtctccgctgcccgacattgtgtacggtgaacaggggaaacccgcctttgcgaaagatcaccggctctggtttaacctgagccacagcggggacgacattgccctgctggtgagcgatgaaggtgaagtaggctgcgatatctaa

SEQ ID NO: 150637 - DNA, 1902 bp, Enterobacter cloacae
atgtctgttgagttaaaagtatttggtggtgcttacttcccaaaagataaagcattaaaaaaacacccagatttaaaaccgcttgcaactgcagttaatgcagccacaaaagcgatcgccgaagccgttattttcggcaagctggcggcagaacaccctgaacatattgatgattattttaaggtgaaaatctgggaacaccgcgaagaacttccgtgccctgattttgacgttttctcatctgagtttttcgaaagtgtagcagtatggaatgtgaatgctggtgaaccagctgcggcaccacagccagaagctgaagcaaaggaagaatgggaggacaataagactcaggaagaaattaaaatcgttgcacagctcgatctggcatcccgcgcagcttgtctggcactgttcggcccggtccctggaatcacttcagcgcagtacggccagatcgtcgatctgaaaaatgatgatgaacccagctttgctcgcgagcttgcagaagcactggcaaaagagcgccgcgcgcttgagctggcgccggaacgccaggagcaattgctctcctggttacgtgagaacaccaaagaatctgcgcagtggccggatatcaaaaagcagatcgctaaatggatcgataccccagttgataagcgacctcagtctgtcaccaccacagaagaaaaccgtacagacaccggctccacgttgggtggtggcaacaagacagaccgcagcccggatctggttcataacctctctacgctgcgtatcgaagtggctgttgccattctcagcatgtacgacgagatcgacatttactggatcccgaataaatacatgattccagcgaaagccatggccgaagcagaacaggatccccgcttcacagcatggtggaaaaaactgcgtagcaccccaggcattctggactattcccgcgcggccataatcgcgttgattaaatccgccccggaagacctctggatcgatcctgtcgcattacgtgagtatatcaatcgcgagctggttgaatgtgaccatgcgaaccctgaccagaaaacggtagagatcgcctgccgccctaaacctcgtactaattctgagaaaaaagaaaatgatgaaaccgaatcgactgtaccgggcgaaactgagctaccagcagtttgcccagggaaagctgcgcaactcgaaaaagaactcaacgagacattcgctcacagctccgcgccagaacagcagaccactgaccagccacggatggagaacctgggcggcggagtcttctctgttgaagcactgattaataattccccctcaaatgaggtcgaaaagcaggaagtgccaccagcgccaaatgaccgcgaaattgcgattctgcatgcgctgaatgaccttatttctggacgcactaacatcatggggaaagaagaggcagagggcgtagtggcatgtgccggccagctcgtttcggatgttgtcccgttactgatggaagatatcaccgccacagaattttgcctgtctcctgatttcactgacgaggagatccacgacgtggccaccaccatgctggatcgctggtccgacgatgttagcgttcgtcagaaaatcgctcttgatgcgatcgtggaataccgccgcccggcaccaccaaaatctgtcgtgctcgatccgccggccgttactgcaaatccgattgccacccccgatccagcacctgaaacaaacgcgccgctttcgtctgtgacctacctgcagcagctgaccattgcagcgcttcagggcctatgttccaacccagcttattgcaatcagtatgaagaatttccggctatggccgccgggcttgcccgcagcgttatcaaccatcaggaaggctcctgtgcgtctgattaa

SEQ ID NO: 150638 - DNA, 201 bp, Enterobacter cloacae
atgcaaaaacaaaagctaaccccgagggaattctggcttctggttaaagcaaaagccgatgccaccctcgcagaaattaacaatcttgcttctcgcggggattgctcgcttgaatggcatcttttggaagtagccagcctttcatctctattgaaagagcaaggcgaagttcctccattgacatctcacgacactgtttaa

SEQ ID NO: 150639 - DNA, 258 bp, Enterobacter cloacae
atgcaactcaatgactttttaaaagctggtgggccaaagatccgcaaggagctggagcaacacctcggtatatcgaaatcttacctctcccaacttgcaacggggcgggctgctatttcgccaagccgctgcatcgttatcgaggctttcaccaatggagaggtttctcgttctgatttgcgtccaggcgattgggccgaaatttggcctgactacgagccaaaaaatagcacgacaaagcagaaggatactgactga

SEQ ID NO: 150640 - DNA, 657 bp, Enterobacter cloacae
atggaatctgtagtcgacgcattgaaagccatgggtaaagcaacctatcacgaagtggcagcacgcctggatattgaacccgtagaggccctgaaaatgctgcgcgagcacaaggaagaggggttgtgcgatttcttggatggagcctggtcggttggtaccgcgaaagagcagaagccgaagcgtatcagaccaaagcagccatcgcagctggtggagagggtattgtcagcaatgcaggggcagggggctatgagtgccaaccaggttgcagaaaaacttggtaaaggttcgcgagctctgaatgcctcgctgggtgcgatgtgcaaggacggtctggtcctgcgccatgtggacggaaaaaatatcacctggagcctggcgggtgaaccggaagttcatccagaactgcaggcgcctccagtaccggacgtcaagttatcatcagcgccagacagcacaaccctggaagaaattattggggaaatcccaactttcgccagccgtccggatgatctgattattccgtcaccgcgttatatctcaactgaaatccgccgcacgaaagcgaagctggcatgcctgcagcgtctgcagggggccgttcgcgagctgcgccgccacaaacatctgctgcaggggatgggaaatgactaa

SEQ ID NO: 150641 - DNA, 348 bp, Enterobacter cloacae
atgaccgcgattaccagagaattcacaaaagagcagttaatcgcaaaggcgcaagagcaaattgaattcattcgtcgcacacgtgttacaggcgctgggcgggaacatgttgatatgtgcggggagctattcgaaatcgcgctggcaaccctggaggccgagcaggtggcctggttgtggtcacatagaaaacatccgagtgaagttacccttattcgacctgaagatgatgagcgagcggaaggggctcggtggtctggctggcattgccagccgcttacagcacaagtgatatcagaggatctacattcaatatcacttcagcaggaggtgaagaagtgtacctga

SEQ ID NO: 150642 - DNA, 324 bp, Enterobacter cloacae
atgggttttccatcaccagcagccgactacgcagaacacacgctcactattaccagccttttcggttatgacgataactgccgaaccatagaaacttcattcgggcacgcgatcataaacgtcgccatgaaaccgaaaatgggtgacacggtcctgatttctttctgcggaagtctggagtacgcgaaactccatgggaaagcgctgattacgcgggacggcgaggctattgagggcgatgcgttggatgatgtgaccgtaatgggtgtggtaacgcacctcctaaatcgtgtgaaagatgcagacgacaggccggtgatatag

SEQ ID NO: 150643 - DNA, 192 bp, Enterobacter cloacae
atgaaagaaggttattattggatccagcataacggaaaagtacaggtagcttattattctgatggcgtgaccgaagacctggaaacaggtcaaacgattagcggtgtatggcatctaacgattggtgatgacatttgtcacgatggggaggccgaagttctcgaaggtccgatttctccacctattagctaa

SEQ ID NO: 150644 - DNA, 501 bp, Enterobacter cloacae
atgcgcataaaaaagccaccagcggatgccagtggcttgggtgtggcaatcaggaatggattcgaaccattgagccagaagatattggtcgtctgcaccatcctccagcttatagcagcgtcacgcttcgtccggatcggtattttccgacatctcgcgcacctgattaatgtgtttcgacattatcacaggcactcagtgaatgcctgcttgaatgcctatccctttgaagggatatttagtgctttatcccatggaggggatattgccattactatgagcctacccatggttatgacgataaaaccacccaagatagctactgtttgtatatcagggtgttgctttgtattagccctggttaaggtaaacattcagcccgtcagtggttggacactggcgcactctgtcgcggggggatggctgattacctccgaaaaggaaaatacccatgggttccatgtcagaactggaaaaagcagttgcagatttacaacgtga

SEQ ID NO: 150645 - DNA, 588 bp, Enterobacter cloacae
gtgccgaagccaaagaaccgggcgcgccaccgtccgaaagccagcgcaaaaagtaattcgtggttccgcatgcaggccagcaataacagcgaggccgacatttttatttatgacgaaatcgggtactggggcgtaacggcgaagcagttcgtcaatgatctccgggcacttggtgacatcacccacatcaaccttcacatcaactcacccggtggtgatgtcttcgacggtattgctatctataacgcgctgaagcaccacggtgcggcgattaccgttcatatcgacggcctggcggcctccatggcctcggtgatcgcgatggtaggcaatccggtcatcatgcctgaaaacacgatgatgatgatccattatccttcacactacctcatgggtacgcatgaagaaccggattcattcattaactcattgttaactatgaagaagaaaggaatgttgtttgcattgcttttctactgtttttcggcgttgcagctaagtgtgtattgcaatgtgtattgcagaatgaggttttatggctggcgagaacaagttaagcgacaaggcgctaaaagccttacatggtaa

SEQ ID NO: 150646 - DNA, 225 bp, Enterobacter cloacae
atggctatgttatccgtagtgaaaaaagaagatctccagtacatgcctgaccttgacagaatgattcgcgaacctgaatgccgggctatgaccacgctgtctaactcaacgcgctggcgcatggaacaggaaggaaaatttcctaagcgaatcaaaattgggccgtcagccgttgcatatcgactttctgaggtacaagcttggattcggggggaatggctctga

SEQ ID NO: 150647 - DNA, 951 bp, Enterobacter cloacae
atgctactcgaagatccactacatttccctgcctacattgtccttgaggagttggcatattggttcaaagacccagacggaatatttattcgggatttccaaagtgattccttcaactcaagattatttgaattatatttaaatgccgtattttacgaactcgacttcgagatgaacagagaatacaaccaacctgattttttactctcgaaattcggtgaagttatctctgtagaggctgtaagtattgctgaaacggaagatcctcttgaaagaaaagaagttaaccaagaacaaatggatgagttaagaacgcatgtactcaaggtgatgcctttcaagtttgcaagaagtttgttaaaaaaggtccggcatcgtcctgagccagaaaaagttcattattgggaactcgaccatactaaaaataaaccatttattatagccatgcaagattattcaaaaagaatgtctatggcgttttcaagtgaggctctacatagttatttgtatggtgttgatatagagtctggtacatcgattgaaaaacacattgatggtaatagagttataaaatcaaatttttttggatctgaacaaaacaattatgtgtctgcagttttactaactactcaagctaccataccaaaatttaatcgtatgggaatccttgcaggtatagaagcaaaaggatttaaaattctcgttaatggtgttaaaacagaccaagaggctaatcctttcccttttacggcagatgtaagcgatcctaactaccaagaaccatggtgtacagccgtctatatgtatcataatccaaacgctattcaccccgttgactatagattatttccaaatatgatacatgtcttccaaaaagaagatcatttcgaagaactagtcccgagagactatataattcaatcaacaacaatgatatttaaaacagaataa

SEQ ID NO: 150648 - DNA, 1692 bp, Enterobacter cloacae
atgtccgttttatccttagaacagttcatgaccacaccccctgagcagatgccctacgatattatcattgttggcgcgggctctgccggggcagtgctggcagcacgtcttagcgaagatgagcagacacgtgttctgctgctggaatatggtccgtcttttgatcccgatggctatccggaactgctttacagcggcaatattatcgcggcgaatggcgatcagcgatatgaatggggctattacgccagcccggtcaggcagcccgatcccgtctatactccacgcggcaaaaccctcggcggaagttcagccattaacgccgccgtcgcctgccgggcgctcccctgggatttcgaacgcatcacggcaaaagggcttaagggctggaaatatgaggatgtgctgccctactacaaaaagatggaaacctaccctttgggtgaggataaatatcatggtcgtgaaggtccacttccgatccatcagatgacgttagaggagatcaccccagttcagcgggccaccctggaagcggcgtggcagttgggttttgcgcgggttgaagactttaaccacccagaagccaacaacggcgccgggcccaatccgatgaatatcattaacggcgttcgggtgaataccggaatggcatggcttacccgcaaggtacgccagcgcccgaacctgaccatcgtgtatggggcgctcacggacaagctgatcgttgaggagaaccgggtcaaaggcgtgcagcttgccgacgggaaacagtgctttgcccgccagacaatcctcagcgccggcgcctatggttccgccgcgatattgctgcgctcaggcatcggcccacgccaccatctggaatcgctgtctatccccgtcgtgaaagaggccccggtgggtgagcgtctgcgggatcacgccttctactggataaacttcgccggaaaagccgaacttaagggccacgagcatccggttgtcgccgcccagatctggacgaattcaagctttgccaaatcagcccgcgaaatggacattgccatttccccttcgcatctgttacctgcagacctcagcccaaccggcgtcgccttctccctcgggctggaactcatgcattgcagctccacaggctacatccgcctgaagagccgtgaccctcacgatgcaccggaaatagcgcttaatcacctgacgacagaagatgacatgcgccggatggtcgagtgttttcgtctggcacgcctgctggcggatatgccgccgctgcgccagctcattgagtacgaaatcagccccggagcctcggtcggggatgatgaatctgacattcgccaggctctggcgcagggggttagcaccctccagcacccctgctccaccgcaccgatggggccccctgatgacccctatgccgtggtggatgaaaacgggtgcctttacggtctgcatgacttaagggtcatcgacgcatcgatcctgcccgaaatcccgctcatcaacctcaatccgaccatcatcatgatggcagaaaaactggctgatgcgctgcgtaacgatattcatgaggagaggaaaaatggtatccatcaagccggaaaacagcgccagaataatgaaacaatcgtacgacgtcatagtcgcaggcggtggttcagcgggtgcggttctcgccgcacgtcttag

SEQ ID NO: 150649 - DNA, 1428 bp, Enterobacter cloacae
ttgctgctggagggcggccccgtctttgcccccgatggctggccgcatgaactggcgcaaagccactctgttggcggcggtgattacgtctgggaacacggcgcggcaacgggaaccgatcatacctctggtcatctgcgggccaaagtgctcggtggcggctccacgatcaacgcaggcgcgtttgttcgcgcccctaaatccgattttgaccgctgggtaaagcgcggactgagcgactggtcgtttgatagggtcttaccgtggttcaaacggcttgaaaatgccgactatggcgacgatcgctggcatggccgccacggccccgttccggtgcgattacctgcgctggagacactcagtccggcaagtcaggcgttttatcacgcctgtcgcgctcacggctttgccgccattgacgatattaacggcgaacaacaacacggcgtcgccatctatccactgaatgttgtcaacggcatccggcaaaacactggcatggtctacctgacggcggaggttcgggcgcgcaagaatctgtcaattgtcggcatgacggttgtggataaagcgcttatagacaattcgcgggtgaacggcatacagcttgcggatgggacacggatcgctgccgactgcgtgttcctttgtgccggtgcggccggtacgccagccattctgttacgctccggcattggtcctgctgacgatttacgccgtctggaaatcccgctaaaacaggatctccccgttggccgcaatttgcaggaacaacccgtgaacgggatcatgctggcgacctctgcagaacatgccagctatcccccaataggtgcaacgctctggacacaatcttcgctggccgcagccgacgaactggatctgtatatcagcaataaccacttcgtcgatccaggactgtttccacacggggcgggtttccagctctttttcaccgtggctcgcccctgtgcccgtgggcgtctgacactgacgagccgcaatccgctgctcgcccccagcatcgatctcaatctgctgggcgacgagcgcgacgtcatacggatggtcgaagcggtgaagttgtcccgggcactggtgcaggaaggtccattgcaggcactggttactggcgaagtcccggcagttaaaggcggtaaactcgccaaaacagaccagcagatagctgaggagcagcgtgcgacggtgaaaagcaatctacacctcagcgcgacagcaccgatgggtaaagaaagcgatccggcagcagtcgtggacgcgtgcggcaacgtcttcggcattaacgggctgtttgtcgtcgatgcctcgttgttcccggacgttccctctcaggcgactaacccggatgtgatcatggcggcagaatatctcgccagccgtttttccggctccctgaacggcgcatag

SEQ ID NO: 150650 - DNA, 930 bp, Enterobacter cloacae
gtgaacaagttcgtggagatgagcacgtttgtttcggttgttgagtcgcaaagctttgttggcgcggcggcaaagctgggaacatcaaaatcggtggtcagccagcgcgtcaagatgctggagaaacggcttggcgcaagcttgctggagcgtgggccccgccttagcctgacggaagcgggtctgcttttttatcaggagtgcgtgcgtatccttgacgaagtcacacaggcggaagaagccgtggcaccctcacgcagcgagcttcacggcgagctgcgtatcgccacctcgcatacctttatgaccacccatctgtcgacgatcctggccggatttattggcgctcatccgggactgtctctcgatatctcgacagaagatcggcagattaatatgcatcagcccgactttgatatcgccatccgcctcggtctcgtcccggactctacgctcatcgcccgcacgctggcgcgcaatctgacctggctgtgcgcgagcccggactatctggcgcaacggggcacgcctgtgcaccccgttgagctggagcagcatgacggactgttatatacccaccgtgcgccaggcggttgctggcagctactgcataacgggcagcggcagaactggcgcgtcagaaatcgtctgcgttcggataatgctttcagcctgctggaagccgccaaagcaggacttgggattgtggtcatgccgttatttttaggtgctgatgcgatattgcgcggagaactgaatatcattttacccggctggcaaccggatggtggcaacattgtggccctgtatcgccagacgcgtcgcgcctcgccggtgatccaggcgctggtcaacctggtcgcagaacagctagggccagagccagaatgggaaaaaaagctaaggctggccggcctactgcccgaataa

SEQ ID NO: 150651 - DNA, 390 bp, Enterobacter cloacae
atgggattcccgagtcctgcagcagactttgcagaacagcgcatatcgcttgatgagcgcatcgtgtcgagaccagcggctacgtacttcatgcgtgcaggcgcaacgcattaccgggaaggcatccttaaaggtgcaatgctggttgtggatgcttcactaaatccatgtgatggctcattgctcgtctgtgcagtagatggagaattcaagtttaagcgatacagaactcatcctgagtcctatcttgagaatctggagaatggtaagcgtgaaaggctgcgcaaggttggtgagatatcagacgacgacaagccgatattcggagtcatcacgtacatcatcaatgatgcgcgttctggtgagtttgatgattgtccggtgatgtga

SEQ ID NO: 150652 - DNA, 945 bp, Enterobacter cloacae
atgaagctttttttatgtaacacgcctcttcaggccatgattgctgcaaggataattgatgaggagggcctttccctccatgagtgctctttgttgtatgtttgtgatggcctgaacgacaagattcattcttctttcgtaagactgtcttctttcatgaagtatgcaaagttgatacacagggccaggagtttatccggtgttagaagaatgagaaaattcatatcaagcataggaaatgttgacgaaatatatgttgcatgtatagatgacagcctcgctcactatgcaatcagtttcaccaaaggtgcgacaataaagacgtttgacgatggcactgcaaacattactccttccagtagatattttactggccgctctgggttaggctttagatcggcattattgaaagcatttcattttataaatgggaatagatataaccttgacttggtaaaagcagaatcagtattgcattattcaatctataaagattttgataacgtgatgaacaatgtgaagcatatacaaatcttcggagatgagcccattaaaaaaggtgtgtgccacttatttaatggtgtaaattattctaactattgcaaaagcaaaaaggatgcgaaatcgcttaaatcaaagatttatagctttttaaaatcccttgatggagatgttatctacagttctgtgagcgaaaaagaccaacaaatatttagcaattacatagtaaaacatgaactcattgatgttgaatatgtcaattctcttcgacaaagatacaaagttataaatatttatggatttgctgattatatgcaaaatcttttaattgatgagcctgggatagttatccaccccatatattcagatctgttacttggtgaagttaatgaatgctcgagagtcttatcctcacgttgtaagatagattccgtatgtttatga

SEQ ID NO: 150653 - DNA, 1341 bp, Enterobacter cloacae
atgggaattgcttttatttgtgggttgtggatttgtataatcgttgccaatattgtcttttcagatggtagcacgataataaattattgctccatatttttatggcttagcacttgcatatactttataaggaagaattactcctatgggattctttcagcgcaggtaatgcttgcttttaccactgctggtatttgttgcgctattgcagaatcaggtcaatggttaagtgaggttaaatattattccagtctgagcggagcaacagcaaggataatgtctctttgttttgttattttcttcttttcattttttacttttaaataccttagcagaatgagatctgttaggtttggcatgtccaataaattcaacaaagtattacttaactgtgttgttatagcgttctttgccttcacagtaacactatttattgttcatgtgatatatgggcacccaaatgactatggtgtagacagatattattactgggctaacattgcgccaaaatgggctgagtatgtaaaattcttactctctcagttcacagtctttattggtcttgcatatggtttatcacgtaaaaaacgatacgtaatactttttgtggtttctttacttgctcaattttcggttggcgacaagttttcaggcatgctatatgccacgatgacattcatcatacctattgttatattgctgaaagttaacatcgggaagcttatttttagcacaaggttcttatttatttcagtgatctttgtaacggctatgatgtcagcatcgtatttaagttatgttgcaataagtggtgcagggaatggcattgatagagttgtagacaggattgttttacaggggcagatgtggtgggcacttgacaactcatccaatatgagtagtaagggtctgggagagataatgagtaatttcattggcataggtaattctgatgaattttcgacgggaatattttaccttatgtctattattagtccaccatcgatattccagtggtttgctgataaaggaattaccatgactatgggtagtcctgttaatctaatttatttctttggttttcctctatctgtagtacctgcagcaattttagggataattgtaggagcaggctatcatatattctatagagcaatattgatttcagacgtcatattggtattttttggcgtaaagattatggactcaatatttagagcggttaccatgggtgagatattctatttgttctctctgaaggttcttgctggactcttcgcattcgtcttttatatgcttgcatcatgggctacaatacatcgaggagtaaaggcggcgtaa

SEQ ID NO: 150654 - DNA, 1899 bp, Enterobacter cloacae
atgattccagcagtggcgctgtcagaagtgttcgtggtgaacagccaggctgcaatgctcgctcttgatgcgcaggagggtgatgttgctaagcgtacagaccttggttactcgtttatcctagcttctgagccagcatcaactctgtctaactgggtacaagtcagtgacgatgttctggcacagcttggcctttcaaccggggccactgaggttggcgcagttgatgatgataacaactccactaccgttcagggcgctcttgcgctgaaggcatctaaggcctacttgtcagcaacaactggcgcagcgcgagtaaacacatcaagcggcgccactgtgcaggctttgtttgaccagctgaccggtggaacattcaacctaaagtacaggaactacaccgtatacaatcggctggatgaagagcttagtgtggcttctattgctggagttgatccgacaggcgctactgattcgacggcagcactgcaagatttctttgatacgctgcctaacggctcagaggtttatttccctgcggggacatataagattaccggtctggtgataaagaaccatagccttaaaattcgtggagcctaccgttacccatacggccaatcgacaacaaagataaaagctggcgcggacaatatcacgctgatgaagttcacgggcaatggctgccgcattgaaggcttactgtttgaaggtttcgaagccaacgccaccaccaatggattcggtaaaggcacaacatgtaaaggtttgaattttgaaccggcaacaggcactcttgctgatattgactcaactgtgaatgactgtattctttggtacttccagaccgggattgaagggcacggcaggaatttaaccgttacatacacagggttcacgttctgccgtttctgtgtggatctgtatggggtggtaagtgagcaattccgtggtcatgtcctaaacaataaccgtttccattcctgcggcggcaccgaagcggctactaaccccactattctgaattccgtttgtatcaggttaacgacgcctaacaccaataacgtcgataattacgcaggtaatatttctattctgaacaacgtgtgtgatggtggttgctaccagttcttcaaaggtcctttccatcgtggcagcatcatggcagacaacaacatgttccgtgttggtggtgcaggtgcgattgtcatcgacgtagataacacatcaactgcgggcaataccagtgcggacggcgcgcttatttctgataacataatgggcggtttcgacctacctgtttatcaaaatggcgttcaatattgccctgatatgggtattagattaacgcaagtgcgcggtgcgatactttccgaaaaccttattaacaaggtatggaaggacgggattaagctggttaactgttccgaaatagtcataaccgcagaagttaaagatcctagcgcaattgtaaaacaatcgactgcaacgctttacagttcagttgatatcgatgcgaactgtgaaaacataatgatcccgcaccttatgacccgttgcaccatagcaggctcacagttagctgcatacgtcaagaccgcgtgtgcctctacagtcattggtgaattgtacggtagcgcaagctacaccgccgcagggcctgttgttgaaactggcagtggttatacggttggcgatgtttctgcggtttcatccagaactaaacgcaccgctatagccggactgattaccggttccaactacccagcaggaaactacaagcctggtgatgtttgcaagtacattaacccagcagttactggctacaaagaggctgtttgtactgttgctggtaacggttcaggagccacatggaagaattcaggtgcgctagtataa

SEQ ID NO: 150655 - DNA, 201 bp, Enterobacter cloacae
atgccgctcaggctgaagctgctgcagaacaggccagcgactcagcgcaatcagcacttaccgcacagaatggtgctaacgctgcagctggtcaggcaagtgcttcagctaacgaagcggtacaggccgctgctgatgcagaaggagcggcagaggcggtatttggcagctcactacatgcaccgacaggggaagtattaa

SEQ ID NO: 150656 - DNA, 1023 bp, Enterobacter cloacae
atgaacttcacagatatcccggcacggattcttaaagcctttggccttaatggcctgaaaaacaccatccctacagattccagcacatcaacggataacaacggcgttgccacattcgataaaggttttccgcaaattacaatgcagccattaagcgcaggcggcattcctccatccggtaaggatatgaacggtattctttacgccttaagcctgaaagagcaatgggctgacgctggcatgagctacccgttcaacagcgactttgccaccgccatatcgggatacccgaaaggctcagttctcctgaactctcaacagtccgggaaatggctgaacctaaccgatggtaactctacttcgccagaatcactgacgggtgcaagcaccggctgggtgccattagataactacggtgtaacgaccatcaccggacttgcggcaaccaacgtcacgttaagttcattgcaggcggcaaaagaaaggatcgtacttactggcacgcttacaagcaacattgccatcattttcccggcatggatggcttcatggacggtggtaaataactgcactggtgcattcactgtaacctgcagaacggcttctggaacaggaattacggcagcaaccggtacgacagaaaagttgtattgcgatggtgtgaatatcactcgcgattttggcacggcgtcacaacgaaacgtaggtgacggatcgggaaatatacctgacatgtcgttttttcaaaattctaaatcatcatctggttacgccagacttcccggtggggtaatcatacaatgggggacagctagcacaggaacatctggtattactgtcaattttccaattccttttcccacattagttggctctgttaccgcaactgattctggtggagctcaggcaaactcagttgggcttacagttctttctctctcgcaggttagcttcttcggaagggcaattcaaagcggagccgcaagcaacactgcggttcgatggatagctatcggatattaa

SEQ ID NO: 150657 - DNA, 708 bp, Enterobacter cloacae
atgacaaagaaaggtgagttttcctttaagccgcaggatgtgaactgcgaggcaaacattaacgaatttattttcaatacgttaatgtctcgaaatgccttcatccagctcgtgatcgtaaataaggtaaaggatggcccgctactcgatgtcactccactggtaagtggatttgccgctgatggttcaaggaatagcaatacgccggtattcaatgtgccagtgtggaggcttcagcgcggggccagtgcagtgattatggacccagtggaaggtgatataggcctcatgctctgctgcgacagagacattaccaacgtcagaaatgagaagaaagaatccctcccggcgtctctgcgcgtacacaacaaatcagatggcatctatctcggtggagtgctgaacgcagagccaagccagtatgtgaagttcgcaaatgatgggattgacattgtctccccactggttgtgcaggtaaacggcaacacagttgtggtcaatgccgacgacaaaatctcgctcaatgctccaatcattgaggcaaacgggcagcttactcagggttctggtagcttcggtggtaacgcgacattcggtggaacgattaccgcgacaggagaagtcacggggaacggcattcacctcagtacgcataaacatggcggcgtacaaacaggctccggaaacaccggaacgccaacaaactaa

SEQ ID NO: 150658 - DNA, 861 bp, Enterobacter cloacae
atgtcctataaaaagcgcaacattaaaatccagttcactcttacggaccaggtatttgatggttctcaaggtccatcacaggacaacgttctcaccatagaaaacgccaaagctatcgttgaatacaacggctatggtggttctgcgcttaccacattgtcatgccgggtttatggcctgagcctgagcaatatggcgaagttaagctatgcgggaaacctgagaggaccaacgaagaataactacatgaaggtctgggcacaggatgagcttatctttgtggggacgataacatttgccacaaccgattttaatgaggctcctgatgctcctttggtcattgaggctcatgcgctaggtgcagaaaggtctctcccgtcacaaccattctctgtagagggaagtgtcgatgttatcgatgcgataaggtcaatcgccgaccctctggggattatggtttccgtgcttgaggacatcaaatttccactcagcaacccacatgtagtaggcgacccagtaagccagattatccagttggcgaagtccgcaaatctgaatattgactgcagcactggaattatccgcatctggtcaattaacggatcgtgggatgacattgttccttttgtttccaaagagcatggcctgattggctatccgacatggacaagagacggtctatacctcacgacaatgttctcatcaaacctcatagctccgagaaagatgaagctcgaaactgaccttcctggcgcttcagggatgtacaccataaatactgtaaggcacatcatctcggcctgggttgaaggcggtccgtggttttcatttgtcgtagcgaaccaggagacggagctgtaa

SEQ ID NO: 150659 - DNA, 312 bp, Enterobacter cloacae
atgcagacgatatctctccagccggttaaggggcagacattacaggtttcactcggcggtcagcgtgtaactctaagaattaatcagagaagcaccggcatgtttatcgatgtggcgttaagtggggtctggatagctcaaggggttctttgcctgaactgcaataaaatcatcagatacccgtacctgaagtttaagggtgagctgttctttgcagacacaaaaggcgattttgatcctgtttatgatgagctaggttcacgcttcaaacttttctacgccacggaagaagagatgagcaatgtcctataa

SEQ ID NO: 150660 - DNA, 801 bp, Enterobacter cloacae
atgtttagtttaaacgaaacaacgctcctcagtgcgatcaacagcggcaatatcttctccataatcaacagtaccctttcgcctggttacgggatttacctgaaatcaggcttaagggcattgtctccgtcctcgttcctggggattgagtatggggcagatgcttcagtagtttccgcgccaattgaagaggggtcatataccagctttaacaaggttaagcgaccggccatcatcagggttttgtttaaccttgaaggatggacagggtttagtggaagcatccccaacctgaccaacttcacactgacgagtcgctcagacatgctggcggcgctggatgcgatggttgctgatgcgcaggtgtacgacattgaaacaccggacacgacatacgaagactatgaccttgttagatacaattaccggacatcagaacgtgacgtaacactactgactgtagaggctatatttcaggccgttctacaggaggccgaggtaggactgtctaacgcaacagcaaacaaccagccatctcaaaatgccatatcaaaaggaggggcagttgatgcaaagcaggttaacgccaacgcatcagaaagcactcttgatgatgtgaagggtgccttaaccgggcttaagcagtcattaagcagcgctgcagtgtcagttgctacctcagtgagtaatgctgtaaccagcgtaacttcgggggctacaagtgccataaatggtgcagctacttccgctattaataatctttcagcgacagttgacgaactggtgaaggggttatcctga

SEQ ID NO: 150661 - DNA, 1770 bp, Enterobacter cloacae
atggcaacagttatagatgccctggttgtcactctgggccttaatgcttctggattcaaaaaaggcaagagtgaggtctcagaaggcttagaccaaactaagaagcaagcggaatcaactgcaaaggacatggaggcttacggtaagaaagcctcttcgttctttaccagtattgggaagagcatgctggcgcttgctggtatagctttgagtgctaatggcgttaaaaacttcatcaacgacacgaccaaatctctggttgatttaggcgtgcagtcgtccgccatagatacgtctgctaaagctctcgatggatgggttaagtcagcagatgcggttggctcatcggcggcatcaatgagctcaaacctacagaagttccagagctcaatatctcagtttaactctggatttggtgctgacgatacgctcaataccctctttgccttcagcgcccagaccggaaccaagttcgataccacccagaatgcaagccaaatcatgcagtacctggctgaaaactggaataagttgaacaaaaaccagcagcgaatgtacgggcagaggcttggcttcgataatgcaactgtgcagggtctatctagcggacgtcttctggacttgcagaagtcattcgaaggaacgtccaaacaaaccgacgctctgacagaaaaagccaggcgcttaaatgagcagttcgtcagagtcaggcagtcgtgggagtccacctcactaaccctgtatgaaaatcttctgcctgcagtatggaagattctggaggcactcaactcaatgagcgcgtgggtagaaaggcatggacctgagattaacgcctcatttgatgagctagggaaaacattctctatcctctggaaggatgtcactgacgtctctaaggctgtaggcgatcttcttagcatcgatacgaaagactggacgttatctggtgacattaaaaacctcaatcaaaatctcgatgagggccgtcagaccgttgagctgattatcgacgccttcaaaagcttgtttaatctggacttctcgacatttggcgacaaagttaaatccctcttcaagatgggcagtggtgatgatgctcttcctggtgtaacggatagcgcaaactctgccgctgactggattaaagataaaaccggctttgacacccgcagtgtaggtaaatggctgggagaaaaagcagaagggttgagagaccttttctcaggtgaaacgtcacgccttgagaagcaatacggccttcctgaggggcttctagatgcacaggtaacccaagagtcaggttggaatccaaatgctgtctcaggagctggcgcgaagggtttaatgcagttcatgcctggtaccgccaaagacttcggtattcatgggaaagaattcgacccaatgaagtctctggaagctggtgccaaatatatgggctcgcttctccagagatatggtggcgatctgcagaaagccctgactgcttataactggggaatgggcaaccttgagaagaaggggatggcaaatgcccctgaagaggcaagaaactatgcgcctcagattatctcaagaatgcaggcatcacagcgctactcatatcaggctggttcggctacaggtggtggcgggacaaatatcacattccagaacaccacaataaaaacagagtcgagaaccctggatagcctggcgaaagaggccgcgaataaaggcatggctcagagcagccttactcaaacctttctcacggggcaaaacagctaa

SEQ ID NO: 150662 - DNA, 198 bp, Enterobacter cloacae
atgggccagcaaatcgctggccttgccgagtacaccaacgtgcctaaaacaatagcgactgtcatgtcatcgggtaaatgctcgctgacagagctaagcacgacgcttggtgtgcaggatttatggtggtggctggaaattatcaccattgataattacaaccaaatggtaatcgacagagcaagtgaggcctggtaa

SEQ ID NO: 150663 - DNA, 405 bp, Enterobacter cloacae
atggcacgcaaagagattttctacaccgtcgaagataaaggccgagatcatgggaaggttttctacattcgcgaaatgtcagctactcaggctgagtggtgggcaattcgtgccggactggcaatggctaaaaacggcgttaatcttccggataacttttcagatatgggtatggcaggcatggcgaaagtcggcctcgaaatggtggctaaaatccctccagaggatgcacggcctctcctggacgaactgatgaaatgtgtacaggctgttccagacccagccaatcaaagcgttaagcgcaacctgattgacgatgacactgaagaagttatcactcgcctgaaacttcgcagcgaagtgttcaagctccatgttgattttttcacagccaccgccagttag

SEQ ID NO: 150664 - DNA, 441 bp, Enterobacter cloacae
atgtccaacactattacaagcgctgattcaatctttgccctcactgttacgaacctgttccccagcgctcaaacgcttgagggatacgcagcggacgcgatgtttgctctgggtgatacagaaatggcggtttccgtccgtggcgctgacggaaaactctctggcggtttcgtattcggtgagtatctacagacgatcacaatcatgcctgatagcccatctcgtgaactgttcgagacctggcaactgacgtcactgacctcgaaagcagtattccgctgcaacgcaacaatcattctcccggcgattagtcgcaagttcacgctgaccaacggcatcctgcagcgcgtaaaagccatccctgatgcgcagcgagtactgcaggcaatgaccttccagattaactgggaatcagttgttggcgaagcgtacaacgcataa

SEQ ID NO: 150665 - DNA, 1479 bp, Enterobacter cloacae
atggcaatcccattacgcaaagatattcaaatcaatcctggagtgctgccagcgggcggttcagcgcttgatctgaatggccttatccttaccgacagcgcttatgctccggtggggagtgttatcacgttcacgaacaaagaagacgtagcatcctatttcggcagtgcatcggctgaattcagcatggctgaagtgtattttcagggatacgacaattccaccaagacaccgggcgcattgctgtttgcacggtttaacccggaagcagcggcagcatggttgcgctcaggctctatggcggccgtaacgttagaccagctcaaattgctgagtggtgtactgacactgaccgttgacggcaccgcgcatacctcagccagtatcgacctgagcacagcaacaagctttgctatggctgctgacctgattgaaacaggtatcggctccagcgtaacagtggagtacgacacaacgcagaagcgcttcatcatcaccagcgcgacagacggcgcagcgagcaccatcacatacgcaaccggtactttgtctgctggcctgaaactgacagccgccactggcgctcaattgtctcagggcgcagatgcagcagtagtcactacggccatgcagtcagtgcttgatagctctcaaaactgggcaatcttcactacatcattcacgccgaccgaacaagaggcgctggacttctccgcatgggttaacggccaaaattaccggttcggctacgtgccattcacgctggaggaatccgcgctggtatctggctcaaccgacacgctggcgtacaaaatcatcagcacttacgactattcaaacgtcgtaccggtgttcggtgaccagactcacgcagcgagtgtgattggatatgcagcatctcttgacttcgaccgtcaggaaggccgcgtgccattcaaattccgctcactcggtggcctgctaccggaagttaccacatcagcaaattatgatgcgctgattgccaacggatacaacttctacggcgcgtacacggcgaataactacgatacccgttactgggctgatggcaccatcactggtgactttaaatggtttgactccttctgcttccagatttggctgaatgccaacctgatgcaggatgctatcgagctgttccagtccaaccgcagcattccgtacaacgcacgcggcaaggcaatcatcgaggcgtccttctccgatacgctgaatcagggcatcacctttggtggcatccgtactggcgtaacactgtccagttctcagatttccgagattcagaacgcagtaggcgctgacatctatccatcgctgattgctaagggttactacctgtatatcgcagacgccactcctactcagcgtcaggagcgcacaagccctagcatgaccctgtggtactgcgacggcggttgcgtgcagaaaatcactctcgcaagcattgaggtgcaataa

SEQ ID NO: 150666 - DNA, 552 bp, Enterobacter cloacae
atgacagccacagtagacatcaccgagcttgacctgcgtattgctctgcaggcgtttctgatggatatcacggggctcaccatagataacgtgctggtaggtcagcagaacctcacgccaatgccgcttcatgacttcatcatcatgacgccgctgaagcagataggactgtctaccaaccgcgtcaaatacgacgacaacggcgtgtatggcgaaggtaaacagctaaaccagcgcagcacgcaatggccttgtcagattgactgttacggtgagaacgcggccgataacgctgcaatcatcggaacgctaatccgctcagactttgcctgtgagtggttcaggcagaacggtaatgtcatcacccctctttactgctcagaccctcatcagacaacgatgataaacggcgagcaacaatacgaaggccgctggacgatggaattcatcgggcaattcaacccgtctgttaccacacgccaggacttcatggacagcattacagtcggcgttattgccgcagatttaaaatacccaccggagagtgcataa

SEQ ID NO: 150667 - DNA, 369 bp, Enterobacter cloacae
atgaacctgagaggcatagccaatagcgccacgagatcaataaaccccaacgtaaatggcgtgttccggattaataccggtttcactactttacctggcggaaagcgagagcagacgtacagcaacgttgatgttgaagtgcagatgcaggagctatcgtcaacagacttacgacaggtagatgccatcaacattcagggcatcctgaaaagtgcgtatctgaatgggaacttcaacggcgtgaaccgaccagatcaaaagggtggcgacattctcgttgtgaacggtcagcagtggttggtggtgaaagttcctgagttatggcctgactggtgccgagtgattgttaacctgcagaggtcaccatga

SEQ ID NO: 150668 - DNA, 453 bp, Enterobacter cloacae
atgaccacgtttagtggtggcgcagctttagaggcgaaactttctgaactggcggaaaagcttggcgacggtaaaacgcttagggtcggattccttgaaggggcgacataccctgatggacaatctgtcccaatggttgccgcagccaacgaatatggcgaccctgcaatgaacaggccgccacgcccattcttccgaaacatgatcgccgaaaagtcaccagaatggccgcaggatattgcgaagatagccgaggctaccggttatgacgcagaaacgatgctggggatgatgggtgagcatattaaagggcaactacaaggctcaatcagagatttgatggagcctgctctatctccagttacgatcgccaaaaagggcttctctaagccactcattgaaacatcccacatgctaaacagcgtcgattacgacattaaggatggcgtatga

SEQ ID NO: 150669 - DNA, 231 bp, Enterobacter cloacae
gtgcgccacgagcatattcagatacaccgcacgcacatttacatcagtaacaggactgcaatcagtgttatcaaggtagaccgttgcctcaacgaaatacgcattcagcagcgtgtcacttaccgtgtcaaactcggggtaacgctcacggaatgcgttaatgtcgaaaacaacgatcgccatgattacttaccgtccgatttttcgatgccaggcatcggcttgtcctga

SEQ ID NO: 150670 - DNA, 327 bp, Enterobacter cloacae
atggcagagactatcgtagtaggttgcaaacttcccaatggcctgattgttgagcaagatggctacacggtaacgctgaatggctccaattctgccaatgtcattggcggttatggtcttaccgatggcgtagacaaggatgcgttcgagaagtggctttcagttcataaagagcaaccttacgtcgtgaatgagctcgtctttgctcaggcaaaagccaacagcgcacaggcaaaagcttccgagaacgccaaggtcaaatctggacttgaggggcttcctcaggacaagccgatgcctggcatcgaaaaatcggacggtaagtaa

SEQ ID NO: 150671 - DNA, 1035 bp, Enterobacter cloacae
atgaacgaatttcagaaacactattccgctgctagcggcaaatacggcatcattctgccgggcgcgaaagactacctgaagcctgacttcgcagaaaacttccagttggctatggatgctcaaccaaccatggttaccgcgaataacgcaggtatcccggcgtacttcaccaactacgttgatcctgagttgattcgtgttctggtcacaccgatgaaagcagctgaaatcattggtgaagtgaaaaaaggcgactggactaccctgaccgcgcagttcccaatcgttgaaagcaccggtgagaccagctcatatggcgacttcaacaacaacggcatgactgcagcgaacgttaactgggttcctcgccagtcttaccattaccagacccatacccgctggggtgaacgtgagctggatatgtacggcgcggcacgtatcggttacgcggcagagcttaacgtagcatctgctctggtgctgaataagttccagaacaagtcctacttcttcggtatcgacggcctgatgaactatggactgctgaatgacccttctttgacggcatcaatcacgccaaatgctaccggcactggcggagctgtaacctgggcaaccaaagatggccaggcggtgtatgacgatatcgtcaagctgtacggccagttggtttctcaaaccaaaggtttgattgagcgtactgactccatgactcttgccatgtctccttctgcggaagtgaacctgaccaagaccaacatgtacaacgtcaacgtgtctgacctgctgaagaaaaacttccctaacctgcgtgttgaaactgcagttgaatattcaactgatgcgggcgaactcgtgcagctgattgcagatcgtcttggtgagcaagataccgcttatgcggccttcaccgagaagatgcgtgcgcacgcagttgtggttgaagaatccagctggaagcagaagaaatcaggcggcacatggggtgcaatcattcgtcaaccgctgggtatcgccagcatgatcggggtttaa

SEQ ID NO: 150672 - DNA, 231 bp, Enterobacter cloacae
atgctcattcagccaggccgtgaagtaaccctgatgaccgcgggcgacttctgggcgcgcaccgccacggcagcaactcgcggacagaaaatctttgctgtgcttgctgacggcaccattaaaaccggtgcggcaggggcaaccatttccggcgcagtcgaaacgcctttctatgctggtagcgcttgcgatgcgggcgaactggtcaaaatcagcacctggagcaagtaa

SEQ ID NO: 150673 - DNA, 1188 bp, Enterobacter cloacae
atgaaaacaactgaacggttggcatttgaccgcgcttcgatgcgctcgtttgatggcaacggcaggcttcaggttaagttaagcaatatcagcaaagcgaatgtatgcccctacttcgggagagaaattccaaatgctgaaaagctcgggctagagccagataagatttaccagttatggcgacaccctgacgaactgaagaaagccgctgcaacattcaacaacattccccttttatcaatccatacacctgacttccccggcgaccctccgcgtgaatatcgcgttggtgtaacgcattcaaatgcagactttgacggaacgtatctgacaaacggtttatcagtttgggatgactccgcaatcgccggtattgagacggaagagcaggaagaattgtcttcgtcgtaccaatacgtcgctgacatgacccccggagttacaccgaatggagagccttatgacggcatcatgcgggacatcatcgggaaccacgtagcgctggttgaaagaggccgcgcaggaagcgacgtattggtcgcagattcattacccccggagttaatgctcatgagcaaacgtaaagccgcgattattcgcgcaacgctgaagccgttactggcagctgatgctgatttggaggctgaagtacggaaggcgcttctggcgctggatgaagccgaaaaagaagacgagaaagaaaagaaaccggctgaagacgaggatgacgacaaggacgacgagaagaagaaaaccgctgacgacgaagatgatgaagacagcgatgacaaaaagaaaaagccagccgaagacgaagacgatgaagacgacaaaaaagacgacaaagtctccaaaacggcaatggacagtgctattcgcttagctgcggacagcgcaaccaaacgtgcggcggagaacttccgcaaagtgcgtgaagctgagcaggctgtgcgcccactgattggcgatgtcgttgcaatggactccgctgatgatgtctaccgcactgcacttgagcaggctggggtggatatcgaaggcgttcatccttcggccttccctaagatggtcaaaatggctatcgagcagcagaacaataaacgccctgtcattgcgcaggattccgcaaccgtcagtgaatttgagaaagctttcccgaccgctggcaaactgaaacgaggtttctaa

SEQ ID NO: 150674 - DNA, 798 bp, Enterobacter cloacae
atgaccagcgggaagaagaaatcgacgcggcaaacgctgagagcaattaatcctaatgcaggtgttgaggcgtggtatcgcagacagctagacaaccacatcagagagatgcagaagtccgttgtgtactggctgactgctaactacaaagcgagcggtgcagcggtggcaatggacgcatctcctgccgtgtttatgcgtgatgccatgaagaagctcgctaagcgatggacaaaggcattcgacaacgtatctcagaagctggccgaaaggtttgccggtgatgcgatgaagaatactgatgtatcactgcataacgcgctcgaaactgcaggattcacggttgagttcaagatgaccgcgccgatgaataacgcactgcaggcgaccattgcagagaacgttggactgatacgctcaattcctgagaaatatttcactgaggttgaggggctggtaatgcgctcggttgcaagggggcgtgacctgtcttacctcactggcgaacttcagaagcgctatggcattacgcgcaggcgtgcggcattaatcgcacgcgatcagaataacaaagcaacttcagtaatgcaggcagcaaggcagcaatcactcggtatcactcagggcgtctggaagcactcacatgctgggaaagaaccacgaccatcgcacgttaaagctgatggaaaggtgtttgagctaagcaaggggatgtatctggacggcaaatgggttatgcctggcgaggaaatcaactgtcgttgcacctggtcaccagtcatacccggtcttagctag

SEQ ID NO: 150675 - DNA, 1527 bp, Enterobacter cloacae
gtgtggccgtttaaaaagaaacaagtcgccgcgcctgagccggtgaaagaacaaaagcctgagatgaaaatccgcgccgaggcagtggcagaaattcaggctaaaccgcctcgcgagattgagcagtataagccaccgaaaggcgttatccctgagagcatagagaaaggcattctggcgatggactcaacgccatatgccgctctaaacgaagcttatatgggatacacctatggctatcctgacagcttcccgggctacccatacctggctacgctcgctcaaaagcctgaatatcgcaagatggtcggaaccatcgcagaagagatgacccgcaagtgggtcaagctcaagactgtaggcgatgacgataaggctgagcgcgttaagcaactctacgctgcaatggagaagttcaaggttaaggaccggttccgcgaggcagcagagcacgacggttactttggcggcggtcagatttatatcgatgtgcagtcggctaaaggcgtgtctgcatggaatgacccggtagagctgcagtcaaagctgttcctgtctgacaagaagattaagaaaggcagcctcaagggattcaccgttattgagccagtctggacttacccgggcgtgtataacacagataacccgatgagtcctgacttctacaaaccgacagaatggtttgtgatggctaagacggtcaatgccagccgcatgcttgattttgtatcgagagaggtgcctgacctgcttaaagcaacgtacaacttccgtggactgagtctgacgcagattgccgagccgtacgtcaataactggctgagaacgagggatagtgttagcgacctgattcactcgttcaccattcctgtactttcaacaaacatggcgacagtgttgcagggtggcggagcagagtcgcttatcaatcgccttcagatgctcaatcagtgccgggacaatcgcggtgcttttgctgtagataacacgccagcgcaggaagaaaaggctgagtttatcagtgccccccttggtggtcttgacgccctacaggcgcaagctcaggagcaaatggcggcagtttccagcattcctctggtcaagctgctaggcatttcacctgcaggccttaatgcctcatctgatggcgagattcgagtcttctacgactacatccacgcactgcagcaatccatcttcaaagacaacctgaagcgcgttctggacatcatccagttatctgagtttggcgacatcgacccggatatctacttcgagtttgagcctctctacgagatgaccgagaaagagaaagcggaaattcgcaaaattgacgctgataccgacgcggtaaacgtagcaactggagcgctgacgggtaacgagattcggcagaagatcgcaaatgaccctgacagcccataccactcactggacctaagcgatgacatcgaaatcgaagacgactacgaagacgatgaccagcgggaagaagaaatcgacgcggcaaacgctgagagcaattaa

SEQ ID NO: 150676 - DNA, 1659 bp, Enterobacter cloacae
atgaacgaaattatcgaatgggatgatttgtcattccctgagcgtgtagtgcttcgttcaaagtccactaaatcgtttctcaatttcactcgcctgtggttcgaactgattcagggtgatcgccttctggttaactggcatcaccggttaatggcgtcaaagattgatgacctgatagccggccgattagagccgcgaaacctgattatcaacattcctcctggcgggacaaaaacagagttcttctccattcacttcccggcctacgtcaacgcactggtgcaggaaggcaaactaaagcgctttcgtaacctgaatatatcgtttgctgacactctggttaaacgtaactcacgccgcacacgagacattatcgccagcaaggagtatcaggagttatggccttgctcgttcggtgtcaaccaggctgaagaatgggagataaaagacgatcgcgggcgctcaatcgggcagacggtttcccgttcaagcaacgggcaaattaccggtggtcgtggtggttacttcggtactgagttctccggcatggtcatgttggatgactacaacaagcccgtcgacatgctcagtgagtctcgcaggaacagcgccaacacgcttctggtaaacaccattcgctctcgtcgtggtgataagtcaaaagagcacccaacgccgtttgtgagcattcagcagcgccttcacaccgatgacgcaacaggcttcatgttatctggcgggatgggcgttaaattccaccatgtagctatacctgcactgattgatgagaagtacattcagtctctagcagagccatggcgctctttgtgctgggagacggtgaaagacaccgactctgtggaagtgtccgggacgcgctactggtcatactggccgcagatggaggacgtgaacgacctcctgcaactctgggagaaagaccgttacacgttcctatctcagtaccagcagaaccctatggcgcttactggcggcatcatcgataccgactggttccagacctacaccacgcttcccaagctcactcatcgcgccgtgtacgttgatacgaacagcggcaaggtagaggactggcttgactacacggtattcacgcttgttggaatgggtgttgatggaaatctctacatcatcgatgtggtacgaggtcgctgggacccagaagacctcctgaagaaagcggaagaggtctgggagaaatggcgcatgcagggctcgctaagaatcatgcccatgcgtcatatggccatcgaagagaagcaggctggacaaggcctgataactaccctcaagaagcgaaatagcatcccggtaaaagagatacctcgcggtacaggccagaacaaactggttcgctgccttaacgtcattcctcagattaaaactggcaaggtttatgttcctgccactcatgatgagcacggagctatcaggcctcacgtttactacgaagacggaacggtggctggtactacctcatgggttatcaccgcaatgactgaatgcgctgctttctctgctgacgacagtcacgacaatgacgacatcctcgatacatggatggacgctattgacgacaatcttatttctggtcgccagccaatggttatcgacccgagccaactcaggagaatttaa

SEQ ID NO: 150677 - DNA, 477 bp, Enterobacter cloacae
atggccaggccaaccaagtaccagaaggcgtacgccgagcaggctcgcaagctgtgcatgcttggctacaccgacgctcaattagcagacttctttgaggtctctgaagcaactatcaatacgtggaagaaagagcatccagagtttctggagtccgtaaaaaaggggaaggacctagttgacgctgaagtggtcgatagcctattccagcgagcaatgggttatgtagccccggacacagatatccgcgtgattgataaccagatagtcaaaacgcaaatcaagaagcattaccctcctgatactgcagcagccatcttctggcttaagaaccgacagaagaaagactggcgagacaaaattaaccacgctatcgagggtgccaatggcggcccggtagaagtcgtcaattatacagcagcagattacgcagcagctcaggcagcaatggaggagaaactaaaaggcctggactga

SEQ ID NO: 150678 - DNA, 198 bp, Enterobacter cloacae
atgagcgacattgaaaagcgaatctcacaattcgcagaaaagatgaagtcagagggaagggtgttaagcgttatggacggaggatgggtagcagtaagcccaacaaccggcatggcagcatttgacatggtcgagatgacgaaactaaacgccaaaggttatctggctgcatacgtattagcaaataacgagaaataa

SEQ ID NO: 150679 - DNA, 162 bp, Enterobacter cloacae
atgatcaccatgaaggtggtcgcacaaaagcggtggtgggtaagcccattactgtccgtgcttaaggcatttgtctatgcacgcatcgttaaagagaaacacttcaaatctctgtcaggcttcattgctcgctggggatttaagttcaaaacagagaaatga

SEQ ID NO: 150680 - DNA, 210 bp, Enterobacter cloacae
atgactaaacgcgctatctcaactggtggttatccaatcgaagtttccaccccaactgacccggtaaccatccctgcagcgacaacctcagcaattggcggggtgaagaagatggctgcacaagctgattcaactgcaaccgatgtttctggcatggtggcagacttcaatgctctgctggctaaagctcgcactgcaggactgatgtga

SEQ ID NO: 150681 - DNA, 288 bp, Enterobacter cloacae
atggatgaagaatatcgtaaagacctgaggctttggtttggcctgtcacattctgcattctgtgtaatgcctcgcgtattcatggaggctatgccagaagagtggaaagagaaagtggctcaactcctgtttgagtatgacgacacaataaaaaccaatgtttgcggggttcatagttgcttcgtcactgtgaaggatgccgataataaattcatgaaaatgcctgaagatattattaattatcgacaccccaagaaagagttcattgcttcattcctcaaaaagtaa

SEQ ID NO: 150682 - DNA, 459 bp, Enterobacter cloacae
atgagcagactaaccgcaatcattattgccgtaatcgcctgcatcattgtctcgcttggctgggctgttaatcactaccgtgacaacgccattgactacaagaagcaacgagacactgcgattaacgaagctgctctggcaaaagcaaccatcaccgacatgcagacgcgccaacgcgatgtatctgctctcgatgcaaaatacacacaggaactcgcagatgctcaggaaactatcaatcagcttgagcgcgatgttgctactggcaagcgtcggttgcagctcaacgcaacctgcaaaggtaacaccaccggatcctccggcatggatgatgcagactccgccagacttactgactccgctcaacgggattattggagtctcagagaacgaatcgaaaccagcaacaaaatgattcttggcctccaggaatacattaaaacccagtgcctgaagtaa

SEQ ID NO: 150683 - DNA, 495 bp, Enterobacter cloacae
atggcaatgtctccggcactcagaaatagcattattgccacgttgggcggcggcgctatcgcaatagcgacaacaatgctctccggtaaggatggtctcgaaggtcgaaagtatgaagcatatcgcgatgttgtcggagttctgacagtctgtgacggtcacaccggttcagacatcatcataaataagcgatacacagataaagagtgcgacgcactaacaagaaaagaccttcagcgtatagcttcacaggttgacccgtacatcaaagtgccaaccactgaaactcaacgcgcagcaatttactctttcgcttacaacgtcggcgcaactgccacaatcaattccactctcctgaaaaagctgaatgctaaagactattccggagcttgctcagagcttaagcgctgggtatatgcaggcggacagaagtggaaaggactggttaacaggcgtgacgttgaatatcaggtatgtacctggggtcagaaatga

SEQ ID NO: 150684 - DNA, 144 bp, Enterobacter cloacae
atgggtggcgttctatcccttaacgactgggcgatcatcattggtattctctgtaccgtcggcacattcggcatcaactggtactacaagcgcaaagagcgcgaggacagattgaatggcaatgtctccggcactcagaaatag

SEQ ID NO: 150685 - DNA, 765 bp, Enterobacter cloacae
atgaacctggaaaatgcagtcaagtttcacttcgcgaagtctacgcagataaacgatacgccgcgtgcaacctcctcagagacgttaacaggtaccgacgtgatggctgccatgggcatgacacaaagtcgcgcctcgttgggttacagcgcgtttttagggaagatggaaatcagcagcaatgaccgtgagaaagctattgaactgctgacccaatatgcactagagcattgcgataaggttgccgccttacgtaagctcgaaaatgatattaagccaaaggtgatgcaagtgctcgcaacattcgcattcgctgattattcccgcagtgctgccagtacgcgaacctgtgattgctgtggtggtaagaagtttgtcgacgctgaagtcatgacgatgaaaagcatcgggcagccgtacctaactgagcgcaaggaaacagtgaaggtgctctgccataagtgtaaagggaagggagtcctgaccaatgcttgtcagtgcaacggtaaaggcgttgtggtagacaaagagaaaactattctacagggcggcgttcctgcatataaaacgtgcagacgctgcaatgggcgtggttatgctcgtttgttgcctgatagtgttcgtcagtacatctgcgctactgtggttgatgtgccggaaaccacatggcgcaggtcatacaaggacttcttcgaaagcctggttggtgagtgcattaagcaggaggaatacgcaaatcagatgttgagcaaagtcactcgatag

SEQ ID NO: 150686 - DNA, 423 bp, Enterobacter cloacae
atgaagctgaataaaaaacagcgtgcagaactgcgcatgaagttcggtggtcggtgtgcctactgcggatgcgagcttcctgaaaaaggttggcatgccgatcacgttgaagcaattcatagaaagcttgaaattgacgaggaagcaagaagtcaaggtaaatggaaattgaagcagacaggagaatcttacaggcctcagcatgacacgctagaaaacatgaaccccgcctgcgccccatgcaatctattcaagtcagttttcgatattgaagaattcagaaatcagattcaacttcaggcagaaagaggccttaggacttccgtcaatttcagaacagcagagagatttggtctggttgaagtcgtcaataagccggttgtgttctggtttgaacggtatcaggaaggagcaatggcatga

SEQ ID NO: 150687 - DNA, 243 bp, Enterobacter cloacae
atgaccagagaatacgtcaagaaaatccactacccatgcgaaacggcagcaatctttcaagatgtgcttttcgtcatgcgagttaatcattactcggagcttctaaatcaggctgacagagccgccgagttctacctgagccatttccctttctgcacgctagaaaacgtaagagaaggcgttctatacagctttggtggtctttacctgaatgattacgaacttatccgggaggcagcatga

SEQ ID NO: 150688 - DNA, 291 bp, Enterobacter cloacae
atggctaatctacgaaaagaagcgcggggcagggaatgccaggtgcgtatctacggtgtctgtaatcacaaccctgagactaccgttttggctcattaccgaatggcgggattatgcggtataggcatgaagcctgatgaccttctcgcagcatgggcgtgcagtagttgccacgacgaaatagaccgcagaacgcataacatcgaccacgaatttgcaaagatttaccacctggaaggtgtaatgcgcactcaggacattctgcgcaaggaagggaagattaagacatga

SEQ ID NO: 150689 - DNA, 177 bp, Enterobacter cloacae
atgcttagcccccacgaagcccaatcctatgagcagcagagcatacgtcgaacgttgtgcgcaggctgcacgaaggagctatccgacgatgagactcacgtttgtgaggaatgtgcggcgatggcaatagcgtatcgcgaccctaacggatttatgacggaggaggaagatggctaa

SEQ ID NO: 150690 - DNA, 369 bp, Enterobacter cloacae
atggactattcacagttatcagattttgaaattaacaagcgcgttgcagaaattgctatcaatggcgactggttacttgaaccaaccgatgaaagcccatcatggttttttaatcacggggtgcaaggtaaaaataccgtcaagctgcccgattactgcaacaacccggcagacgcatggccgattatcgttgataacgaaatctctctgaacagctacggtagtgcatgggaggcatcattcgaacacgatgcacctataggtgcctttggtacagacgaaacggtgacatcaggatatgagcatagaaatccattgagagcagcaatgattgctttcctgatgaaacaggagcaggccaatgcttag

SEQ ID NO: 150691 - DNA, 228 bp, Enterobacter cloacae
atgagtaacttagacgatgactacgcagaccgactcgctgaccttctcgaagatatggaaggtgacggagttgactctgtaggaatgattatgaactgggtacgcggttacgcagaaggccaaatggaggccaattgcgctgactgttacatctgtcagtttgacgacatggatatggttattcaggtagttgatccacaacaaacaacatcagacagggtgcattga

SEQ ID NO: 150692 - DNA, 411 bp, Enterobacter cloacae
atgaagcaaacaatcttccttcgaagtaagcagcaacagcagtcagcaataaacgccatcctcgcatcacctctcgacaacgaccgacccatcaccattcgaatctctgactacaagcgcaacattgaccagaacgcgaaatttcacgcgcttttgggtgatatcgctcgtcaggtcacatggtgcggaaagaagcttaagcctgagcagtggaaggtattgctgattagcggtcatgcagtcgctacaaagcaggaggctgaagtcgttcccgggctagagggtgagtatgtcaatatccgcgagagcagcgcagagatgagcgtagggcgtatggcgagcctcatagagtacacgatggcttgggcaacaggtcagggagtcagatttacggacaggaggtacgattga

SEQ ID NO: 150693 - DNA, 192 bp, Enterobacter cloacae
atgagggttattcagagttgttttataacctattcctccagaaactcgatttcaaatatgacgacggttacggcggacaagagctattcggaaatatttggtacgaggatggaacattctctatcagaggagagtatgacggctctgaatggtgggagtacatgcactgccctccaatccctgaaaacctaa

SEQ ID NO: 150694 - DNA, 252 bp, Enterobacter cloacae
atggaagaatcaagaaaggctttcgaatcgtggcttgagaattatcatggcataaaggccagtaattcgggccacgccaatatgattgagatgtattggcaagcatggaaagccagtcgagaagctatcgagataaagctaccgccaaagacagaatcaagcccgtacgagcactacatgccgcattacacaatggatgcagatagcgtagaaagcgccatccgcgcagctggaatcaaagtgaatgagtga

SEQ ID NO: 150695 - DNA, 207 bp, Enterobacter cloacae
atgacaacgattggcgttctttacgacgaatggacgaaagagcgattcaggcgtcactacaagatggcgaaggttatccgcaacaagccctatcgaaatgactaccgcaaggttatggcagagaacatgcagaagaatatcgacaagatattcccacgcgggaaagctgtctggcgcttacttaaaaccagcaaaactatttggtga

SEQ ID NO: 150696 - DNA, 1983 bp, Enterobacter cloacae
atgtcacaaacagctatcacactcgcttttgagcagtggaaagccagccaggcggtaacgggtgagccggttttgctggatgaatttgtttttgccaacgtgccggggctggataccagtaagccaattgaccgcaacgaggcgttgcctcctgccgcacaaattgttcatcgccaggccgtaagccgtaaaggcgtggtcaatgaaaatgccgtggttcattccactgttctgggcgcggaagtgggtgatttttcgtttaactggatcgggctgattaacaaggcgagcaacacgctggccatgattgtacatgcgccgctacagcagaagctgaaaacgaaagatggccagcagggcaatgtgctaacccgttcgtttttgatggagtacaacggggcacaggcagaaaccgggatcaacacgccagcggaaacctggcagattgacttcactgcccgtatggccgcgatggatgaacgtcagcgcctggagaatattgacctctacggtactgcggctttcctggggaatggctaccttgttgcaaaaagtggctcgcaatatcttgtgacggccggggcgggttatgttcgcggcttgcgcgcgcagctggccgcgaaccagaacattacggtaactaccaagcccgtaaaggtctggctggatgtgtcatggacaggaacgctgacaagtgcctggggtgtcaccagcaaaattacggtggcggctaaccttgccgattacgttcaaaacggcgtgcagcactatgtgtttgcagtggccagtatcgatgcaaacggcaatattaccgatctgcgccctaaggggacacttaacgaacaggccgccagtgatgcgctgaaaaaacatgagcagtcacgcaatcatccggatgcaacgacggcggccaaaggctttacgcaactcagcagcgccctggacagcatctcagagacgcttgcggccacgcctaaggccgttaaggcggcctacgatctggctaagggtaaatataccgctcaggacgccaccacggcgcaaaaaggtattgtcaggctaagcagtgctaccgacagtgtatcggagctgctcgcagcgacgccaaaagccgtcaaaacagcatatgaccttgctgatacagcaaacaaagcggctaaactggctgacgataatgctgacacacggttactcaagacaagtaatctttcggatatccctgataaagcgaaagcccgttctgcactggagcttaaaacagcagcgacgagggatgtcacgacctccacctacgacacaacagcaggcagggtgttaaagaatggtgattacggtcagggaaccgataacggattggctctactgaattcaatatttgacatcacttgcactgctaaatactcagctctgggtgtcggtgcaggagcgaacgctacacaggggatgcctgctaattctggcaatacccgattctcagttgaagctgacaatatctataccggccagtactgggttactctgcgcagcacctcgcaaatttatctcggtctggtaaatacgacgaacaaaacagcttcatggacgcagtattacactgagctgtacaaacccacagcaacagatgttgacgccgtatctgcatcgcagggcggtgtttttcaggggcaggtccagttcagacgaggattacggcttcagaattcggaataccttgccgggattgactacggtactgatgcggcttcgttcagcggcgcaaacttattgctgaaaagctggtatggcatcggcttctacagtaattacccgagcagcggtgagcttggtgtgatggggtatgtgaatgtccgtattggtcgtctggaaatgaaagaacaaatcattccgggcaactatgggaactttgacaatcgttactatacgcaagcagttgcggatggcagattccagcctaaaggtaactacaccccggcaggacagtga

SEQ ID NO: 150697 - DNA, 213 bp, Enterobacter cloacae
atgatgactgaacccatgaccgggctgtatgcgctgacggtatttgcggcttttatctttttttccattctggagctggctgacgctcaagacactgacgaagaggattttgttttagtatttttcgctgcgttattttggccagttgtggttgccgtagctgcacttggtttcattgtcggtttatggaaattgtgggttagccgtggctga

SEQ ID NO: 150698 - DNA, 222 bp, Enterobacter cloacae
atgaccactaacatttcaatcaatctgcccgtcccttctatctcaaaagagaagtacatcgaactcactggtttaccggaagataccgttgaagcaatgctgaaagatggccgcttaccacgtcaccgccttcgcaaagatatggggcgtgaaaaagtcatgattaatatcgcggctctgaccatagacgccctcgcgggttgcaacatcgtacttaactga

SEQ ID NO: 150699 - DNA, 621 bp, Enterobacter cloacae
atggacttcaatagaggcgggcaggaggtaatcaagcgattactaattgcttatggattcaagacaagacaggcgctttgcgaacagcttggcgcatcaactagcacaatgagcacaagatggatgagggatatttttcccgcagactgggttattcagtgcgcgatggaaacaggcgcttcgcttgaatggctctcctttgggaagggcgaagccttccagaacggagcggaaaactctccaaatgagtataaaaagacggccaacgacaacgccatgggtgatgtggtcgcggttcctcgtaagaaaatcattgatgggaatctgtacgaatccaatttttatatgctcgataaggcaatgcttccctctcacctcagcaagccggtaatcatccttgatgacgaaatcccgtacgtcgcagacatgaaaactgacgaactatcggatggaacatgggttgttgaaattgagggaaaaacaagcattaaagagctgacccgtattcctgttggcagggtgcttgtagccccaatatctggcggccaatcttttgaatgtgggatcaatgaccttaagccattagctaaatgccactattacctaatgtcgaatgtttaa

SEQ ID NO: 150700 - DNA, 2178 bp, Enterobacter cloacae
atggctttaaccgcggcgctgaaagcgcagattggtgcctggtataaggcactccagcagcagatccccgactttatcccccgggcaccacagcggcagatgattgccgatgtggcaaaaacgctcgccggtgacgacgggcgacatctggcgattgaagcgccaaccggggtcggtaaaaccctctcttatttaatcccgggcatcgctattgcgcgggaagaacaaaagacgctggtgatcagcaccgctaacgtggcgctacaggatcagatcttcagcaaagacctgccgctgctgcgcaaaattatccccgagctgcgttttaccgccgcctttggccgcggacgttatgtctgcccgcgtaacctggcggcgctcgccagcagtgagcccacccagcaggatctgctggcgtttcttgatgacgaactgacgccaaacaacaaggcggagcaggaacagtgtgcgaagctgaaagccgatctcgacagctacaggtgggacggtttgcgcgatcacaccagccaggccatcggcgatgatttatggcgcaggctcagcaccgataaagccagttgcctcaaccgtaactgtcactactaccgcgagtgcccgttttttgtcgcccggcgggagatccaggaagcggaagtggtggtcgccaatcatgcgctggtgatggcggcgctggagagcgaggcggtgctgccggagccgaaaaacctgctgctggtgcttgatgaaggccaccatttgcctgacgtagcccgggatgcgctggagatgagtgctgaaatcacggccccgtggttccgcctgcagctcgatctgttctgcaagctggtggccacctgcatggagcagttccgtcccaaaaccacgccgccgctggcggtgcccgagcgtctgagtgaacactgtgaagaggtctacggccttatcgcatccctgaacaacattctgaatctgtatctcccggcgactcaggaggcagagcaccgttttgccatgggggagttgccggacgaggtgatggagatttgccagcagctggcgaagcatctggaaaagctgcgcggcctggccgagatgttcttaaacgatctcagtgaaaagaccggcacccatgacgtggtgcgtttgcaccgtattctgctgcaaatgaaccgtgcgctgggcatgtttgaagcgcaaagcaaactctggcgactggcctctatggcgcaggcgtccggcgcgccggtcaccaaatgggccacccgcgaagtgagagacgggcaggtacacctctttttccactgcgtgggcatccgcgtggccgatcagctggaaaagctgatctggcgtagcgtgccgcacgtggtggtaacgtcagcgaccttgcgttccctgaacagcttctcgcggctgcaggagatgagcggcctgaaggaaaaagcgggggaccgcttcgtggcgctggactcgccgtttaatcactgcgagcagggcaagctggtgatcccgcgcatgcgctatgagccgcttatcgataacgaagagcagcatattgccgaaatggccgcctatttccgcgaacagctggagagtaaaaaataccccggcatgctggtgctgtttgccagcggacgcgccatgcagcgctttctggaacatgttaccgatctgcgtttactgctgctggtgcagggcgatcagccgcgctatcggctggtagagctccaccgccagcgcatcgataacggcgagcgcagcgtgctggtggggttacagtcttttgcggaaggtctggatctgaagggcgactatctgacccaggtgcatattcataaaatcgctttcccgcccatcgacagcccggtggtgatcaccgaaggagaatggctgaaaagcctcaaccgctatccgtttgaggtacaaagtcttccggcggcgtcgtttaacctgattcagcaggtgggtcgtctgattcgtagccacggctgctggggcgaagtggtgatctacgacaagcgtctgctcactaaaaaatacggtcagcgcctgctgaatgccctgccggtgttcccgatagaacagccggaggtgcctgaaataaaaaaacgcccggcaaaacagactgccgggcgtcggaaaagcatccgtgctaaggggcgcggtcctactggtaagtaa

SEQ ID NO: 150701 - DNA, 909 bp, Enterobacter cloacae
atgttcgcagcaattatcatcgctatatttattatcagtgttatttatgcgcattcgcgcggcaaagaaaaacagacgctttcccgtcaacttttcgaccactccacctttatggcgcctatcaatatgtttatgacggcgttctcttcgctgcccgccagacagcccttttttgaaaccgagcgctttccggaattaaataaactgacggaaaactgggaggtcattcgcgaagaggcgctgcgtttgcaggatcatatcaaggcggcacaaaatcataacgatgccggttttaacaccttctttaaacgcggctggaaacggttttacctcaaatggtatgccgatgcgcatccctcggctcagatcctgtgccccgttacgacacaactggtgagtgagatcccgtccgtgaaagcggcaatgtttgccgaactcccggcgggcgcgaagctcggcaagcatcgcgatccctacgccggctcggttcgttaccatttaggcctggtcacgccaaatgacgatcgctgctttatagaggttgaccagcagcgccacagctggcgtgacggtgaggctgtcatctttgatgaaacttacgtgcactgggcggagaataaatcggatcacacgcggattattctcttctgcgatatcgaacgtccgatgaaatggcgctgggcgcaggcggttaaccactgggtcgggacaacgctgatgtcagcggccagctcccccaatgacgataacgaccgcaccgggggaatcaaccgtatcttcaaatatgtgcacgccgggcgagaacgcggtcagcgtctgaagaagcgcaataggaagctctattacgcactgaagtacctggtcatcacggcgattttcgccgcgcttattgtcgctgccataacgtaa

SEQ ID NO: 150702 - DNA, 501 bp, Enterobacter cloacae
atgcgctggtgttcagatggcttcgagttcggctgcgacaacggcgaaaaactgcgggtaacgttcgcgctggactgctgcgaccgtgaggccatagactgggcagcaagcacgggaggctatgacagttcgaccgtgcaggatgtgatgctgaggtcggtggaaaagcgcttcggcgacaggctgcccgacacagcggtgcagtggctgacggacaacggttcagcatataccgcgcatgaaacgcggaggttcgccaaagagctgaatctggagccatgtacaacagcggtgagcagcccgcagagcaatggcatggccgaacggttcgtgaagacgatgaaggaagactatatcgcgttcatgccgaaaccggatgtgagaacagccctgcgaaaccttgcagcggcgttcacgcattacaatgaaaatcacccgcatagtgcgctgggatatcactctccgagagaataccggcggcagcgggcatcgttaacttaa

SEQ ID NO: 150703 - DNA, 174 bp, Enterobacter cloacae
atgaaaccatttggctggttctacacccgtgagggttgtacttgttcattatgccgaggtcgtggctatagaaagaataacgcgtatgattctgcaatacgcacaagtaaacataaagccaggcaggttgcgaaaaaatcaatacagacagagctgagagacttattggtctaa

SEQ ID NO: 150704 - DNA, 204 bp, Enterobacter cloacae
atgagcgcgaaaacgaaatatgattgctataacgtgcagggaaggaaattagggtatgttttattggatgatgaaggtaaaggtttgagagatatctttattgagaacaaggcagtcatcaaggcatactatccaggaacagtattcattaaaccagctcgaaaagataaatcgcaagtaaaggaacggagaactaaaaaataa

SEQ ID NO: 150705 - DNA, 399 bp, Enterobacter cloacae
atgttgaaaaatgaagtaccgcttgcactcagcccaacatgctttatccatcacgtttttatcgatgcctggcatcattctctttcaaccatgattcgaaaggcctccagacagttcggagaacagataatttcgcattatcgctcagacgatatcagtggagaataccgggtattttctggatttggggatggttactggatgataggcgtcggtatagaaatacccgttgatttgtgcaaacagttcccgtcattaattgtcagcaaccgattaatagaaaggaggcactgcccggataacattacgatgatcatagaatatgaattggggaaaatgcccgttggtcgaatcaacgggcatttaacaagaaaattaaccgttacatgtaacgtttaa

SEQ ID NO: 150706 - DNA, 273 bp, Enterobacter cloacae
atggtgtccgatcacctgctaagcccactacatatccgcaaaagcccccgctgcgggttatgcggatctttaaccgttttgccgcatgcggagaaaaaacgtcgactcttggttgtaacgctttactgttacatactctatgatataaattcgaatcatgaaagcgttttctggaaaaaagaaatcatcggcgataatcaggaaaacgcgcctcgcgccgttggtgtcatttctgtgggcgtaaccggacaagtaactgacggtaaccactga

SEQ ID NO: 150707 - DNA, 651 bp, Enterobacter cloacae
atgacctggaatgagcctgcaccactgcgggggcgcagggatgactcttgtaaccagggggcatctgcgcagcagtgcgcccggccatcaccacggcggcaacctcctgcgcggggcggaacggtcacgcgccagcgcgtcacctgccgtcacaatctgcaccctgccggaacgctggcgcagcgctccggcagcgccggacaccagggggcatctgcgcagcagtgcgcccggccatcaccacggcagcaacctcctgcgcggggcgggaacggtcacgcgccagcgcgtcacctgccgtcacgatctgcaccctgccggaacgctggcgcggcgctccggctgtgccggacaccagggggtatctgcgcagcagtgcgcccggccagcaccacggcggcaacctcctgcgcggggcgggaacggtcacgcgtctgcgcgtcaccagccgtcacgatctgccccctgccggaacgctggcgcggcgctccggctgtgccggacaccagggggcatctgcgcagcagtgcgcccggttatcactacggtaatggcgttacggattgcgataagaatatgaatctagtgattttgcgcatgcgcaaaattgagagcgcgaatccgctcaaaattgcgctcagaaaatggtga

SEQ ID NO: 150708 - DNA, 279 bp, Enterobacter cloacae
atgcaaacagattatgtattatttacggctgccgtagagatcgtcggtttctggttgcttttccaaaatttcagagcctggaaaaaaggtatcactcacatccgttactaccctttttttggtgccaggagacttgaacccatttatcgtcgtgatgaaccaataattttttgcctcatcctgatatgggaaacgttgttgatagttggactgatggcaacgatgctttattgcaccttgtggttataccttcacgaaataggctttttgcacgagtaa

SEQ ID NO: 150709 - DNA, 189 bp, Enterobacter cloacae
atggcatttcatattcgcgtgcagctgaccttagttgaaactgatttgctgaacgtcagcaaaattcagctgaacgaggaagaaatgtgctgcatctctaaattctgcaatcagaaatgtaactttccttgcaacgtcttgcagaaagcgcaagactttttgaaacgtttcagcgctatcttgttttaa

SEQ ID NO: 150710 - DNA, 501 bp, Enterobacter cloacae; identical to SEQ ID NO: 150702

SEQ ID NO: 150711 - DNA, 372 bp, Enterobacter cloacae
atgttgaggattcattgtttccacggtgttgcgcagtttgtggaagctgatttcaccgatgaaagcggcaatggttttatcaacgtttacgatcgccactggcagttgcagcctttccagatggaatatcccaacactccgcaggacatacccaagcccgcctcttatcaggaagcgctgctggcggcacaagcactggccctggggattgactattgccgtgtcgatctcatgctcacccgggacgagatctacttcagtgagataacgttaagtccgaaacggggcaaactgactatcacgccgccggaatgggatgccaggttaggtgaaatgtggcaaatgacgcccgtcgcaaacaggctcatttga

SEQ ID NO: 150712 - DNA, 270 bp, Enterobacter cloacae
atgtcagccctggcggaaatggagagggagttgattgtggagcgcacccgggcaggtttggctgcagctcgtgagaaaggtcgaatcggcggcaggcgtccaaagcttacccaggaacaatgggaccaggcgggccgactgattgcgaacggcgtggacagaaaacaggtggcaataatttatgatgtggccgtgtgcacgctttataaaaaatttccggtggggataaatcggagaaaaagcagcccaccgtgtgaaatggcgggctga

SEQ ID NO: 150713 - DNA, 276 bp, Enterobacter cloacae
atgaaaattttgcttagcccacaacgtgcagatgccacagtcacttattcagcacagggcgatgtgcttacagttacggtggacgaaaaagtacattctttcgatttttccaatctgcaggacgaggctcttactgagttctcgtcctcgcttcccatttgtcctttactctttgcgaagcggacagatgatggcgtaattgtttcagctctccactattacggaccagaggccgatgagaaagagaaagtttctactgaaattattcttcagtag

SEQ ID NO: 150714 - DNA, 243 bp, Enterobacter cloacae
atggacgcggccaccataaaaaagatggggaaaacggctctgattaacggaatcacatacgacgttatctctgctgagttgcttgaagagatggggccgttatcagggaatttacggtctctggtggtattcagtggagaatataccccgcggcgaaacgatgaagtggtttgggaaggcaaaaactggaccgtcacacgtcatgaactgtttaacgggaaacctcgtatcttcattgagtag

SEQ ID NO: 150715 - DNA, 327 bp, Enterobacter cloacae
atggctaagaactatgcgcaggacgggaaaacgatcccgctggtaaacagtggtgcaaccgatattcagagcggcgacccggttgttgttggaaaacttatcgcggtggcaattaccgatatcccggctggcgataccggggacggttttactgagggtgttttcctcttgccaaaagtatccgcagatgcggttactgccggggcgcaggtgtatctgaaggacggcaaaatccagaccgatgaaacggatgccgttgccgcaggcatcgcctgggaagatgcaccggcaaacaccaccgttgttgaagtaaagattaatgtctaa

SEQ ID NO: 150716 - DNA, 654 bp, Enterobacter cloacae
atgacaaagtctagatttaaaattccttcatttattgcgcctacaatacaattcatattagcgctcgcaacttttattcttagtgtaaccttcagccttgagcaaaatagaatatcaaaacttcaatactcaccggttttcattttaaacattgagcaactttaccggaaggattacacaccaacacaatcagaaaaatttgatatattcaacgagggttattccataaacaattataactacaaactacattcaatcatgaatgtagaatataccctcaataacaaatcatatgaaaaaaaattctatgttgattatttctctgtgaaatcaaaaaagtccggaggaaaagatcgcatgtcagggggtataggtgaaaacaacatcctattattcagcaatttaaaaaaggaaatcattaaaaaccttaatgataaaggtatcaatctaataaatattgaacttaatcattattctgacatcagttactctgatacagaactcaacgaaaatcacgtctacttcgcagattctgaacgtatagcaaaagatatttatgaaaattatttagctgggattgatacatactatacaatttcactctacagcccaaacatagatgatatcatatcaagaaccttacgaagcaaatag

SEQ ID NO: 150717 - DNA, 426 bp, Enterobacter cloacae
atgctaaatcttcttatcaaacttacgttgagtatagccatcttattttataacttcagtgttaatgctgcatgtctgaaagagggggataaggttgtactctcaggagtaatgaaagaagagttgttttacggtccccccaactggggagaggataggcaacatgacgaaaaattactttactggatcctgcatttaaacagtccgctaaaatgtgtgattgatgctaatactgagcgagatgggtgggacagcaatgtacaactcattgttagcagtaaagattataaaagtaaacgcaacttacttaatcaccatatcactgtatatggaaatgtgatgcttgctgacacaggttatcatatgacttcagttttactaaaagacatcagttttaaaccaatgcgaaaaaataaaaaaggatga

SEQ ID NO: 150718 - DNA, 1848 bp, Enterobacter cloacae
atgagatttgtaaaagcgacataccatcttaaaaccaagacggttgagtacgaagctggtgatggtactcgtttgctaaaaactgctggtacattgagttggcgatttaacaatcccgggaatattatcgcattacctgatgcaaataagcaaaaagggcgaataggcgccgggactgtgtataatccgaaaaaaaatacattcgtgattttttccagcattgaagttggggagcgtgaaaaatgtgcattattgaagcgaaaatatcgagattataccatatctgacatgatgtcgcagtatgcacctgaaaccgcaggcaatgatcccgtagcttatgccaattttataagttcagagagtggagttgcaaaagataaaaaaatttctgatctgaatgataatgaatttgacaaggtagtggatgcaatcagtaaaaaggaaggtggtctgaagcccggaacagaaaaatgggtgtatgtgacaaatgtgactgtttctgatggctgccgaccagttgccgatgtgccatttaaggtaatactaggaagcactacctacgagtggaaaacagatgcttatggtaagctcaagacaatcatccatacgaaacaaggaatggctattgtcctcaaatatactaattctgcaggaaaagaggatgtagtttattcagctgttgctggggatgaaacgaaaaatatactgcttacaagaaacttttcacaattttctgcaaaaacactagccgaaaccccaaaagtcccacgagagaaaagtactcagaatccgatagagtacatagttatgtcaggagactccctctctaaaattgccgaacgttataagacaagtactgatgaaattgccaaaaataataacattaaaaatgtgagtaagatctttcccggtcagcgcttgacgatttatggtgtcaatactagtggcccttcagtatatatagtttcaccgggtgatacactggcaaaaatcgcggcgaaaaacggtgtgagtgtagatgatatcgcacgacagaataatatatcagaccctaataaaatatacccggggcaatccctttctattagcacaaatggcagtaatgctgctggtgagactgagaaaccatcagtcagttctccagcatcaaaaccagtgaataaaaaacgacaaaatagcggtataaataccaataaaaaaacgctggaatcggttggggggaagaattccggaaatccgattgcgttactacctcatgaacagagagaggctccatggatggcagttgcattcgaggaaggagagactagatggaaatgggggcgtgtaaaggaaggagatggtggaataaactaccataagaagactggcattaatatggcatcaatggttggtaattctaatccgtggtgtgcttcttttataaattattgtctcaaagaggcaggatattcaatgtctggtagcgccagttctcaatccttcaaaaaaaacaaaaatttcataaaaatatctgagcctatatatggtgcaatagttgttttgcggaaaaaaggctcctggacagggcatgttgcttttatatactgtctttttgaagatggtgaaataggtgtgcttggcggaaatcaaggaaatagtgttacaataaatccattatatcaagtttatataaatggacgtttaaattatgaactgataggattctatatacctaagtcatattacccttatgcacaaaagataataagttcaggtatgagggaaactacgatgtctaatattgcagagttgcgtgaaagccttggagccaatctaccctcgaatgaggatgaaagaacgaggtaa

SEQ ID NO: 150719 - DNA, 234 bp, Enterobacter cloacae
atgttacttatttatccaatgaactctacttttgctaaggatcttatttacaatgcaaagtggaacgacaattctggcgaacattttctggtgatagaaaaggaaatcaataaaaataacacgggagagcatctatctgtaaaacaggtgacgaagagaaaggttgattgggtactaaatgattatgttaatgactgtgatgtagacattaatctgaatgtgataaaagaataa

SEQ ID NO: 150720 - DNA, 1209 bp, Enterobacter cloacae
atgtcatatacacttaaatatttgccagaacgctaccccagacctaaacctctgagattttctcgttggtttgttgctctggttgttatgctttctatcagtgttatcttaatgcgtttatttgggcgttatgtcggaaatctgtacttttggaaattggctttaggtttacctatttctttgtggagtattctgtttgcttgttgttttcttctttgggcattgcgggatagcaaagcaaatgcttttgacaaacagcgagaacagtggattcttctagaaacccgtaaggctcgacgtgcgctgcaggtgctgaatgcaacatttattaccggccactcatctgttgcacagaaagatatagctattgccatgcaaaaaaacgatagcattattgtttcacaggtcgaccgggatggtaatgaaagtaccagaatgagccaaatttcatctagcccgcaggactcgtcaaaattcgtgataattaatattttttcgcggttgattactgacattccttttgcacaattccctgacaaagtcccactgattgttgtttttgatataacaacatctctgccccttgagaatatacgccattactgggacgaggtctggcaaaagaataatattacccatcctgttgaatatggtgaagggagtggactcagcgtaattgaccgctggctgaatgtacgtattaaagataaagcgatgttactgattgtgggactccagtttcatccctctgattctgataacacggcagaagcagccgttgcgctgcttcttggcaaccgcctgacacaggaggcactcgaacctctcgcgttgttacaccggccagatgcttcccctcctggtgaactgagcgagggaatgaacatggccgcctggaacgtcccgctcaaagaaaatatcgttaaaaatttatggcttgccgggatgacgggtgagcaacgcgcagaagtgatcgcgtgccagaatgcgcatcctgcgcagtctgtagcggacgactccgtcatttcactcgacaggtctatggggcatgccggtgccgcagccccctggctggccatcgcggccgccactgaaatcgcccgacagacacagtccccacagatgattatctgcggtgatacgacacagaatgtgctgtggagcacgctcattaccccgattgcttcccgacaggagatggatccgtga

SEQ ID NO: 150721 - DNA, 192 bp, Enterobacter cloacae
atgccagcaaaaggtttttatctggttcagggtgacaaaacgacctgcggtggaagaattatcacgggcgcagaagatcacacactgtttggtaaacctgttgccagggagcaggacggcgtgacctgtggtaagtttgtagggctttacaaggtcgccggggctttgttgaataaatcgaacttttgctga

SEQ ID NO: 150722 - DNA, 348 bp, Enterobacter cloacae
gtggccgggctactggtgggaatgatgcccggcaggctgaacgacggcgaacaggattttatcgaccgtatgcgcctcgcgcagatgcgtgaagccccaagccgtgttcgctatacgtgggagaacgacagcagggggaacccggtgccgcatggctggcacacgccgcctggccgggacagtgtgcgcgtcagaaaaatggagtacgacagcagggtgcaggcgtacaccttcactacggaggaagaaccgcgcgtcaccatcgtgtggacgcctgaccggacggacgagaaaacgccgttgaataccggcagcgcggccggtgctaccgaacccggttgttgttga

SEQ ID NO: 150723 - DNA, 555 bp, Enterobacter cloacae
gtgctaccgaacccggttgttgttgacccgctgcccgttaacaccggcataacggcgactaccagcccggaacaggaagaaaagcgtttcgcggattacattctgattctgccgttccctgacctgccgccgatttatatctacctgagcaaaccaccggtggagtttctggaggttgagctatacagtgactttaaacgccgttcgcggcaggggatatatgaggctgatcatatgccgtctgctgctgcggtgcgaacagcgttattgcgcgaaaatccacgtctcagtaaaaatctggtggatgaaatggcgcaggatgttgcagccatagtcgttccaaaagaaattcatcaaaaaatgagtgaaacttatggtggccgcaatacgccagcacaaattgaacttgactcaatgaatctccgtgcggcagttgatcgtaacctggacgcaatcaagccagcccttaaagcaaatggcgcaacagaaagccagatagaaacggcaagagtcaaaatgcacacattgaatcgaaacgtggggttatacaaatga

SEQ ID NO: 150724 - DNA, 468 bp, Enterobacter cloacae
atgacagtgaatgttgaagcgttaattcatagcttcggtaaatcttatcaaaacttggttgacgctgagctgataccttacaaaacccctccaacaggtttttctggtgatcctgatctgagcctgaatatggcgctggaggggatatatttatcattcaggcgtgaagggcgcattctccaggaaattacagcaattctactcaggccggaaattaagggctggcattttcctaataagttgccgttcgggctcaaaagcgaaatgtcacgacaatggattcatgaacatttcggagagccgctaagaagttcaccacctaaaactattatgaggcgtgccttgggatgggtagatctttttgatgccgcaactggagacatcccagtgagtatgcagattgattatgacgtaatggacaatgctttatctgtaacatttatgccaacctcagagcatcgctggtag

SEQ ID NO: 150725 - DNA, 432 bp, Enterobacter cloacae
atgtcgattttatttagcccctcaactatgggcttttatgatgatgtgatgaaagcagattatgaagcggctgattcgtggcctgatgatgcaatgttggtatctgatctttggtaccaaaagcttattgagggacaatctgcggggaaaataattagcgtcaacgagtatggacaacccgtacttgctgaccctgagctgccagaaaaagagaaacctgttcaggaggcagaatccagaaagtcagggctattacaggcggcaagtgatgccattgcccctcttcaggatgctgtggatcttgacattgccacagctgaagaaaatgccctcctgctggcctggaaaaaatatcgcgtgttgattaaccgcgttgataccagcaaagcgccggatattgactggccagaggtgcctggcaatgtggcgtga

SEQ ID NO: 150726 - DNA, 699 bp, Enterobacter cloacae
atgtatcagagccattttaaattcagtaccccgccgttcagaaatatcacccgcaagtcgggcgattttctggtgccttatcatcaggatgtgtttaatcttctgaaagagaaaagccagcaggcagggatcaccgggctcttttaccacgacagcgaactgctggggcagttcagcgatgccctcaaagccaacagcaaatcggtgctctgcattaatgcctttccgaagctgagcgccagtagcctgctcttcaaactcaacccggtagcgaaagagaagaacaagctccaggcggttgacgctattattcgcctgtggcgcgatgcgaagtcgacccataaggtgctggtcatttcccaggcgcaggcgatgaaggccagcggctatgacgtgctgggcatactgcttacccgtgcgcaggagctggatgttcgcctgtcgattgtgctgatgggcacggccgaccaggaagtgatgctgaaagcctctgccctgcaggaatatgtgctgacctgccacaccctgcgcaacctgacctgccgcgagttcctgagctacgttgacgcccagtgccacgagcacggcgcggatgtctctccgctgacgcccgctcgcgtgaaaaaaatccacgccctgaccaaaggcaacatcagcaagctgaacgaactggctcatctttccatgctggccgcctaa

SEQ ID NO: 150727 - DNA, 330 bp, Enterobacter cloacae
atgttcagacttatcgttcatcatgcggttcgggaggagatcctcgcattgcctgcggtggtacaggcgaagttgattcgccagctagataaattgcgtactcatccaaccgcattgagggagcctgatagcaagccgttgccacatggcttgtttgaaataagaacaattgggctgctccatagtcgcggaatttatgtctatcaacgggagaagaccatttttctgttgcgggtctttattaagaagacgcaaaaaaccccctccgctgaaatccgtctggcactgaagagacaacaggagatgttagatgagcaagaagattattaa

SEQ ID NO: 150728 - DNA, 1500 bp, Enterobacter cloacae
atgaccaccaatagaattggagtgttcattaaaaacaaccgattgccaattttcgttgtcttttccatgtgcattttatatgtactaccaataatcatggccgacaggctgtacgttgacgacatgggtcggactaccactgggtattatgggtggaaaggtaatggtaggccttttgcagaaatgataatgaagtttctatcatttggagggcttaacttagacatatcccccttacctctgctgctagcgttagccttgtattctgttacttccgtggcatacgtcagatctgtcattccaaagaaaggtatattgataacggttatcgcatcattaggattcatagttaacccattttatcttgagaacctttcgtataagtatgattcgttccctatgatgattagtgtatgtgttttattgcttgcttacattaatatatcgaacatatacgctagagctacaatagcgactatagccgtaattgcttctttgagctcatatcaagcatctattggtctttttgtatctttagcagtaatagaatcagttagttacataaacaaaggaatagatttaaaatttgtctttttgagaattgtagagagggggttgtgctttggaataggttacttattgtatgacaaggtaataaaaccagcgacagttctggaaagcaatggttatacttggcagcactctcaaacaatccttttaaataaggaagggtttgatatatttgcccggaacgtacatatctatcttgaaaagataatgaaatacgcgacctccataccaagcattactattgctttagtggcttttttcatagttgccagcctcggctcaattttattcggtatttttaataaacaaaaaaacaaacctatagctataatctgctcaattatggttatggcatcaccgatcattgttttcgctttgacatttattcatatgtgcctattggtttacccaattgcatcgcctcgtgtctttgtatcattttcagctttcatttttttgatgatggctatacttttcatgcatgatagattcaacagagcatcactggttcctgcaatactatttattgccttctcgtatgtttactcattctcatacggaaatgccttgaaatttcaggacgaatatgaaaattatgttgcagtaaacattgcaaatgatttatcaactatcgatccacttggacaattgaaaatacagactaatggctatatggactatcctcagcaggttgccattgttttaaaaaaataccctgccatgaaggatgctatcttgagatatttgaacaatgattggtactggtcatactttcaactaggtaaatatggtgtaaccaatgctagagctggattgtctcaaaaatatgcatcagatatatctagtgggaaagctctcctggtaaggcgagactattctttccataagagagacaatattttagttataagtttccacggaaaatactga

SEQ ID NO: 150729 - DNA, 1974 bp, Enterobacter cloacae
atggctactacacctactcagaattctgttccgagcgaatcaccacgcgaccttaagtttaacgcgggtaaaattgacgagttcgttacttcgctggtaaacacctatgttgaccggttcggaaacgagcattacaccatcgaaggtcttcgctggctggctcagcaggctattgctcagttcgggtgggtccttatcgactcgttccaggacggcgctaatatcaccctgccaaaccaggcgctacgtgacgaagataccggcgaatattatcgttgggacggcgcgctgccgaagcatgtggatgccggctctacgccatcatcttccggcggggttggcgtaggcgcgtgggtaggtattggtgatgcgagcctgcgagcaatgctagctacatctgcgggcgcgggaatgatcggcgcgctggactcagatggaaatgcaacgactgttcagaatgcaatcggccattatcgcgcctatacggttaaaaagagattagatgaggagttgagcgttggtgcgatcgccggggtagatccgacaggcgctactgattcgacggcagctcttaacggtttcttttcccttttaaatactaatggaaccaggacaagcgtccgtatcccggcggggacgtaccttactaccggtttaactattaacaatacgtctttggttatcaaaggtgcaggtgaatacccttacggcgcatccacaactaaaattaaagctgcggccgccaatacaacattgatgacattcacaagaagtggttgtcgtattgaaggccttctttttgaaggtttcgaagccgcagttaactttggtgctacagaaacatgtaccggcgtgaagttccagccgtcaacgggcacgcttgcagacatcgatagcactgtgcacggctgtacattcttttgcctgaagaacggtgtggttgggtatggtagaaaccttactcagcggcttaatggttattcgcatgtcgctttcccaataactcttaactacgtgcctggtcagcaattccgtggtcacgttatagacgacaatagattccactcatgtggcggatttggatcagctaccgatactagtcttgcggattctgtgtgcataaaacttgtaaccaacactgcccaaggtgtgttagcggataattatgccggtgatatcagcattaaaaataacaaatgcgacaatgggtgcttccaattcttcctgggccacttcggtagagggagcatcatgtcctgcaatgacatattccgctgtggtggatcattatcagtgatgattaaaatcgacaataccgctacatcatcaaatactgactatgataattttgtattgataggcaatactatagcctcggacgcggcaagcaccaacccgcagtccttccctgattatgcattatggatgacaggagtgagaggcggcgttgtgtctggtaatgccttcggtaagctatataaacatggccttgttatggagaactgtgcagacattgtactaaacgcaattcagttaaaaaacccaagcatgagtgttgcatttggtggctcagcttataatgcagtggaaataataagaggtggtaacaatattcagattcttggtctgaatgttcgaaactcacagtcatcaactcagattcagttcgttatcaataacgcaagcgcaacgaacgtaatggttgataacatacaggctaatggatatatctcgatgattaacgagggctcatcagctagaactcatggcattatcaatttcggaggaaacaggagaaaagaagtctttgctacaacggtagctggaataccctcaacaattaattattccgtaggcgatatttgctggtttacgacacctccagcctctggaacagcctacgctggtgctatttgcgtcactgctggcaatggatctgctgctgtgtggcgtaactttggtgcatttgcttaa

SEQ ID NO: 150730 - DNA, 1644 bp, Enterobacter cloacae
atggtggcactgtcgtccgtgaacctcctttctctggcgagccttgcccgtcagaaacacccggcctgtcagattgtgctcggtgccgaccgcgaccttaacggcgacggccagaacaaagccgcagcggccgcagaaacctgtgagggtgttgttgccctgccgccggtgtttggtgactggaatgatgcgtttatgcagaatggcggggaggccacgcgaaaagcgatttatgacgccatccggccaccggcacaaagcccgttcgacaccatgagcgaggcggaatttaccgccatgagcgccagcgacaaggctctgcgggtgcatgagcattacggtgaagcgctggcggtggatgcgaacggccagctcctgtcccgttatgaagcagggatatggaaagtcgttcagccgtccagcttcgaacgcgacgtagccgggctttttcagcgcctgcgcgccccgttctcgtcggggagaatcacctcagtggtggagacgctgaagctgattattcctcagcaggccgcaccggcacgccgtctgattggttttcgcaacggggtactcgatacccaaagcggcctgttcagcccacacagcaaatcgtactggctgcgcacgctgtgcgacgtggattttaccccgccggtcgagggggaaacgctggagacccacgcgccgaatttctggcgctggctcgaccgggcggccggtaaaaatccacaaaagcgcgacgtgatactcgctgcgctgtttatggtgctggcgaaccgctacgactggcagctctttcttgaagtcaccggtcccggcgggagcgggaaaagtatactggccgaaatcgcgaccctgctcgccggagaggataacgccacgtcggccgatatcgacacgctggaagacccgcgcaagcgtgcctccctgattggcttctcgcttatccgtctgcctgaccaggaaaaatggagcggtgacggtgcagggctgaaggccatcaccggcggtgatgcggtctcggttgacccgaaataccagaacccgtattcaacgcatattccggcggtcattctggccgtgaacaataatccgatgcgcttcaccgaccgcagcggcggtgtgtcgcgtcgccgggtgattattcatttcccggagcagattgccccggaagagcgcgacccgcagctcagggataaaattgcgcgcgagctggccgtcatcgtgcgccagcttatgcagaaattcagcgacccgatggccgcgcgcgcactgctccagtcgcagcagaactccgatgaagcgctcagcatcaagcgcgatgctgacccgacgtttgatttttgcggctatctggaaatgctgccgcagaccaacggaatgtttatgggtaatgccagcattgtcccgcgtaattaccgtaaatatctttatcacgcgtatctggcctatatggaggctaacggatacaggaacgtactcagcctgaaaatgttcgggctggggctgcccatgatgctgaaagagtacggcctgaattatgagaagcggcacacaaagcaggggatacagaccaacctgtcactgaaagaggaaagctacggcgactggctgccgaaatgcgatgaccccgcagcgacataa

SEQ ID NO: 150731 - DNA, 999 bp, Enterobacter cloacae
atgtttgataataaaacgattctggtaactggcggcacaggttcatttggcaataagttcgttcgcatgacgcttgaaaaatataatcctaaaaaaattatcatttattcgcgtgatgaaatgaaacagtgggaaatggcaaagcatttcaaagatgaaagtcgcatccgctttttcatcggtgatgtgcgtgataaagatcgtttgtaccgtgcgttagatggggttgatttcgtggtgcatgcagcagcaacaaaaatcgttcctaccgcagaatacaacccgtttgagtgtgtaaaaaccaacatcaacggtgcgatgaatgttattgatgcatgtattgataaaggtatcgagcgtgtcgttgcactgtctactgacaaagcaagtagcccagcaaacctgtatggtgcaactaaactggcatccgataaattgtttgtggcaggtaattcctactccggtgctaccaagactcgcttcgccgttgtgcgttacgggaacgttatgggatcccgtggttccgtaattccattcttcctgtctatcaaagacaagggcgaactgccaatcactgatgaccgcatgacccgtttcatgattaccctggaacagggtgtggaactggtttggcacgccttcaatgacatggaaggtggcgagatctatgttaagaaaatcccatcaatgaaagtgactgatgttgcaacggctgttgctcctgatgcaactcagaaagtgatcggtattcgtccgggtgaaaaactgcatgaacaaatgatcagtgcagaagatgcgcattacacctatgaatatccggaacacttcaaaatccttcctgcaatccataactggtgcgattctcctgaacgtattaaagatggtaaacgtgtaccagaagggttcgtttacgaaagcgacagcaataccgagtggatgagcattgaagaactgcgtcaatggattgatgataaccgtgaaaaagtaggcaatatctaa

SEQ ID NO: 150732 - DNA, 231 bp, Enterobacter cloacae
atgggcagcgcactggactctttatttgggtctgcgaccgggcgcggtgaagaaagcttccaggtggcaaagaaaaaggccctcgctgataaagacccctggcatgcctggctggaattgtctgccagtgacccgggcgatatctccagcgatatccgagaacaatacagcgagctggcagcttcactggttctgagcgcaacccggaaaaataacggtcaacgtaattaa

SEQ ID NO: 150733 - DNA, 690 bp, Enterobacter cloacae
atgccgagttatggttatcgacgcgtgtggggcatcctgcgcaagcaacgtcgcacagagggacagccacctgtgaatgccaaacggctttacaggataatgagcgagcataacctgttgttgttgcatcacaaaccagagcgaccgaagcgtgaacataagggcaagatagcggtggcagaaagcgatatgcgctggtgttcagatggcttcgagttcggctgcgacaacggcgaaaaactgcgggtaacgttcgcgctggactgctgcgaccgtgaggccatagactgggcagcaagcacgggaggctatgacagttcgaccgtgcaggatgtgatgctgaggtcggtggaaaagcgcttcggcgacaggctgcccgacacagcggtgcagtggctgacggacaacggttcagcatataccgcgcatgaaacgcggaggttcgccaaagagctgaatctggagccatgtacaacagcggtgagcagcccgcagagcaatggcatggccgaacggttcgtgaagacgatgaaggaagactatatcgcgttcatgccgaaaccggatgtgagaacagccctgcgaaaccttgcagcggcgttcacgcattacaatgaaaatcacccgcatagtgcgctgggatatcactctccgagagaataccggcggcagcgggcatcgttaacttaa

SEQ ID NO: 150734 - DNA, 909 bp, Enterobacter cloacae
atggcttttctaagcatcattattgctgcacataacgccgaagatacccttcacacaacgttagaaagcctgcacaatgccatcgataatgcgggcgacgatgttgaggtaattatctttaacgacagctccgatgattccacgcaagatattattgagacgtggttgccagcgtttccgaatgtgcactcccgtcacgttcagtttcgtaatgtaggccttgttcgcaacagcgcattctctctggcatcaggtgactacattacgatgctggatagtgatgaccgactgaaaccgggtagcatcagggacgctgtagcattcctcaagacagagcgtcctgatatgctgctgacgcgtctgctagaaattcgtgatatcaaaaaaatcacccccaactggcaaggattttctcccgttgcgttgtcgcaacgggaggctataaaacgtttcctgctgcataaagatttccaggcacatctcattggtcaattcattcatcgcaagttatacgaaagtaacccgattccttcgatggtgtgttatgaggattttgcggtattccctggcatgttgatgcaatcgagtaaaatagcctatcaacgtcgcgggcactattactacatcaagcgtagcgacagtttgtcgagcaaactcgacgcgagcaaaatcaagacgcttgtggaatgcacattgctgatggaaaaaacattccagcagccgtttcaacatctcataaattgtcattggtttgatatttacagtaatcatcggcaacatctgaccgaccagcatttccagcttgttaaacaacgggtaaaagcactttattctctctcatttttcttatccagcgatgttcgcttcagctataaaaaaagggttattgaggcattatggaaaaagtaa

SEQ ID NO: 150735 - DNA, 1212 bp, Enterobacter cloacae
atggaaaaagtaaagttaagactttatcagttaacgctcacgctaagccttgtgtctttagcattggtgctggttagttcaggtaaacaaagagaatttttctatattgctatctatgccagtattttaggcttagccgttgagtataaaaaaatcacctggaggccttttagcatcgcatatcctgtacttctggtggggatccttaacctgatctggtatttctcttatgaattccataatgagggattaaacgcatatagtgattatcttggagcaagtaagaaattaatactggcaagttttttgatcttctatctggatcgctttaaatctcatgtaacgaaacagaacttccaaaaatatttcttaatcgctacgtcagttggctttgtactggctacaggatatgggcttttccaggccatacaaggtattgatcgcgtcgagatggctatcaatcggccaacaattgcggcttacatctactctgttctttcgttagcgttcgtttatagcttatatcttcagcaaaatgtgaaactgtacttactggctggtttcgttgtgttgctgtcttacttcgtaattttattgaccgccacgcgtgctgctatgggactctacctcatactggctattgttctcacgctttatcaatttagaaaaattcatctaaaatcgctgatgattttcttatgtattgttgcgggtatcattatcgtcagttacaagccgttgatttcaccaaaaattcaacaaactcaaaatgagataaccaaatatcaaaaaggccacgatgccacatccctcggtgcgcgtttttctatgtggaatgtgggaataatgactggccttgcccatcctctgggacagtctattgaaagcagggaaatctgggcaaaacagtatgtaaaagagggccatgcgcatgttgccgctgcacttggatacatgcgaattcatttgcataatgaatttattgaaaaatactctctgcaagggatcccaggtctggcagttttactctttttctacgtttcgatgattgtatacgccatgactaacagaaatggtctgctgttaacggctatgcttctcttactgctctacggactgacagatgtgatgctattgagttcagaagccttaattttcttcatgacactttttgcgttaagcacctcgttttcgcaaacaaagcgacaataa

SEQ ID NO: 150736 - DNA, 372 bp, Enterobacter cloacae
atggggctgaccagctataaaggcgaagaagtccgtaaaagcgatgtcaccacagcaaaaaattatctgtctcaggatgaagtcagcgaactaaatcgtgtcgttaatatgtggctcgactttgctgaagatcaggccaaacgccgcaagcaggtatttttacgagactggcaaaccaaactcgatcagttcctgcaatttaacgaccgggacgttttagaaggcgcaggcaaaatcagcaaaaaagcggcggatgaaaaggcgtgttcagaatacattgagtatgaaaagaagcagcgcctgctgaaagaagccgagggagagaaagatattgtcggcttattaaaatgggataagcaggctaagcgctaa

SEQ ID NO: 150737 - DNA, 954 bp, Enterobacter cloacae
atgaaagctccagttctttcaatagttgtgccttgctataatgagcaggaagtattcaccttatgcctaaatgagctatcatcagtattaaatagtatggtagacaaaggaaaaatagatgcaaatagccatattgtgtttgttgatgacgggagcaaagacttaacatggagtctgataaaagaggagtctaataagaactataaagtaaaaggggtgaaactttctcgcaataaaggccatcagactgcattgatggcaggtctatcttcttgcattaactctgatataacagtgagtattgatgctgatttgcaggatgatacatcagttatcgaaaaaatggttgattcatatctgtctggacatgacatagtgtatggagttcgtaatgatagggcttcagatagtttcttcaaaaaattcacggccgagactttctataaagttatgactaagcttggtgttagtcaggttgaaaatcatgcggactttagacttttgagcaagcgtgctcttgatgctttattgcagtatagagaacaaaatctttatatcagaggtctcattcctctcattggcttccctagtgaaaaagtgtattactcaaggagcgagcgcgctgctggtgaatctaaatatcccctaagaaagatgctcgccttagctcttgaggggattacgtctttttctgttactccgcttcgcatggttaccgccatgggatttgtgatatctatgctctcttctcttgggatagtatatacacttgttcagtattttatggggcacacagtaagcggatgggcatcagttatcctggctgtcctttttattggcggcgtgcaaatgctttgtcttggtgtgattggagagtatataggtaaaatatacatggaaagcaaggggcgtccaaaatactttattgatgaaaagtcatggggcgagaaatga

SEQ ID NO: 150738 - DNA, 384 bp, Enterobacter cloacae
gtggacactttgtctattaaaggaattgttgaagttttcgttaacaattgggttcctggtatcttcaccttctttttaggtatctgttattcaaatatcgttgagaaaaggaaacttaaacagaagttaaagaacgatattcttgagatcttcataccggtcttcaacgcagggaacgagatctcattcgaaattgcagagaatgcatgcaggaatataaaaggtacctttcaggcatacaagagaatatatccaggtatcttcaacaaagaggcagagaatgagcttgaagttctattaaaagatggtttcctcataaatggtaaagttaaccagcattattttgaaccagctaatattgagaacctgattaaaagattgtag

SEQ ID NO: 150739 - DNA, 1143 bp, Enterobacter cloacae
atgggtattaaaatggaaaaattgatttgcatttcatgtatcaaaaacacaggcttgaagtttttagctgaaaaattaagaaactcaaatgacaaacgtttcttcgacacctgcggccatactggtggattccttaatgaggataatgtagatcaacttgctcatgagtttttcgtgaatggttcaattccaccgagttcaggaggaaatgcgcctgtgtataacattaaaactacaggaatgaatgaactcactttcgggtcagaactagaccatgacattgaactgctgagtcaatataagccgttacctctttaccattatggtcctccgctttataaaataggggcaactacaaactatcaagagttagttattgacgaagttagtgagtggagacgcaaagagatttgggaaagtataataagtgcatgtaaaactgtgacacttaaacctggctcaacgattttcagagcgagaaaaggaaactcactaccatcggcacttgaaaatgagtttgattcaaatcccaatccaacggaggggcgttttaataaatctggagaaaaagttttttatggtgcttttgagattgaaacttgcttgcatgagatacgtgtagctctgaccgattggatagcgctcgcaacttttcaagtgataaaagaactccgattgcttgatattacagacataaccgagttaccttctacacctttcgaaagcatagagatctttattagaaagatagtttatagcggagaatctgagtatccattatgtcaggagcttgcaaatgaaattaaaagtcgcggttatgatggtttaattgcttccagcttctttaagcaggcacataagaacgatctaaagaacattattttgtttggtcagccagccaaggatggaaaaatatcaataacatccacgaacaaaattaatctaaactttatttcgtatgaattttcatttgggccaatgagagataataaaagattggacataaaggctctcggattgctgacgaaacaatataaagataaactaagattactcgaatctggagagttagaattcgatgaattccaaagatttatggattactacatgcatgagtttatgaccaccatggaaaattcataa

SEQ ID NO: 150740 - DNA, 273 bp, Enterobacter cloacae
atggatattgctctgcttaacaggggctgtaacagaacatgttcagatacgatggtgaatctggaagcccgaaaactgttcgaaacagcaaatcgattgtcagcattttatttacatgacgccctgacgcgtatcgaatttgtcgaggagataaaacaggtcgtagaaaaggagcaaggtggatacgatgggtcgtccaggacgctgattgttaacctttatgttttcttcagaactgccaggatttgtaagacaacactggcggctgaataa

SEQ ID NO: 150741 - DNA, 297 bp, Enterobacter cloacae
atggatgttactgaagaggctttgttgagttctggctttacgcgatctgacttgcagaagattaagaacaacattgaaagctatggtggaacattgggggaagcgattcaggatctggctaatcgattcagggttgttttatggataacatcatcttgcctgatggtttttatcattcttgtgttgttttcatcgaaagaaaatataattagcggtggaatatcaatactcatcactgtcttcatcgttacatttattcagccgccagtgttgtcttacaaatcctggcagttctga

SEQ ID NO: 150742 - DNA, 156 bp, Enterobacter cloacae
atggtccatgggattttaagcaaggccgtgcccagtatgccaactttggaaatttccatttcggtgccgtgggcgcggcagcgggcatacctgatggtgtgttacttaggggtgcaggtgctgcgcagatccttgctggaacaagcgatccggtag

SEQ ID NO: 150743 - DNA, 147 bp, Enterobacter cloacae
atgtggattaacccacttatagatatgatacttggtattggcctagtgtgcggtatgggttggttaatccttaggttttggccttacttcttcagtgtagtattcataatggcgacgatttatgaagtgtggaatatcttcagatga

SEQ ID NO: 150744 - DNA, 1935 bp, Enterobacter cloacae
atgctccgtcctatttgttatgagcgagtatcaagcattcagcaagtcgaaatgggaaatggattggatgatcaaaggtcttctttaactgcctatttagacaaaaattctgataagttcacgaatgatagagttttcataacagatgcggggctttcggcatttaaaaatgccaatatttcacctgagtctcaacttgggatatttttgcaagatgtggggaaccgcaagtacggtaagggtgacgcacttatagtcattagccttgataggttatcgcgtcgttcaagttgggctgaaagtactatccagtacatcgtgaacagcggtgtagaaatccacgacatttctacaaatctcgtgttacgggcagatgatcctatgtcgaaaatccacatggaactcatacaacatcgctcgcacaatgaatcattgatgaagtcggtacgtgctaagttagcttgggataacaaaattttacgtgcattacagaatggagaggtgatttccaatcgtatgcctaactggttaaaaaatgttgataacaagtatcaggtgatccctgaacaggctgaacttattgttaagtgtttcgagtggtatagggaagggcttagtactggagagattgttaagcgtatcggtaaaaagtggcagatggtaaccgtgtcaaggctgatacgtgaccgccgcttgttgggtgaacatgagcgatacaatggtgaggttgtaccaaatgtttacccgaaaatcattgatgaagacttgttcctaacggcgaacaggatgatggatcgcgttatgctggagaagaaaaagccagccgaggatctgttacttgaacctgatgtagttcgtgaaattttcaaactatatgaaagtggacttggctcaggggcaattgttaaacgcttgcctaaagggtggagtactgtaaacgtactgcgagtattacgcgataagaaagtagttactatgaagattatcgataatctcacttttgaacgggttaatgagaagttatcaaggagtggtatagccaatcgtattcgtaaagatataacaattgctcaggatgattacatcacaaacctgttccccaaaatattaaagtgtggtcattgtggagggaacatcgccattcactataaccatgtcagaactaagtacgtcatttgtcgcaacagggaagagaagaagatttgtgatgccaaatctttccagtacacaagaattgagaagaatattcttcaacttgtcaaaaacatcgatttcaataatttaatgatggaaggacagtctgattctgaccttttgctgacatcgttgcgagaagaattgtctactctgaagaaggaagaggaaacctatcagattaaaattaatgaacgtaaggtagcaggtaagaagacctctttaccattaatgactggtttgaccgaggttcaagatagaattgaagaaattgaatccgaaattttaaacgctaaaaatatcaaagaaatccctgtttttgactttgatattaataaagtacttgatccgatgaatgttgaactacgtgcaaagctaagaaaggaattaaggttagtacttaaatcagtaaagtactggattttcggaaaacgtattttcgttcagttagaatatttcaatgagatcctatcccatgtacttgtgatagataataagcggggtggtggtgaagtactacatgaaattgtcatttcagaatctaatggtgaacgtgtttatacggtcaatgaagaaggtaaaacagtattcatagcatcagtattgattggcactgatgcatggtcacttgcacttagtagaactaaaaaaattattgatgtaggtaactatctggatctgcttagtagagagaagattgaaatgataatccacgaaaaagatattgaatggattgattag

SEQ ID NO: 150745 - DNA, 369 bp, Enterobacter cloacae
atgaaatcggccagagaaactgctgttgaactggcagcgctcctgactctctgtcagacgcttcagtctgaaaaaaacggggtggggcgccacgcgccgagcgtgtttgccagcgaccatgaaacgttttcggagcgaattgtagaggcgtgtatgtatacgaaaatgctcaattatctgctccccatgcacagccagttggtcacggtgggagatgaaatggaacgacagagtaaaatccgggtaaacgctagtgaaagttatgcacgagtcgccttggatcatctgctggcgcagtatctgcccggtcagtcccggataaatgactgtgtggcagctttgccggcattttctgtcccactgatgtaa

SEQ ID NO: 150746 - DNA, 2667 bp, Enterobacter cloacae
atgaaaggctctgaatggaataaatgggacctgcacattcacagtccgatgacttggcttgccaatgtatacgccgataactgtgatatagagacctacgtcagaaagctgggagagcaacaactgtccctgataggcctgaccaactatttttatttccaggaaaatgaactggagattatccggagtgaaattggccggcagggtcttaatattacagtgcttggcaacgtcgagtttcgtctcgatcaacagaataaagacgaagcgtttatcaatgtgcacgttttgttctccgacaagctcagtacctcaaaaataaacgagatactttccagacttcctctgaagctgaccgatgatagtgggaaaaaagtatacgcttgtgaaagcagcgtacgtgatagcgggcataacgtggataccatcgtggttaacctcagtgatctgctcgaacatctttcgtcagcgctgagaccttttatcgattatatcgtagccgtctgcccgaatggttacggcggctaccgtccgggtgcaaccgggcgttcagcagcgattgctactgaaattgatcgtcagggacatattatttttggggaccccaacgatagagattacttcttaacgacaacgcgctatccgggagcctcgcttaaaccagtttttcactgctcggacgctcatcgggcagaacacattggccgcgcttacacatgggttaaggcgaagccaacatttgagggtctccgtcaggcattgctggaaccagaagctcgcctgcagttgggcgcggactggctggcgcaaaggcccccaaaagtacatttcagccatattgctgttgaaggcacaattttcgacgggcaagcaatccggtttaaaaaacagagtattcctctgaatcaagacatggtggccataatcggcgggaggggtacaggtaagagccttcttcttgacgcgctgcgctcccgctttgccggcgccacagcgtacggcattgaagaacgtgaggtcaacgttgaacatctgtcaatagagctggataagacaaacggtgaaaagacgctttttgatactcgcactgacagctatgactatctgcacgtttcgcagggggaaatcaaaaccctatgccagcaacccggccttatcagcgatgagatcaaaaaaatgcttcggctggccgactgcgaggttgcggacgaacagcgtagagggctgggtgaaaacctgaacgccttccaaacgttccgcgaatactatgtggcccaggatgagcgccagtactatatcaatacgcccgggtatcaggacgaagttatcaaggtcgcccaggataagataaacacactcactagtgaaaagaacaaagcactgattgaacgatttcgggcaaacagtctacgagccaccgcactgacgcgaggcatcaatgcaggaaatgcttttctgcgggaggctacagccgcagaaacatcactgaatagccgcctgaccgagatgaatacggtttccgccggcgtggttcccgtgccaccgctagatctgtcagagctgatggctagagtcaaagcctatatggaagcgctacagactcaactgatggagaccggagaggacaatctgcgaataactgctgaattccgggagcagggtattgaacaggacatcactggcgtgctcgacaaaattcaaggctatcagcgggaaattcagcaagcgcagctcagacatggagaaattcagcagcgtattacacagtacaacaatgacgtccggcagaggggaaacttggtggagacttatgtccgtcagcttctggagcagaaaacggctatcgactcctgctttgccgcactagcggaaaaaccacatcttaagcctgaccagcaggaactgataaaagagatcctgaccgatatacgtatttacggacagcctcactttgacaccgctaggttctataatggaatacttgagcgacttaaccgcggacggttccggactgcaggcgagcagtctggcacagaaaagctaactcaggttctcggcgtaaggagcattgatgattttgtggcacttgtccggggtgatgccatcatcgagcttcccgaggaacccggaaataagattacgcttgaggcctttctttggaggtccgagtatttcaacaatcagggaccctacgccctgcagcgcttcctctgcagccccgaacacatcagcagctatctgacggtgagggccgagtttgaatacaaaggaaaaacggttgagaagctgtcggctggacagcgcggaacgttctacgtttgcctgaagttggcgaccgatgcgtttggttctccatttgttttcgatcagccagaggacgaccttgataatgactttatcatgcgccagcttgttccgcttttccgcaaaatcaaactttaccggcaagtcatcatcgtgacacataatgccaatctggtggtgaactgtgacgccgaacaggtaattgtggccagcaatgaagatgaagtgatcagctaccgcagcggcgcacttgagcacggcgaccacgggcagaaaaacagcatgcgtaaggccatctgcgacgtattagaaggtgggcgtcaggcctttgaagcccgcgaacagaagtacggaatgctgtga

SEQ ID NO: 150747 - DNA, 291 bp, Enterobacter cloacae
atgagcaaagatggattccgtgctgatgatatcgccagcacatttgcccggttcgccaataaacgccgtaatattgtttgtgatgagtcaaagttgcagaggaagaaaccagaaccgcttgagttctccagtgcaaccaatgcatgtggaactgctgtgctggctggtatagcagatcttatgattattactccagaacgtaaaaaacaaaatgaagagtggagtgaaagctgggatgcagaaagagaagattgggaaagtcaagatagacaatggaatgataacagatga

SEQ ID NO: 150748 - DNA, 1545 bp, Enterobacter cloacae
atgactgcgaacagttttctggagtattttctcatcctgttcggctgggtgatgaacaacgccatgtggaccatcctcggcagcacggggctgttcgccctgccgctggtctttaaggtgatgggtgtgtggctgaaggtccgggaggaaggggcagacgaaggcaacaaagggttgctggcactgccccgtatcgagcatgcgctttacgtgtcgtttgtggtgatgttgttctgctgcattccgctgctgccggtggatatcagtaccattaaattcgacagttcccgggcaaaacagtgcggtgtcagtgttcccacgccgcagaactccggttacagcggactggtgaacgactttgacggccgcacggctgaggtgcccatctggtggtatctgctgcacatgatttcgaaaggcaccacgcaggcgatgattgcgtccatcccgtgcggtacggagctgcgccagatgcggtttgacgtgcagaacacgaagctgcgtgacccggtattgctgcaggaggtgcaggattttgcgaaccagtgttactcgcgggcgtactttcgtctcaagaacagcaacagccagctcagcgatgctaccattaactcggtgggctggattggcagcgactattttctgaatacgtccggctattacgattattacaccgccaccacaccgaggggccagtggccttatgacagcacgcgcgacagcggttatccggataccgggcagggaggctatcccacctgtaaaacgtggtggtcagatggctcgtccgggctgcgcaagcgggtactggccagctttggtgacaacacgcgtaaggagatgcagcgatcattcccggggacgcagtgggaagaggtcgccctgcgctggctggtcagtccgcgtaatgccggcctctccggagacggaacgacgtatgccgtgggaagttctgataacgtgaccggcgtggtcggtaatatgacacgactgacgtccactatcgggctgggcctcaagcaggcggaagcgctgccgggatttgatgcgctgaaacaggcgcttccgatgattcaggcgctgctgcagatgatgattattacggtaataccggtcctgatgatgttcagtgcctatgagcccaaaacggtggtgacgatatcatttgcgctgtttgcgttgcagttcatcacgttctggtgggaactggccgggtggctcgatgaccgtctgatcaccatcctctacgataatatggcccagcagggactggccagttctgtaccttttgcgaattttatcagctcaaccaacgacggctggatcatgaatctggtgctgggaatgatgtatgtggttttcccggtgttctggattggcatgcttagttggattggcgttaatttgggaactgcaatatcgacaggtttggaaaaaggtggttctttgccacagaaggctggtgcagaggcgggtagagatgcccagaagattgctacagataaagccggaggtgctttaaaagggggacttaagcttaaatag

SEQ ID NO: 150749 - DNA, 339 bp, Enterobacter cloacae
atgaagcgctcttttcttcgcggtcgtacgggccgcattgtcctgatgattgccgccttactgcttataaccgtggccatgttcgcactggcctctgtgtttatggcgtatgacccggatggccacctgacccgtcgctggctgcatgacagccgctgggcactgtttacctggcggctgctcatgtatgccggcatcgcggtagtctggcggatgaaggtccggccgcagatgctggcgcgctggccggaggtccgggctcgcctgccgcgcacggaactgctcggcgtactgtttattgcggccacggagtgcgtggcctgggcaggtgtggcgtga

SEQ ID NO: 150750 - DNA, 1425 bp, Enterobacter cloacae
atgaaacaacagtatccgcagcggctgcgccgccccctggcgacactggcacttttcgccgctctttccctgcctgcactggccgtgaatacatcgctttcgtccgatggcgcctcggtcagcggtgccatcaatgacggtcttttttactccattggtggcggttcagtgatttccccgccgccgagccgcagcaatatgtcgcgactcgggctgaacgacggctggagcagtgacctcatgtgcggcaacttcgacctgaaaaccactgtaggcaaccagcttaacggtatcaccagtgggtttaaggacctgatgggtaacgtgattcagggggcgaccggggcggtcatgagcatgccggcgatggccattcagcgcgccaacccgggtctgtatgaaatgctcaccaacggggtgcttcaggcggggctcagttacgacaaagccctgctgaactgccagaatatgtcgaaaaaactcgccgattacactgtgggcagcaagtggcagcaggctgctgtatctgaggagtacaaggatatcgtggcgtccagcggcggggatgcggtctccagcgaccagcaattgcagaaggccaccggtgaagaaggtgtcacctgggtcggcggccagaagcgcggtggtaaggggcagcaggccatccagcccacccgggacctggcgaaagccggttataacatgatgaacagcctgccggtgaccagcaacagcagcgtgggctccgccagctgcaatggcacggcctgtcagcgatggccatcgtccgatgatgcagccgccgcggtggtgaaagtgctgggtgaccgctccatccgtacctgccgtgagaccagtgaatgcaccagtggtggcacggacaatcagcccgggagtactgttgccggcaccggtttctcgccggtgctggaggatgcaacgaaaaccaacctggaacaactggataagctggtcggcggccagatccagcccaccgcggaaaatctgggggcgctcaaaaccggcagtctggtggtgacacgcggcgtcattcagtcgctgcgcgatgaccccgataaagccgctctggtgcagcgtctggcgggtgagctggcgatggccgacaccgtcgagaccgcgctcaccatgcgccgcatgctgaccaccggtgagtctgaaccgaatgccgccgagcagccagaggcgattgccgagggtgaccgccgcatcgatgccctggaccgggaactgaatgccctgcgtaacgagatggagctgcgtaaggccatcagtaacaacagcctgctcaccacgctggaacgtcagggtgcccgtaaccaggataaccagctgcagcagaaagccggcaaccaggaccagggcttcagccagatgaaccagacgcaatcctcaggagcaaagtga

SEQ ID NO: 150751 - DNA, 972 bp, Enterobacter cloacae
gtgaaaatgtctttctcccgcccgcgccggctggcgctggccacgttaatggtctgcacgggcacgatggccagcgtcaataccgccagcctgctctccagtgccaccagtccggactgtatcagctggcgcatcagcggcatctgttactggctgttctgcacgccgttcggctgctcggtgaaaacctccgtgaaggtcacgcattttattcctgaagccgtggtttcggcctacctcagcccgggtgccaatccgtggaccgaaatgtcggctgtcagcagcctggccgacagcaccgaaagcacgctgctcggtagtgctgcaggtgtggccaccggcggtggccgtcaggagatgaaagccccgggtgagcgcaagcagaacctgcacttttactatggcgatgcgtatggacatccggccaccagacttattggcgggatggtcccgggttattcgtgcgacagtgccgccacgccctttatgccgtacttcacaagtgctctcgatgcactggcctggcgcaccggcgtgccggaatcactctacccggaggcgcttatccccggacagcgtgaaatcggcagtaccatcggcggcaatatgtggggcaacgtctacccccgcagcggctttgtgacccagaccgacagctacaaatcggcggccatggtggtgcagcgcgtggctgacatcattacccgccagggacaactgcatgtttacagcccgctcaccggccagcgttcgccggggtactggccacccgaccccgtgcaggaaaacaccggtacgaaaaatcacaagtggcagcgtctttccccacagctgtcgcagagctgcgcggtgttcccggacaccggtggacaggaggctcaggacggcaactacgcctgggcactgtggcaaccgtacagttgttgcaagcgacgcgggcagacttttctttacagcaccgatttctcatga

SEQ ID NO: 150752 - DNA, 408 bp, Enterobacter cloacae
atgaaattacctgtctgctgcctcgcagcacttttccttaccgccggcgtccgtgccggcaccgtcatttataccgacagtacccacccggtcacgggcaaccccggtcctgaagtgaccgtcgttctgctcgatgcccctgaccggctgcaggcgcagctgttcgggccgctcccggcagacccggcgcaggctgagcagcaggcgcggacggttatcggttcaccggattttcagcgacgccagcaggaccttgccggggcttatgccggcctcacgcgtgcctggtcgctgggtcttgagaaataccccgcggtggtgtttgacgataagtgggtggtttacggcacctctgacgtcgacgttgccacacagaagctgaacgtatggaaggagaaggcacagtga

SEQ ID NO: 150753 - DNA, 2427 bp, Enterobacter cloacae
atgcgctatccctttgaactcgatccacagattatccatcacattatttacagccaggccggttccatcggcaaggccgtgatagaactcatcatgaacagcgtcgatgccggcgccggcgcggtgattatcgatattaccccggaaggcttctcctgccgggatgatggccggggttttgcgtcatacgatgatgttaagcgctactttggccggttcggcaccccgcaccaggagggcgatgccacttacggccgtttccggctcgggcgggggcagattatggcacatgcccggacgctgtggcgttcgcagcgatggcagatgtccgttgatacgcgtgaaatggggtatcactatgatctggaagaactgactcagccgattcagggatgcatcatcagcggtgaatggtatgagccgctcaccagccaggagcgtatgtcctgcctccaggaaatccgcgacctggtacgctatacgcccgtcacggtacatctcaacggcaccatcattacccggaatccggcgctggaaaagtgggatatggaggacgatgaggcctggtatcgcctgcgcgaagacggtgccgtatccatttacaatcagggcgtcctggtacgacatgacccggctcatatctggggcgtgggtggccttgtcgtcagtaaaaagccgctcgcgctgaacgtctcacgcaccgaaatcctgcgcaagacctgccctgtgtgggcatcgattgcggcccggtttggccggcttgctgccactttttctgacaatcagggtaagcaccgtaaaacggaagcccggcgggagaaaacggcgcgatcgctgctgtcaggcgagggagacatgcagagtcttttcaatggtgaggaggtcatcaccctgctgcccggaaagcagcatgttacgctggagcacttcatccgcaaatgctgccattacccctctgcggtggataaaaactgtttcactctcatccgttatgccggtgatgtgccccggggagaactcattgcccgtgcggggatcgcacccgtggtgcatccggtcacgctttcccgctttggctgttatgagccggaagagtttatggagtgcctgagccgtgtccgggaaaacctcatggcgtacagggaacccctgccccgggagcagcgatggggttccggctggctgtcagaactggcgctcgttgattttgagacgctcagcacaaactttatcgacagcacgcagatggtcagtgagaaacaactggataaggagacacggcgggcgtggacggcgctgcgatggtgtctggcccggtatgctgccgtctgttcggggggggaggcgggttatcagtcacgttcttacggcggcaaatgcttccagatcctgctgggtgagtccacgtcgtccgatgcctggacggacggtgaaacctatattgcctacaacattgatatcgtgcgccggctgaagcctgatgcgctgcgtaccgccagcctgttgttcagcctgacggaacatgaggtggcgcatgagggtgacagtctggactgtggccatgatgaggccttttaccagcggtttcatgacatcagtaccctgtgcgcccccgacaggcagcgttatatgcacgtctggctgatgaaatacaccaccagtctggaagcggagagcaagcgtgccaaaggcacagcatggcgggaacgttacctgaccgagcgagccagtaccggccgggagaaaaaggggcttcccggtgtcatcagccatgaaggcattgaggacgctgtgaacgcaccggctgagccggaagatgtagcccggctcagctttctcaacctgcagttgaacggtgcgggcacggtagcaccggcggagaccgactggaatagtgtggtggccgcgggtattgagcagacccgggtaaatcaggacatacgtggccaacaaaagaaactactggaggaatggtacgcttcagataaagatgagaccgatatcctgacggatgagcaacaggcagatgaagccgaagagcagatgtggctggagtcccgtaaattgcattacctgtccattttacccggggcgactgaggaaaatctgcatgacagggctgtggcatttcttgcttatatgaccgattcagaagaggaggaactggccgcctgggccatgcgggcctgggaaaacagtgaccagtggtatgccagaaataccctgtcgtgcagtgaggctgatttcctgtatgagcaggattttgatcagccacttggggaaaatgtcccggcagactggcttccgtttatgcaggagggcgaaacccgatggagcattgagcgtaacgcggcagcggccgggtttatccgggaaatggattatctggagtggcgtcgcgacagcgccatcgatgacattccctga

SEQ ID NO: 150754 - DNA, 234 bp, Enterobacter cloacae
atggaactgaaagacagtattgctgaaagtctggaacaccgggggcagtggcgccgtgccgcccgccggtggctggctgtgatggacctgtcggacgacgatgccgtacgggaagccattgcccgtcgcagggaacactgcatcagtatgggcgcaaacatagcaccggacggacgacgaaatgaaacacgacgcctgtataaaatgcagagtcgctacaacaatggctactga

SEQ ID NO: 150755 - DNA, 405 bp, Enterobacter cloacae
atgaagaaactgactatggcaccgccgatggtcgttgcggacaaagcgctgattgcgtctgtcatttttaccgtaccgccgcagggtatggcctcgatagggcagtctgacagcgtgtcgcttgatacgctgctgcgggaaatactgaaacgtctgaaaacaccgtttttgctgtcggtttacccgcaccgtgttggccgtcgcagttgcgtggcggtacacctgacggatgagaatgaaaaaaaactggatatcctgatcactgtgactggcaatacgctgtggcccggtgaagcggagttcagaaatggcctgcgctggaatgtctgcgtacccgacgccaccgacctgctgtgggtactgaaggagattgacagagttacgggcggggaaatctgcagttaa

SEQ ID NO: 150756 - DNA, 2799 bp, Enterobacter cloacae
atggccttttcacttttccgtcgcagggctgaagcgcaggaagcacaccagtacggtgacgggccgttttctgttaacggccatgaacccctgacgcgcgagggacgtctgacccgcagcgaggaagcgaagctgtatgagacggctccgtccatcatcgatcacattccctggggggaatatctccctgaacatcagtgcatcctgcttgatgacggcgtgtcggtcggggcagtttacgaaatcatcccggtgggcaccgaggggcgtccggattcccgcctggaggaaattcgcgacgtggtcgaaaacgccctgcaggacagtcttccggagctggatacacatcagtgggtggtgcagttctactgtcaggacgagtctgacctgatggtgtatatggataagatccgggggtatgttaagccccgggcgcagggcaccgacttcaccgacgcctggctgagggaacaggcccgtcatctgcagaatgtggccactgaaaaaggcctgtttgtcgatgaggccgtcaccggtgcgccgtggcgcggtcagatacgtcgtacgcgtatggtcatctaccgctgggtggagtcaccgtatcgtgacccgatggcccccgaggtgctgctgaagcaggtctgcgatcgcctgacggccgccatgagcggtgccggtattcagtgccagcgccagaacggcgagcagatccacagctggctgctgcgctggttcaaccctgaaccaacgtgggtggataaggccacactgtatcgctgtgccagacatactgacgacgctcctggcgaactgccgttgctgaatgatttcagtgaaagcctgtggttcacccgcccccgcagtgatgcggagaaaggcgtatggtggtttgatgacgtggcgcacagggcggtgccggtggctcgtctgcgcagcgcacccaccacggggcacctgaccggcgaggtccgccgtggcgataatatcaacgccattatggacctgctgccggaaggtacggtgcttgtcatgacgctggttatccatccgcaggacaagctggaggaaaactttgcccggctgagtcgtgactcgatgggggagaacgtggattcgctgcgtgcccgggaggatgcggccaccgcccgcacttacctgggtaataagcataaactgtatcgcgcggccattaccctgctgattaaagcccgcgacctgccttcactggacagtcgctatctcgacctcagcagtaagctactgaactgcgggctggagccggtaaacccggagcatgatatcgggccgctcagcacctacatgcgtgcattacccatgtgctttaatccggagcaggaccggcacaactggtatacccgtctgatgttcgtgcagcattttgcctgcctggcgccggtgtacgggcgtgataccggcaccggcaacccgggctttaccttttttaaccggggcggtggtccgctgtccgtcgatcccctcaacaaaaatgaccgtacgcagaacgcccacctcctgctgtttgggccgaccggtgcaggtaaatcggctaccgcacttgataagctggcacaaatgatagccatttaccgttcacgtatctttttactggaggcgggtaacagcttcgggctggccggagactactttgagtccctgggactcaccgttcatcgtgtcagcatcaagcccggtaaggccatctcgctggcgccgttcggtgattcgcatctgctgatgcaggaaaaaccggatgaactcattatcagtgaagacgccctgccggatattgatgacgatgaggacaaggatgaaaaacgtgatgtgctgggtgagatggagattgcagcacgcctgatgattaccggcggcgagccagcggaggagcagagaatgacgcgcgccgatcgcgggatgatccgggaagccatcatgatcgctgcgcggagtacgtttgaggccggacggcagatgttgcctgaagatctgatgtttgcgctgcagggcatcgcccgggatgccgggatgggtgaggacgggcgcgaaaggcgtacggccgcgcgccgggcccgtgctgaggaaatgtcggaagcgctacggatgtttaccgaaggctttgaaggtgagctgtttaaccgtccgggtacgccgtggccggaggctgatgtgaccatcgttgaccttggtacgctggcgcgcgaaggctatgaggcgcagatggccgttgcggtgatttccctgctcaacaccatcaacaatattgctgagcgcgagcagtacagtgaccgggatattatcgtgtcgatcgatgaggcgcatatcgtgaccgcaaatcccctgatggggccttatgccaccaagattgtgaaaatgtggcgtaagctgggtgcctggctctggctgttcacgcagaacctggccgactttccggatacggccaaaaagatgctcaatatggcggagtggtggatttgtctggtgatgccccctgatgaagtggagcagatagcgcgttttaaaacgctgaacagtgaacagaaggcgatgctgttgtctgccaccaaacttcctaaaaaatatacggaaggcgttattttgtcacgtaaggtgcaggccctgttccgtgccgtgcccccgagcctctaccttgctctgggtatgacagaaaaagaagagaaagctgaaagacgcctcattatgaatgaattacagtgcagtgaacttgaggctgcgtttcatgttgcgcgccggcttgatgaaaatcgcggactgagtatctga

SEQ ID NO: 150757 - DNA, 450 bp, Enterobacter cloacae
atgcaaaatgatatccctgataccgctgtgatgaggtggcgcagtctgcgtcccgtcacgcttttcctgaccggagccgtggcactgctgcttgccggctgcagcacatcaaaagatgagatgctcccgccgggtgacagcaccatgctggaactgtggaatgatggtgcttcagccacccatgcaaccggtgagagccggaccaccctgcgccgtccggttacggacagtgagcgggttatttcacggcagacccgggacagctacagccgcacccaggagaatgaaatccagcagacgtttccgcgcctgcccaaccccgacctggtgatgtacgtcttcccgcatctggccgacggcaacacgccggtgcccggttacagcaccgtatttcccttctacagccaggtacagtacgcgctgcccggcgagcgcacggaggatttgtaa

SEQ ID NO: 150758 - DNA, 1524 bp, Enterobacter cloacae
atgaaggcaccctcctcaaatcttctcgtgaaagtcgccgttccggtggtactggccagcgcggtggtggtgggcgtgaaatcctgctcagggggggggaatcagacggctgcaccacataccgccagcaatgttgcgctgaaggacctgtcgccggaagatctcaaagcgctgggtattgaaggtgacacgccgcaggacacactgcgcacggtggtgggaaatttccgcaaagtgcaggaccgtctcgatacgctcgcggacgataacaaaaagctcagcgacgaaaataaagccctgaaaaccaccaacagcaatgtggacacgcagattaatcaggcagtaagcaatgcccgtgccgaggaggcgcagaaacgccagcagctcagtgcagaggtcaccgatctcagtacccaggtcaaacagctgatggatcagttgcgcaatggcggtgccggcacggaatccggaaaaaacagcggctccggcagtgatattccgatcgggctgggctatgacagtgggctgaacagcggcgccgccggcgtatcgtcttccgctgatggacttcattgggtggagccaaaagacggtgtccccgttgatgccagcggccggccggtgaccgacagcaacaagaataacgccacaggcttctcgtttgccacgtcgtttgctgatacagctgatgccggtaaacaggccgtcggcaacaccacagcagcggtacagacgcagcttacggatgcacagaaggccaccgacccggtgtacacgctgccggagaattccaccctcgttggcagtcgcgcgatgaccgcactcctggggcgcatccccgtggatggtaaagtgaccgacccctatccctttaaggtgatgattggcaaagacaacctgacggcaaacggcatcgagttgcctgacgtgcagggggccattgtttccggcacggcgacgggcgactggacgctgtcatgcgtgcggggctccattaccagcatcacttttgtcttcagcgacggcacggtcaggacgctgccttcgcctgacggacaggggcagaacggaaacagcagtaatcagaacagtcagggcggtaatagcagcagtattggctggttgtccgatgataacggtattccctgcatctccgggacgcgcaagagcaatgcttcgacctatctgccgaccatcgccgcacttgcggccgccagtgcggcgggtgatgccgtggcggaaaaccagagtaccggccagaccaacgcttacggtggcgtgacctcaacgctcaccggtaatgccggtcaggccgtactgggtaaagcgctctccggcggcatgcgtgagaccgttgactgggtgaaggcccgctatggccagacgtttgatgccatctacgtgccgccgggtcagacagtggctttgcatatcacgcgccagctggccatcgattacgaggaaaaaggccgcagggttaaatacgatttcagcctggccggcagcggcacgggcatggactga

SEQ ID NO: 150759 - DNA, 909 bp, Enterobacter cloacae
atgaagaacccgttaaaaaaatgccgtctgctcctgctcgccggactgatcctgtcgggcgcggcagacgctgtggagctgatgaaatgggaacgtatcccgctgcaggttcccctgacggtgggtcaggagcgtatcgtttttgtgaataaaaacgtgcgtgtcggctttccacccgcgcttaacaataagctgcgtattcagagcaccggcggcgtggtgtatctcgatgcgagtgaggcgtttccggtgacgcggcttgagctgcagaacaaggaaaacggggaaattattctgctcgatgtatcagccgcaccgggaaaaaccacgcgtgaacccgtgaaaattgtctatgacggcgaagtggccaccgcaaccgccagtgacaggcagtccgtcagcagcgagggtgacagcaccggccgcagtgctcaacaggctgatacggaaaccacaaagccggaccgtaagcccgcgaaactgaatgcaccgctgccggtggtcctgacccgctatgcggcccagaacatgtacggtccgttgcgtacggttgaaccggtgccgggtatcagcccggtgtcactgaagctgccttccgtcatcaccacactgatgcctgctgaaccggtcaccgtcacgccgatggccgcctggagtctgcagggcagcagcgtcgtcgcgctgcaggtccgtaaccgttctgccggaaaggtcattcttgatccccgcgcgctggaaggtcagtttaccacggccaccttccagcaccgctggctggggcgcgcaggcacaccggaggatacaacggtcctctatctggtgacgcccggacgcccggagggtgccttcattgctgagccaccctcgctgcagcccgctgacggacataaacggagagcgaaaaaatga

SEQ ID NO: 150760 - DNA, 645 bp, Enterobacter cloacae
atgagtcgtttccgcaatggcatgaccgcgcgggataatcatattttctccctgcgcatcgcctgtgcgctgctgttcgctggcatgctgatggccggtattggctggatgcgtgcaccgtcagaacttaccatccacaatccgccggatctgcgttcaggcagcacccgtaaatggtgggaagtgccgccttccaccgtgtacagctttgccttctatatctttcagcagctcaattcctggccaaagaacggcgaggtggattatccggcaaaaattgcccagatgagtccttacctgacgccgtcctgccaggattttctcaataaagacgcggagatgcgtaaaaacagcgacgagctccgggaccgcgtgcgcgtggtgtatgagatcccgcgccgtggctacagcagccgcagcgtcaccattctcgatcaggaccactggatagcacagctcgatctggtggcggatgagtattaccacactgagccggtaaaacgtgcgctggtccgctatccgctgaaagtggtgcgctgggagggtgatccggaacgcaatcccttcggacttgctctggactgttatgcggccaccccgcagcggctggaggccgtcacgctgcctgagccggagaaaaagtga

SEQ ID NO: 150761 - DNA, 375 bp, Enterobacter cloacae
atggccgtcatcgatttccttcctgaccgtctgaacaacccgcctgtggtgtggaaaggtttcacgtccggtgaatttcttctggcggccatcaccggcgtcattgccggtattccgctggcggtgccgctggctctggtaccttttatcggctggctggcctttcccacctgtatgctgctgatgccgatgttcgtcatcttcttcggcgggggctggattgcgggttacaagcgcggtaagccggagaattatatctggcaacgcctggaggaaatccgctgtcgtaccggtctgtcccgtgccctgatcctcaacagccgggcatgggagatgaaacgtaccacagcgataaaacgcggaggtctgtcatga

SEQ ID NO: 150762 - DNA, 366 bp, Enterobacter cloacae
atgatatccacattactcaggcgttaccgggctatccgggcccgtgcaaaacacatactgctgacagggctattttttaccggtaatgccctggccgaccttcctcccattgaacaacccacgactggcggcggtggcgggacgtacaacatcatgatgggttacgcaaaaatgggcggtctcgcactcggactgcttgtcagcgtgggagcatttctggccgtggcgcatgctgtcatcacgtctttccatgatatccgcaagggaaaaggctcctggacggaattcctgctttacggtgtggtgggcatcattcttatccttgtagttatttttctggcgaccaaagcgtcagacattctgtaa

SEQ ID NO: 150763 - DNA, 246 bp, Enterobacter cloacae
atggcgatgaacggtgcacagcttaatggctggagcgccggcaccggcagcagcctcacgccttcgcaactgaacacgctcatcctcggcacgctcgcagtcgtcattctcctgttcagcgcctgggcgctggttcaggcctatcgcggggttgcctcgaaatccgtgacatttcgtcagttcaatgagcttgccgtgcgactgatcgtgctttacctggcaatgctgtttctgtttttccactga

SEQ ID NO: 150764 - DNA, 318 bp, Enterobacter cloacae
atgcctcatacccgaatcctcacagccctgctgatggccgtcctgcccgcgctgcagtgccacgcttcagagaaagatgaactcgcgctggtcatgcgccagctcgaccaggtgcaggccgggctggaccgcgcccgcgtggtggcgaaccagacccaggatgcccgcttttacttcgattatcagcaggcgacgcgcgatatcaccaccatgaagcaggggatctcaacctatcttgaaccctcccgcgcgcagcctgcgtcaccgtcgtcttctgtcaccggacagtaccgcgcacaggcaccggcatggcgatga

SEQ ID NO: 150765 - DNA, 762 bp, Enterobacter cloacae
atgccacagcaggacagtgagaacgggcagcgcagcgcgacgccccgacagcgacagtccggtccgattggcctgctgctctgggatttcccgatgggccttatcggtgtgttgctcggttcactcctggtcagcctgcttatcgagtatgtctgtattgcgctgttgtggccggaagaaggcgcggcccacagctatcaggtgatggtggcagaaagccactggctctcggaagggtatacgcgcagtctgctgatggccgccccggttgagacagtcagccggtgggtgcacgttgcctggcagtggctgtttgtggatagcgggttcagtggctggctgcagtcatttaaatccctgagcgaaaaaggtagcgggcttattccggcgctgaacggaatcggagccacgcttgtgagctggctgggtgtgtaccttcaggccacggtctgggtcacgctgatattcttcatccgggtaatgatcctgtttctcagcctgccgctgttcgcgctggttgtcatcacgggcgtggtggacgggctggtcagacgtgacctgcgtcgctacggcgcggggtatgaatcgagctttgtgtatcaccatgccaaacgctttatcaaacccgccctgtatggcccctgcatgctctatctggcctggccaactgcggtgtggccgaatctgctgttgctgccatcagccttgctggtcggtggtgtgctcgccgtggtgaccggctcgttcaaaaaatacctctag

SEQ ID NO: 150766 - DNA, 2118 bp, Enterobacter cloacae
atgagcgatcgctatgtgatggaatccctgctgcgcccggctgtggaactgtattccgcaacggttgcggccagtgcgacctgtatctgcctgaccgccccgtgggcggtggcactctcgccttctgtcagttgggtgacggccgccggtttcggcgttctggccctgaagcgcacccgcgagggcatgaaaattctgcgctaccggcagaatatccgccgtcttccccgttatgtactgaccagcgaacagataccggtcagccggcgccatctgtttctggggaaaggttttcagtggtctgtgcgtcatacccagcggctgattgaggcgcgtcggccggagtgcgaaatctatgtgcagccctccgtgctgtaccgcatggcgcgtgagatggaaaagaagatggagtacagcctcccctggctgtgccggctgacctgcacggattcggcgctgaacccttttcgccctttacccccggtcggcggcagcccggtgtatcacggtgtcgagcctgatgagactacggtgacctacgatctcggcgaacgcgtcgggcatatgctcgttatcggcacgacccgcgtgggcaagacccgactggcggaactgcttatcacccaggatatccgccgcacaaacgccgccggtgaacacgaggtggtcattgtgtttgaccctaaaggggacgcggacctgctccggcggatgtacgcagagtcgcaccgcgcggggcgtcaggataacttctgggtgttccacctcggctggcccgatatcagcgcccggtataacgccgtcggacggttcagccgtatctccgaggtggcctcccgcgtggccggtcagctctcgggggaaggtaactccgcggccttccgtgaatttgcctggcggttcgtcaatatcatcacccgcgcgctggtcgccctcggacaacgcccggactacggcctcattctgcggtatgtcaccaatatcggtgagctgtatgagacttacgtggataacttgctgagcgaaaaggcgccgcagctgatgaatacaacggaagccatgatgcagagcgggatcagcgataaggacctgccgcgtcatctccagggacggcctaacggcgtgaaaatctgggtgtcagagcaggtgctcggcagcccggaggggaaaaaactctgggacccggtgctggacggcctgcgcagcgcggtgcagtacgatcgcacctacttcgataaaattgtggcatccctgttaccactactggagaaactcactaccggcaaaacggccgcgcttctcgccccagactacaccgacctggacgatccgcgtccgattctcgactggcacaatatcatcaagtcccgaggcgtggtatacgtgggcctcgatgcactctccgacccggtggtggccgccgccgttggaaacagcatgttcgcagacctcgtgtctgagggaggccacatctataagttcggtctcggtgatgaggaagaggggaaatccgcaaaggtggccatcaaccttcactgcgatgagtttaacgagctgatgggggatgaatttatcccgcttattaacaaaggcggtggtgccggttttcaggtgacggcttacacccagacgctttctgacatcgaggcccgcatcggcagtacggccaaagcgaaccaggtggtgggtaacttcaacactctggtgatgctgcgcgtgcgcgagaaaaacaccgccatgctgctcaccgatcagctcccggaagtggatgtctaccagaaaacactgacatcgggtgtcaccgacgtctcgcgtcccggggaaggcacggattttaacagcaacgttaacgaccaggtgagtctggtaaaagtgccgatgataagacctgctgacatcatcaatctgccgaaaggccaggcctttgcactgctggaagggggaagactgtggaaaatccgtatgccgttgccggcggataacaacgacccacatatgccggccagcctgaagcatctggctgacagcatggagaaaaactaccacaccggtgaaacctggtggaccggtggtgacataacgtatgcaggagggccggatgccacagcaggacagtga

SEQ ID NO: 150767 - DNA, 777 bp, Enterobacter cloacae
atgagtgattttctggcgagaacggatgctaacccgccacactgggcgggggaggttatcggcaaatgggatgaccataagttgcgcctgtacggtggttttctccgccggcattactggaccgatcagggcagtattaatgtgttctgcataaaaggcaccgaccatcctgactatcaggggctgacctggcatgagtttctgcaccggggtaaacgcatggaccggaacattccgatgctggagcgtaatccgggttactacctggagactgaccgtaaaaaaccttccatgtattacaacagctatgacggtattgactggtatatcggtgctgacggcaatcaccgcagcggtctggcacggtttctgtttcatgagcgggaaatggcgtatctgcatggcgtgcatctgaaccattatgagttcgatgaacccctgctggccgtgtatctggcccttcgtgaggaactgagccagcatgcggcacagggctttcacatggacctgaatgtcaaccgcgttcatcgcgcccgggaggataccgcaggctggaaaaccgatatctattccacgtcgctgtatttcagtgtggggtcatggtgcagggaacacgctgacaacctggacatcagcgcactggctgcaccgcgtgatttttcgtgtccggatgagggatggcaattgcttgtgtctctgatggcatggcgggataagcgtactgcaacaaaacgtcccggatttttcagccggctgaccagcagggggcgtatatga

SEQ ID NO: 150768 - DNA, 375 bp, Enterobacter cloacae
atgcccagaatgctgtattccctgacagaccgcatcgtcgacctggttacctctcaggcggcaaaaacggccccgatggtcattttcgtcctcgtgcagtgtgtgctcagaatatgtattctgcgtcccctcattatcttttgctgcatggtactcgcggtactgatcgccgtgcctgttgcggtttttatcagtccgtcgttcaccccggatgtgctggctcagggcctcttacgggtgattcacctgctccccggggcgtataccccgctgtgcgtagccggtgcactgtctgaactggtttacctgattcgccgttttacggttctccctgatttctggccggataatgcggctcagcgaaaagggagataa

SEQ ID NO: 150769 - DNA, 645 bp, Enterobacter cloacae
atgccggcctcccttatcgctgagttgctgaacccgcacaggggactgtctgtcctggcaatgacgggggcggtagtgctggcattcctggcattaaaaccgcgcactgtcagtcagcgccgccatcgtcgctatcagaaacaggccgcacgggcgctgcttcgcctgccacagctgcgcgacgaggcggcaaggatggcctggttgcgtaagatgaacccgtatgtgttcgaggaaatgctgctgacggcactttcccggcagggcctgcgcatacagcgtaacgcccgttacagcggtgataacggcgcagacggtcaggtctggatcaacggtcgtcgctggctgattcaggccaaacgttacagcgccaccatcagtgccgcgcatgtttcggtattcgggttactgacagagcgcgaggggtgtccggggctgttcgttcacaccggccggaccggcgaggtcagccgggaagcctttcgccgctatgacggcatcatccttatcagcgggcagcgcctgctctggctgctgtccggtgaccggcgctggatggacacactgaccagaccgccacaccgctccctcaccccacaaagtcaacgtaaagaaccggcaccatcccccgtcatccgcgattaa

SEQ ID NO: 150770 - DNA, 531 bp, Enterobacter cloacae
atgaaaaatacgcttcgttatacccttgttttcacgcttttttcagggctgctgaccagtgcctttagtgcctctgccacgctgaccgtggtgggcgacctcggcggtgaatccacaggaccgctgtttgacgccatcaatgccggtccgggtcagtctgcaacggagtcgcccgttctcccgccaccgccggcatcgctttccctgtccgacatgctgccggtcagcacgcctgaaatgtcaccaggcgctgtcgccgcccggccgctgaatcttcccggcatgccgccggtgtttgtactgggtgacgatgcgtcttcccgtcattggctcacgcaccacgccaccacgctcagccgcatgcaggcaaccggcatggttatcagtgtcagggatgagcagggattaaacgcactgcgtcagctggcgccgggggtggcaatggtgcctgtcagcggcggtgacctggcccgtcgcctggcactgacgcattatcctgccctcatcaccgcaacggggatatcacagtga

SEQ ID NO: 150771 - DNA, 612 bp, Enterobacter cloacae
atggcagctcgccgcattctgatgctgggtgccgggattctgtttgcaacagcggcgtccggcgccacagacctgcaggttattcctgatgcgtaccggcagatagccgccgctgagcgggtgccggcggagtcactgtattcgctggcaatggccgaaagcacccgcaaaactgcctggggtgcgaagccgtggccgtggaccattaacgtcgcaggcaggggttaccattacagcacgcgtgaagaggccttcacggcgctgctcgggtttatgcagcgctggccgctgaaaaatattgatgtcggtgtggcccaggtgaacctgggctggaacgggcattttttcccgacataccgtgatgcgtttgatccgtacaccaatcttcgcgcagcggcccgtatcctgcgggcctgctatgacgcccgccccggcagctggcttcgtgcggcgggctgctaccaccatccgtcaggcggtgcgcacgcggcaacctatatggccattgtgcgacgcaagctcagtcagatagccatgaccggtacaccggcggccgtcggtcagcccgggttactggcccgaaattctctttcctggattgaaccgcaatga

SEQ ID NO: 150772 - DNA, 714 bp, Enterobacter cloacae
atgaaaaaaacactgatggcctcactgtttctggtgccgctcatgacctccgctgccacggtcaggacatcctccgcgcagagcagcatatccacatcgcaggagtcctccaccggcgtgctgagtgcgcagcagcaggcgcagcagtggggactgtctgacagcgactggagccgttatcagaccctgatggagggggatcgcggcattatgtcaccgggccttgacccgctgacggcgctgggtgtggaaaccgataacagtgctgaacgccgtcgcctggctgaactctgggtgaggcacgaataccagcgaagcgaaaaggagctggcctttcagcgcgaaatcaatgctgcctggctgcgactgtatccggagacgctggccgtcaacatgggcagcaatgcggcgggtatcgcgcacgacacacaggggcgtctcgccctgtttgtgaaagagaactgctcgcgttgcgatgcgcgtctggcggccgtgctcgccgacgaccgtcccgtcgatatttatctggtcggcggaaacagcgatgaggccatccgtacctgggccatccgtcacaacatcccggtggaaaaagtccgcagccgccagataacgctcaaccacgacggtggcctgtggctgcgctacgggcagggccagatgccggtgattctgcagcagggggaaaacggatggcagctcgccgcattctga

SEQ ID NO: 150773 - DNA, 858 bp, Enterobacter cloacae
atgtcactcagtcatgcctcgcccgatgaactgctccctgaagctcctgagcatcaggtcagtgcgccggaggtgcagtccgctgctgcggttaagccacgtatccggcttccgttcagcccccgaaaaattcttcagactggcagcatcattttgctgactgtcagtctgacgggttccctgatcgcgctggttgtcatggggcgtcaggtttcagacctgacaatacgtgttaacacactcgatgcggcatttcgcagcggccagataggccagctcacctcaaatatttcagcgatggaagcgcgcctgaagacgctcgaacagcaggcggccacgcttgcctcacttcctgctgctatgcagtcggccgatgagcagcagagcgccctgagaacatccgtcagccagcttcaggaggccggcaacgacaacacccgggcggtgactcagttgcagtcacgcgtgggctctcttgaacacgatgtacagcagtcccgggccgagcttgatgagattaaccgtaaggcggaactcacgcagaaaacgccggcgcctgaaaagccccggaccagcactggtgcagtgcccccccgggtgggcgccgctgtaaaaaagactgaccggtcagccaggcgtacggtgacgccggctgcaccgtttgtgctgaccggcattgaacgccgtggtggtcagaccttcgccgtcgtcattccccgcggtgtctcgcagatatcggccatgcgcctgctctcaccgggggatgccatgctgggctggacgctgcgctcaacggagggcagcggtgctgctgtctttctggtaaacggccgcgaacaccggattcaggttgaataa

SEQ ID NO: 150774 - DNA, 1209 bp, Enterobacter cloacae
atgtctgacagcagtgtgatatctttcctgatttttcaggggaataggatggcggtcaggaatcggataaaaaaaatgccactggcaaaagcactggataaatatttcagtgcggtctctgtccacaaacgtggtcatcttcaggagttttaccgcatcaacgttatcaagcgttcaacgctgtcactgaagtgcatggatgagattacctccgtggatatcgctgattaccgtgatatgaggctgaatacggtgagcgaccgtacaggtcgtactgtgagtcccaatacggtcaggcttgaactggccttactttcggcgctgtataatcttgcgcgtatcgaatggggaacctgctcacacaatcccgtcgaacacgtccgtaaacctgcggcgtcccccgggcgtacgcgccggctgacctccaccgaagagcgccggattgcgcgcgccctccgccagaaaaatccacagcttctcgccatttttcatctggcgctggaaacagccatgcgtcagggagaaattctgtccctgcgctgggaatatgtggatcttcatctgggtattgctcacctgccgctcacgaaaaatggcaccgcccgtgatgtgcctttgtcatggaaagcacgacaggttctgaaagagtttgcggggccggtgacggggccggtttttgattacacctcaaatggttttaaaagcgcatggcgggttcttctggctgagctggagatacatgatctccattttcacgatctgcgtcatgaagcggtcagccgcttgttcgagctcgggacgctgaatgtcatggaggtggcggcgatctcaggccataagagtatgaatatgctgaaacggtatacacaccttcgggcctctcagctggtcagcaaactggatgcccgacgccgtcaggcacagaagctggcaacgttatttgttccctatccggcagagatttcagaatccggcggcctgttccgggtgcagttcagtgacctggagcacacggctattaccgcagtaaatcgtgatgaagccctggcaaatgcagcttcacatcttctgcgaattcaggctctggcagcgcgagccggtaaaaggcttcctccaccgggtgaaattggcgtccgggaagctcaccgcgtactgattaatcccttccataaagggggagaggcagcaggcactgataacggaacttaa

SEQ ID NO: 150775 - DNA, 885 bp, Enterobacter cloacae
atgcattcaaaaacgaaagttgtacccgtagtttctaccaaaggtggcgaggggaaatcaacccaggccgctaatctcggtggttttctcgccgatgcaggcataaaaacccttattattgacggcgaccatgctcagcctaccgccagcagtatctacccgttagcatatgaagcaccctgcggcctatacgaactgctcatgcagaccgtagacctatcaaaagctgaaaatattatttcccgcaccacgatcgataaccttgatgtcatcgtctccaatgaccctcgaaaccttttacctacctatatgctcaatgttcctgacggacgcgtgcgtcttcgtaatgcactgtcaaatcaggttttcagtcagtatgacgtcattttgattgattcacagggttcacgttcagtgatgtccgaactgattattctggccgctaccggcgaaatgattgggatggttaaacctgttctgccggatgttcgtgaatttatgcgtggaactgtagctctgatggaagaactgatcccgtatatggcttttggtatcagtctcccacgcatacatatgctggttaattgtatggattatacgctgctcgcgaaaaccacagttgaacaggccgaaaacatcatagtaagcggcgattacagtcagcatgcagataagatcgtcatcgatatgctccagacccgcatttatgacctggacgtttataagcaggggcatgcagcaggtcagccagtgcaccgccttgagaagaaaaccagccgtaaaagcgattccgcatttgattctatgcatggcctcgcctgcgaactgttccctgaatgggtaagccttttcgatacgctggcaaagggaggtgagcgtgtctga

SEQ ID NO: 150776 - DNA, 1365 bp, Enterobacter cloacae
gtgtctgacgatcgcagaaatataccggggatttattcccctgatgctgaacagtctgtcatcgggggtcttatgctggataacgaccgctgggatgaagtggcactccgtctgagtgctgatgattttttccagaaagtccataaagttatctatcaggaaatgacccgtctggttgcggcaggaaagccgcttgacctgattacgctctcggagagtatcgaaagtcgcggtaaagatgcccttgaacaactaggtggttttgcctacctggctgagctcagtaaaaacaccccgagtgcggcaaatatcgttgcgtactgtgacattgtggccagaaccagccgggcaaggcaactggcctccattggcgctgaaatcaccgaatcagtcaggacacctggcaccgatattgacagggtgatggagaccgccgagcagaaaattacccgtctggcagagcgcgctgaaccagagcagggcgtcacgctgcttgaagggatggaaaggctgctgccagaactggagcggcgatgcaatgtgcctgacggtattaccggtacgccaacaggttttgaagaacttgatgccatgaccagtggtctccaggcgggtgacctggtacttattgcggctcgtccctcgatggggaaaacagcgcttctcattagcctgctactgaactcattgatgaaaaaatccggctcaaaggggcagctttacagtatggagcaacccaccgaacagatcctgatgcgtatgctcgcgtcgcttggcagtattgacctcacgcatcttaaaagcgggctgatggatgatgaggactgggctcgtgcaacagacgcgtcggcattgctgatgggtgatctcaacgacagtctcatcattgatgataccggctcactgacgccggcgatgctgcgtatccgcgcccggcgcaatgcccgccgctacggtcacccgtcgattatcgggctcgattacctgcaactgatgcggtgcccggatcaggaaaaccgcacgcaggaaattgcggaaatctccaggtcactaaaagcgctggccaaagagatgatgtgtccggtggtggcactgtcacagctgaaccgccagcttgaaagccgcgcggataagcgccccaacaacggtgatttacgtgattccggtgccctggagcaggacgctgacgtcatcgtctttatttatcgcgatgaggtctatcacgaaaacaccgaggataaagggattgctgaaatcattatcagtaaacagcgccagggacccacggggacgatccgcctgcagtatgaaggtcgttttacccgtttttctgacgtcgcgggccgaccggggaggagcgcatga

SEQ ID NO: 150777 - DNA, 1707 bp, Enterobacter cloacae
atgagcaacgtccgtaatcttaatcttggcgcggccatgctgcagcgcggcaaaaccccggctcagggtgatgcggttcccgccgcagtccccctgccagtcagcgagatggcaatggtcctcactcttgaccaactgcgccctaatccggacaacccccgcaagagccgtaacccacatttcgatgaaatcaaggcttccatcagggcctgtgggttggtccaggtaccgaaagtgacacgcgatccggacggcgaagacgtttacattttcagcgacgggggtaacacccggtatcagatcctctgcgaactgtggcaggagactggtgatgagcgtttctatcgcgttcacactatttttaaaccctggccaggacggttgaaatgtctggtcgggcacctggcagaaaacgaagtcagaggagacctgagttacatagataaagcgtttggtgtacacagtgccagagccattcaggaagagctgatgggacgtccagtgactctgcgagaactatccgatcttttaaaccttgaaggctatcctattgactattcaaccatcagtaggatggaggataccataaaatatctctggccctgcatcccgaacttgctcaacagtggtctggcacgtctgcaggtgctgtcactgctgcgcattcgttcccaggcaggaaaggtctggtcgcagttcgcacatgagtcctccccgcagtgttcgttcgatcaggtctttgaggcgagttgccaggggtttgacgatcctgacagttatgcatatgagacattccgtgatgagtttatcggtcagctggttaaggcgctgccacatcccagcctgaactatgaccgctggatgattgaactggacccccgcgagcagaaacgccgtgagcagtttggtgagccgcctccgctgcccgtactgacgccaccacaggaaaaagcggcaggtcgtgaacccccggagccgcaggtgactgtcctgcctccggatactgcatctgaaacgccggtcacgggactgcgcagcggcacgctgaccacacccggacgccctgagccggcaccggaactgcccgcagatgctgaattgcctgtgaacgcactgatgaccgccggcagtgaaccacgtcgtgaagtacagaatgatctgtttggcggacggccggtcatttctggcgaaacggctgaccctgacagcatttctctccctgatttcagcccggacacactgatgtcagcatttggcgaggagaatgcgtccccggctgcgtccgtcagttcggtcgcctttgccgcaaccggacttgagcccgtcagtgatatctggcacatcccggccctccaggatgatattgagcacctgcaggatatggcttaccggcttgtcttcgagattgctgaggcgatgggctgcgcggacaatgtgcgggaggataaaaaccctcagtcagcaggctttgccgtctccgaaaccggcagcgaatttgtcctcttcctggcgggcctgtccggctcgctccccaacaggcagttcaatatgtttatgttctgcctgaatttcttcggttctcagtcaccggctgacatggccgtattcgacgatatcacggtcgtgaaaacaatgcgccttatccgcgttatccgccgtctgcgtgaactgcagcgactcgctgcgaaaggaggggaaaatgtctga

SEQ ID NO: 150778 - DNA, 258 bp, Enterobacter cloacae
atgtctgatgatctgaatgatgaaatggcccaggccagtacagctctgttcatccagcacggcatcgatgccatccgggcaaaggtaaactctgcaacaccgtcaaaagcgttctgcgaatgctgcggtgcggctattccggttgcccgtcagcttgcggttccgggcgtggagctctgtgccggttgccaggaggtaaaagagatgaaaaaccgtcaccgggccgacggtggcagggggatgcgccatgtcggataa

SEQ ID NO: 150779 - DNA, 744 bp, Enterobacter cloacae
atgtcggataacgcaaaaatcactgcccgtatccggcgcctgatggcgctgggcacccgcaacagcaacccgcatgaagccgcgcgtgcggtggcgctggcacagcggctgatgcagcgccacgggctgacgccggacatgctttccctcagtgatgtcagtgagtcagtctgtttcagcctgaccagtgatgcagaaaaggtgccggcctggctgagctcgctggcaaccgtggtctgtatggccacgggctgccgttgctggtttggctggcatgttcatgtcagtccacagggcgtgagcagcgtgcgccgttcactgcacttttatggattcagcgaacgaccggaggtggcgctctacatctataccgttctccagcggcagttgcgtgccgccacagacgcacatatgtccgggtatcgcacgcgccgcattcttctgcgcacgcgccgtcgccgggcagaccagttccgcgagggctgggtatccggcgtctggcaggtgttgcagtcctttgcaccctcgggggaagagaacgccgtactgcagcgctggctggtccggcgtcatgcaggcgagccgctggaagatatggcggtccggtctgcaggcaaatgccggggtgacagaacggcccgggtggccggttttttcgcaggtcgcgatatcgacctccatcatggtctcagtggcgcacaggcttcccggcagataacggcgggagggcatgcacatgactga

SEQ ID NO: 150780 - DNA, 600 bp, Enterobacter cloacae
gtgagccagcataatctttctcaggccaccacggccattctgtcctcactgctgatggacgtcaaaaacggcaatatccgccgctgtgagtcactgggtatgtcggtcgaggaaatccgtgcgctgagtcatctgagccttgatgaactgcattacctcagccagtcacatgtttccgttctcgatgtcaccctgaaccatgaaaacttctggctgatgctgaatcaggcccgcaatgagcagaagcgcttcatgatgattgaccgcgcactggagctcggcggttcgatggagctgattgaccggtattttggtctgtctccttcggaggtgagcgcccgccgccgtctgatgggcattgaatcccggcagggccgaacccaggccctgacagagccacaggacgccgcgctctgggccgagtggaaagcggcagggttgtcatcaccggactcccatcaggcgctggaggcgatgatgctggcggccgagcaactggggctttcactgacggccgtatggagccgggtctgccagtggtgtcgggaggcgaatgccgcaggccgccgggctgaaatacctgtgcgtaaggaggcgtga

SEQ ID NO: 150781 - DNA, 231 bp, Enterobacter cloacae
atggaaatgggtgatttctccccccggcagcaggtgtcaccggcagtacgccgccgcgcgcagcagctgttccgcgctgcctgcggtggacagaaggtgttccgccggctgaccatgaacggctacctcaagatagacgtggggccgttctggcgcattctcagtaaggatggctgccggcagtggtggctgatggaccatgagacctacaaccgtgaaatacggcggtaa

SEQ ID NO: 150782 - DNA, 1239 bp, Enterobacter cloacae
atgaccattcccgccgacagcatcgtggcgcacacgctcgccagaatgcagcagaatcttgagcggcgcaccgataccggcgatgtcagccaggagcgcagcgggctgctgttcatgggcaacgtgcacgatgcgttcccgcgcaggctgtttctggatacacgcctttcaccgctggataaaaccgcctgggtaatgataaggctttatgcccagcagaacgaaggggccatcttcccgacctacgatgagctgcaggttcagcttgcctccgcgcattcagagaaggcatcgagggatacggtcagccgcgtcctgctgatgctgcgcctgaccggctggctcagcctgtgtaagcgggtacgcgatgaccgcgggcgtgtgcggggcaacatttacgcgcagcatgacgagccgctgggttaccgtgacgccgaaaccttcgatccgggctggcttaagctggttgaagagagttgccttagccgtaataaagctgtccgcatgaccgcgctggccgtggtgaatgacatacttcaggaccccggaatgcgtcaccgtcacagtcgcctggcccttatcgaaagtcgcctgagcgcgccgtccacacccaggcagatggtcagtcatcgccgggcagtgaaccggagtccggaatccggactcagtcaaaaaagcaccaaaaacatcccggaatcactgagtccggaaaacggactcagtaccccgtcagtggataaaacacagagtccggaatcaggactcagtctgaaatcaacgagttacaccggagtccggaatccggactgtaacgtacgttctttcacacagagtgtgaataaaaaaacgtacgtaccgggcggggaacattttctgcctgacgattttgtgaacggactgaacagcgatgaccggcagatgctgaccacacagatggcctcactgcctgaggcggtggcaaagacgctggctgacatgctgcgtgagcaactgcggcttggcaggctgaataacccggtgggctggctgttcacgatgctgcggcgtgcccgcagcggtgagctgaacctgccggaagcagcagcacctgcccctgccggctccggcagcaacaatccaccgacaaccggtacgcgtgctgtaccggcggcgatcatccccgtgcagcctgccagacggccttcccgcgatgaggtcagggcgatgatcgagagcatacgacagaatgttggcagataa

SEQ ID NO: 150783 - DNA, 723 bp, Enterobacter cloacae
atggcagataaacaggtaacaaagacaggctcgcttcagtcagaaatgacaattgcgctccataccaattatgcaattggtttgtggctgggtcgcaaacgggagaaacaggaagacaatactcctgttaaacacggcatcatcgggatgcctcagttcttcgtgcgtgcaacactgattaaccaggactccctgaataataatccgtgggcagatgaagccatgtaccgtctggaggaaaagctgagatctgcaacagagacgatgaccgggcttattaagcaactggatgaagagatgagtatgcttccagcaggtattacgctgacagaagttacttcggtcgaaccactcgatattcatgtgtttacgcgtactcctctgggataccggtgtgtgtttctgctggtcgggtttgaccagtttgccaagaaggttcttcaggcgtcacattacgggctgattacccgtaatggccgggataattatctcagtgaaggtgggcgacttttgcgtcagatttacgggacggttctttcttaccgcagggtggatgcgacacgcctggatgcagcagagaataatgaagtctggcagaaggcctgtcaggaagcgggtgagcccgatcgtgccgtgctgctcggagaaaaacgttccgcattttcccctccagttaatgaagcgagcgtgaacctgctgcgcctgcgttatcagacagtctga

SEQ ID NO: 150784 - DNA, 2013 bp, Enterobacter cloacae
atgcggctatttatctgtgaaaaaccctcgcaggggcgcgatctggccggggttctcggtgccacccggcgcggtgacggctttctgaccggcagcggagtcaccgtcacctgggcagtggggcacctgctggaaaccgcaccgcccgaggcgtacggtcagcaatacggtaaaccgtggtcactttcggcactgccgatcctgcctgccccctggcgggttgtggtcaaaaaagagacgcaggatcagttcaaagtcatcgagcggctgctgcgacaggttgacgatgtggttattgccactgatgcagatcgggagggggaggtcattgcgcgtgagctgctggaatactgccgctgggaaggtccggtgcagcggctctggctgtctgcgctggatgaactcagtatccgcgcggcgcttcaggacctgcgtcccggtcaggccacgctcgggatgtatcacgccggactggggcgtgcccgggccgactggctgataggtatgaacctctcccgtctttataccctgcgcgcagcggagtccggttttgatggcgtggtctccgtggggcgtgttcagacgccaacgctggcgctggttgtccgacgggaccgggaaatcgcagcatttgtgccgaaaccgttctggcaggttaaagcgcttatttccgccggtgacctcacctttccggcgcagtgggtgccggcgaaggtgtataccgacgaggaaaagcgctgtgttcaccagaacatcgcgcagcaggtggcacagctctgccggcagacaggtcacgccgtggtgaccgaatgtgacactaagcgtgaaaaagccgccgcgccactggcgttttccctcgggtccctgcagcaggcctgtggcaggctgtgggatatgtccccgcagcaggtgcttgatactgcccagagcctgtatgaaaagcacaaggccacgacctacccccgtaccgactgcggttacctgccggaatcgatgcgggaggagatttccggtgtgcttgatgccatcggccgtaccgacccggaatgtgcgccggtgctggctcgcctcgacagaacatttgtctcgcgcatctggaacgacaaaaaaattacggcacaccacggcattatccccacccgcaatgcgtttcagctgtccgcgctgacggagaccgagcgtaacgtctatatgctcatccgccgtaactatctggcccagttcctccccctgcatgagtccgatttcacacggctgcagttcgacactggcgggcagctgttccgtgccaccgggcgaacggaggtgataaagggctggaaggttctgtttgagaacgctggtgataatgaagttgatgacggcgatgaagcagacattgccctgccgccgctggcgcagaatgaccgctgcgcggtgacgggggctgaggtggtgcaactgatgacccgtccgccggcgcactatacctttgccacgctgattggcgccatgatgaacgcggcagcatttgtcaccgacgtcgcgctgcgcaaggtgctgaaagacaacgcgggactgggcaccgaagccacccgcgccggtattgttgagcaactgctgaaccgtcactttatcgtgcgtaaaggcagtaaaatcatggcgaccgaactgggtgccgatgtgattgatgccctgccgccgcaactgaccgaaccgggcatgacggcgctgtgggaacaggcgctggatgaggtcgccgccgggcgtatgtcactcgacgacttcctgcagcggcagactggctggacgcgtaacctggtcagtcagggcacacagcagcaggtgcgtatccgggttccgcccacgcccgcctgcccgctctgcgggggaaaaacccgtctgcgcaggggagagaaaggggaattctggagctgccagcgctggccggaatgcaaaggtgtcatcaacatcgggggcaccagaaagaaacgaccgcgcagggctaagtctcctgaatcaaagaagaattaa

SEQ ID NO: 150785 - DNA, 501 bp, Enterobacter cloacae
atgtccgcacgcggcgtcaacaaagtcatcctggtcggtcatctcggtcaggaccctgaagttcgttacatgcctgacagtacggccgtgaccacgctttctgtggccacgtcggaaacctggcgtgataaacagaccggtgaaaaccgtgaaaataccgaatggcatcgtgtcgtgctgtttggcaagctggccgaagtggccggtgaatacctgagaaagggttcacaggtgtatatcgaaggtcagttgcgcacccgcaagtggaccgataccaatggtattgaacgctggacgacagaagtccgtgtgggcgttaacggaacgatgcagatgctgggcggtggccgtaataacagcaccaacaccagtggaaataatgcgcagtcaggtcagcagggcggctggggccagcctcagcaaccgcagcagacaccgtcagcgccacaaaatccgcaaaatgaacctccgatggattttgacgatgatataccgttctga

SEQ ID NO: 150786 - DNA, 285 bp, Enterobacter cloacae
atgcaaactccagtccgtaaatccgtccgtgacaagcaaatcaatatccgcgccacggatgaagaacgtgcggtgattgattacgctgcgagtctggttaataaaaaccgtactgatttcatcattgaaagggctgtgcatgaggcccagaacatcattctggaccagcgtgtgttcgttcttgatgatgcccgttaccaggcgttcatcaggcagcttgaagcccctgtgcagaatgttgaaggtcgtcagcgactgatggatgtaaaacctgaatggaaataa

SEQ ID NO: 150787 - DNA, 483 bp, Enterobacter cloacae
atggaaataaatgtcactgcgcctgctttactgacagaggagcatgttcttcattcgttcgattgcgggaatgcggtacttgatgactggcttcgccggcgtgcgttgaagaatcagcatcttaatgcttcccggacattcgtcatctgtcctgaaggtactgcgtgtgtagtgggttattattcccttgcgacgggctcagttagtcatgtcgacttgagtcgtagtctgcgacagaatatgcccgatcccgtaccggttgttttgctgggccgccttgcagtcgatgtatccactcagggcaataacttcgggaaatggttgctgaatgatgctgtgatgcgcgtatcgaatctggcggatcaggtcggcatcaaggctatcatggtgcatgcaattgatgagcgggctaaagcgttctatgaatactttggttttgtgcagtcaccggttgcggctaacacgcttttctacaaaatataa

SEQ ID NO: 150788 - DNA, 1287 bp, Enterobacter cloacae
atggcagtaccttccagacgtgtggcaacgggcgctgccctcctcgcctgttcagttatacaggcgggctgcagcagcgccgtttctgatcccgcgccctttgcaaacggccgctatcagcagcccacccgcttcgatgatatttaccgcaaccgggcccccgacgtggttcgctatgaccgttatacgctggtcagcacgcgcccggacgatgcacagcgcgatccactcaatcagattgtcgatatcaccatgccggcgcaactggtcaaaacggtcggtgagggctttcgctatctgctgctggagtccggatattcactgtgctcagccacaacctccgcattttcagaacttcttagccgtccactgccggccgttcagcgtgatatcggtccggtccggctcagtgaagccctgcagattgtggccggcccggcctggcgactgaaggtggatgacgttaaccgtgaaatttgctttgaactgcgggaccagtatcgcagcttcgccgcaccgttgccggctccggtctcactggtgtcacagcatgcacccgtcagtctccccccggtcatacagccagcccggactggcggggccgccggcactgtcaatgctgtgccgcgtaatccctttaccggtgatacgagtatcaacagcaccccggggaccctgcaaaaaccggtacttacggcgcagaaccagtccgtcccgtcaccggtactgacagtggcgaagacacctgcagcacagaagtctgctgcgctgtcgccagccgggcgcccgccggtgccaccacctgcagctgcaccgaaagcggcctcatctcagaaaacccctgttacagccgttcatccggttaccgtacagccagctacagtgaacgctgcccggcagactgtgcccgtccggcccgtcacctcactgccgccggctccccccgtctccggtcagaccgcttcttcatatataccgggggcgccggtcactcctcagccagttggccagacgtggcgtgccgaaccgggttccacactgaaagagaccctgacgggctgggcatcaaaggcgacgtgcagcaatggcggaaactgggtggtcatctggccggtatcactggattaccgcattgatgcgcctctggtgtttcacggcaacttcgaatccgtcctggtacaggtctttgatctctaccgcaaagcggaaaaaccgctgtttgccgaggctaaccgcattcagtgcctgatttcggtgagcgataccccgacgggcggagggcactga

SEQ ID NO: 150789 - DNA, 444 bp, Enterobacter cloacae
atgggctatgcgctgcccgtctttgttttctgtctggtcattgcgctgatggccggcgatgcgcagcgtcactccgctgaacacgtccggctgtcgctgcagcagaccctgcctgaccagcttgccaccgacatgctgcgcaccgcggatgcggtgaacaactggcgccacggccggacggtcgctgacggcacggtgacacctgcacaggccggcatcgtccccgcgcctgacagccgtattcagaccgtgattcaggggggacgcctctgggtctgggttcccgccactgatggcgtgtatgcggcactgcgtacgcagtccgtgacctcggcactggcgctgaccgtcagcggcgggcggctgcggatggcggacggcaccgatatgaacctgtccctgccgtccggcgtgacggagggcagcattgtttacctcaactaa

SEQ ID NO: 150790 - DNA, 1674 bp, Enterobacter cloacae
atgccgcgtttacctttctgcctgacagcgctggtcgccgcgctggcgctgtcatcatgttcgctgaatgaaatcagcaaaatggacaaggaggcctcggggcaggccgataccgctcagcgcgtactgcagagtcgccagaccctgactcagcccaccgttgtctggtccgataaaccctgggtgaacctgcagccggtcacgccggtcatctccacgccggatgagaagaacctgcccgcctgccagattacgattaaccggccggaggggatttcgctgccggagctggggcagcgtatcaccgcgctctgcggcatccgcgtttccatcacgccggatgcctttgccgcactgagcagcatttccaccggcagcgtggtgacgtcgcaaatgaacggtcagttgccggcaccggatgataatggccgcgtacctttgtcacagatgggcaccacgtctgcgcagcccgtctccgttcagtcatctccttcgcttatccggggcctgaaatatcagggcgatatccgcgggctgctggatatggcagcgagtggtctgggactgtcatggcgcatcgacagcagcggcgtgtatttctaccagcaggatacgcgtacctttcagctcgtcatcctcaacacgaaggtgaacagcagtgcctccatcaactccggctccggtaatcaacttggcagcggtggcggtacatccggggggaccaccggcgacatcagctcgaaccagaagaccgactatggcatgaacagcgacctgtacgatgacatcaaaaaaacggttgagcagatggtgacgccaaaatccggccgcttctggctgtcgtctgccaccggtacgctcagcgtaacggatacacccgatgttctgaatcgtatcggtcgctatatcgaataccagaacaaggttctgagccgtcaggtccagcttaatatccagattgtcagcgtcaaccagacgcgtaacgagcagatgggactggactggggactggtctataaatcgctgcagaacgtgggtgccagcctgaccggctcaatggcgaacgcctcctcatccgccgccagcgccggtatctccattcttgatacggccagcggcaatgccgctaaattctccggctccagcctgctcattcatgccctgtctgagcagggcaacgtcagcatggcgctgaaccagaccgacccgaccgccaacctgacgccggtggcctatcagctctcgaaatccaccgggatgctgaccagctccagctcgacggccaccgccaacgtgggggtgacgtcaacgatgaccacgaccaacgtcaccaccggtctgttcatgaccatgctgcccttcattcaggaaaacggtgatgtgcagctgcagtttgccttcagttataccagcccgccggatatcaaaagctttgtcagccgggacggtaatacccgcaatgataccgcagacacctctaccgaagggctcgcccgtaaggtcaacctgcgctcgggccagacgctggtcctgaccggttctgaacagcagaacgtctcggcggataagcagggcacctttacgccgggcaactttatcctgggcggcggtcagaccggctcgcggggccgtaccacgctcgtcatcatgatcacccctgttctgctgaggtaa

SEQ ID NO: 150791 - DNA, 1281 bp, Enterobacter cloacae
atgtcatcacagaaaaaaacagcacgccgcaccggtattcgtctcacacaccaccggcgcgactggatggccggtcttcactgggcgccgcagcacagtgtactcagtgttcgtctgcggggcagggcctcgccggacacccactgcgtgacggccggcagaggcagcgcttccatggcgggcgttgtctccccgggacgcgtgcgtcaccgcctttatgcccttgccgtggcttttcagttgtccgaaggcggtaatgcctggggtatttaccgtctgagccgcgatgaagacctgtgggtgttctttgccgccagtggggggcagctttccgtgatgggcgacgtgaccggcacgcgggcattcattgagtcagccgcacagaattttctgcgctttaacgatgccgatgcgccgggcctgcgctgtgcggccacggctgaggatggccgcgatgccaccacgctcacggacaggctgagtggtgcacagctcaggcgctgccgcctgcgaaaacgcctggcaccaatgtcgctcatcctgccggctgtcgtgctcaccctggcgacggctgccggcgtttactggcacgataccgtgcagcagcaggcagaccgggataaggcgatggaggcttctcgctcccgtgtggcgccgaaaaacgataaacctgccctcccggcccgtgcaccgcacccgtgggcctcacagcctccggtgtcagtgctgctcagcaactgctggctgacgcgggagccggtctttgcctcggtggccggctggcgttttaccgacggtgagtgtgtgccggaaggactgcggctgcgctttgtcgccacccccggctcaacagtggaagacttctcccgccgcgcccgtgaactgctggggcatgcggccgtttttaacctgcaggaaggcgggaaaaatggtgatgttttcattccattccgtaaatacctcgcaggcgagtacaccgatgaagcgctgccgggtgccgaggcgcaactgatgcggtttatctctcacctgcagcgccgcaacctggacgtgaaattcacggaggtgaagccgcctgccgtcgcgccgggtcaggaaaaaaacacgcccgtccaggactggcgggaattcaccttctccgtcagctcgcgtctgcagcctgagcgcctgctgcaggattttgatgccgccgggcttcgcctgaccagcgtgtccatcaccatgagcccgcaggggcagttcggatacaccatgaaggggagcatttatgcgcagaattaa

SEQ ID NO: 150792 - DNA, 498 bp, Enterobacter cloacae
atgcgcagaattaatcccgcccggacggggctgctgctgtccgttctgctcagcgggcccgcgctgtcagccaccaccgccgatgcgctgccaccgaacgtcaccctcggggaactggaagccacacaggccaggaacctgattctggagcagaaagtccagaccgcccgtctggaacagcagctgcgcgaaagccagtccgggcagagtaccgaccgtaattatctggcgacatccctgcaaccgtcagccccgctcatgacgcaacccgtcccgtcacaaacggccgcgacgtctggcacggagaagcgtgccggcagtgtgcgcctgcaggagatttacggtcgcggcacacagctgcgcgcccgcattgtgctgccggacgggggcgtcaccgaggtggcgaaaggtgaccagatccccggcactgctaaacgggtcacggaggtcacgtccacgctcgtgcgcctcagtgacaattctgaactttccttctga

SEQ ID NO: 150793 - DNA, 1575 bp, Enterobacter cloacae
atgacgcccgataaagacattatggattttgtgtttgccgaacagcatccgtccggcggcgtgacgctgcttatcgacggtaaccggcgaaaagaaccggccatacagcgctgggtgatggatgtcacccgcgagtatccgacggcaaagaccgagtttgtgacgctgagcgagctgaaccgccggcgtgaagtggcagagcgtcaggggctggccctgtcccggagcgtcagtgaaagtgatctgaacagtcgcgatatcagcgtatcgcaggataaggtcatcagttatatgaaactgggaaacgagttcagtgcgtctgatatccatattgaaatcagcgccgaccgtaagctcagcatcgtccagttgcgcattcacggcgagctggaagtggtggatgaagtgaaagatgtggaggggatgacactggcctccacctcctatctttccatgtgcgacgtgcgcgagcagtcattttttgccggccgcgagcagtcagggcgcatcgatgcgaagtttgcccgccgtgccggtctgtatggcgcccgctatgaacaccgtcccacgcccgacgggcttattgtggtcatgcgactcattcctgatgacggcgataacattcccgggctgccgcaactgggttttctgccggagcagataacgctcattatgcagatcctgcgcctgccggaaggcatggtgctgctgaccgggcctaccggttccggcaaaagcgccacgctgcgtgtgttcagcgatatctggctgaaactgaccggcgggaaaaagcgcctgctgacgctggaaaacccgcccgaggggcgtattcccggcgccatccagacgccggtcatgccggctgacaactcgccggaagccatcagccgcgcctggagtaacgccaatgcctccgcgctgcgtctcgatccggatgccatcctgaacggcgaaatgcgtgacctgtattccctcatcgccgccatttacgccagtgaaaccggccacgcgctgttctcgaccctgcatacccagagtcccatcggttccctgcgccgtatggagcacttcggcattgaccgccaccttctggcggatgccgcactcattaccggcctgataggccagcgtctggtgccgctgctgtgtgaaaaatgccgtattccctggcaggtgaaagcgcctgagcttgacggcgaaacgcgcgcgcgcctggaaaaatactgcaccgtggagggggtatgcgacaccggcaaactcttcttccgtaatcacgagggctgttctcactgccagaaaacggtgccgctgaccggccgcatcgtcagccgcggcgtaaccggtcgcacggccattgccgaggttgtccgcacagatgcccgactgatgcagctctggttgtctcacggcccggccgttgcccgtcagtactgggtaaaccaggggggtatcacccgccgtatgcatctgctgcgttatctcgcgcaggggcgcgttgatccggtggaaggcgatcttatctgtccgctggacgaggacgacatcatgcagtgtgaggtgccaaatgtcggttaa

SEQ ID NO: 150794 - DNA, 1116 bp, Enterobacter cloacae
atgtcggttaagacccgtttttcgcctgagcgtgacatgtcgctggcggaaatgctgcggtatcgcctggtcagggcaacgtttaccgggcagtatcgccagccgttttacgaaaccctgcgctttctgctggaaaaccgcaaagcactggaagaggcgctggccatgattggtgaggtgcataccgactttggccggcgctggcacccctattatgaactggtgcaggactgtcttgagggtgtgaaagacaaccgcgagggccgctcccttaaggatgtactggctgcctgggcaccttatgaagaggcggcgcttatcagcgccggtatggaaaccggcaatattcccggtgcgctgatgcaggctgacaagctgattgtcgcccgccggctcatcctcggtcaggtggtttttgcctcggtctttccgtcagcgctggccctgctgagcgcggggctgctgctggccaacaacatggcactggtgcccaccctgagcaaaatgtctgaccctgcacgctggaccggtgcactcgggctgatgaacggggtggctcagtggaccgacaggtggggtgtgaccgcagcaggggccaccgtcgggggcgtcattctggcgttctggtcactgccgcgctggcgaggccggctgcgtcgtgttgccgattttctgatgccctggtcggtttaccaggatctgcagggggcagtgttcctgatgaatatcggtgccctgctgggggctggcgtgcaggagcttaaggcgctgcagatcctcaacgagttcgctccgccctggctgcaggagcgtatcgaagcggcaatggagtgtatgagcgacggtgactcgctgggcatggcgctgcgccagagcggttacgacttccccagccgcgaggcggtcaactacctctcgctgctggataagggcaacagcgctgcgtcactcattactaactatgccgaccgctggctcgaacaggcgctgacgcgtgtggcccggcgggcaaacgtcaccaaactcttttctctcgttctgattatgagtttcttcttactcatcctgctgatggtgatgcagattcaggacatgaacaccttcaacatacattaa

SEQ ID NO: 150795 - DNA, 597 bp, Enterobacter cloacae
atgtcatctcagacatcacattatcaccagcgccagccagaccggggctggggtatccttgagcacggcagcattgccctgtttacggttatcgtcatctgcattgtcggggcgcttgtctgggggctctctggcaaaaagtctgttgcggtggaaacctcaaatatccagaccgttgtgaccaatgcccagcaactcaagcagacccagggcgggtataactttaccagcggcaccacgatgaccggcacgctgattcagcagggaggcgcgccaaaagctggctggacgattcaggggacggccagttccggcacggggacgatgtggaacagctacggtggccaggttgtcatggcacctgtggcatcaaacggattcaataatggtttctccgtcaccacgcagaaagtgccgcaggccgactgtatctccattgccacccagctcggctccggtggcgcattcagtgccatcagcatcaacagcaccgattacagcgacggtctggtcagcgccgaagatgccggcaaagcctgtaccgctgacaccggtatgacgggtaacaacaccctggtcttcacgcacaacggctga

SEQ ID NO: 150796 - DNA, 480 bp, Enterobacter cloacae
atgctgcgcctgacagtcctcctgctgtttatcctgctcagcccccgcgcgggggcattctgctttgacgcagccggggcaaagtaccacatcgatccgctgctgattcaggccattgccaccggcgaaagcagtctgcgcccggggattacgaatgttaaccgcgataaaaagaccgggcgtgcgctcagcactgattacgggctgatgcaggtcaactcctcgcacatcccggcgctgatggctcagggggttatccgcagcccgcaggatctgctgacccgtccctgtctcaatgtgcagattggcacctggattctggcgaaacattttcaggtatgcggtatcagctggaactgtctgggttcttacaacgccgggtttcgtcaggatcgccatgaaacgcgcgaatcctacgctaaccggatttatgccatttaccggcgccttttactgaaagagcgggggatcagactgtga

SEQ ID NO: 150797 - DNA, 657 bp, Enterobacter cloacae
gtgacgctgctgacgctgagtatgccgtggccaacgcttggcatcctttttccccttagtctcggtttgtttaatgttatggcgatcctcgtgcgtattaacctggtgatatcggggcaccggaacgggggcagttctcctgtgcgtccggcgatagtctggctgtatgccgctgctgtcagtgtcatgctgctggcgcctgcaccggcgatactccgccttctgtcctttttcctcagcctgtttcttttcagaatgacgctgaccgatgcgctgacgggactgctcccccgcgaaatgacggtgagctgtctgactgcgggtcttgctgccgcacttctgcacccggggtttacggaacatctcctttctgcggtcaccgcgatgttgatatttggtggctggcgatatggctcaacgaagattcaggggcgcgagtgtctggggcttggcgatgtgtggctggccggtgccattgccgcatggctcggtggagccagcgggctttatgccctgctgaccggtgtgatgttctttgtcctgtggcagttaacggtgcgtcgcatccgcgagggcgggccgatgggcccctggctgtgtgccggtgcgatgtcagtgacactgcttaaactttatcagccacttattacatggtga

SEQ ID NO: 150798 - DNA, 1335 bp, Enterobacter cloacae
atggtgataccagtgaacgtaacaaaaacaaccgatcgtggctgggctattctcagcacaggtgcggctttagtgatcctgctgctggtcagcgtatggggatattcgcttatcagcgactggatgcagagacggacctggatgaacacctccgcgcaggtgtcccgcttcacgcaggccgtaaagagttataccgggcgttattacgatacgttactcgccagtgccaccaccaccgcgccggtcattgtgacccccgctatgctgaaaaataccggttttctggagcagggcttcagtgagaccaccattgacggtcaggcttattccgctgcggtgatacgcaatgccaccaacaccgaccagctgcaggcgatgatttacacgcagaacggatctgcgctgccgtttctcgcgctgcgtcagatatcaatggatatctctgccggcatggggggctacatctggacgtccggtatcgccaccggtgcaatggggagctggactgttcctctcgcacagtttggtgtcagcagcacgcaggggcatattgccacactgctgactgcggatgaactgggggtggcacgcggtgaaagtgaccggctttaccgtttttcggtcaccggtaagcccgatctcaacaccatgcataccagcatcgatatgggcggcaacaacctcaacaataccggaaccgtcaatgccgtaacggggacgttcagcggcaacgtgaccgccggtggcaatatgacggcaaacggcacggtaacgggacagaacgtcgctgcagggacaaatgtcaccgccggcaataccattacagccagtaacgatatccgttcgaataatggctggttcattactcgggacgggaaaggctggctggatgaaacacatggcggtggtttttatatgtccgataatgactgggtacgggttgttaataacaagaatatttacaccgccggtcaggttcgcggtggtagcgtacgggcagatggtcgtctgtccaccggtgaggttctgcagctcgatggggtgaacacagcgggtgcaacttgttcaccaaacgggcttgtaagccgtgatgcgtctggcgcaatactttcctgtcaatccggtgtgtggcgaaaaagcacagttgcactacagcgaaccacatggacagtatcaggaacgggtgagaattatggcgatgtgtgtcaggcatatattcagtcatccggaatgattaatgatgggtgggtagcttctggttctgatgcgtgtacggaggatggtgaatactgcacttacgataacgtccgttgttacgccgtccgtttgcagtga

SEQ ID NO: 150799 - DNA, 135 bp, Enterobacter cloacae
atgttcaatgctggagtggctatagaaactatcacccatttcttcggacagagagatccacgctctactatgtattacatcgggtatggtcaggacgtgcaggacgatttaacagacgagttttctttggaatag

SEQ ID NO: 150800 - DNA, 177 bp, Enterobacter cloacae
atgttcgataacggccaacttggtataaatccagatactctaaccgtacatttcaatgttgaatgtatatatgcccatatgtttgagggtaaaagaatagaggcacatactgtgaagttagacgagaataaactgcgcagtaaatggaaattatttttgaaaattagatccggttga

SEQ ID NO: 150801 - DNA, 915 bp, Enterobacter cloacae
  misc_feature (897)..(906): n is a, c, g, or t
atgaagaatagtattcttgctgatgctttgttgaatgctgcaaaaaatagcgagcctgaaagcgctatcaccaaacttgttacatcaagtgttggagaacagcaaaaacaaaccaaaagaaaacttcatgcacaagaaatgtctctaactgaattgatcaggataaaaaatgaatactctgaaaaaataaacgatccggtaacatctaacgagaagaagaaagaagtttcagaaatcattaaatcaataaattatgagatcaggaatagaactaaggatacgcctgcacaaactctaaaggagccttgctcaatatttaagcaggagaggagagttgcacgcgaaaattatagaaaatctattcaggttagatctttcaagaaaactatcccaccgaatcagtttaccatcagccatgaaaatcgtagtttcctgccattgaatgagaagactttggagcgtgaaaggttgcgtaaagagttaattgccaaagaagctcaggctgagttggagagaatggctttaatttctcgcgttacgcatactaaaattattcaagaagaaagaactgatacgaggaagagatcacctgcaaaggtgattacaaaattagataccaattcaacaaccaaaattgaagtgccggaattttattttaatagcgaactgtacagccagttgataaggattatccctgtcacgcaagcgtacaagatcgcaaaaagccgtgaactatcttcaaaatattatgacagtaaagttgaatcaggtaagtatacatattttaacacgctcgcttacttaatttcattaagaggtaagactgaagcggatgcgcgtgaaatagccaaggaacaagggcgatctgaaagggtattatatgattttatcacagtnnnnnnnnnntcacagtag

SEQ ID NO: 150802 - DNA, 480 bp, Enterobacter cloacae
atgacacttaccgtcctgccaggtgatctcttcgaacaggaagctgattgtctgatcaatgcctggaatatgaattttataccctggtggctgctctggcctaagggggtctccggcagactgaaacagctggcagggccggagccgttccgacaactcgcccgaacaggtgtgatgcgcccgggaacggtctgcctgactgatggcggtaaacttaaaacacccatcattcatgcagccgcactgaatatgttctggtgcagctcggaatcaatcgtccattgctgcacagatgcggccctgaacctcgccgccgtgaagggatttcactctgttgcttttcctttactgggaagcggtatcggtggacttactccatcactcagcctggaggcgatgacccgtgcgattgaaatcaacccgtacagcaaaactctcgatatcaaaatcataacctacagaaaaggcgatgcagtatga

SEQ ID NO: 150803 - DNA, 654 bp, Enterobacter cloacae
atggttcagttacagacacaactcaatgccatccacgaacggattgcagaagcgcagaatattgtggcacgccgggagcgctccgttaaacgtgcggaacgcaatcttgaaattgcagaggataaccttgctcagctgcaaaatgaacgtgacgaactgctgattgcgtcatggggagatataccgaactggcaggttatttttgacctcgttaatccctcaccggcaatgtatgaatacaaagaaaaatgggtcagggaaaaaggccttcacgcgggcgggatgtataattgccatactaatcagggcgccttctctgttggttttaccacaacatcagaacacgaactgtatcaaaatatccgcatggttgaattcgttatgcaatatttgcggaccgaccacaataacgaaaaaacaatgattgtctataacgtcccgactgacaattgttgccacaacttcgtttttaatacaggaacgggaaaatacggaattaccactgacagctatatgagtcgcagcaacattactgaattctcaacagcagaagaagcgctgcgctatctgcaaagcatttccgataccgatatcgtccctgagccggaaagtcttcccggtgcagtaatatatcctgacggagatgaagaatga

SEQ ID NO: 150804 - DNA, 537 bp, Enterobacter cloacae
atgataaaaatgttctccgttgtctctctgacgactcttttattaacgctgaccggctgtagcggcagttcccccttaaacgacctcagcctcagcaggctgacatcgcttatcaaccctgtgagtcagcagcagacacaaaacagtgctgaaccgaaccaacgtaattacgtcggccagttttatggccctataccgattccagctgaaactgtagccatgcgtctgaaacagcattacgggtttgtatcggacattgatgtcgctgctgcacataacagcggtcagggaaatgcaggctggtcagcatcggcgatctcagaaggcaccagttgggaggcgcagccgggcaactactatcgcatgagccggaactgggccgaaaatgaccgcctgacgctcgatgttcgggggaacagtaaagagagctttattacagcaacctatatatcttccaatccggagcatcttaaaaaaacctggacatcacgtttgtggaagcagatcccggatgtcgctagcggctctctcaaataa

SEQ ID NO: 150805 - DNA, 1218 bp, Enterobacter cloacae
atgatgaaagcttcagtttcaatgattacacgctgcatttctgttgccctgctggtttctgcggtgccgtcagtctatgcagccacaggctggatggaagcacggggggacgcaatggggggcaccggcgtggcatcagcacactacggtaccgcggcgctgtccaacccggcgctgttgacgcattttggaccaaccgattatttcagcctggtgctgccgtctgtcggcgcgcaagtctctgatcccgataacacggtggacaaagcggatgatgtgaaagacctgtgggaccgttttgatgcagccgccgacagccagtccggtgtcagcgaaagcgcagcggcacttaaaaataaactgcaggatctgaaagatactcatgccaatggtcaggtcggtgcctctgtagtggcaaccgtgccaaatcagaccctgccttttgcggtagtcgtgaagtcctgggggacagtgtctgttgagggtaaagtcagtgaccatgacctggattatctcgataaggtggctgatggcgacatccctccatccgctgtagacaagaattccctgacctcgaaagcttatggccgtgcagccgttatcaccgatgtcggggtagcaatggcacatgagtttgaaactgccggtcagagatggtccctgggcatcaccccgaaatatcagcgtattgacctgtttaactacaatgtctccgttcgcgatttcgataagagcgatatccattccggcgattaccgcaacacaaaaacgggttttaacgctgacctgggactggcaacggatctgactgacaactggactctgggtctggcagtcctgaacgtcattccccgttccgttgagaccaaaccggtaaatggctcgaccgggacattcaaagttaagccgcaggctacggccggagctgcatggcacagcggttttatcacaacggcgctcgatgtcgacctgactgaagccagccgtttcgataccgacaaaaagcgtcagtttgcaagcgctggcgtcgagctgaatgcgtggagctggatgcaggttcgtgcaggttaccgccagaacatcatttcgaacgatggctccgccttcacggccgggctcggtttctcgccttttgatgtggtccatctggacatcacgggcattgccggcaccgatcgtacctacggtgcagtcgcccagatgcagttcaccttctga

SEQ ID NO: 150806 - DNA, 990 bp, Enterobacter cloacae
atgaagcatctgaatatgacatccctgctggcaaggatcgcccttgaacgggacgacgaattgctgcagctgaccgccgcaatgtccgacggaaagaaaacatccggtaacccgatggccatccgtttcaaacctgctgtgggggattttatcatcctcatgtcaggtcgtctgggtatctcggctgcggctctcgtgaatattatgattgaaggcgtcatgcgtgaaaccctcacaccgcatcaggccgccgttacccgcatccctgaacgtttctggctgttgatggacgaatacaatctgtcatctccggaggtggcccatctgcttgcggactggaacatgagcctgggtgtgctggaaaaccgggaaagaacgctcggttacatgaccccgcccctgctggaaaaattgtctgaatggttttatgtcagtaccgggtggctctcgggcaaaatcgtccctccggtccggattaccgtatttcctgactggctcgatgcatcccggttattaacgtgcagaattcaggaaatcaatccggaagattttatcgcccggccggatctcttttttattcgaaaaaaagagcaggatgatattttcctgtttattcgccggtacacaaccattaacgacacaaggttccgtgttgtggaatgtgctggccgttgttcagtatccggtgagtcagggaaacaatttactttattcctggccctgtgcggattgctgtttaaagccgaagtcctctcccttgtcgatacctttattgattcagggaacattctggattcaatgatatccggggaagtacttccgccggcagcattaagggaaatacaaaaacccttccacgattctcacggaaaatatacccaaaggatctggagcactgaagaaagggagcctttccttaatccggataattttataaatgatgaatggagaaagatagcggaagacattatttcaacccgttccatctga

SEQ ID NO: 150807 - DNA, 561 bp, Enterobacter cloacae
atgcagcaagcctgtgttttttcttttttcctgctatggctgggtttgtccggcgtgatgggtctggagatcaccggcggcgttccctgctccggtttttatctggtctgggtgctgctgtccggcctccccttcctgctgcgcccgctcgcatgggcagagcgtcgtttcaggccgaagatgacgctgataagccagcacggaaagcgggcatgggttcacctggccccctggcagcccaccaccgacctgacgccgtcgcgtgtctgtctgttctggcagaacgtgaacgcctcaacctgtcaggcactggaaacacaccgcaccgttatcatctcatcgcacctgctgaccggtatacgtgcccgcaggctactggcccacaccacggaatatggactcacggtccgcagccgtatttatcagattccttttactccctggaaaagagcactgatgcagctcgaaatccttttccggcagtggcgctggcgcacggacttccgcagggactggcccgtgctggtcctccggcgaaaatctttaaacacggaaaaataa

SEQ ID NO: 150808 - DNA, 1578 bp, Enterobacter cloacae
gtgcgtggacttaactggttaacaggcaggagcagacaggaaaaacggcccggagagaggctaccggcgggtgccacgccgtcccggactgttgctgatgatggctggcgccctgctcagacgggcagatcactgctgcaggcagacgaataccgtcgccttatccgggtgctgacagagaacagcccgctgtcgcagcaggtcacggaagcttggtggctcaggccactggaggagatggcgggacgggtgcaggcctgcccgggggcctggtctgggccgttctccggaccgggagggtttaatgaactcagcctgaacgtagccacacgtgcggtgaggctggtacgtggcatgatgctgccaccgggtgccacgcctgaagagcaggcagagcagatgcccggctgggtctgtgcagcgtactgggccgggctgttccatcacctgccctggctgatgcaggtggagggggcgctgaaaagcggacgtgtctggtatccggggctgagtgtgcccggagaaccgtggcgggtcaggccggccggtgaacctccgggggcgacgggcagtgtatatgtggcgttcaggctcctgcctgaggccgctctgctgtggcttcagcgctggcctgtgctgtctgatacgctgctgctgtttctttccggacgtcgtgcggaagccgggattctgaacagtattgtgaacgatgcgctgcgcagctgcggtctctctgatacggccgttatgtccgggcagccaccagacccggtctcccttgtgacagttgtgcctgtcactggtcataccttccctaaattatatgagactgattctatcccattgtccagtaacgataattctccggatgtttcagtgccaattaaaaccggagatatgacctacagtttcagtcaggacggagagaaaacgtccgttaatactgtcccttcagcactggtactggaatcagcactttcaacacatgaaccgctgctttcagcagaaaatgatatcagcagggatgaggaaggtggggcgcaggtatccacggagaacctgctgtcattgctggacctgatggcagaagggaaaagctctgtggtaacggaaaatgtacctgcagatagtgctgatagccctccggccacggagcttccgcccggtacgcacccttcgcatgaggaggggatggacaaggaagagcaggccggcgcgttatttctggagtgggtcagggacagcgttgaggacggcacgctcagcgtcaatgaaaaggacagcattctgcacgttctggcgcagtttgtattcatggtgtcaccggcctgtttttaccgtcacacctctacagcggaagggagtgttaccgacaaggacaggctgcagaaaagttttgaggcgctgaacgtacaccattcacgaaatggtaaggggttattccattaccatcaatacgacacgccggataaaagcggtcgttttaccaaagtgtcaggctacatgattaacgctgacattatttttaaaaaagggagctgtctcacggacagtatatggctttcagcgaagaaataa

SEQ ID NO: 150809 - DNA, 966 bp, Enterobacter cloacae
atggcagacattgtgacgtttgaaaaaattctcgatgactatttttttaataaagttcttcgtcgtgcaacagaatggagttaccgaaaggtggtgagaactttccttgaattttacggagaagatattcttccggaaaatgtgacgcgaatggatgttctgaaatggagacggtatgttctgaatgaacagatgtccagtaagcggacatggaataacaaggttgcccacatgcgggcagtatttaatcatgccatcacgaataaacttatttcagccagagagaatccttttaaccaggtgattgttaaacccgatattaaacgaaaaaaaacactatccggggagcagatgaagaaaattgatttaatcatggaaaggaaaattgagctggagcagatgggcgttcacgatccgcggccaaatgcccttgaacccgcctggttctggatgacggtcattgagacactgaagttcaccggtatgcgccagaatcagctgctgcatatacgactttgtgatgtggacctgaaactgggcatcattgaattacaggctgaaggttctaaaaaccaccgggagcatcgcgtgccgatcacagcgcggctgagaccgcgtcttgagcaactgtatcttatgtctgtacagaagggatccaaaaaaggggagcagttattcaacatcaaccggtttacacccaaaaagaaaagaattattcgggctaaaaacatggatcacctaccgatgagggccttcttcagaagactgtccagggagtgtcagtgtgatatcagcccgcaccggttcaggcatacgatagccacagacctgatgaaacgcccggagagaagcctgaatgatgtccagatgctgctcggtcattccagcgtagcggtgaccctggaatatgtggaagcaaacatggataacctgaggcgaaatcttgaagccgcatatgcagcttag

SEQ ID NO: 150810 - DNA, 765 bp, Enterobacter cloacae
atgggcaccgcgaaagtgatgctgagtgtaagtgactgcgggcataaagtgattgaaaaatgtcctgtcggagaggtggagtacagcttttatcagtacgctgcaacggagcttaatcaggctggcattgttaccccaatgctcttttccgctgatgcccctttacgcaagttaatactggaatatattcctgaaaaagttgaacagaacgatgtcgctggtgacgacgccatcgctatgctggcacgcttgcatggtttccccgcaaattctgaatggatttaccacagccactcgtggtcagaactggcgctcgaaaagtccctcatgcttttagcgttaccagataaaagtacgcagcaatttcggctatttcaggaatgtagtgatgttttgttcgcttacccaagcctgatctctggcgatagcaatgctggcaattggggaagaagagaaaacggtgatttagttcttttcgactgggaacgatttggaaaagggagtcctgcgatcgatcttgcccctctgataaaagggatgggttcgaagctaatgtttactgatattgctgaacgctattgccagttctctttccatcatgaccgtaatgcgttagcgagagaaattgccattgccaaagcatggattgtcaccgaagtcattgtgctacttaatgagcggcaaaacgcagactttcctttatatctcgactggtacagggaacatcttcctggctggttagatgatgtcatcacgatgctatga

SEQ ID NO: 150811 - DNA, 744 bp, Enterobacter cloacae
atgctgagaggtaaaagagccgtcattactggcggcggcgggggatttggacaggcgttgtgcgtgtggttggcacgagaaggcgtcgaggtggatttttgcgcgcggcgcgctgatgatattcaaaacacctgcagcatcatcactgctgaaggcggcatggcaaaagggtatctctgtgatttaacccaacctgattccatttctcagttttcttcacagctgttaacgtcagacaagcctgtagacattttaatcctcaatgctgctcagtggttgtcaggaaggtttgacgatcagccagacacagaaattatcaataccatcagttcaggtctgactggttcgattctcttgactcaggcattactgcccggattaagacgttcagccagcgctgatatcatctcgattatctctacctgtgggatcccgaatttcaccgattcaattgcgcatcccgcttttttcgccagtaaacatgggctgagcgggtttataacgaaactgtcgcggcaaatgtctgaagaaaacatacgtgttactggtctgtatccacccgatttcgaaaataccggattagagccagcttttgatgatcaatccagaatgggggacggtctgctgaacgggcgctcggtctgggaaaccattcgttttgtactgatgcaacctcgcagttgccatatcagccacatctattttcaaggcccaacgcgcgaagatctggttagcaggggctga

SEQ ID NO: 150812 - DNA, 690 bp, Enterobacter cloacae; identical to SEQ ID NO: 150733

SEQ ID NO: 150813 - DNA, 1053 bp, Enterobacter cloacae
atgaaaaagagcactctggcattaatggttatgggcgttgtggcttccgcatctgttcacgctgccgaagtttataataaaaacggcaacaaactggacgtgtacggcaaagttaaagcaatgcactacatcagcgatgacgattcaaaagatggtgaccagacatacgtgcgtttcggttttaaaggtgaaactcagattaacgatcagctgacgggctatggccgttgggaagcggaatttgcaggcaacaaagcagagagcgattccactcagaaaacgcgtctggcattcgccggtctgaagctaaaagactttggttctctggattacggtcgtaacctgggcgcgctgtatgacgtggaagcctggaccgatatgttccctgagtttggcggcgactcttccgctcagaccgataacttcatgaccaagcgtgcaagcggtctggccacttaccgtaacaccgacttctttggcgcggttgacggtctggatatgaccctgcaataccagggtaaaaacgaaaaccgcgacgtcaaaaaacagaacggtgacggttttggtacgtctctgacctatgactttggcggcagcgatttcgcggtaagcggcgcgtacaccaactctgatcgtaccaacgcgcagaacctgctgacccgcggcgaaggcaaaaaagccgaagcctgggcaaccggtctgaaatatgatgcgaacgatatctacctggcggcgatgtactccgaaacccgcaatatgaccccaatttctggcggctttgccaataaagcgcagaactttgaagtggtcgcacaatatcagttcgatttcggtctgcgtccatccctgggttatgtccagtctaaaggcaaggatatcgaaggtattggcgatgaagatctggtgaaatatatcgacgtcggcgcgacctattatttcaacaaaaatatgtccgcgtttgttgattataaaatcaaccagattgatgacgataacaaactgggcgtgagcagcgatgatatcgttgccctgggtatgacctaccagttctga

SEQ ID NO: 150814 - DNA, 183 bp, Enterobacter cloacae
atgcgtatcgaaaaagtcactggctggctattcaggctgatcccggaacgcgtttttgacgcgttatccgggatcgtatgtgcggaaatggatggtattgcgcgtgaccgtctgccggaacagactgagcggaaggccacactccctgcagcagggcaagagcggcgaaaaagaaataactga

SEQ ID NO: 150815 - DNA, 543 bp, Enterobacter cloacae
atggtgcaaccgacaggctcactaccttgcctgatgaaggcatggaagatgcatgaacacgaactttattgctggttactcagacaaacgggtaatcaggctgatactgatgatctgatacaggaaaccttcctccgggcaatacgtcaacagagaaaattctgttccattgtaaatacaagagcctggctgtttgaggttgcccggcatctggttattgataaaagccggcggcagcgcccatatcagcctctccacgatggtgtatgcatacaggataatgcccctgaaactgtcgattcactcgctgaatgtctgccccgtatactggataaaatgacagaggatgatcgaactatccttactctttgcgatctggaagggatgaaacaggccgattttgcagaccgaagcggtctcacgcttgctgcaaccaaatcgagattattacgggcgagagagagattgcataagaaactctccagtgattgtcaggtcagactggatgagtatggtcgggtatgttgttttactccccgatga

SEQ ID NO: 150816 - DNA, 231 bp, Enterobacter cloacae
atgaagcatgtaaaagtactgggtacaggttgttccagttgtaaaacaaccatccggcttatccagcaagtagctgatgagcgaggcgtcgctattcagcttgaaaaagtggagtcactacctgaaataatgaaatacaaagtgatgtcgacaccggcagtcgtcattaatgacatcgttgtacacgccggaggaataccgtcaaaagacattatcgaaagctggctctga

SEQ ID NO: 150817 - DNA, 204 bp, Enterobacter cloacae
atgcagaaagcccttatgactgctgaacttctggcgcttgcccggcttagcatcatggcatttaagaagcccttaaaatatatggatgacactgacgctgaagtcatcgctcgttttaaaaaaacgtttactcctgagcttattgagcagatgtgcctccggatcctagggcttgaagcggagcgtcagagtttgaacgaataa

SEQ ID NO: 150818 - DNA, 228 bp, Enterobacter cloacae
atgaaaaatgtacttgttttctttaactctcaacccgctgaattagtaaaaaccctgagggaagtcaatatcatcaggcgcgtatacccgaacggggaagaagctcatctcaaaatcatgctttccggcatgcactccgttggacgaaagaaatgtgagattttcatagcatcagacagagacctgaagcatgacgaaattataactgctgcgaatactctgctgtga

SEQ ID NO: 150819 - DNA, 171 bp, Enterobacter cloacae
atgcgtgcctgcggggtcatcagcatcatcacggaaacgggcgctgttgccattcctgagtttatttcatcacgggtggtgatttttatccgacccgtattgtgtataaaccaggagccggaatgtgtggaggaggcagtaatgactgccgggtatgagaaccccatctga

SEQ ID NO: 150820 - DNA, 492 bp, Enterobacter cloacae
atgattgaactgcctgatttgccgaagcacctgcctaaagcggaagttccggacggtcgtttctccaggccaaagaacaaaatcacaaaagcgcagcgggcagagctgcgcatgaagttcggcgggcgctgtgcgtattgtggctgctttctccctgaaaaaggctggcatgcagatcacgttgaacctgtgcgccgcgattttgaatatgtgctggcaccagttggaagcggagtaacgcatgttgccagaaacactggtaaagtcttgcatccagatctgcacacaatagaaaacctgtttcccgcctgcgcaccgtgcaacctgttcaagggggcatttagcgttgaaggaatgagaaaagaaatcagccagcaggtagagcgcgcccgaacatatagcgtcaatttccgcaccgcagagcgctttggcctggtagagatcgtcgataagccggtggtgttctggtttgaacatgatgtagccccctga

SEQ ID NO: 150821 - DNA, 414 bp, Enterobacter cloacae
atgaaaattaacatcagattttcaagattatttttacttgcgatcccattagccatatatggcacggagttactattttggtatgtcatgatgaaaagaaatatattcccgccggaatacataagctggcgggttactatcctgttaacatttgtatggatatctgggtttgcgctctatttgtgtgagaatgctgaaaaatggcctgtacttcttatgaagctattcagtcccgttgctggctatattttagtggcatgtgtagcaactctggatgcattcgtaatgtgggatacgaaaccattcaccgacaattacgttgacttttttcgtcttggttttcttggcagctatattatcccattaatcctcgtttttttatccggaatcttcgataacttttcagatatgtga

SEQ ID NO: 150822 - DNA, 687 bp, Enterobacter cloacae
atgaaaagcgtcatcaaccacgaaaaagcctttctctcactcttcagccagactgcacggtaccatcaccggcatcaggtatttgaagactttgtcagctgcagtgtgatcgcactgcagaacagccttcagttctgtgacaaacgggaagaaaagtacatgcgtattgtcggccgttacgaaaaaacggacatctcccgtatggcgcagctactggcccatgtgaccaacgggctggatgagacgcccggcgattttcttggccgcgtttttatgcagcttgaactgggtgataaataccgtggtcagtttttcacgccgtggaatatcggtctgatgatggccagaatgcagctcggtaacgtcgaagataattttagggacaagccgtttatcacgctttccgaacctgcctgcggcgccggctgtatggctctggcatttgcctttgttctgcgtgaggctggctattctcctcaccggtatctgtgggtctctgctcaggatatcgatccgctggcggccggtatggcgtatatccagctttcgctgtctggtgtgccgggggaggtggtgatcggcaactcactaaacgatgagcgccggcgaatacttcacacgcccgcgcattacatggggaactggagtttcctgctgcagacgagaatgaatgcagccgttgcatga

SEQ ID NO: 150823 - DNA, 951 bp, Enterobacter cloacae
atgttctcatggtgccaaaaccgtctggagatcaccggtaaatcagtctgtctcgatgtgatgcagccctggattgccggcacggaaaaaccgctttaccggcatgccatccggcaggcgataaagctgttcctcgccggctgtgccggcatactgaagcccgtcagggcggtggattacgcaccgtatcctatgctgaccgcatccggtacaggcgcgcagacctcacccaaccaggccttccagcattttatcgagctgctggagcagaatgcgtggcttgacagcaagacgctctcccgtatggagaaaatctggctgcagtccggcatcgatgcactgaaatgggaagccattccctttgcagcgcggcagataatggcgcagctgatggccgtgcactatgccgactggttcggcgttgccggtgccggtggtcagtttgatccgcaggagcgctgggagtcgctgagcatcatgccggagacgacctgcccctgtgacatgctgatggtgatgccgtcacgtctggcctccgagctcaacggcgaaggtggtcttttcaccgggctctgtataacgtccgaactctatatgcagctctttggcatggagtttccggcgggccatcaggccagctggagcagggatgacgtggggtcactgacgctgagctttgcatctccctggtatccgccgtcaggtgaggttatggggataatgtcgcagatgtttgactgtgaaatccggcactactggatttcaccggatgccggcacgtcagggttcaactgctttgatcggggggaccacgttgacagtggtccgtaccaggcagaagcgctgcggcagtcagcatccggcgacggtgcacgcatgtatctggtgacacccgaaacggctgcggttcctgcaaccaccgcagcgcactacggcagcatccgcgcataa

SEQ ID NO: 150824 - DNA, 984 bp, Enterobacter cloacae
atgaagataaccaccggccggcgtaaaccggcggcagtacagacccccgacctgtatcagcaggtcactgacaaaatcattctggcgctcgaaaacggcgtaccgccctggcggcgcccctggcgttcggctcagaacgtgcatggaggcagtctgccggtcaatgccgtcaccggccgcgcctacagtggcattaatgtaccactgctgtggatggccgctgaagaacacgggtacacgtccgaccgctggctgactttccggcaggcgaaagccgtcggcggttatgtcaggaagaatgagaccagcgcgctggccatcatctacaaaccgtttgagaaacaggcccgcgacagcagcgataacctgttgtatcgcgacggtgaaccggtcatggagcaactggccatgctgaagcagttgcagttgttcaatgttgcccagtgcgacggccttcccgaatccgtacagggtgaacagcccaacacggtggaggcagagccgccctctgaactcagtgcagctcaactgcagcaggtgcagcagatactcagcacaaccggcgtcggctgtgaccatcgccggcaggaccgcgcattttaccgtccgggtgccgaccgcattgtgatgccgacggcatcgcagttccggacggaagcggattactggtccacgctgttgcacgaactggtacatgccaccggccacagcagccgcctgaaccgggaaggtattacctcatcatcgcgtaagttcggtgatccggtttacgccttcgaagagctgatagcggaaaccggaagtgcctttctctgtgtggagctcggcattaccggcgacgtgcagcacgaaagctatctggccggctggctgaaagcccttcgtgaagacaaaagagcgattttccgtgcctgccggtttgcccgggaagcgtcggaatatttacttgcccccctgaaccggaacacggaacaggcggcataa

SEQ ID NO: 150825 - DNA, 612 bp, Enterobacter cloacae
atgatccgctttacttctgatgaactacgtccgctgtttacacagaatctgggtatgcagcgcccgctgatacttgaaaagaaactgggcatttatcttcgtgtaccggatgacagacgtccgggggagtggctgaaagcctgggctgcaggctgcaatccgttaaaagatgcagactggttcacacttgtcgacacgctcatacccgaacatgagttttcttttcagacatttatggcacagagcatgtttgatgccgtgctgaacgaccatcacgacctgctcatgaagcctgttatcagtaagctgaataacgcgctgacacttcacaagggaacgagaccacccatgaaggtatatgtgccggtgggcgaatatcgctaccggatacagtggctttatgagcagtccttacgccacttccatgcctgtgtgggtgatgctgaacgtctcagctggcgttcgcaggcattgcatgtgctggatcaggtgatacgcctggactcgaaacgggcgaaacccgccgaccgggagaggtttgaccgggcggtcgagagcgtacgtgaccgtatccgttcggtgatgtccgacggctccttacgttattactga

SEQ ID NO: 150826 - DNA, 438 bp, Enterobacter cloacae
atgaccgtatttaatgacatcgcttttgacagatcttacgcacctcagggaatgcatgaactgtggcaggggcaacgctcgctttcccgtttcatcgcttatgttgcggaattagagggtgaactcctggcaatacgtgcattccggcgctgcgctatccctgacctgacgggcagctacggcgttccggtacgcacattccggcttgtttcgattgcccggcttattgggtacgcctgtatgaccggggcatttactgacggtttattcgaaaagtacattgccgggctgatccttctcggagaacagattgccccccgggcctggaattttgggtttagtgaggggcagatgcactttgatgagatgcgctctgacgatgaagccagtgaggaacaacgggctgtattctgtgcgagtgcagactatatagcctga

SEQ ID NO: 150827 - DNA, 306 bp, Enterobacter cloacae
atgagtataatgctcatccttgcatcaaaagcggcttcagctctggcgcacgtttctgagtcacttaatcaacgtaagaaagaatggttcaccaatcagtcggggcacagcagcttccggccggaagtgatcccggatggtaacggattcacagccataatttcccgacgaaccggttacagtccgaaagactggacctatcaacgttgtgcaaccgcaggacggtttgcctcctcgcgtcaggcaatgaatgctggtcgccggatggcgcagcagctggctgatttacgttaccgttttgactga

SEQ ID NO: 150828 - DNA, 363 bp, Enterobacter cloacae
atgactgcttttgctattactgttgatgtccttgctgccagcatccattcaaagaccgggttcatttcggtgatgtcggagattgaagggctgttacagagcgctacagcgctgaacatttgcggcatcccggacagcatcgatctggatggttttccggaacgctgcagccagacaatccaccttgccagtgttgttggtgaggcccaggaaatgaatctgattccagactctcttcgtcagtttgtcgatgatgttgtcctgacgggaaaacgcttcgacgctgaaggcgacactaacgcatggtgctacggttttaagctgggcaccgaacgtggactggctaactggtccggcgtttaa

SEQ ID NO: 150829 - DNA, 390 bp, Enterobacter cloacae
atgacctttcttcatattgtttactttgttgctgtttttgccgatcgctttgtgtgcttcattgcaccaaaaacgctgattgctgaatggtttttctggttcaccggtgatgcgaagtcattactgcttgttgttcgtgagctggagcttgcccgttcatatcagaaggacgaagcatcagtgttgctgacggaattctcggtctaccatgccgcctttttcttcggagaacgcgagtattacggactaaaggttcgctggccacgctggttcatcaaccgccttcattttaccgggatgcagctcgacgccacgcagtggcaggaaggctgtcagaatggattcagcgacgcagccgcactggagtccagggcgactgctcattgctga

SEQ ID NO: 150830 - DNA, 444 bp, Enterobacter cloacae
atgaatgtacttaaagtatccaggttagttaaagtggctaatagggcttcattttttgattttatttcactcgtatcagaaattgaagggcgtttgaaattgttgcatgcatactccattctctttgccatcgatggtaagggtgatagttacttctcttttgagcatgtttcccggactacttttttagttactgaaagattaatggaatataaacttcttggactgattcctgatcatagagttaagtgccttgatgatatttttgagcaatgtaaacaggtactgggtgataaaaagtggaacatggcagtgacaggtgggacagtagttgctcaggatgtacttgacacatatgcagaaacttttctcaccacctatgttgaagagtccgatacccgcttcttaaaggattttgttcaatggtacttaagtacctgttga

SEQ ID NO: 150831 - DNA, 885 bp, Enterobacter cloacae
atggctaaattgaataaaaatttgaaaacacttgccagacaggcaggtggaagttttaagactgttgccgatcggatgaaaatagccgacagatttgctgcccggttgcaaagtcttaatattcagattagggacattaaaaatattaaaacagggcatgttgaattatatgttcgcagccgtcttgcggaagacatatcaaaacgcaccctgcaaaatgaaatgtccgccattcgttctttgttacgtgttgcgggaaaaacgtttatggccgatccgtctcacgaaaaactgagcaatgaagcattgaacatctccggaacaagtcgtgatggaacaaaagtggccatcaccgatgaacatcttgattctgtactttcgttagttaaggagaaagatgaaggcgtggctgttgccattcaactctctcgtctcctcggtttacgaacagaggaaacgatccagtcggttaaatcactttcgacatggaaaaaggctttgcagaacggagagaataaaatcagagtggtttttgggacgaaaggtggaaggcccagggacacgacaattattaagcgtgaagagacattaaaattattatcttccgctttgaagtacacagcagaacataatggaaaactcatcgataaaccttccttacaccttgccattgagcgatacagaaatatcgtacgtgaagcgggaatggttggagagtttgctcctcatagcctcaggtacgcttatacacaagatgtgatcggattatatttagaacacggcttcagtgtaaaagaagctcaggctcttgcttctatggatttaggtcacggtgatggtcgtggacattatgtagcgaggatttatagcaagacaaaatcatag

SEQ ID NO: 150832 - DNA, 1158 bp, Enterobacter cloacae
atgagcgcaaataaaaaaaagcttaacggagttgtcagagggtttatcagctcgccggcggcgggcggtattatactgatcctcgcgtctgtagcagccatcgtggtggccaactctcccctgcttgagggatatgaatcactgctgaaatacaaaactgtcgggctttccacggagcactgggtcaacgacgggctgatggccatcttttttctctttgtcggtctcgagattaagcgggagcttctcgttggtcaactggcaacatggagccagcgcgccctaccgggttttgcggcgctgggaggcgttgccgtgccggcactgatttatgccgggtttaatgccagcaatgcagaaacgcttcgcggatgggccatcccggctgcgacggacattgcgttcgcgctcggtgtgctgactttgctgggaaggagggttccggcgtcgctgaagatttttctctctgccctggccatccttgatgacatgggagccgtagcgattattgcaattttttataccagtcatatttcactcatgatgctgggcggcgctatggtaaccgcactgatgatgttcatgatgaacagagctggcctgaagcgactgcttccctacctcgttgcaggctgcctgatgtggttttttatgctgcagtcgggggttcatgctacggtggctggtattctggtggccctcttcatcccgctgaaaacagacagcacttccggttcaccgctggagcgacttgaacatggtcttgagccgtgggtggttttccttattctgccggtgtttggtttcgcgaatgcaggcgtatcgctcacaggcctgaccgcagaggatcttctgtcacccgtgccagttggtgtggccacgggactcttcctgggtaagcaggtgggcgtttttggcctttcgctgctcgctgtcggtctggggctggcccaaaaaccgaaaaacagctcgtggctgcagatatacggcgtctctgttctgtgtggaattggttttaccatgagccttttcattggcaaccttgcatttgcggaaagccagttactcatagatgaagtgaaagtcggcgtactggtgggatcagttctgtctgcgttgactggggcgcttatcatgttgctcccgcgtcagcgttga

SEQ ID NO: 150833 - DNA, 138 bp, Enterobacter cloacae
atgatgtttttaaaggtgatggcgttccacctttcccaaccgccccgtccggggctgatgacgcctgatatgactcttgattttcaggaggtatgtcaggccgtcgataaatccttccggcctgtgtacttcccttaa

SEQ ID NO: 150834 - DNA, 909 bp, Enterobacter cloacae
ttgattaatgtttttggtcatcttaaccctgacagcgacgctgtctgcaccgcagccgtgacggcgggctggctcaaccggtgtaaccgtcctgcccgtgcctggcggcccggtgaagcgaatcctgagacacgctatatttttgaagctgccgggctctccctgccgcccctgctggatattccactgaaaggtgaaccggtatggctggtcgattttaccgaaccggcacaggggcctgctgatctcctccagagcaatatcatcgggattatcgaccatcaccggcttggcggtctggtcacgcaactgccgccggaggtctggataaaaccggcaggcagcagcgcgacagtactctggctgctgatggatgcagaaatgcgccgcacgatgcccccgactcacgcaaccctgcttcttggcgcgctgctcagcgacaccattaatctgtgctcacccaccacgacggaagacgatatccgtacagccactgaactctgcgtcctgtcggggataaaacgcagggcatttgctcatgggctcatgaccgccaaaaccgacatcagcggacagtcagcagagcagcttctgaataaagacctgaaggccttttcgctcgctggcacggatgtgcgtatcgcacaactggaggtcaactcacctgaacaggtcgctcccctactggatgaactgcaaaatgcgatggcgcagatggcggtgacaaccggagccggacttatcgtgctgatggtgactgatatccaggaatgcttttcaacactgtatttcgccgggccggagagtggcaacataacatcatgctccgtaccgggcatggtcagccggaagaaacagcttctgccctggctggagcacttcctcagtcaaagccggagacagccatga

SEQ ID NO: 150835 - DNA, 420 bp, Enterobacter cloacae
atgattacaaaaattctgattgcctatgatggttcggagtctgcaaaagaggctatggatttcgcctttgaacttgctcatcattttaacagcgaattgtatgttatggctgtttgtcacttaactgagtttggcggtgaggttgagatgctggattttgtgagtcggacacaatcctacttctatcagaggatgagaaatctgaggaaacagtatccggaaatgaaaaaaaaacctcgattacatattgccacagggcatccggcagaacagattctgcattatgccgatggtcatggtatcgatcatattgtggtcggtcacagaggaaaaaaacagttttctcagtggttgttgggttcagttgctcgacaggtggtggaccatgccccttgcccggtaacagttacccgtaaatga

SEQ ID NO: 150836 - DNA, 510 bp, Enterobacter cloacae
atgttaagaggctggagtctttttgtctttaaaatgcatttgggtgtaaatttcatgccattaaacgttctgataacacaggatagttatctctttcatgggttgaaacactgtatttctcttaaacatattcaggatcttacactacttgaaacctcacatcgagagtgtgtggttctggtagacagcagaatgccgatgaacgaccttgagcacgggtggcggtttctctcggctatgtttgagcgaactaaggctattatgctttgtatgaatcaacccgtgagcttgcccttcagcgtaaaaccctgtggagacactgttgatatgaaaaccagcccagaaaatatatcgctgatgatccttaataaaatctctattgcaatgccggataaatggtcaccgccggtgcgaataaaaatagaagaaagagaggttgcattaattaatgcgtttctgtgcggaaaggatatcgaagagatggcaacgatgttttgttgtttgatgtag

SEQ ID NO: 150837 - DNA, 441 bp, Enterobacter cloacae
atgttgttgatcgcggtatttattggtgcgttgctgtatgtgcccaaggatacccgcgtgctggattgcacagcagatatgaatcttgagctgggtaaagaccatgacaagatcgtcgccaacatccatctcgtcgttcacttcgttccagatgagctcagctacattaccgagtatggggtcgtgacctacaacaaccagcgctatatcgtcgatcgctatgcccgactgcgttattctggagataaccgtcactcttttaatgaatttaaaagagaagagatagagaagaatattagtgaaacactacctgactctttatctgaaaaactcacttcagcacaaaaggtctttttatttaaggtgcggaagttacagggtgaaatatggagcattagcgatttgcggcgtacggtattagtgtgcgctaaatcagactga

SEQ ID NO: 150838 - DNA, 861 bp, Enterobacter cloacae
atgaaaaaaatgttctttgcgcttcttctgttcctcggcatggcattttgtcacaccgcttcagcctcaatctggagttggatcgacaccctcaaatcgtgcggctcgaactcctgctacgactacactttcacgattgccgactgggatgaaaatgacgcaacgccaaatccatgctatcagctctcggcctgtactctgatcatcggacacagacataatgttgcggggacttcaggaccaggaatagagcgttcctgggacgcggggtcctatccgtttttgatcaccgcagagacaatgggtgaggtaagtcagcagtttaaaaccattttcacgttcccttattcgtccacgacgcggcacagcggtgtggctgtcaattgggaagagtgcgtgggttttttttacgcagcgggcaaaaaccttggtaacaacgcgtcaaacgtcaaccaaagcgcttttcagggccaccctatgatgccagggagtatttgtggtgttgctccacagcccagcggttcctgcgatttcaatcaggacgtactgaccctcgaccacggcacgctgacgcatcaggagcttgacgggcatgaagtcagtgaaaacgtcagtattaactgtacgacatcacagacgctcaagctgtatatctactccgcagacaacgtgcagttgcgtgacgacggcagtctctattccgagctttatatgaatgacaacgtactcggcacgtcgggcttcactctggacgtcgccgaacaggaaaatgtcgttgtgaaatcagttcttcatacaaatggcagcgtggcggcaggtgagttttcgggctccactgtgatgctgattacagtggagtga

SEQ ID NO: 150839 - DNA, 189 bp, Enterobacter cloacae
atgaatgattggtttatgtcatataagatttaccacaccaacggcggagtatttgaaaacttcgaaatttatggtgcaagctcttcgaaatctgcatcaactgtcttaattgagtgcactcagaagttggcaagtgattatggcgttaagcctgagcagattatgtttatttcgttcaacagagtttag

SEQ ID NO: 150840 - DNA, 369 bp, Enterobacter cloacae
atgcaggcagaaataacgatgcagcgtgccaccacgcggctgtgtattcagtgcggacttttcctgctccagcacggggcggaaagcgccctggtcgaggagctttcgacgcgtctggggctggcattggggatggatagcgtcgaaagcgcgatttcatcgaacgctatcgtgctgaccactatcaaagatggccagtgcctcacctctacccgtaaaaaccacgaccgcggcattaatatgcatgtggtaaccgaagtgcagcacatcgtcattctggctgaacataagctgctcgacctgaaagagatagaaaaacggttcaaccaaattaaaccggctttgttgaataaatcagatttcgggtaa

SEQ ID NO: 150841 - DNA, 189 bp, Enterobacter cloacae
atggatatcgacctaatcaccatgtctatctcagcgctggcagtggctatttctgtttatgtcgctgtgccggttcctgagaagaagtccaaacagattaagcatacaccccgcgatcagcttccatccgaggtgagaaagctcattgagaacgttgatgagattgagcggatagcaaaaagtctctga

SEQ ID NO: 150842 - DNA, 417 bp, Enterobacter cloacae
atgacccaacggaatataccggcctgcagtacctctgatttcatcagcaggatgatcggcgtgccgtgggctaaccgggcctgttcgttcgagaaggtggattgctggggattatgcgtgctgtattaccggcacgttctcggcattgagctgcaccagacgccggactacgaagccggagctgacttcttcacctgctatcagggtgacgtcgttttctggcgccaggtcgataaacctgtcgagggagggatattcgtagggtaccgcggcgcgcagccagctcacgttgggttggtggttaacaggcaggcgttgcactcgcgcggcgagaacggaagcgtgcgcatggactcgttgctggtcattcagcgggcattcaccaaagtggagttttttgaatatggcgctggttga

SEQ ID NO: 150843 - DNA, 195 bp, Enterobacter cloacae
atgtcaacatctattaaacgcgataaacaaccgaaagggggaggcaaagccccagcatttcagattcgaatttcacctgatttaaagcaacaaatttctgagattgcggaaaaagaaggcgttagtctagggaattggatcaaagaattgattagaagtgaacttaaaaaaaatggaatcactcctaaaggttaa

SEQ ID NO: 150844 - DNA, 288 bp, Enterobacter cloacae
atggctggaatacagcatacccaaactcgccccaaatttacatggctattccttggcacaccgcgaggtcattcttgtctcccgatagttctgcgcaccgttgcagatactgaagacactgcccgtgcaaagttctgtggctgggagttaacctttgccgccaaaatccggaccgaaagcccgctctcagtatcgtttatggatcctgagaatcgcaccctatggagcatcctgggtagcgatccttacagcaatgaagctgtgccaatggaggtgcgccatggataa

SEQ ID NO: 150845 - DNA, 324 bp, Enterobacter cloacae
atgattaaaaaattcaatcaggttcagcctgagggcgttgctcaaccaaaaatcgaggcacacagccgctggaaaaataactacggtgaaaaaatcactgttaagtgcgtggcgttcggtcgtgtgacatatatccgcgacgggtatgacagcgaatgcatttgctctgaataccggttcacgggtgaatttaagtaccttccggaggaaacggagaaaagccaggcggaagcgaaagaaaatgggcgtaaaaaaattgctgagctgcgttcagccctgccgctgagtgttggatctgacggatgggataaggggctgaaatga

SEQ ID NO: 150846 - DNA, 1410 bp, Enterobacter cloacae
atgaaaaatgcaccgaatctgaaactcctgccaaaagaaaaattcacggaggcagttatttttgccgggtcagaagcatacgcccatgcgaagggttgggaagaggggcttggtaaacagattgccgaagataccactcctccagtttaccttgggccaaaacaactggctgagttggataacctgcgcattgtggatgatggccgtcatgctgtgcggatttacttggccgggaatataaagcctatccagattaatcacattgctgaaaagctggcggtggctggcgtgcaggatgccaaattgtataaaggcattcccgaccatgagccagaagactggagggaatatctttcccgtttgcgcgagcaggttgaagtatctataggggaggagtcattgcggcacagtcttcctttaagcgtgggctctgatgggtacgatcaggagcaggattacacgttaaagagttaccttcccgctaacagcctgagcagtatctacggcccgagcggttcgtataaaagttttctggcggtgtcctgggcttgccacgttgcagccgggatgaagtgggctgggaagtcggtatcagccggagctgtgatgtacgtagtgggtgaaggtggcattggcgtcccgcggcgaataaaggcgtgggagaaaagacacggtgtgaaactgaataatctgtatctggtaaaccgtccggttttcccggttcgccgtgaggaaatgcaggagatgatcaaagctgcgcgtgatgttaagtccagaacgggacagccggttcgcctgattgtcgtagatactttagcgcggtgcttcggtggtaacgatgaaaacgatgctcgtgatatgggggcgtttatcgaaggctgcgacgtcatcaagcgtgagactggcgccacgttgctggtggtgcatcattcaggaaaagacgataccaaaggtgcacgtggttccagtgctttcagggctgcgctcgatgctgagttcaatgtccggcgcgagggtgatggtggggcgataatcctgacctgcacaaagatgaaagatgcggaggagccaaaacaggcagcattcgatttgcgcacggtggaactgtttactgatcgcgatggcgaactgatttcgtcgctggtggtgcaggacctgccacgagaggcgcgagaacctgatccggaactggctgatatcaagcacctgaccgggaaccacgctgcactatggcagtcaatccggagccgaaaagccaaaggtgaaccgtgtaatgtctctgttatacgtgatgatattaccactttgtttggagagaacggccgcaaaggctttaaacgctggctggataaactcgttagggaaaatattatctttatcgatgattcaggagatatcacgataatttaa

SEQ ID NO: 150847 - DNA, 489 bp, Enterobacter cloacae
atggacttgtccaaggctaacttttacaactttattgatcagtatgttgagattactggtgcttctccaaataccgctggcaacgtgcgtagcgtttgctatctggtaaaggattacatctcggagaccgcaactgcggatacgtgggatacaaacagcatcattaacacctacgttatggcgaatggtattgctgaagatacccagaaatcgtacatcagccgctttaacggagctgtgacaaaatttattgcacatgagaaaggtgaagatgtgaccgtgaagcagcgcagatcgcctgttaagtacgctccgtctttagtgatctcgaataaattcttagtaaagacctttgatctgccgatcccccttcgggatgatctcaccgtcattgtcggtaatttgcctcgcgatttgaccaaagatgaggcgaaaaggattagcacaatcattgagtcgtttgcagtctctcagccggcaaatgactaa

SEQ ID NO: 150848 - DNA, 213 bp, Enterobacter cloacae
atgagtgacattaacactttaaaccctagcgagaccaaaggcggctctgtacatctggacgcgcagaccgttttacgacttaagcagtaccgccttgatcatttgaaagctcaccccgggaagccattacccggggttgcgcagattgttcggcacgctgttaatgcctggcttgatgaaagcggcttttcagttacggaaggtgtcaaatga

SEQ ID NO: 150849 - DNA, 690 bp, Enterobacter cloacae; identical to SEQ ID NO: 150733

SEQ ID NO: 150850 - DNA, 183 bp, Enterobacter cloacae
atgatggttacagctatggggcgggcgattatggagctatcgctcgccaatcaaccaataactcaggaagctgtcgttgaaaagctggagcagtaccgaaaagagatgggtaacgtgattggggaaggggttaacaaggatgcggctgagatagtgcggaatggaagtgctgcgattgagtaa

SEQ ID NO: 150851 - DNA, 471 bp, Enterobacter cloacae
atgactgaaaaaggaaacgaggttgtacctcatcaggaagagcaagctggtcaaagagagaaaaaattaaaccctatagctgcgattgagaagtttgtagaagtacagacaaaggaaatcgagttaaaggaaaaagagttagattttaagacgcaagagctagagatccgcaagcaggagattgaaagcaatagagaaattgcattaaaatcaattgaagcacagaaagaagatagagccacacaggccacaatattcagtggtgtggaggtaaaaagggtctacttcaagtaccttgtgactatagcggttgccactgttgtcattatctccatgtatacaggtaatgcgcaatatgcgattgagcttgccaagataggcggtggagttttagctggttatcttgcaggggtatacaagggtaaatcagaccagctcgaaagaaataacgctccaaagagcgaagaatag

SEQ ID NO: 150852 - DNA, 219 bp, Enterobacter cloacae
atgaggggatatatgaaccacaaaaacagcaactttaaccgcgttctggaacctatgtatgagagggttgtatctgccgatcaggttgcaactttaaacaagtctcagattgataacattgaaaagattcagtttacgcctcctaagataggcggttctgattttggtacgtttaagatcagatacaagactcctgtgctatgtgaagtgaatagatga

SEQ ID NO: 150853 - DNA, 666 bp, Enterobacter cloacae
atgcgtttgaaggctatatacgagaaaaagaaatcagagcttggcctatctcaagaaggcattgctttttccatggggatcgggcaatcagctgttggggcgattttaaacggcgtaaatgcccttaatgcgaacaatgcagccatgctggcaaacattcttcaggtaggaatagaggaatttagtccgtcaatagccaaagagatttctgacttgtacagagccataggcgcagatgtacagaagagaagcgagtatgagtatccagtcttctcgcatgtgcaggctggaatgttctctcctgagtttcgcacgttcactcaacgtgacgctgagggatgggtgagtacaacgaagaaagccagtgatgctgcgttctggctagaggtagatggtcactcaatgacagctcctgccggatcacgcccaagcttccctgaaggaatgcttatccttgttgatccagaggagccggttgacccaggtgatttctgcattgcgcggttgggtggtgatgagttcactttcaaaagactgatcagggatagcggacaggcattccttcaaccgttaaacccacagttccctatgattccatgcaatgagaactgccgagttgttgggaaggtagtagccagccagtggcctgacgagacgtttgggtga

SEQ ID NO: 150854 - DNA, 198 bp, Enterobacter cloacae
atggaacagcgcataaccctgaaagattatgccctgcgttttggtcaaaccaagaccgcacaagatcttggcgtttaccaaagtgcaattaacaaggctattcgctctggcagaaagatttttttaacagttaaacctgacggcagcattgatgcggaagaagtgaagccattcccaagcaataagaaagccgcataa

SEQ ID NO: 150855 - DNA, 291 bp, Enterobacter cloacae
atggaactagcaaatcacagcaaaaaggtacgcgaagtggaaacagagcttcgtgccagactcgtatcaatgggtcagacaaatttcgcaaagatggcgggatgggctgattcaaaggtgagtcgattaaacatccacgatatggcggtgacgttcgttcttctggagaaagtctgggagacaagcctgattcgtgaagtggcaagacaggctattgcagctgtgatgccagaaagcaaaaaacgcccagcggtaactgagcgtttagagcaaatcacattggatttttga

SEQ ID NO: 150856 - DNA, 159 bp, Enterobacter cloacae
atgcgaaagcgtaaaaagtaccaggaaaaagaagagattcgacatcctgattcacctgaaggattagtgaatacagctgccaataaccgggcgttcgcagagcgttttattggcgtttacagactagccaaagcaggagtgaagaatgggcgtcgttaa

SEQ ID NO: 150857 - DNA, 900 bp, Enterobacter cloacae
atgggcgtcgttaagttttcagactaccaacctcaacgcgaggtagtggagcgcaaagtggcgagtcttgatgatggttacatgcgtgtagctaccagcatcgggaagcttaagccaaaactgaaacttgcaggtcgtgaacatcaggttctggacgccgttatctactgcacctttggctggaataagtcggaggacaaggtaacgaatacatacctggctgaagtgacagatctggatgattcagatgtagccgcagccctgaatgttctggcagagcgcaagattataaacctcagaaaagtggctggatttaagctggtcagtgtgaacgtcagcattgataaatgggttctcaaaaagaccccaaaaacaccacccaaaaagttgggcgaaaccacccaaaatgttgggcgaaaaaaggtttcaagttgggcgagatcacccgacaccctaaacagtcttaccaaagacaatttaaaagatacccaaacccacgaagtgggcttgtctggtgatgagaaattaacaccccgtcagaaaggcaccaacccccgagctaggcaaaccaatcctcgctctactgtcccagcattcgatcgcgaacgcttcaaggagacttggaactgcaaagcaaaacgtcttggtatgccaaccatcagaagcatcaccacatcgacagagaatggaattaagcgcctctggtcatcatacctgaagcagtgcaaagagcttggcaaagagccgcgtgatatcgacagcatcctgaacggatacatcgaacacggttatcagccgactcagtgggcgctaggtggcaaccctgaaggaaaggtttacgggattgatactgctctgacgcagaagaagattgacgagattttaggagcgggaagctga

SEQ ID NO: 150858 - DNA, 1335 bp, Enterobacter cloacae
atggaaagttacgactttgagcaccaactggttggttcgatgatggtaaagggagatcacatcgactgccgcgaaatagccgggaagctacctgctgaggcattcgagaacttccacctgaaaagcatgtaccaggcgattgtgacattgctgaacaaggctgagccggtagatatgttcactgtgaaggacgcagtgccatcagcgacaaaggactttgttgttgaggtggcatgcaaatgctcatcggcggcaaatatccgtggctgggctaagcgtgtcaggcagtgctggatgttacgtcgtggcgaggctgagcttaagcgagcggcagagcttctggcaggagctggaacacatgacctgaatgaccggatcgcagaagtaagcgggattctgtcaaagcttcagttcgaaaccaacgacaagctaccgcgccgcataggcgacttgctggacgactacatggtggttctggaaaacaggatgctcggtgaagaatcaggaatgtacctgcgtaccggtattcagccgatggacgatgcatacggagggtttgaccgaacagacctgattatcatcgctggacgcccgggaatgggtaaaacggaactagccatcaacatcgctaactccattgggcggcagaaagggaaggggttgtttatctcgatggaaatgtccgatatgcaggtggtagagcgccatgtcgccgaccgcgctggattgtctgtaggcactcttcgcaatccccttgggatgattcaggagcactacacgcgactaaccgcggcaacaggaacactgctcgaagaggacaactacgtaatcgacggagcgtttactgtggacgaatgcattgcccatgctgagcgacttaacatggacggcgggttaagcttcctggccatcgattaccttgggctcattgaaaagccgaaagcagacagaaatgacctagctatcgctgaaatcacccgcaagctgaagcagtttacccttcgcaataaagtgcctgtaatcctcctttcgcagcttaaccgcggcgtagaagggcggcatgataagcgaccaaacctttccgacctgaaggactccggcgctatcgagcaggatgcagacgtaatcatcttcccgtatcgcgatgaagtttacgacgagaacagcaacatgaagggaatcgcggaaatcatcatcggcaaatatcgatctggtcagccgcaaacgttctacatgggatggaagaacggccatttcgtgaatatcgatcagcaggaagccgccaaacagttttcagccaaccagacggagtcgaaatcaaacgactggagataa

SEQ ID NO: 150859 - DNA, 228 bp, Enterobacter cloacae
atgaacccgaagaatagccctcgattctcaaaggccaacttatggccggttaagaattttacggtgcgcacgttgccaataaaaaatgtgtatacctcattcagtgctttaatgcatgcttctattaatattatggattatttccttaacaaaaaacatcatatgaatttttataatgctcaatatttgaagatgcaagtatctacaactaaaatcattgaaaaatga

SEQ ID NO: 150860 - DNA, 252 bp, Enterobacter cloacae
atgaatcagcgatgcagcaaagaattaacgccagcaaaaagtaccacaagggttgatccggcacatgcaataatcacagaaatcatgggttttgaatgtaaacaccctgagattgctatctgccgcagagcaacagaagggattattacccgttgtgggggaattgttgccccagtgggtaatctgctgaatctggtaacccgagaagtgattgcgcttgaggcggattttccgaccgttaccggagtttaa

SEQ ID NO: 150861 - DNA, 369 bp, Enterobacter cloacae
atgaacgaaacggtggaagagttgaaagctaggctgatgctaattaagtattacatggcggtgtcagaggcacggattgacacgggagagtttggcgatattcgttcttccgtgcgagaggagcgctggaaggctggccgtgcgctgaacaactttgtcggagcttatacctaccaagtattgaaactagattttgtggggcttcatgaggcagttgagtctgcacttagcgcggctgaggatgggcgatacggcttaaaccgagcgttcgaaagtgagctgcgtggattgtatgactggtttcgtgaaagattacctgatggatattctcctggctggttgaaacatggtagcccagatggactataa

SEQ ID NO: 150862 - DNA, 504 bp, Enterobacter cloacae
atgactttttattatgggggatgtatgtcagttttattatttttgctggataaggttagcttgcttttttcggccttagcgttaattgtatcagtgttgggttatctaaatagtagagaaataaaaataaagaataacaaagattctttgtatcgatttaaaattgaaactttaagtaaagcgagagagtccgagatcgcgtttcaggatatatatgaaaaaattgcatcattcattagagaactacaaaacaacaatgatgtatcggtagcagcaaagcgcgttgttttagatgaactttttgagcaaagagatacattctttagacagtctgttctggattcgaaggctgcatgttcttttatcattgaaaattttgaaacaatgagtgaggaaaaatttgttgaataccatcgtgtctttgtctctgaattagatagactcaaagccaataataaaagattagatgataaatttgccaacttgcttgatggtatgaaataa

SEQ ID NO: 150863 - DNA, 426 bp, Enterobacter cloacae
atggctgacccaacttctctcgctgctatctctggcacccttgagcttgttaacaaatcagttgatttagttcgcaatctccgtaaaaaaggtgacgatgaacttaccgctgccgaaatgagaaatacattgattgatttgcttgatgaccttgtagaagtcaaaagtgaatttgttagtcttaaagctgttttgctaagtaaagaagaagaaatacaagagctaaaggctaagctagaaggaaagcaagaagtaaaatttgatggtcgtttatattggaaagagggtgatgaaactgctttttgcccggtatgtaaagagaacgaaaacaaactaatacatatgatctattattctggtagtagagaatactccccaagttggtattgtaaagtatgtcgtaatgagttcaatgaacatgcctag

SEQ ID NO: 150864 - DNA, 210 bp, Enterobacter cloacae
atgaccatgtacccaaaaggagcgaggccgaaccgctggcagagcttgcatatggtctgcaagtaccgtgaccaccataaacctgtttatccctgcggcgtctcgcgacggcgacagaacgggggcatcgggctaaaatgcgcttcactaaaagtcttcgggattatgccgagtaggcggcttttgttcgttgttgggctgtcgcagtaa

SEQ ID NO: 150865 - DNA, 1251 bp, Enterobacter cloacae
atgacaatcaagggccaggagtatctttatctttcaccggacggtgtatggcagtttcaaatctacatcccgtcttatatgcgtcacatgttcggcgggaagcgcctgtatcggaaaagtacagggacaagagatatctacaaggcgcgtcacttccgtaaccacatgctggtagagtggaacaaccttaaagaacagttcaagcctgatactgaggataagcgtattcagcttgcgatcacttccctgcactctcaaatcaggaagaacaagaataaaccattgattgaagagcgagccagttcgattcctcacctgtgcttcttacgagatgaatacgctactgcctaccaggatcggagatcattctccacactgagcaaatcggcgcgagccgttgaggtgtttctccagagtattgggaaagttgatatcagcctggatcagattggacgccgattagttacagacttcatagaagagcagcagaaacgcgatgtagcgccccagaccgtgcaaaactggcttacatcgttaggtagcctctacgagttcgccaaacgccgctatgacgctatagcccccctaaatccgtttcatggtcacaaccttgaagcgcggcgcacaattgaaagctatcagccgtttgaatggcatcagctatctacactactcaacgaagcagacgaagagctacgagcagttattctgatcggtttgttctctggtgcaaggctggacgaaatagccagcttgaagaaagaagagatcgttatggtggaagggatacggacattctacattagcaaatccaagacgaaggcagggattagacacattcctatccatgcttttctgatcggcatggtggattattatctgagtttgaacactggagattacctgttaccacaggctaacaagattgaacgcaaagacggtaagaaaggaccattctattcccaagcattcacccgcttacggcgtcgcgtagtgcctatggctacagaccgtcaatgctttcacagtttgagggggcattttatcacgtgtctcgaccgtgccggagtacccgaacaacggatcggctacatcacgggacactcttcccaagccgctgccacagaagcattcaaaacctacagcgcggggtgttccatgaaagagctatccgactatgtggaaatggtggcctatccagagatcactttcccagaattaaacaaagaggagcaagctccccacgcataa

SEQ ID NO: 150866 - DNA, 333 bp, Enterobacter cloacae; identical to SEQ ID NO: 133630

SEQ ID NO: 150867 - DNA, 495 bp, Enterobacter cloacae; identical to SEQ ID NO: 133631

SEQ ID NO: 150868 - DNA, 174 bp, Enterobacter cloacae; identical to SEQ ID NO: 150703

SEQ ID NO: 150869 - DNA, 444 bp, Enterobacter cloacae; identical to SEQ ID NO: 133633

SEQ ID NO: 150870 - DNA, 273 bp, Enterobacter cloacae; identical to SEQ ID NO: 133634

SEQ ID NO: 150871 - DNA, 762 bp, Enterobacter cloacae
atgacaattcttattaaaacgttaaaaatcatggcgtcaggtgttgttttcgtttcaggtttaaccaccgcctccagtaccgtgtatttcttgccagaggcaaaatcagtgggtgtcgccagcagcgacaaaaacgcactgatgtttctcgggatggacagggatgtaaatctgaagggaatatgcttcgcgatgacaaagcaatcatcatcaatcgttccgctggtagatatcactgctacaactgataacggcagattcacgatgcacgggttacgccctaatgtcagtgattctaaagaagtcgcttgttccttcgggtccgaagctggtgatttcttgactgccatttcgaagtcaacaaccgttaacgtgaagctggacttcaatggcgagatccgcaattacagtttcgacactacagagttcggaaaggtattgactgcgaatgggcaagccgtgggggaaaaagcagctaaagactacgctcagggagtacgtgcacccgttttctatagcagcggtagcgaagctcccaaaaacaatgcagtaacctcaaacgtcgatacacacagttataaagcaagcgatgagaaacttaattcggtctggaaaagccttagccctgaaacccgaaaacgattgcttccttctcaaagagaatggataaagcacaaatccggctgcaataatgaacagaaatgtcttaccgacatgacgaacaatcgcattcgtgaactggagtctgaatatggaaaataa

SEQ ID NO: 150872 - DNA, 180 bp, Enterobacter cloacae
atgagcacccataacaccctcgctttactcaactggtatcgctcaaagcatgtcgccgctgtaaagactcctgcaggcattgttttcatggggatgcgtaacatcaccgccgagcagcgaaggacgcttctggcaatcccgcagtcagaccttgaggcagcgttgaggattcagcaatga

SEQ ID NO: 150873 - DNA, 249 bp, Enterobacter cloacae
atgtcggactggaacattgcagccaaaccgcaggaggaccgcgataaggttaacgttgaccttgcggcctccggagtggcgtacaaagagcgcctgaacatgccggttattgctgaggtggtgatgcgagagcagccggagcatttgcgagattacttccttgaacgcctgaagttttatcgagagaagtcgataaccttaccgaaaggtagcgatccggtttaccttaaacaggaggaagggaagtga

SEQ ID NO: 150874 - DNA, 246 bp, Enterobacter cloacae
atggaaatcatccaggggacatgcaactgcggcgagccaatcagcatcgagttaaacgccgatccaaagtcgtgcggccgcaccgacaggaagagaccgttctatccagaccagaacattgagccatttaaggttgggcagttcacatatacccaggagggcgtgacaacgttttactgcaggaagtgcggcggatatctgtccgagacggttcctgaggctgcgtggggaccgattgatggctaa

SEQ ID NO: 150875 - DNA, 468 bp, Enterobacter cloacae
atggagcggactgttggggatgtggttgcgctattcaccgccccgccagcgccggtatctgtgatggatgaagacctgcttcacatggcagcatctgcgatagaagacctgctcagcaacgaagacaggtctggtgccggggtatgggctgacgtgcctgccaagttacgccgcgacgccatgcttcagggtgcagatggcgactctccggtgattccagatgcatacgacatcgaagcatttggtgtattcagtgcatccgaaggtgaggatggtctgttgctgcagattgagaactttaggctcggcacggaaaactgcccacaaatcggcaaggggaatatggttcctaagtttgcattgcaggcaatcataaataggctgcaggaacattgcgacagcatggaaaatgagactcttgtcaacattttgtcagcgccatcagcaccgcagcaggaggtgaagtga

SEQ ID NO: 150876 - DNA, 651 bp, Enterobacter cloacae
gtgcaaaacggtgatggctggattgccgtccaggatgccttcgtatttggcgtgccgcagttcatcgacacgggcctgctgctgggccagcagtttgctgcggtcaatcgcaggcacagttgccgcaataccgccgtcgaacggactttcccggcgcagatgggcaatatgggcagcgcggatcatgatcttggacggcacacagccgatattgacgcaggtgccgccgatggtgccgcgttcgatcagcgtgaccgtcgcgccttgctcgacggccttcagcgccgccgccatcgcggccccgccgctgccaatgatggcgatatgcaaaccggcgccctcaagtgcatcacggatttttggttcatctttgaaatcaccaacccggatcgagccttgataacccaatgcggcgatggcggccagcagttggttgtggctcacggcggtgtctgccatgacttgcgcgcggctttctggataggacaccacagcggcattcacgccgggaatcttttccaaagcatctttgacatgggtggcgcaggatgtgcaggtcatgccattcacggtgatttcggtcatttttttactccattgaatttcggggtgcagcaggcatcggcttggcgttttcgttggatggcgtag

SEQ ID NO: 150877 - DNA, 276 bp, Enterobacter cloacae
atgaaaaagctgctttccgcccttgccctcgctgccgttgttgcccccgtgtgggccgccacccagaccgttacgttgtccgtaccgggcatgacctgctcggcctgtccgatcactgtcaagaaggcgatttccaaggtcgatggcgtcagtaaagttgacgtgaccttcgagacgcgcgaagcggtggtcaccttcgatgatgccaagaccagcgtgcagaaactgaccaaggctaccgaggatgcgggctacccatcatcagtcaagaactga

SEQ ID NO: 150878 - DNA, 351 bp, Enterobacter cloacae; identical to SEQ ID NO: 121654

SEQ ID NO: 150879 - DNA, 690 bp, Enterobacter cloacae; identical to SEQ ID NO: 150733

SEQ ID NO: 150880 - DNA, 450 bp, Enterobacter cloacae
atgcgaaattcagacaatttcttctcattccacaaaacgcccttgtcaaaatgttctcttttcattcatgttattgggctgcgctacactgtctgtagtgttccagcttcggccgacccgcttaaccacatcggcggaccagccccccattatcgtccaggaaaattcacctgctcgaccacgaagaatcaagaaaccatcaccacattacgtgaaatttcggacctgaataatgacgcattcgtttgcgaacttcgttacagtcgtctaaaaactggtgccccctgcggcagagagcgcattgaaaaatacaatcagttgaagcgtattgaaaacgctatgggtgaggcggcagtctttatcggtaagccagcctttaaaaaagccagtcctgtacctaccccataccttcgatctgggggctataaggaggtcctctgtgaatcctaa

SEQ ID NO: 150881 - DNA, 696 bp, Enterobacter cloacae
atgattacgtggcaatcgctattgcccttttcatcgggagtagcagccatttgctggtccgccattttctcagcagaacatcgaaaaaaaaaggttattaaacgtggatgccaggaaaaccctggcaatttattgatacgtactattaacaacaacgggttctgggtcatgggaaaaataattttgctccgacatggcgaaagtgaatggaatcagcaaaatcgttttacaggatggacagacgttacgctgaccaggagaggagaagaagaagcccgacatgcagccaggctcataaaacaggctggtatacagatagattcagcctgtacatctgttctcaaccgggcaatacattcactttggttgataatggagacactgaacctgttatggctgccagtgagtaaaacctggcggttgaatgaacgtcattatggcgccctgcaagggatgaggaaagatgaagcggcacaacaaatgggcgaggaactggtgtatcactggcgaaaaagttaccgaggtattccgcctttgcttgcggcagccccacaacttctccatcgcgaagcccgctatcaccatattgctctgtcagatctcccaaaaggtgaaagtcttgagatggcactacgaagagttataccttactggcagcatgtcatcgctccccgcgtcgtcagcgggctttgttga

SEQ ID NO: 150882 - DNA, 1248 bp, Enterobacter cloacae
atgggaagttctgaacttagcttgctgcaaatggctgtcatgcagtcttggaatgcggtggtgattaccagtgctgacagagcagcaggatatcctgtaaaaattgcgaatcctgctttttgtcagatgacaggttacgcaattgatgagttgtatggtcagtccttgaagatgttacaaggtcctgctacagatcaggaggtgattaaccggcttagaaattgtcttagcagtggtgaatactttgagggtatgaccactaattaccgcaaagatggtttgccatatttggtgcgctggaatatctcaccggtacgagatgaagagggcgacatcacgcactttgtttcagtgcagcaagatatgactgcgtatgccaaggttgaagagaccagtaaaattcttggtcaggcattggatgccgcagcacagccgatactcgttaccgatgcgcaagctaagataatctttgccaatcaagcgttttgccaggtaagcgattatgaagaatcagaattaatcggcaatacaccatcacttttcaagtcaggcttacaagacgatgacttttacaagaacgtaaaagcatctttaatgacagcaaagacgttccaggcaattttcattaataaacgtaaagacggtaccttgtatcattctgagcagagtatctccgctatcaaagaccacgctggtaacattactaactatgttagtgttggaaaagatgtcactgagcgacttcgtgaagagcaagcgctacgtgaatcggcaacagtggatcaactaactggtttgtttaaccgcaatcatggtaaggcgttgttaagcgaggcttatagctttactcttagccgggaagagcccatgagtctaattctttgcgatattgatcactttaagcagattaatgatagctttgggcatcctgttggtgatcagatcttagctcaagtatcgggtctacttcgaaagtcggttcggggtaatgatcgggtaattcgttggggcggagaggagtttttgatcctgcttgagaattgcactgatatggtagcggcagaattagctgaacgcttgcgattgcgaattgcttcagagcagtttcagaatgtaggcaaggtcaccgtgtcactgggagttgcatcattatttcagaaagaaagtttagagcagctgatcagccgttgcgatgaagccttgtataagtcaaaacgtaatggtcgaaaccaactaacgttagcgtaa

SEQ ID NO: 150883 - DNA, 477 bp, Enterobacter cloacae
atgagtcatcaacttaccttcgccgacagtgaattcagcagtaagcgccgtcagaccagaaaagagattttcttgtcccgcatggagcagattctgccatggcaaaacatggtggaagtcatcgagccgttttaccccaaggctggtaatggccggcgaccttatccgctggaaaccatgctacgcattcactgcatgcagcattggtacaacctgagcgatggcgcgatggaagatgctctgtacgaaatcgcctcaatgcgtctgtttgcccggttatccctggatagcgccttgccggaccgcaccaccatcatgaatttccgccacctgctggagcagcatcaactggcccgccaattgttcaagaccatcaatcgctggctggccgaagcaggcgtcatgatgactcaaggcaccttggtcgatgccaccatcattgaggcacccagctcgaccaagaacaaagagcagtaa

SEQ ID NO: 150884 - DNA, 249 bp, Enterobacter cloacae
atgataaatttgcaatcttataatgaagtgttgggttttcttgagttattttttcaaaaatatattcttgattataattgcctccaggatatgcaatttattttagagggttgtcgaaaagaaaaaacggtggctattcgagctatagactcatgctttatggtatatagacggaagactcaagattatagagtccttactcatgaggaacaggagatttggaggcagttgttcaatgtatggcaataa

SEQ ID NO: 150885 - DNA, 1983 bp, Enterobacter cloacae
atggctacgcaacctaccaatttgcctgtcccaagtgaatcccctcgcgatctgaagtttaacgcgggaaaaattgacgagttcgttacctcattggttaacacctatgttgaccggtttggtaacgagcattacaccatcgaggggctgcgctggctggctcaacaggctattgctcagtatggatggatcctcattgactccttccaggacggcgctaatatcaccctgccaaaccaggcgctacgtgacgaagataccggcgaatattatcgttgggacggcgcgctgccgaagcatgtggatgccggctctacgccatcatcttccggcggggttggcgtaggcgcgtgggtaggtattggtgatgcgagcctgcgagcaatgctagctacatctgcgggcgcgggaatgatcggcgcgctggactcagatggaaatgcaacgactgttcagaatgcaatcggccattatcgcgcctataccgttaaagagcgacttgatgaagagataagtatcgcatcaatcccaggggttgactccaccggcacagaagactcaacagcagcacttcaaaacttttttgattctctaagtgatgggagtgaggtatacgtgccagctggaacgtacaaaattagcggacttatcatatcaaataattcattaaaaatacgtggggcatatagatacgcctacggacaaagtacgactaaattaaaagctagcgctccaaatatcaccttaatgaaatttaccggaaatggatgcagggtagaaggcttactttttgaaggctatgaagcggcagttgccaatgagtttggtaaaggcacaacttgcaaaggggtaaattttgagccttctacaggtacgcttgcagatattgattcatttgtagatgattgtattttctggtatttgcaaacaggagcagaaggtcatggcagaaatttaactgtcacaaatacaatgtttacgttctgccgtttcggagttgatctttatggcgtgccaaatcaacaatttcgcggtcatatcattaatcataatcgctttcattcttgtggaggtgtcgaagcatcttctgaaccaacacttcttaactctgtatgcattagattaacaactaccaataccaataatgttgataattatgcgggaaacgtatccattatgaataatgttgttgatggtggcagttatcaatttttcaaaggaccatttcaccgcggcagcattatgagtgctaacagtatgttccgtatcggtggctcaggtgcaattgttatagacatagataacacctcaacagctggcaacactagctctgacggtgtaattatttcagacaacagtttgggtggatttgaccttcctgtttatcagaatgggatacaatactgtcctgatatgggcatccgattaacacaggtacgaggcgctatcctttctgaaaaccttattaacaaggcatggaaagatgggatcaagttggttagcagttctgaagtaattatcacgggtgtagtcaaggacccgagttcaattgcaaaccaatcgacttcaaccctttatagttcagttgatatcgacgctaattgcgctaacgtgctgatccctcacttaatgacgcgaacaaccgtttataacggaaaccaattggccgcctatgtcaaaaccgcatgcgcatcaacggttattggagacctttacggaagcgcaagctatactccatcaggcccagtgattgaaacaggtagtggttatgctgttggcgatgtttctgctgtctcatcgaaaacaaagataacagcgataaccggccttattagtgggtcaaactacccagcaggaaactacaagccaggtgatgtttgcaagtatctgaacccagcaactacaggatataaagaagctgtatgtactgttggcggtaatggttcagcggtgacatggaaaaattcaggtgcgctagtataa

SEQ ID NO: 150886 - DNA, 1509 bp, Enterobacter cloacae
atgaacgtatatctgatgtataaagatgctgattttgttttggatgatattttcccggataatttcaatatccaggtgagagatctggggttggatgtattattccagagtctttctgctggggatgagtttttatattcagtggtcaaaaaagcctgttctcagtcgcttgctgacgttccgtgtattgagtacagacaggctattttgcgtgactgtctttataactcaaatattatcagggaattttatcaggcggttcttgagtgcctgacgatggagaaagaaaaacttcactacattgtatttggtcattccccctcagcaatgcttcatcagtcaatttccttcactagatttttccttgaaaatttaaagaaagtcagagctattgctgaaaaaaatatttatttttttgagtcatccggaatgactcgcctcctgaagatgattatccaggaactgaatgaggattatctgaggggtatagaagaacatcttaaacagatggacttcaaaagaggcgtattaatgagtgccaagcttggtccgggaagtcgtggagacgagtatattctcagagaacccaactcgccggataagtgctggttcaggcgcattttctcaaggagacctgaacattactcggttcaaatagcccctcgtgatgaaaatggcttcagagcacttagcgatttacgggatgagggactggtactggttgctagtgcaatggcgcagtctacagagcatttacggaattttttcaaatcactgcgtgcagagctaggattttatgtgtgctgtattaaccttgctgaagaattaaataaacgcaatttaccccagtgtttccctgttcctgtatataaacgagagcgtcgtctggtttttgaatcgttgtatgatgtttgtctggggcttacatcagacaagaatatcgtcggcaatacattaaagactgataataaaaacacattcattattaccggtgcaaatcagggcgggaagtctacctttttacgtagtattggactggcacagataatgatgcaaagtggaatgtttgtcgtggctgagtatttctgtaccgatatttgcggtcaaatctttactcactataagtgtgaagaggatagctctatggttagtggaaaactggatgaagagctcctgcgtatgcgcgatatcgttgatcttctggaacaagacgatcttgtcctgttcaatgagtcgttttcagcgaccaacagccgggaaggggctgatattatcagggggattgtgatggcgcttgcagagagcagggtaaaaattttttttgttacccattgttcagagtttgcctgcgcgttttatcaggaattccatccagataccgaatatctgtgtgctgaaagacgagacgatggtgaaaggacgttcaggatcgaggagggagcaccgatggatactagctttggtgaagacttatatcaggcggtttttacatctgatgagcttgcatga

SEQ ID NO: 150887 - DNA, 285 bp, Enterobacter cloacae
atgagcgaagcaaaaccggaagatggtagcaccgtaaagggatatcgaaccctgaccgctgacgatatcgcgcaaatgaatgagctgaaagaaattagccgtgacttttgtgagaagctcgatatcgaacgcactcacctctctatcgaggttgtagaggccaaatctcaggaggctggcgagcgtgctgaagcgctgcgttgcctagccattgcgcgtaccaaaatgcaggaggcctgcatgtgggcctgtcgtgctgtagcgcgtccagatgccgattgctag

SEQ ID NO: 150888 - DNA, 612 bp, Enterobacter cloacae
atgacgcgttatgctttggagcaatattcaaagtttggagcgggctggaacgctaatactgcacccgaagctgcaggcaatgcttctattattagactggcgccggtctcaattttttttagaaattcaataaaaaaagcattctacgaagctaaaaaacagagtattgctacacatggtgccgcggaatcaataaatagtgcacagtatttaagctatttactcgtacttatgattaacggtcgcaacaaagagtttacttttgcaccacacatcctgccgctacagccgcgtgtcatgatcgtcaacgccggtgagtataagcaaaaaacacgcgaccagatacgttcaagtggttatgttatcgacacacttgaggccgcaatgtggtccgtatggaatactgataatttccgtgatgccattctactggcggccaatcttgccgatgatgcggatagcgttgcggcgacggcgggacaaatagcaggcgcgttgtatggttattccggtattccgctggagtggagaaacaaacttgtacaacacgaacgtatcacaaaaattgcaggtgaattgtttgaaagggcacctgaaggtattttcgtataa

SEQ ID NO: 150889 - DNA, 936 bp, Enterobacter cloacae
atgcgctttgtcacgccggtgaaaaccgtcaattcaggacctaacagaaaatattttggttccggacgtggcatcacctggtacaacttcgtctctgatcagtactctggattccacggcatcgttgtccccggcacattacgagattccatttttgtgctggaaggccttctggagcagcagacagggctgaatccggttgagatcatgacagacacagccggtaccagcgacattatttttggcctcttctggctgctgggataccagttttccccccggcttgccgatgccggtgaagcggtattctggcgagtggataaatcggcaaattacggtgcactggacgaactggcacgtggttgtgccgatctgtcgaaagccgaggatcagtgggatgagatgatgcgaaccgccggttcgctgaaactgggcaccattcatgcttcagaactcattcgctctttgctgaaaagctcgcgcccatcagggctggcacaggcgatcatggaagtggggcgcgtcaacaagacgctgtaccttcttaattatattgatgatgaggattatcgtcggcggatcctgacgcagctaaaccggggggaaggccgccatgctgtggcgagggcgatctgctacgggcagcgcggtgagatcagaaagcgctatcgtgaaggtcaggaagatcagctgggggcactgggcctggtcactaacgcagtggtactgtggaacacactttatatgcaggaagccctgagctggatacgcagtaatggagaagaaatcggggttgaagatatcgcccggttgtccccactgatgcacgggcatatcaatatgctggggcattatacgtttacgctaccggaggatattttgaagggggaactgagagaactaaatttcaatttaaacaatgaattaacttcttag

SEQ ID NO: 150890 - DNA, 201 bp, Enterobacter cloacae
atgcgcaaactgagaatgacaggcttcgtgctgatgttgtcgctggtaagcgtcggctgcaaatcgccgccacctgctccagagacgaaaccaccggagcctccggcctggttgatggctcaagccctcgacttacagcagatgctgaactcaattattggcgtctcagagacgggatcgccgccgtcacaaagcaactga

SEQ ID NO: 150891 - DNA, 690 bp, Enterobacter cloacae; identical to SEQ ID NO: 150733

SEQ ID NO: 150892 - DNA, 786 bp, Enterobacter cloacae
atgaatgatattggtggttgccgagttatagttgacaataaaacagaattgctaacgctaaatgactctttaaataatagtaaaacgttacacaaaactataagagtgcgtgattatcttgaatctcccaaaacaacaggataccgtggtatacatagaatctatgagtgttatgctcatgctgattctcatgattggaaggggtttaaaattgaggtgcagcttcgtactgttttacagcacttatgggcaacaacaattgaagttgttgacctttgcgaagggaaagcgttaaaaacaaatccattcgaggctgatcaaaggtggactgaattcttttttattatgagtgaattttttgctgaagatgatggttttatagttctcgataatacaaaaaaaagtcattataaaaaaagattgcaggcgctaaataatgcaattggggcatacaataagttggcttcgttcaaagctgtgttttcgacgaaagacatagatgaaagatcaactggaaagagttttgttgtattgattatcgatgaaagtaataaaagggtttcttataccttttatagtgaaactcaaaaaaaggacgcaatacgaaaatataatagtgaagagagggatggcgggaaaaatgtcttgttagtccaaatggatgacataaaaaatattaaaagtgcctatcctaactatttaattgatacaagtgagttcctaaggaaatttgatacttacaccaaggctacatactggataaatccaatccctccgcggggttag

SEQ ID NO: 150893 - DNA, 285 bp, Enterobacter cloacae
atggaaaacgaaattttagaagctttaaagaaaatacatgacaatcatgagaaaacagcgggcagccgcttaccgtatttcgatatttcacttgacaagttactgtttcaattggggttggatgaaagcgcatatcatgaaaacctttatgcagcacttgagtctcttgaagagcaaggtttgatctatgatcaaagtacaagtaatgggggatttggccgaatgattggtaccgatgatgaaatctctcatagcattgcaacgaaaatccgcttagcacattaa

SEQ ID NO: 150894 - DNA, 207 bp, Enterobacter cloacae
atgtgtgagcaggtgctgaatacggggaatatcccggtgaagggcggtattacccagggcacggtcaacacgtttaattttatttttgacgtgcgccctgccgggaagagtgcgaccaaggctggtcagggtcagatccgcaccgtgcgtgagggcaacggccatggaaacaaggacattaatccggaagctgtgaacgtccggtaa

SEQ ID NO: 150895 - DNA, 339 bp, Enterobacter cloacae
atgcagatagaaccggccgtaacagggcgttcgtggtttacgggacaggacaccgtaacccacgcagaccggttgtccggtagcctcaagctcactgattttcatccattttttatctccgtccagccggaagctgatgcagcccctgaccctgccggtgaagctccagcccagctggctgacatgccggaaccagtctgtccggaagcctgcatccgtaatgatggtgacggctttatctttcgggatggcatcatgcaggcggtcaaggaagcggcactgtacatcgctgttctgcgccagctctgcggggacaacctcactcataagcggcagtga

SEQ ID NO: 150896 - DNA, 177 bp, Enterobacter cloacae
atgctgatggccaccgttgccagatccacggtgacatcatggctgatggtaattgggttacccgccgtgctgtcgccggtgacgctgatcttcacggtgccttccggccacgtgctcacgtccgccgccgggaccgccgcgctccaggtgccgtccgccagcaccgttgcggaatag

SEQ ID NO: 150897 - DNA, 690 bp, Enterobacter cloacae; identical to SEQ ID NO: 150733

SEQ ID NO: 150898 - DNA, 402 bp, Enterobacter cloacae
atggcgcgtcaccagcgcgttatatttgcgctcacggcttcccagcgcgttctcggtcgccctcactttcacccgtaccagcgtgtcagtctggtgaacgacgtttgtccggatgttgatactgtggatctcttcgaccttcaacaggcttgcatcactggagttatcggtgcgctggaagctaaccgcgtactttccgaatcccccggaaggtgtgattttgtcagtgcggtagaatacctcacttgtggaatcatgcggggtcgtctgccggtatgtgaaagtctgctgcgtgccaggcacctggttgtaatcgtcgtcgattttccagaggacgaccttccagttagtttccttatttccgcccaggctggactgtgtatgcagccaaagctgagttga

SEQ ID NO: 150899 - DNA, 315 bp, Enterobacter cloacae
atgatgtcctgcgcgagctttctcatttccggatcttttccgtattttagctcggtctcagccattgctattgccccttcatggtgtgctaccatgcctttcgcaaaagccttgtcgggatcggactcttttacagcggccatcattttgtcatgcatacctttcatgccggacatatattcctgtgacgatgacgatgacgatgacgatgccgatgaggatatatctgacattttcatttctgaatgttctgcggaaatcgctggcagggataacatcagtataacaaaaagcgaatttgtgattttcatataa

SEQ ID NO: 150900 - DNA, 510 bp, Enterobacter cloacae
atggttaaggggaagcgtatcgcctctcctgaagagatgatgaatcttctggagaatgctgatattctggttgctaaaccacgtaattattatattacgagcattaaaagccattatatacatgctcatcatgaatcggactacactcaactgcgagatgaaatagcgcgacaacaacctgattatctctcagattttgatgatgttatggggggcactaagatcagcctgtacaatatgttcgtctgtaaaaaagcattgatagatgaatattttgcctggctcttccctctattgttcgcgcttgaacaaaaaattgcttatcagaattatgatgcgtaccaaaaacgcgtctttgggtttatggcagaaagacttttcaatgtgtggcttcatcatcagcgcaatcgactgaggattaaatatatgccggtggtcaatattgatggtgagaacctccttctgaaggggattggattattaaaacgacatttttggggaacaaaatga

SEQ ID NO: 150901 - DNA, 501 bp, Enterobacter cloacae; identical to SEQ ID NO: 150702

SEQ ID NO: 150902 - DNA, 690 bp, Enterobacter cloacae; identical to SEQ ID NO: 150733

SEQ ID NO: 150903 - DNA, 690 bp, Enterobacter cloacae; identical to SEQ ID NO: 150733

SEQ ID NO: 150904 - DNA, 354 bp, Enterobacter cloacae; identical to SEQ ID NO: 117747

SEQ ID NO: 150905 - DNA, 702 bp, Enterobacter cloacae
atgcctttcagtgaaactcagttgtactgtttcatccaagcatggtttaaagataaaaatccagctttaagcgacattataattaaaaatataaaagccaaaaaaatatctgacatagtgagaactccattattagcaacactgctgtgtgatctagctgaaaaaggaatagatatcccatctagtgaaagtgagattttcactaaacgattagagttgttatgtggttcttatgatacctacaaagatattaaacgaacaaagttatcccaaagtattttaatcaaagcatctcataaaattgctttcgctatgcattcaaaaaccttaagagcagcaactaagcaagagcttgcttcttttttaattaatgaccctagttttaattatgaggaatcaacgtgtttattagcagttaatgagctaatagatccttgcaatatactctttttcgatcctatatctgaaacattttcttttggtcatcttaggtatcaggaacacttagcttcattagagctaatgcagaatcggtcaatagagattattcattacttaaaaaatgactggtggcgaggtgccctgtgcctttatgctcaatgctgtgaattctctattttgttggaggagtttacactgaaatacactaatataaagcctgcctttgacctgcccccacgattagatacaacactcagttag

SEQ ID NO: 150906 - DNA, 600 bp, Enterobacter cloacae
atgtccaacactaccgaacgccacctcaagaccggaaacgatcctcgcacaatgcctgattattcagcgctacgtgatgagcttgccaaactctcccatcctgcccgtccggatgtgaattgggggaatgttgaaaaactggcattaaaccttttcgataccaatggtgtcgagcttcagacagctgcgtggtataccctggcaagggcacaacaggcgggtatacagggtttcaatgaaggtatggcgattctggatgccctgatacgctaccaatggtcagcaatgtggcccgcttctgcacatgccagaatagaaatacttagcagcctgagtaaacgtcttcagcagctgtaccggactttttcccttcagaaggaggatttaccaggcctgaaccagggcataaggcttttgagctcaacaggtgaagccttgcaacggctcgaactccacaatgcaagcggatttgagccgcttcgtcagatgctgcaaaacacaactatcaggctggagaatagcgatgtcccctcaagccagacagagagcaatctaacagatgtagcactacctgttagggctgaaaggcagatgatgtag

SEQ ID NO: 150907 - DNA, 324 bp, Enterobacter cloacae
gtggcgatcactcagtgggcttgggcagaattccgggaacaactcggtgcgaagaaagtagccggcaagacgatggatcggatgaagaaacttatctggctggcggcgcaggacgtcaaagcggagctggcagggcgtgagacgtatgaatatcatgcgttggcggagctggtgggcgtggctaaatccacctggacagaaacgtatctgcctcactggctggctatgcgtaacagctttaagcggctcgatagcggtgcgcttatctccgtaacgcgatcacgttcacaacaaaaggcgacaaactcagaggctcaaaaatga

SEQ ID NO: 150908 - DNA, 261 bp, Enterobacter cloacae
ttgcatctttacccactgacggtgaacgatccggctcaacgtaaaccactgtttgattatctgcgtgataaaggcattggggttaacgtccactatatccccgttcatactcagccttattatgagcagttaggtcataaatctggtgattatcccgtcgctgaagactattactctcgcgcgctaagtatccctatgtactcaacgctgacagatgaagagcaagactacgttattcagtgcattcgggagtatttttaa

SEQ ID NO: 150909 - DNA, 441 bp, Enterobacter cloacae
atgaaaaaagtggttctgatggcgctggctctcggcctttcactgcccgcgatggcgagtgaaaaagtgattgatatgtacaaatctgaaaactgtggctgttgttccctgtggggcaaggcgatggaaaaagacgggtttgaagtacgaactcacgtcatgaatgatcaggcgctgtcagccctgaaagaaaagcatgctattcctgcaggactgcgaagttgtcattccgcggttgccggtaatttgatcattgaaggccatgtgcctgcgacaacgatacataaggcaatgcagtctggttcaggtatatacggtctcgccacccccggtatgccagcaggaagtcctggaatggagatgggagcccgaaaagaggcttacgatgttatcgcattctcaccggatggaagtaaaaaagtcttccagcgaatcgaatag

SEQ ID NO: 150910 - DNA, 441 bp, Enterobacter cloacae; identical to SEQ ID NO: 97789

SEQ ID NO: 150911 - DNA, 249 bp, Enterobacter cloacae
atgttttcacctgagatgttccatgtccggtcacaggatcttgaagagtcgtggcacgatgccgggcaattttattgggggacatcctcagcttggttgaacgaaaagccgatttttagcgcagattcctactcgattgaacttccgcgtgaacgtgtccaggatattgatactccagaagactggcgcgtagctgagtggttgtttaaagccatggagtttaaaaatgaacgtgtttctgcgggctga

SEQ ID NO: 150912 - DNA, 186 bp, Enterobacter cloacae
gtgcaggcggtggccccggaagcgggcgaactgatccagacggcggtgctcgccatccgcaaccgcatgacggtgcaggaactggccgaccagttgttcccctacctgacaatggtcgaggggttgaagcttgcggcgcagaccttcaacaaggacgtgaagcagctttcctgctgcgctggataa

SEQ ID NO: 150913 - DNA, 1590 bp, Enterobacter cloacae
atggctgtaggaacaatgacaattcgaaaattgatccaagcagtagctgagggagaaatccgaatacctgcttttcaacgtgatttcgtctgggaaccagatagagttcagtttctaatggatagcctttataaaaaatatccagttgggacgcttttgctatggcgtaccaaagagaaactcgaacacgatagaatgctaggcccttataaactccctgacccgaaaaaagattatcctatcgagtatgttcttgatgggcaacaacgaattacatcaatcttctctgtctttcaaacagaattagtaaaagagcctaacaataacatcaattggctagatatatattttgacattgatgcaaataaagatgtccaagattcccaattcattgccttgcaaccccaagaagtaaaagataatcatataccactcaatatattatttgacgtaaaaaattacggaacatttgttcgtaattacccgaagcaagaaaggattgcggaaatagatagattacaagccgcatttcaagaggttcaacttccgactgaaatagtagaaataacagaccattccagcattgccataatttttgaacgagtcaatcgaggcggagttccattagatacttatcaactattgtcagcatggacttggagtggggattttgatctgcgtgctaaatttgacgagttaggtgatgatttagacgatcatggatataaagaactggctgaagaacctgacttactgctgaaatgctgtgctgctgtgataaaagacgatgcttctgcaaaatcaattgttgaactaaatggtacagaggtacgtacccagttcgaaatttttaaacgaggattgttaggtgctgttgatttccttaaacgagactgtttggtcgtttcatttaaaaacttaccatataaatctatgttaattcccttgaccaaatgctttgctacagccaagcctgctggtttccaccctaatgcggcgcaaagatctgctctagtgaaatggttctggcatagttgtttctcaagaaggtattcaaacagcgttgatacggctgtaaaaaatgatataactgcagttaaaaacctcctcaacaacgacttaagcgattttgcgaatcgtttaattaacgttaccccagatttttttattgaaaacacattctcaattaattccgttaatacaaagacatttgtactaatgcttgctaacaagagaccaaaatcatttatatctggagctaacgttgacttaaactcagtgctgatttcttgtaataaaagagagtatcatcatatattcccaaaagactatctcgaaaaaacttataattacacagataaaactgacatcttcccgcttgccaacttcgcttttttaaccaaaactgacaatgcttcaattcaaaactcagcacctaacatatatgagtcaagaatcaatgcaggtatgaaaaatgcaattctcggaacacatttcattcctaataatgggttaaagttggattataaagattttgtgttagagagagctaaactactcgctgatgaagcgaatagactctcaaattaa

SEQ ID NO: 150914 - DNA, 615 bp, Enterobacter cloacae
atgggtgaatggatgtttaaggatgagctgtggaaaacaattgtggcagccttgccggtgatggctgcattttggaaaacttgtgaatatgtttatcaatttgtacgaagtggcaaaatattaaagctaaaaaactattataaagagtatggcgaacatttggaaaatgaagataaaaaattcatctctaaagcattgagaaagaaaataatgacacagctaataggtgtatccaatgataacattagggataaattaatatacatatctaatagatgtgatttgaatttaacggctagaaatttggtaaatttaagtggatatttaaaatatgatggtaaatatttttatttcttgattgatagcaaatatagaagaaagaggatctatactataattgctgcggtgggctacttggcttatgctttagctccagtaaaagcatattatgatggggctcttgaaatatatcaggtagtacttcttattgctttttcggttggttgtatttttctttcatttttcttaatgaagtcttatccgagtgaaaaaaccatacaaggtttaaatgggaaaatgttaaaagttgaagggtcgaaatataatggcacataa

SEQ ID NO: 150915 - DNA, 189 bp, Enterobacter cloacae
atgaaaaaacacttcgaaaaatgcatgaatacggtaaaacgcttaacctcgaataccgaagaagtcaccatggtcgatgtcgctctcttttatctcgggtgctgggttactttcccactccctatgggctcatcccattcccataatacttatcaaaactttccccttccccagttagttctggcatga

SEQ ID NO: 150916 - DNA, 177 bp, Enterobacter cloacae
atgcccgacatctacatcatcatactgacgacgaacgacggcggcgaattcaagggcaagatgtcgcgacgtcagcctgagctagttagggttttgtgccgctggcgaccgaaacgggagagtggctgtattttgcacctgccgatgttaagcgagtgcagttcatgccagaactaa

SEQ ID NO: 150917 - DNA, 363 bp, Enterobacter cloacae
atgttttcctttctcaacacatttaagcggcttataagcaagcagcagacggcgctgaccgtcaagccagagtattcagatgaacagcttttgcaatgggctaccggttgcatgttagaaggtttgccagacgagttttacgaggcaaggatttcctgtttccgcaacattgacaatgaaggacgcaccgcaatcgcttcaatacatgacgtcaagttgactatggaaagcgaatacacttctttctctccacccgatgatctttacgccacacactgcatagagaaaattcttgctggaaaaaactggaaccaagccaccataactttcaccccacacacgacacgattcatatgggaataa

SEQ ID NO: 150918 - DNA, 177 bp, Enterobacter cloacae
atgagccaaaacaaacaagacattatcgaagcagacttcactggcaccgcagaagtgtatcttcaagacctgcttgaaaaaatcaggagcaaacaagttagtgtagagtcacttaaatcagcagaggtggtcggtgatactagtgctgaaatggtagtcattaaactgaaaaaatag

SEQ ID NO: 150919 - DNA, 537 bp, Enterobacter cloacae
atgaacgaagcatgggctgcaattactgcaggggtgattgcggcagcagcaggcggcatcggtttggtgatgactaaggaaaacaaaacatcagagtttcgtcagcaatggatacaagaactccgaactgtgctgacgacattttgctcatccctaatgttaatcaacaagcgtgtcaaagagggcgggaaggttgatgacgcagatttcaaaaaaataaatatgctgctttgtgaactgcatttaagaataaattacgccaaacagtcttcagaagagtcgaatctcaataaagccttaacaactcttcaagagagagcattcagaggttcagcaaattttgcagaggctcaagaaaaatttacagccgcctcatttgcagtacttaaaaaagagtggggaagggtgaaaaagggtgaaaggatctaccgtttgtgcatgtacccttgccttgctatcactggagtatccattttagcggctctactatatctggctatgcattatgaaaaattgtggcatttcttagttggttga

SEQ ID NO: 150920 - DNA, 1230 bp, Enterobacter cloacae
atgggactctacgttgaacctgaggttattcgtgaattaacattaactgacaattatttgcaaataaatgttttttctatgaaaaataatgaactgggtatctacaatcgagatattgcaagtgatgagttttttttattgaaattaagggctatttggaatgaatttttccatttggtagaaagtaagaatgtggctttagatgataacacgcagtattgtcaaggaaattatagtgtgggtttgttttttaccatgcaagactacatggaaaataagtacctttttctttcgaggcttgttcaggttttatatgaatatggtttctggacgggtgttttatcaaatgagttaagagagccagaaattgataaacttataaatcatttcatttctttaaatcaaaatgaaagcgatttattatgggtaagggataatatgcagtatgcactcatgaaatgggttttatacagcaaaagattcctagaagcgaaggggtttttggctgatttgaacttaaaaagagaagcagctataaagtcggaagcaattcgagacgctgatagtagaactcagattgagaaattaaccaacgagtcattatcaacaattaataatagtttcaatagtatcattcattccatcaaaacagatgcaaatgaagtaagtaaattggcaagtgatataagtaagtctctagaagagattaaagctttggaggagcgtgtctccaagcttagaacagagtacaatttcgttgggttgagttcaggatttaatcatataaaagagaagaaagatgaggaattaagaaccgctgaggtattttataagaatctatttggctgcatgtttatttgtcctttggtgataattgtgttacatgttttctttccagagaaattgccgcagggatacaatgttttacaaataatccttccctttttgactatcgaaatggtaatgctttattttttcaggctctcttatttagaggccaagtctttgcgtgctcaacttttgcaaattgatttgaagttaagtttgtgttcatttattgacaactatgtgaagtacagaaaagaacataatacgaatgtaaggaaagttcttgatagctttgatgcagttatatttagcccaatacaatctaatgaaaataatatcccatcaatgtttgatggtgtagaggttttagcaaatttagctgataaaattattaaaaaataa

SEQ ID NO: 150921 - DNA, 180 bp, Enterobacter cloacae
atgaaatacttgaaagctttattgtttatctttggggtaatgctgttcggggcgagcgtgaagatggatgtgggcggtgattcaccattcctggcgtccctatgttatggattttttgctgtgtctatcatgattgcgtggtgtgagataagaaaactgctgcttgagatgaaaggctag

SEQ ID NO: 150922 - DNA, 183 bp, Enterobacter cloacae
atgtcagagaaaacaactaatccacttttgcatccggaggtggctgctcatgaagttattcttgagttaattaaggctgggagaatactcaaaatcagagatgcgtctgaatgctttacttttatgctggatcactatcgttctgagctgaagcgagtccagaatgagagtaaagggcaataa

SEQ ID NO: 150923 - DNA, 165 bp, Enterobacter cloacae
atgacagtcacccacaacggcaagcagtacaccgtaaagcgctgcgccatgaacgaaaacgaatggcggctaacgtcgctcaccaatccgcgagagcaggtcacgctgaaccactggcagatgcacattgctggcttattggctcaggtggagggtaaaaaatga

SEQ ID NO: 150924 - DNA, 831 bp, Enterobacter cloacae
atgattcgtcttttaatgctgattagcgcagtttttggaatcggctatggttacgcaatatcgcacgacgtttggccatttgaaggtatggatgcgaaccagcgaggagtttttggtgattcttggggcgcctttacctcaatcttttctgctatgggtttttgtggcgttttatggacgattaaactgcagatggatgcaacaaaaaaaatagaagatgattctagtaagagggaggaagcggaaaaaatcagggatttcgaaaattccttctttaatatgttgagtatattacaaacgctaattaaagatatgagagttgaaggttcctcaggaagaactttggctgaggggcgtcatgtttttctttatttttttagaagattcaaaaaagaggttagacaaaaaaatggaatgttattagattacgactctagtgatgaatctgaaataaaaaaagcctctttgcgaatgtctaatgagtatcgtttttatttcagaaacagagctcaaaacctttctcattattatagatatatctataatatgttcaagataatccatgagtctgatttgaatagtgctaataagaaaaaatatgctaatattttacgcgctcaactatctaattacgaattgttaatgcttttttataatgccaattttgttcatggtaggaagtttgaaacgtatatgaattcgtatgcgatcctggacaatctaccagccgagaaacttataaataaaaaacatgtcgcattctttgataagaaggcatggggagaaaattatgatgcgcttaagtatcaccccaaacatcttgattcttaa

SEQ ID NO: 150925 - DNA, 1224 bp, Enterobacter cloacae
atgcgagcagaaaaaatggatgtctttaaagctttcaaagaagagaaagaaaaaagccatagagttgatgctttttacaccccttcaaaaccagtgtcctctccttcaaatcttagaggtcgtgatgaagagattcaaaagatattaggtgcgttaacgactcccggtcggcattgtatgatttacggagatcgtggaattggcaagagctcacttgcgttatcaactcttgaaggtggtaaagagcatgaaattttaccagagattgttttccagtatagatgtattaaaaccacttcattcaaagatattattgaaaaagctgctatttttatagatgaagcttacaagcatgataaagttgaaactactaaaaaatatggagcaagggcaaagcttctagatatatttagtcttgaaggttctcgagaagaaaagattacaatagaaaaggaagaactcactgccaacaaagcagcctcagttttacatcatttggaatcagttctacttattgatgaatttgatgttgtaaaggatgatgttaagcatgaggttgctgaatttgttaaacaattaagtgacgcaggtagtccatttaaagtcctaatagtaggaattggctccgatggcgcagctctaattgccgggcaccaatcggtcatccggtgcatgcatgaaattaaactgcctcgtgttgaagacaaatatttagcggaaataattgagagcggcgagagcggtttaggtctgacgtttgcacctgaaattaaaaaatccattattgaaataagcagtggtttcccgtattttacacatttgctatgtaaggaaagtgcagaggaagcgattaggaaatcacaaaaaataattgatagaactgtatttgaacaagctttgattgttgcggtgaaaaacacggaaggtcagttgaaacgttgttatgatttagctgtcacttcttctagaacagatatgtatcctaaaatcctcttatctgccgcaaaattcaataatgatcaatttagtgtaaaaagctggattgaacaaatttcagttgaccataatattgatttaacatatggcagtatgaataactacacaggtaagcttataaaacctgagcgtggagaaatccttcaacttgtaaggagaggggtttataaaattacagatccccgtatgccaagctatatattaatgtgtcacaatgctgtgccataa

SEQ ID NO: 150926 - DNA, 678 bp, Enterobacter cloacae
atgaaacacgagcaatctttagctgatgtatttaataaattcatggaaaagcaatccaaagtatttggctatgattttcactcattttctctggatgggcaagaccgtgatgctggggctgattatttactcagcgactccaatagatttgcaattatagaatttaaattttcagaagacgaactgcctagcgaaaataaaaagccaaggcgtttaaatttatgtaaaaaattgcccctttgccctacaatgactatccatcatgacaaatgtcattttattacatttagcaattcaactactggcgtgatctatactaacgtataccgaaagcaaatttgtaataaatctatatttggagactcttgtggtttaaatgatcaaagccctaacatctcttcgttatgtactgcaaatgttttcgcaaatagtttcttcaacggtcaaggttctcattctttatctttcaacgatttcgtagattatttagcttggctgcttaatgatgttagtggctcctcaagttcaacacttgaagtgttagtcattaatccggactccaaagatttagcggttacgacgatgagttctattgaattattacataattacattaaagataatattaggccatccacacaagaagcgactccgaaaaagagagggccaagaccctaa

SEQ ID NO: 150927 - DNA, 1029 bp, Enterobacter cloacae
atgcacactttatctgtttcaaagaaggaagttggaagagctggtgatagattggtctctcagtttagtttaggtgaaaagtataatgaggaagatgtgcaaattcttcatgagtggaggatgttgcatttatatcctttaaataaaataaaattttacatggaaagagaggctatttccttaaacaaaaatgcgttgctgtcctctagaattaagagactgccttctattgttactaagctttccagattccctgatatgaagttaaataagatgcaggatcttggtgggtgcagggctattttaaataatctagatcaagtatatggtttagtcaataaaataaaatcatctagattttcacatgaactagttagaatggatgattacatgataaacgtgaaagattccggttatagaagctttcacatgatctattcattccaaaataaaaaatttccatctttaaatggattacgcattgagatgcaaataagaacagttattcagcatagctgggctacagcagttgaaatggttggtttgtttcgaaaagaatcattgaaatctggttttggtgatacaagatggcttaggttttttgagttggtatcagagcttttttataaagttgaatatggtaaagagccatccggaagttatataaaaatatcagaggaattaagttatttatccgttgagttgaatgttttcaatatattacctgcttataatgccgcagtaagccatattgaaggtagtgagaaatatgataaaggactttgcataattgttgttgacactgtaaaacggaatataaatataaagagtttcgaaaatcacaatcatacaaaggcggcagaagcttatgtcgagtctgaaaaatactgtgcggaaaataaaggctgtgaagtagctatggtttctgttagttcaattaatgaattgaaaaatgcatatcctgcttattttttagatacgaaaacttttttaaattacctgagcagatatgtttttataaaatcataa

SEQ ID NO: 150928 - DNA, 873 bp, Enterobacter cloacae
  misc_feature (793)..(802): n is a, c, g, or t
ttgattaagaaaaacaaattattgttaccagcactacgaggtgttattggggattgggtatactattcttgcttgatgccaattcctgagttagctgcccgtgttgattacgcccagaatattcataatgataatgccttatcaaagatgattcaacgaagccttgaaggaccaagggcagaacatattgcttcatatctcgagaaaacagaagaaagatttttcaattcattggttttagcaacctacgatggtcgccctgaatggctagaaatcggtgattttaaagcaacaactgatgacagtttaaatgacttcattagcgaaaacacaaaagatacactaggtttcttgagcctttctggcgatgaaaaaatatttgcagttgatggccaacatagactttcaggaataaaaaaggctatagctaataaaacaagctttggagatgaaagattatcagttatatttatagctcatagtgagaaaaaaagagaacgaacaagaaggctttttactacattaaataaaacagctaaaccagtgaagaagagcgatattattgctttagatgaagatgacaccatggcaataataacacgtagactcatcgaaaataacagttggttttcgtctccaaaaatattgattaatgccagtgaaaacattccagctactaacagggtttgcttaacaacaatatctaatttatatgatgtattgaagttaatatttaagcataaaattaatgaaaaaagcgatgttaaacttagattttatagaccttcagatnnnnnnnnnntacgccgaaaaattctttactgctttagcaaatgccttccccgaaataaaagaattattcttatcaaatga

SEQ ID NO: 150929 - DNA, 516 bp, Enterobacter cloacae
gtgagtgcacgaaaaggcgagcttaatgatctaattgctgatatcgatcatcacaaatctaattgttggtcaatatatttagatctgaaaaaatggcgtgacttcaattccacctaccctctcagatggtcacgttttaggtttgaactaaaaaacaaaggattaatacctaaagaaaggggaatatatgcgttcagtatagcattagagccttcatcattgccagaacatggatatatcctttatatgggtattactggcgatgattccggaggaaatctatataaacgttacaaccaatatcttggttattttaaacggaaagatggaaggcctaaagtttataatatgttgaaacgttgggaaggggatcttttctttagttttgtacctatcccagataaacgaatgagtttaagtaaattagaaaccgaatttctaaccgcgataaggccacctgttaatgaaaaagatttcgaagctagaatatcaaacgcaaggagggctgcattttga

SEQ ID NO: 150930 - DNA, 576 bp, Enterobacter cloacae
gtgacgaccaacagctatctggaatactttctgacgctgctcggctggatggtcaataacgggctatggaatgcgatcagcgcgaccggattattcgcccttccgctgctgattaagctgctggcgctgtggttacaggcaagaagtcagggggcggatgaaggcaataaagctgcactgtccctgatatggaccgagcacctgatgtacacctcgctactggtgattatgtcctcctgcataccgttgctgaacatcgacctcgataccatcaaatatgacactacccgctcgaagcagtgcaggatgtcggtgccgcaacccgccgatactggctatcagcctattataaactcgctgggcggcaaaaccgccgccgttcctgtctggtggtacttcattcatgtgatcagcaaaggcatcaccagcgcaacggttgccaccctgccctgccagcctgacctgcgtcagatccgctttgaggtgcagcacacccggattaaggccccaacgctggctcaggaactgcgggatttcgttgagaggagtgttacgccccttcccgcgaccgactaa

SEQ ID NO: 150931 - DNA, 153 bp, Enterobacter cloacae
atgcgccaggcactcacgtataacgcggcgctcaccatcctcgaacgccagacaacgctggcgaagaccaaaggccaggctgtcggcgtagagggcgacaccgataaacggggggacgaactcagcaagcccacaggtggagagacgcaatga

SEQ ID NO: 150932 - DNA, 261 bp, Enterobacter cloacae
atgagcatcttcagtaaggttggtatcttttggcttcttttcttggttatgtactgtacagttttagtcactattgttcttttcgcatgccagttcggagtgtcaataattttctattttaacgatggtgaattctttttttcatggaaaaaggcattacatatcgcattaataaaagggggtattacaggattaatattaggtgtaggggtgtggttaaaaaacaaactgcatgagtatcgctggaaaaatagtcgctga

SEQ ID NO: 150933 - DNA, 921 bp, Enterobacter cloacae
atggccgattcagcaaggagttgctcagcgggacgtttagtcgatattctgatagaactacaaacttgtggcgctgtgaatcgctatcagttgatgaggaaatttaatattactgaacgaacggtctatcgtgatcttaatatgctttcctcatttatagaggggtgtggtggtggagagtatcgattgatacctattcgagctcagaataatcgctacgatgctcttcattacccactggctaagttgctggacgccgatgcggtttttcctgacagagatgaggatttttggcttagcttagagaaaagagctgcagaacagcatgttagagttcagtttggtcgccctgaacattcagtcagaaatgatttgcgaaagtattttaacttattagaaaaagcgattcagaaaaacagcgtctgtcatattttatataaagacaaaacgcgcactgttcatccttataaattagttaaccagaaaaatatttggtatctgcaggcgactgaggacggaaaactaaaatctttttcgttaggtaaaattcggtggttggatatccggaaagagcattttgctgtagacacccccacactgtcattaattgatgagcatcgcgatccttgggtgagtgaagagacgtttgaggtgcgggtgcgtattaaacacagtattgctggctacttcgcaagacgagacttactgcctcagcaagaattggttcgcgaagagaatgatggtgtgactttgctttgcaaggcagcacatcagaatcaaattattccactaattctattctggttaccgaatatagaaattctggaaccagaatggttgaaaaaaacggtcatcaacttactgcataactacatcactgtcgatcgtgactctgttcctgttcaggaatgtgatgcgtag

SEQ ID NO: 150934 - DNA, 1098 bp, Enterobacter cloacae
atggcattaccattcattattctgggcgtcgcggcagcggcaacggcgtttggcggcaaaaaagcttatgatggctaccagaaaaaatcggaagctgatgatgtattagatcgcgcgcagcgtcgctttgataagcataaagagagctttgatctggcaaatgaaacaacgtcgaaaaaactggccgaactgggtgaaaaagagctggaaatcggtaaagatttcaatgagtttaaaacgattgccgacgatctgctggcgcgtatggcgaaagatgggcataaagatcttcagctgaaggtaccacagcataacatcaataaaattcagaacttggcgatttccgccacggaatacctgacgacggtcgtcggtgccggggtttctggtgctgccgctggttttgccgtgtacagcggcgtgatggcgtttgccgcagcttctaccggtacgccgatcgccgccctgtctggtgcggcggcgtataacgccacaatggcagcgattggtggtggttccctggccgcaggtggttgggggatggcgggcggcgcgatggtgcttggcggtgcagtggtggctccgctgattgctattgcgggctgggcttacgatagccatgccgaaaaggcgcttaacaatgcttatcaaagctcccgtgaagtgaccgcggcggtggaaaaaatgaatgcggctgaagcgcagctgacgaaggtgcagcagtatgtaaatagcatttatgaatcaatcacccgtatgcatagcgtctttattcagcactactttgagccgctgaaagcgatgcataccatcattgttgaacgtcatgagaagaatatcactaccgagattagtgagtcggaagagatcatggcgattatcgaccatggttatgaattagccgccataatgaccgacgtgatcaccacgccgttgttcaagccggtgacgcaggaaaacggtgaagccgttatcgaagatggcgtgatccaactgcagaccgacagcaacggtatgaacctgctgaacaaagagattctggacgaaaaactggcggcttctgattctgagtttgacgcattttcttctcgtatttaa

SEQ ID NO: 150935 - DNA, 348 bp, Enterobacter cloacae
atgtgcgttaacgtggtcactatgccgagcgtaatctcgtattacttcatgtgggattttgtaggcatcaagaatgttgtaagtttcatcgaaaataacggctatcaaataatcaaaatcggcagcttcatagttacgcaatgcactgagttgccgggaaggattatccggcgtgactctcctcgctttgatctgcactttcttgccatcagcatcaatggcatcagcacccgccgacgaattactgagaagagtcatacccagtgcattagaaaccagccattcagcatagtcaccaacaggattattcttggtgcgaatgacacctctagaacgcaactgcgttaa

SEQ ID NO: 150936 - DNA, 753 bp, Enterobacter cloacae
atgtcaaaaacacggcttagtaagcccggtttttctgccaagtctgtgctgaccattatgttaatcgctgcgtcatctgcatcttatgcagcagaaagcatcgatcaactggcgacgcgcatcggtatggatcactttcgggaagcgattaagaatggcgaccgtaacgcctttaaaactctaccggcaaaaggctataaaaacggtcttaccgggctgctcatcaaaactaacacctacgttaaccccgaatacagctttgctgattgcgatacggacaccgttattatctcggcgcaagaacataaaacactccctggttgccgcatatctttaaagctagcgactaaagatgctgacggtagctatcacgataatggcattcgcatcgaatacggtattgcgaccggttccaaaaagtttatcgccaacaattcaatgtgggcacaacatgccatcagcggtgataaagtgttagaaggtgctatccacccggataaaacaaataaccataaagatcaaatgtgcatgggtatggctcaatttactgcaaacgtaaccgaaggccgaaacggaggaatgagcaaaggtgaatattatcagcgacttgataatatgaacggtaagtccgaagtcactcctcaaatgatcatgctctataagaccttcgttgactacgtatatgaacacccgaaacaagatgctcaggtttcagcggcctttgtttacaataactgtataaacaacttctga

SEQ ID NO: 150937 - DNA, 1002 bp, Enterobacter cloacae
gtgcattatctctacatcgatacctgtgtttggctaactatagcaaagtcaaagaaccagcatgcactacttgaagcatttaaccaattattgaatagtaacaacgctgctattgtaatcccaaccttggtgaaggaagagttccttcgaaataaggacagggttattgaggctactaagcagcaaattggttcggaattccataaaatcaaaaaaataattggggcttatggaggtaatggtaaggaccaagcgctagctgtattaaatgatgttggaagtcgcttgcctattttaagcgaagttacagggcatacagcggagatgattgaatctctgatggataaatgtataagtcttgaggctagtgattccgttcggttaaaagccgtggcaagggcattggataagagagccccttttcatcgctcgaaaaacagcgttgctgattcaatattaattgagttgttttacgactttatgaaagataaaaatggcgtcttccattttgttacggaaaactatacggatttcagctcattaactgataggcgaaatccacatccggattttggtgaaatattttctgataatgtccattatcatttagatattgcggaggctataaatagtatagaacctgagcttttgagtgtgcttgaagaagaaaataattggtttgatgatgacacaagaagcttaacagacatactaactgcgattaatgagtattgtgaaaaagtatggtataaccggcataaatacagggagtataaaattgaaataggtgatatttctataatacctaaaggagatgcacgccatggtaataatgttattcatgaagatatctgggaaagggcaaagttggcagctgagaaagtcgaagaaaaatatgaagacactggcccttgggatgattttgaatggggaatgatcaatggcaagttatctgccttaagatgggtgcttggagatgaatgggatatgttggatacctag

SEQ ID NO: 150938 - DNA, 192 bp, Enterobacter cloacae
atgcgcttgcttctgggcactcttattattcattatgtagctatctcaggacactcttttgaattagtgaattgcctcatggcttattattttaccgccgtgagcattgacttttttgaccacacgaatagagtctgtgtagaaaaaaaacgaagcgtcatcccactggcagaattcaatttcacgctttaa

SEQ ID NO: 150939 - DNA, 582 bp, Enterobacter cloacae
atggttaatcagccacagtcacgacagacaagtgaagaaataaagctagagactatccgctggcatcagaaattgcaggaaattacttatctcgaagctgggcaacatatgcgtgctttaaatcaactaatgtggcaaatccctagttttgctatcgcagttaatggtggattatggtatgcaacaacattagcaaatgaaaaatctttatggataatatttgctgtgttagcgttctttgatatcacaacaattgctactatttatcgcttgagatatttaataggtaaaaaaatagaaactcaaaacaatattgaggatccttctaaaaatatggttttgaataaaataagcattgagagtgggtttcctatgaaggagattcaaagagagtcccaaaaaggttatattgtagtcagttgttgggctttgatgttgcttgcttgttttgtcattaatatgtgcggtgctgttcaccctaatatattttcaaaacaaaatgccttaaattcgtataaagcaacaattaagactaattccacgggtttagtaatcgaagcaacatccggagagtcaaaatga

SEQ ID NO: 150940 - DNA, 600 bp, Enterobacter cloacae
atgacatcatggaaattttacgatgataacgcagaacgattgttcgctgattatatctctttgagttttaatgaaatattttctgatgttaaacattacttttctgattcaatcgaaacgattttggatgttggggctggctctggaagagattctgcagcgctagctgaaaaaggctacagagttgtggcagttgagccaagcgagagaatgcgaagcttggcttcgtcattatacacttctgaaagtataacatggattgatgattctttacccttacttagtattgtaaaaaaaataaatgttaaatatgatcttattcttgtaagtgccgtttggatgcacctaactgaaaccgaacaaaatgaatcattagaaacattatgtgatcttttatctgaaaaagggaaaatcataataactctaagattggggccgcaggaaccagacagaaatattaagagtgtgagtactcaatatttacttaacctagcggctactttaggattgaatgctgattatattagtcctataaatgacgatagtttcaacaggacgcagataaaatggcaaaaaattgtcctgtcaaagcccatctaa

SEQ ID NO: 150941 - DNA, 1245 bp, Enterobacter cloacae
atgagtgaatcagtaatgataattgtcccaacagacatcagcaaaaaagttcgtgagataaagacggcttacagtcgttatctgcaagaattccatattcccgatgaccacaggatcgtcgttaattactcagccggtaaagatagcacgaccactcttgcaattgcgcatacgcttttcggcgatcgggttcacgctgttatggctgacactgataatgaacataacttaaccatcgagttcgctagcactattcacgagcagatcggctgtagccctgtaaaggtagtgaagaagatatataccgaagaggatttcaataaacgtcgggcatatctgcaaaataactggcctaaacggcaggtaattcgaatgggggcctaccgcggtattgtcatgccatctctggcccggtcagatactaaatttggccgggcttggctacgcacagctgagagatggggcattgattttgagaccgccctcgatgctgctttgtcagtcatgcacccgagcggaaatagcttccttgactgcgccctcctccatggcaaatttccgatgctccgcgaccgtttctgcactgatgagctgaagattcagatcgcctttgatatggctttgcagccaatgctggatgacggcgatattattgttcagtggtcaggcgttcgagctgatgaatcatccaagcgcgcgagttatgagcggttctctatagataaccgtgatccacagttcctttacaacttcttgcccattcatcagtggacagcagcagatgtcttcgctctgcacaaacatatgggaatccccccaaacccgttgtacctgcaaggtgcttcgcgtgtcggttgtatgaattgcgtgctttgcaacaaggaagaaatcgcagaaacggcagcgcgatggcctgagcatatcgagaagcacaaagaatgggaactgaaggttcgattaaccagccgctgggttcactggatgagtgttggtgaaattagtcaacgatggatgaaaaaattcgatcttcctcttgggcgtaacgtgcaactttatggtatggatccagaagttcagcatattgactggtcaggattctacggtcctcgcgctaatctcaatgccccgggagtggatgaagtagttgagtgggctaagactggtagaggggggaaagtatatgacctggttaaggcaagtcttgatacttccgtctgttcttcccgttacggtctttgcgagtaa

SEQ ID NO: 150942 - DNA, 534 bp, Enterobacter cloacae
atgaagataacaatttcaggcgtattactgggcgttttcttactggccggatgcagtcagccaaaggctgaggcacaaacgcaaagtggtggtacgggaacaatagaagcgattaaccataccaaatgggccatcaatcatttcagcgtaaacggtcagtcgggcatagatgctatcgggccttttgacggcggtggcggtgggtgttgctatggtgtaccgacagtctggaaaccgggaatgacagtacgtatagactgggaaagcggtgaggcttccacagagggattcccgggatttgctgactatgaaaaatataaggcctgggaaaagaaaatgagtgcaaataacagagaacatagcaaaatagtaccgcttcccgattatacaggacaggaaacctgcggtattacggtacattttttaccctgtgatgacgtaaaggtaacaaccagctgctggtcacctgctaatgctaattatccaatcaaacttccgctggaaatgaaggagccgaaagtatgtccgaagtaa

SEQ ID NO: 150943 - DNA, 1236 bp, Enterobacter cloacae
atggccgaaaataaactctcagatgttcaattgcgtgcgttaacccgcaaagtcatcgaaaaaccttttgatgttgctgacggtggcagcctttctgttcgcgttacaccatcaaggcgcaaaatccttgatggcgagaagagaccggccaataacatccaatggttgttccgttataagaataagcataaaagcgccaatactttgacgctagtgctaggcaagtatcctgccttatctcttgctgaggcgagggtgaaacgcgaccaatgcaaacggtggcttgctcataatctagatcctaaagaccagtttgaccaagagtcagcaaaaaccatgaaacctgtcactatcagggaagcattggaacgctggattaatgagtacgcggcggaaaaccgggtcaactttgaaaggcatagacgccaattcgaaagacatatttatcctttcatcggcgaattgccacttgaacagtgctctaaagcaagatggatggagacatttagcagaatcaaaaaagtcgcgccggtagcaagcggctacatattaggtaactgcaagcaggcgttgattcacaaccgcaggctgcacgatgtttacagtgatgcgctggaggatatcaaagttactgatgtaggaagaaagcaggcaaaacgtgatcgtgttttaacttctgaagaacttagtggcctttggaatgcgctaaaaagcgaatatgcgtttctaccttactacaccgcgcttttaaaattgctaatagtgtttggtgcaagaacacaagaaattcgtctttcgacatggtcggaatggaacgtgaaagaatggatttggacagttccgcgagaacatagcaagggtggggagaaaatcatccgacccgtgcctgaatctatacagccatttattttacagctacgccaaaatcaccttgatagcggaatgctgcttggtgaaatgaagaaacccgaagctgtcagccagtgggggcgtatcttatacagccgattagagcattcaacgccgtggacgttgcatgacctgcgccgcacttttgccaccagtctaaataacttggggatagccccacatgtggttgaacagttgctgggccactcaatgccaggagtgatggcggtgtacaaccgtagccagtacatcccggaaaaacggttagccttggacaaatggataaaatatttagaaaaaataaaccctttaaaatcaaataattaa

SEQ ID NO: 150944 - DNA, 180 bp, Enterobacter cloacae
atggaattactgactgctaagcaagtcacaacactaacaacattatcccgcatgactatctggcgctatatccaggctggcacgtttcctaattgcataaaattagggccaaaacgcgtggcttggcggcgcaaagatgttatggcgtggcttgaaagccgccagccagtacagcgctga

SEQ ID NO: 150945 - DNA, 282 bp, Enterobacter cloacae
atgaagaaaacaaccgtaaatcaggctatcagtcgctacaacgcactgctgcgtaatcctgttcgtcattctaccgtgggagaactcactgcattacggcttgaggcggcacaatcattgttgttagcctgcattagaagtggtgttaaccggccatggacgatagttagccgccacgcagaaatggctgaaaaccttgttccattccgcattagtgatgctgacgcatgggcaatgtatctggacctgaaacgtggggtgctaaatgagaaacgcacctaa

SEQ ID NO: 150946 - DNA, 1695 bp, Enterobacter cloacae
atgagaaacgcacctaacctgaaaaaccttccaaaagaaaaattcaccgaagctattatttttgctggtgctgacgcctggagtcatgccaaaggctggcaagaaggcatggggaaacagattgctggtgatgacacaccgccagtttatctaggcccaaaacaactggcagatctcaatagtctacgaatcattgatgatggccgtatttctgctcgtgtttaccttgctggtgatatcgagccaataaaaattaacgctatcgctgaaaaactagctttggctggggttaaggaagctcgattatttaaaggcattcctgaccgtgagccagagaactggagcaactatttaaccaggattcgtgacgaccaccagcgtggtgaaagtctggttgaaatgctgcgtaaagaagaacgagcaaccgccgcagcatctgcaaaagacattcacgatatgacgcctgtattaatgacaacctggccaaatattggaagcaatggccagcctttaaacacgcgccccaatgttgaacgtctattagagaactactgcatttctgcgaaatataacgagattagcaaggacgttgaggttttagtgcctggcgttagtagcggttcagatgctcgcgataactgcgctgtgagtgaaattttaagcctcgccgcactgaaccggttaccaatgagcaatattgaaggtcatatcaaaaccatcgctgtgcgcaatacttataatcctgtcagggatttcatcaatcagcgtgaatgggatggccggagccgatttgcagacctgctgaataccatcagcacgccagatgactacagccgtgatctgctggccatgctggtgcgtcgttggttgctgtctgccgtggcggctgcttacttagaagcgggtttctggtccaaaggcgtactggttttccagggcgagcagtcactgggtaaaacagcatggtttaaagcgcttctgccccctgacaatcgcaacctggttaaggtgggagcaactattgaccctagcaataaagacagcgtggccagcgcaattagtcactggcttgttgagctaggtgaactggatgcgacgttccgcaaggcggatattgccaagctcaaagcatttatcagtcaggaccgtgatgacctgcgcagaccttatgaccgcctggaatcgaagtaccagcgccgcaccgtgttttttgcatcggtcaacccgaaacacttcctggctgacgataccggtaacgtgcgctggtggactatccctgtgactgccgttaactacgagcatggcatagacacacaacaattatgggccgaagttctttcctggtttaaggctggtgaacgctggtggctggatcgtgatgaagaagccatgctggaagtagtgaacgaacagcacgggcaaactgacccgattgaagaaatgatattggcgcgttttgattggaacagtgatcgcctggctgcatatatagaaatgactgcaacggatgttctgttgtctattgggcaggatcggccaacaaaatcccaggcaacgcagtgcggtaacattctgcgaaaactgactggaagagatgcacgtagaacaagtaaagggcgtttttacctaatgccaccgaaagtttttggacagcaagaccatagctattttgatgggcctaaccgccagttttga

SEQ ID NO: 150947 - DNA, 225 bp, Enterobacter cloacae
atgagttatcgcgcatatatcattgcttttgacccggaacacggcacctacaccgaaaccgaaatcatggaaggtttcgccactgaacaggaagcggtagaccatgctcgcaataggctgccagaggtgcagcaggaactcgccaagttgggtgaaaacctgctatgcagctaccgcataagggcagtggattccgctgaaatcttgccgtttttccgctcataa

SEQ ID NO: 150948 - DNA, 912 bp, Enterobacter cloacae
atgaatgacgttctttctggacttattcggtcagccctggaacatcagggcgctcatctgcgctttgatggtaacggcgatatcaatcaaattatcccggtagagcctgccgctgttcgctacctgtcactaaacgaagtgctgacgccgaaagccggtagccaaaccacgttcaacggcatcattgctgcgcgctccttagtagctgccgctggcgctgaaatcatccgcatccctggcccgatgacacagcagcctgacattgacgccgaaggccgccgccgcccactgaaacagcaggaagtgccacgccactacatcgttgtagcgcctggtaagttctcagcagtggccgatgatgccgaaatcaccctgagtgatgcaccttatctggttgccagctacgacgatgccactgcgccatcctacggtatcggctacaccctgacccgtcagcaattgaaacacacctttgctgaccctgacaccgttttgcgtgccgtcaacatcgctatcgagcagggcattgcccgcctggctgacagcgttctgctgaccgacctgaacaccaaagccgcgacactgaccgacgacacagttgacgaagtggcgaaggttgcagccgctaagggctgccgctgggctgacctttcagccatcgccggaaccagtgctgctggcgtgaccctgggcggtgacggaaccctgcgagcctgtgcggttaaggccgaactgaccgacaccattacaacaactattgttggcgatttcagccgtgcagccgtggcgattgatgacgaactgcgcgtaaccgccaaacgcatcaacaacggtgccgtcgagatcgtcgtatggtgcaacgcacaggcgttggttccggattctgcgtacttctggaaatacggggcttaa

SEQ ID NO: 150949 - DNA, 378 bp, Enterobacter cloacae
atggtgcaacgcacaggcgttggttccggattctgcgtacttctggaaatacggggcttaatcatgggctggggcatcaagaaagtggcggcggaacgcgccgccttatcgggcgaagtgctggccgccattgaaggtgccgccatgtacacgcgccacggcgatgatgaatcaccgcgcatcatcgtacagccagcaggctacaccggctttatctacagcgacgaagcagcagaaaagtgggttaggcgcgcgtttatcgaactgacaccgcatcaggtggaacgtgcagttaattatctcgcctccctggtgcgggaacaccaccgggagcaacagccaaagcgccagcgcaataattgggtgaacaggtggtga

SEQ ID NO: 150950 - DNA, 333 bp, Enterobacter cloacae
atgaaaactgaaaacctatacgaacaaatgaccgaagaagctcgcctgctggcgagtgaaaccaaaagattccagatcgtatctgcgaaaaaccctatctgccgcgaggctgccgaactgctggcaagcatcagaaaccgtttaaacgcgtttgagcacatgacggatgaatccgggctggtcatgcgcagcgcagccgaaagccacagcgccaccctagaacgccagcaaatcaaggttaagagatctccgcgattgagagccatcagccctggtgagcgtgcaaagcgccaggcaatgaagcgcggcgctctgctggttcgtggggtttga

SEQ ID NO: 150951 - DNA, 189 bp, Enterobacter cloacae
atgcaagccatcggcgtggctgacaaactcctgcaagagaacaagagcctgaccacacaggacagacagaagatgaaggcaatcaaagacgggctggccggatacaaaaacacggcattcaccctgcgtgattacaccgttggcggtggagacaacacaacgccagcaaacgacaacaaagccgcataa

SEQ ID NO: 150952 - DNA, 210 bp, Enterobacter cloacae
atgacacgcatgaaccccgcacgaagcgatgacccggcaacagtatgggatgcgtatgtagtggccgccctgcgaaaaatgcccgtatgcaccacgcaggaggaaaaagcccaacatacagaactgcgccgtaatgaagccctgcaactggccgctgccgccctgcgggctgctggcgaatactccctggcagaaaacctactcgattaa

SEQ ID NO: 150953 - DNA, 2085 bp, Enterobacter cloacae
atggccagcaataagcaattgaatgccacaataaccatagggggagccgtcagcagcagcctgaaatccgcctttggtactgtggccaaatcaacggagagggttggcggtgccatcgctgacctgacccgacgacaaaaaacgctcagtcagtcaattcagacgtttggccgccagggtaaggacgtggacgggatgcgccagcgttatgcagcgctgggaagtcagattgaccggcttaaatcctcatatgaccgcctgaaccgcgttgaggctgcccgcgaacgaaacctggctaagcgtgaagggtacaaatccggcatcatgggcacagtggccattagcgcgtctgtggccgttccggtcaaagccgctatggattttgaaaccacgatggctgatgttcgcaaagtggtggattttgacactcctgatgggctgaggaagatgggcgatgccatcctggaaatgtcaacacgcctgccaatggctgctaacgacattggcaagattgttgccgctggtggtcagtcaggcattgccgccaaagatcttaccgcgttcgctgaatccgccatcaaaatgggtgtggcgtttgatatcagcgcggaacaggctggccagtcaatggctgaactgcgttctgctttccgcctgacgcagccacaggtaaacgtattggctgacaaaattaactaccttggcaacaacacagccgcgtcagccaaagatatcatggagatcgtgcagcgcatcgggccgcttggtgaagtggctggttctgcgtcaggttcgattgcagcgatgggggcaacccttcgcggtatgggcgtggccaatgagattgccgccactggcatcaagaatatgctgctgaccctgacatctggcaaggccgccacaaaagcacaggtggcagtgtttaaacagcttggatttactgcaacgcaggtttcaaaatccatgcagttgaacgcggatgaaactatccgtgtcatcctggcgaagatttccagactacctaagcacgcgcaggcatccgcactggctgaactgttcggtaaggagtcaatcggggccatcgcgccactgctgaccaacctggaccagctacagggcaatcttaaaatggttggagacgctaccaaatactccggttcaatgaacaaggagtatgaggcagccgcagctaccacagccaatcaggtgaaactgtttaatggccaggttaacgccctgggggtcaccatcggcagcgtgttgttgccagccgttaacggcgtgctgaaaaccgtaagcccgtggattggcaaggttgtgtctctggcaaaagaacaccccgtggttacgcaggctattgttggcaccgctggcgcactggcaaccctgaccgttgtaacttacggggccggatttgcctggacgttcctgaaaggtggattgctcaacaccgttggtctgtttgcccgcgttgctgctggtgccactctggctggcgcggccaacactacagccgcagcaggcacaacgctgcttggaaccgcgttccggttcgtaggtaaatccattttgtgggctggccgtgcgctactgcttaacccgattggcctggcggtcactgccatcgccggtggcgcgtacctaatttacaagaattgggaaccgctgaaaaagtggtttaccgacctgtgggcagacatcaccgcaacgtttgacgcagcgatcgggaaaatcattgggctgattaacagcgttggcgagaagtggaacaccttcaaaactacagttagtgaaggcgttggcgatgcttggaagggtactaaacaattcttcggcattgatgacgacagcagcaagccagccgcttcccctggtgcgcctgtgctggtggcaccggcaccgccgcagatggccaaccgtgctggcggaacgcagattaccaccaatgacagttatcaaatcagtgtgcaggccacgcctggcatggatgaagatgcactggccagaaaggtggcgcagcagctacggcagcagcaatctgtaaggcagcgcagcatgatgacggatggcgtgctaacaccataa

SEQ ID NO: 150954 - DNA, 468 bp, Enterobacter cloacae
atgatttatcagtgtaatacgtgcagtagaacgacttttgaggttaattgtccctggtgtagcggagtttcacctgttaaaacaactgcatggggttcagcatcatcgaccgcacaagcagtagatatacaacgtatgacgccattgaatccatcgttttatccggagtttcagtatcgttcaaagggtgtactgaaagatctgtttgggaagaaaaaagaacaaactcagcttaatcaattgcttgaaaatgttctcgaaaaatactccagtttaaaggatccatattttactaacttcatttacacttccagattctcacataataataaatcggaagcagatttctcaacagataatggtacatactccgaattacaacttttccgtgaggtgttggtcagaaaagggttcaatgagcttgaggaattacctgagctattagataaactactccttaccacgtaa

SEQ ID NO: 150955 - DNA, 2397 bp, Enterobacter cloacae
atgaaagcagaatacacatctttaactaaactttatgaatatattgcaaattctaatgccagagtaatttcgttcgattgcttcgatactcttttctggcgaaaaatggcttcacctatagatgtttttaccgtcattgacccctcaatagatattgtcagtcgggtacaagctgagcaacgtgcgcgcgctaaaaaaatgattaattgtggtcactcggaggtaaatttagctgaaatatacaagcaattgttaccattggctaacccaacccttattgatgaatatattcaaaaggagattgccgcagaaataaaatatggcttcctacatgagccaaccataaatctgttgaagcttgcgaaagaaaaaaaatataaaaccatcatcgtcagtgacatttattttaataaaacacagctaaggcatattataacatcgttgtcacctcaagtttcatatttgattgatgatatttattgttcaagcgaacacggagtcggaaagacgacaggactgtgggataaggttttaaaccaagaaaaagtacctgctgcgcagttaattcacatcggtgataataaagcagctgattttatttcaccaaataaattgggcattgacgccattcattttcgtcatacccacgatgaaataaataaaatttttagacaacgagagagcgtagcgactctcatcttccctaaattacgcaaagaagcgcctatccctaacttgtggcatagttggttttccgaaaatgtcgatgatgagacatcggcacaaaaattaattggctggggcattctcggtccaacgttgcgttgttttgcaaataaaatctttgaagattataaaaagaaaaataatacaaaaattgcttttttaatgcgtgatggttttatgccacgcttagcttttaatatcttacacccggaaatagaaacgcatgatgtttatatttctcgcttatgctctattcgcgcaagtttcatatcaaaagaaagtattagtgatcatatcattactctttttaatagtatggatgatgatattgcggatcaatatgttaacgacgagacactgaaattagtatccaaacactttggaattaatcaaaaagacatgatttctcttaaaaaaaagcttagccaaggaaactataaaatcaacgagctaataaaaatcatcctcagtaaaaattacactcaacatattattaataattccatgcaatatcgcaaaaagctaattaaacatattataaacagcacaggcattaaggctggcgatcatttattattagttgatttagggtacgagggcacaacacagaatttgttgcaaaccattttacaagaagagttatctattactatttctggttgttacatgattgtttcatataccccggaatggaaaagtaaccgaacggggatagtgacccctgagacttttgactaccgtacaatcaaagccttgacaaaccatattgcaatttatgaatccctttgctcatctcatcggaattcaactgtagattatactgacgaaggtattcctgtaggcgaagcaccaagtatcagtgagaagcatctatctttaataagagaaatacagaacgaagcattatattttatcggttcacccacaaccaatttggcttacgaagcagagtatgaaattacttcctcaattattgacttattccgttttatttatttcccaacagaaagtgaaatacgctgtttcagtaatatgaaattcgatatcaatcttggttctgatcagatttcaacactgtacaacctaagcaaacataattaccagatgaaaaaatttggaccttctttactaactgatagtaatgccaatataaacattactaatacaccgacagaattacgttatagtggcatagaacaatctattgcactcctaagcagttatcgttatgggcttacttggtccttaaccgatgcgtcctaccgcaagaaattggttgatattctctatattaacaacactactgttgttacaaaaaaattaaccgctatgtatactcatgaaggatgctactctctctatattcctatagttacggcagaaatagtaatgaaactgaatgataagtgtaatggtatagaactgatatctgtatccagaataaaaacaaacctcgtatacaaagcatacaatgactctcaaatgcaagagttacatataaataatgattggtttattgatggcgcagatgttgcaaaaggtatcatcacaggtcttagccctgcctcgattttatacttcagacctcgcaattctcgcaatgatgatgttattcatattgtatatcgtcccattggcgatagttgtgacgcggagattaataatggatga

SEQ ID NO: 150956 - DNA, 228 bp, Enterobacter cloacae
atggaagactgtcgggaattgtctgagtgttacctatgttcccggtctgatctgtcacctatgtatccggtcatacacttcgcttacccggcctacaaggtaaatgcgaacggcaacggatgttgccgtttttggtgttttgtgggagagggcaccagaccgcactacaacaacacacgttttgtaggccgggtaaggcgaagccgccacccggcacaactgcactag

SEQ ID NO: 150957 - DNA, 177 bp, Enterobacter cloacae
atgccggactgtataattattaccacccagaacacccgcgagttgtggggctgcgccgaaggcttaagcgtcgtcggtgttagcgtgccaaagatgaaccagtggcttaaggcctgccccggtgtgctgaacgacaccggcgatcagccatcgatcaggcgcggtaaaggctggtaa

SEQ ID NO: 150958 - DNA, 231 bp, Enterobacter cloacae
atgcttaatctcttcaaattgattgccactatatcatttgttatatcaatagttgccattggggtttttattagccgcagcttattttatataatcgaaatgcgaagctttaacattcctttttttgacatactaaaaattagtattaaggttggttatgtgggaggattagtaggtagtataggtatatatttcatcccttacttttctaaaaatacatctggacgatag

SEQ ID NO: 150959 - DNA, 456 bp, Enterobacter cloacae
atggctgagaagaattttatgccagagtgggctattgcccaaacagaaaatgcagtatttgagggtgataacgaaatccgcgagccggtgcacaaaaaagatgcccgtcgcctccatggtaagcggactgatgcggcccctttacatccgagagctgaaacaccgcaggacagttcagcctgttgtgagctttattcccgtatggacagagattatctgccccttaacggaaagtggttgtcgaatgcaggtattattgatggcatgtcggtgaaaatccgtgttatgaaggattgcattgtgattacgccacaacatacacgcgagttatggggatgtcgtgaaggtatgagtgtggtgaatataaatatgcagaaagtggctaactggctgaagacgtttcctggggcgctgaatgatacgggggatgtgcctgtgattaagcgcgataattaa

SEQ ID NO: 150960 - DNA, 510 bp, Enterobacter cloacae
atgcttattaacgcgtggccggataaaaaagttgtaaactggtaccgtacctggagttcaggatttactcaggacacaacggtgttaagcgtattgacggataaaaacacggtcaccaggcatactgttctgagatataaaaccagtaccaattacagcttcgtcagtaaactctctgacgctgagttaaaatcatttgttacgccaggaaaaacaacacttcaggagatcgagaataaattcggcaagccaaatgacaacgcgtttgatgaggaaggcaatcagatagtcatttatatgtatgccgatgtcagcaatagccagtttggctggataccgaatgtcggaggatatgtggaagcattagcaggaagtaaaaaaatcaaacttaacaccctgcagttcatcatgaacagtaacaatacggtaaaagctttctcattaaatgccaataattaccatcagggtgttgggttattaaattcatctggtgtaattgaagataaataa

SEQ ID NO: 150961 - DNA, 561 bp, Enterobacter cloacae
atgaaaaacatttctctggctgtactgctggcagtttctacgatgagtagcgtagcacttgccagtagtcacacggtatcattgggctatgcacaaagcgatgtacaaaacttcaatgatattagcggcgctaacctgcagtaccgttatgaatttgattccccattgagtatccttggctcctttacctatatgcagggcgacggtaagaatagctattatgttgcaaacgatgccgtaaccaacaatgctgatgtaaaatattactcctttttagtcggccctgcctggcgaattaacgagtacgtctccttatacgcccttggtggttttgcttatgtcaaagcttcaggcatgacgaaatgggaagattctgcatcagattatattgggcgtgaagatctctccgaaaaatcaacctctttcgcttatggagcaggtgtacttattaatctgcaggagaatattcccgttaacatcggttacgaaggcactcaagcagatatggatggtaactactctatcaactgttttaacgttggtattggttatcggttctaa

SEQ ID NO: 150962 - DNA, 567 bp, Enterobacter cloacae
atgtttagacagttacactctaaatacagctgcacccattacatagtagtgatcatatttcttattatggcattatggttgtgttatatggggtggtctacacgtatcgcaatgcggtcaatattaatgcgcgacatacctgaatttacaacatacataactgttggctccgtccttggtcttatatgtggtggtcgcgcaacatactttcgacctgtgaataaaacatcaaaacatgtccttgaaatgttttgtggcggtttttgtttcggctttgcatgcagcttaaatttttatgacgtctactcttatcttttaccaggagaaaccattcaatatcagactgattatgaaatatccttccctggcccctcccagggaaaatctgggcattgcgaagcaggattatggtttaaagattttcataccgatcgctggatccaactctgtacaaataaatccaatttagctaaacagcgaaagccaggaatgaataatatatgggtaacagctcatacaaccaacattgggacatatattatagattatgaatttatctataaatag

SEQ ID NO: 150963 - DNA, 333 bp, Enterobacter cloacae
atgccagagtgggctattgcccaaacagaaaatacagtatttgagggtgataatgaaatccgcgagccggtgcacaaaaaagatgcccgtcgcctccatggtaagcggactgatgctgctcctttacatccgagagctgaaacgccgcaggacagttcagcctgttgtgagctttattcccgtatggacagaaattacctgccccttaacgggaagtggttgtcgaatgcgggttttattgatggtatgccggtgaaaatccatgtgatgaaggattgcatcgtgattacgccacagcatatgcgcgagttatggggtacctggagggtatga

SEQ ID NO: 150964 - DNA, 306 bp, Enterobacter cloacae
atggaactggacacggccgcaagggttctgaaagagctcgggcacaccacgcggctcagcatctacaggacactgatcaaagcaggacaccagggaatgcccgttggcgagctgcagcagcagcttgcggtaccggcctccaccctgagccatcatctgtcgtccctgattgccgtgtccctggttcgccaggagcgacaggggagaacccttttctgccacgcctgctatgacaacctcggggcgctgatcgcctttctgacagatgaatgctgttcaggcgattctgctcgctctgtcctatga

SEQ ID NO: 150965 - DNA, 546 bp, Enterobacter cloacae
atgagtgatataacagcattcaacaactgcatgcgcgtgttctggcgacaacatgaagctgaactctcccgctttctgaagtcaaagacgggcgacagcgaaaaagcagccgatcttctgcaggagctgttcctgcgtgcccgcgcgcattcagaccgtttctgccagatggaggatccgcgagcctggctctaccgggcggcaaggaatctgctgaccgatgagtaccgcaccaccaggccgttcgttgagctggaagaaaatgccctgttcccggacgactcccctgacgggatctcaacgctggatatctgcctgcctgaaacgctgcaggcattatctgacgatgagcggtggctgatcgaagaggccgatctgaaccggcgtccccagcagttactggccggtgaactgggtatcacgctgacggcgtttaaatcccgcctgcttcgggccagaaaacacctgaaagaagcaataacagaacgttgccagattgaagcggatgacacatctgccgtctgctgccacaaaaaaatgaattaa

SEQ ID NO: 150966 - DNA, 603 bp, Enterobacter cloacae
atggctggtataaggagttctccccctgcaacacccagcagagcggcaacattcccgatgaagaaaccagcaataacgccagcaatgatggtggcgattcctggctggaataatccagcggagctgtcatgcagaggcatccatgcttctgaaagcattatgaatgacaagataacaagcaggatcagaatgattctgtccagccagatacgtgacatttttatagctcttccagcagcccaccatgctccgataaggctcccggcaagcaaattgataacaatatcaagatgtgccaacagctggtcaactgcaatcgactttgtgcggaatatcaaagcaacggcaacgacagtaaggctcattgctttgttaaaaataaccgcttccagcgtgggcattttgaaactgccaatcaggaccggaaggcggaattcagcaccaccaagaccaatcaagccgcctaaagcaccaattagcgtgcctgataaaaagcctttcccgttccgttttaattctgatgacatgtgttacctttctcgttatgtcttttttgacataacgagaaaggtaacacagagaataaggattctggaagcgtag

SEQ ID NO: 150967 - DNA, 492 bp, Enterobacter cloacae
atgcagaatcaaccatttaatgtgctgtttctttgcacaggcaattcaaccagaagcattatggctgaagtgctcatgaatcagatggggcaaggccattttaaagcttacagcgctggcactcacccccggggcgagctgcatccgatgacagcacttttcttgcagcaacatcagatagatacctcaacgctagccagtaaaagctggctcttgtttgctgatgccggtgctcccagaatggatttcatctttaccgtctgcgatcaggcagcaggcgagtcctgtccggcctggcccgggcaaccgattactgcccattggggattttccgatccggccttgtttaaaggaactgatgagcagaagttgcaggaattcagccggatatacaaagaaatcagcaaccggatccgaatttttatgagtttgccgctgcatactctggatcgtatgtctcttcagcaggaactgaaccgtataggtgggtaa

SEQ ID NO: 150968 - DNA, 441 bp, Enterobacter cloacae
atgagcaagttatatcatgcactgataccgggtcgtatttactgtggcggcgctgatgatatccagcagatggtggatgaagatggcgtcgacgtggtggttgatttacgagccgaatcgacgggctgcgctgcacatcaacccggggtgcagtgggtacatattccactgagtgatcatgccacagaacctgaggagacactgtttcgtgatgccattctcgcggtcgtggatgcctataaaaatggacataaagtggcatttcattgtggcgcaggcagggggcggactggcacggtggcggcaggcgtcctgctggaattaaaaatcagcaaaaccttaccggaagcggttgagcgggctaaatctgtgcgcccggtactcaacatcaagccacttcagtatcaggcgttaggcctcctctaccctgaacctgagtaa

SEQ ID NO: 150969 - DNA, 480 bp, Enterobacter cloacae
gtgaacgtattgtttctgtgtaccggtaattcctgtcgatccattcttgccgaagcgaccttcaaccatctggcacccgaaggctggcatggcatgagtgccgggagtcatccgacgggtcaggtacatccccgcgcgcttgctttactggctcgtgaaggcatcgccaccggggggtattacagtaagtcgtgggaaaatctgcccggggtaccggatatcgtcatcagcgtctgtggcaacgctgctagggagacctgcccggtctatctgggaccggtgttgcgaagccattggggcgtagaggacccggctcatgtcaccgggacggacgaggagatcgatgcggcatttgtcacggcatataccattctgcgtgcgcgtatcgaggcgttttttgctcttcccctggccacattgcagcaggataaatccatgctgaaagccgaactggaccgtatcagcaatgtgatgggttaa

SEQ ID NO: 150970 - DNA, 372 bp, Enterobacter cloacae
atgaaaaaagacaccgcaactcaggtttttgaatctctggcttcaggtatccgactggatgtctatcggctgctggtgaaagccggaccacaggggttggtcgcggggcaaattgcctcaagccttgccattgtgcccaataatttgtcatttcatctcaaggctatgacccgtgcagggttgctctcggttgagcaggaaggccgctttcagcgttaccgggccaacatccccctgatgctggagttaatcactttcctgactgaagagtgctgttctggtcatccggaaaaatgtatatcgctgtactccggtgccggctgctcatccacagaaccaccggcatccaccaggataaaatgtgaggactag

SEQ ID NO: 150971 - DNA, 729 bp, Enterobacter cloacae
atgaacataatgtccagaagccttatggcagcaggcctgaccgcagggctactgctcagcaccttaactgcgcatgccggtaaaagcccgggttctggctcaaggtctttcagctcgtcctcaaccaaaggctctgctgtacgaagttccccgcgaccgtcgacgtcaggaccggtcacgtataaaagcgctgtacccgtgacgccggtcaaccgcttcaactcgcggacacctgaaaaaaccggcagctaccgttctgttttgtctcaatcgcaaacccttccttcagaaaagctgcagacagttattcgggagaaagaacgaagcggaccgggctggatgggaaccgcgctgctggtctggttattgagtcagcacgacctttcctcctctgataaggagtgggtaaatcaacaaattgcgcaggcgaaaaaagagaaccaacagattccgccaccgcctccagaactgtcagatgtggcattcaactggagctatccatctgcgtttaaaccaggggaaaaagcgctgatcgccgttagtgcaacacagggcattgccggtaaatcagtccctgttacctgtgtaatgaaaggctcttacggcgttaaggacggtgaaatcacccggatggaatggacgcccgataaggccatgacagccgtgatgcgctgtgaggccggcgggttgagtgacttacgtatctttagcgcaggagatatgaaatga

SEQ ID NO: 150972 - DNA, 732 bp, Enterobacter cloacae
atgaatcgtaaaacagcactcacactctctctggtcgtattgctaagtacacctcagcttgctaccgccgggatgtctttatttgggtccgtgaccggacgcggtgaagaaagcttcctgatggctaagaaaaaggccctcgctgataaagacccctggcatgcctggctggaattgtctgccagtgacccaggcgatatctccagcgatattcgtgaacaatacagcgaactggcagcttcactggttctgagtgcagcccggaaaaataatccggatgcactggtcctggtgttcagccgggatgacgcgccggggtttgttggcagccgacccgagctctatgagccactcctgatgctcgcagaaaaagcagcaggaaaccggaaggacaaagagctgttaatgacagccggggacatattgcaaaaaggacagtggacaatcaaagacagccagcgcgcagcgggttactactcacgggcctggctggcaggagagaacagcgcacctgcaaagatttactccatctaccaggagctgcaggaccctggcagcgcttatctctggcaacttcgctgcatcggcaactgccgtatctggcaggatgaaagccactctccggtgacccaactcctgaacccccgccagattcagtggattcagaaacaggcacgggataagaccgtcataaccgttaacgggctggcagcccttaaggagctgcaatga

SEQ ID NO: 150973 - DNA, 474 bp, Enterobacter cloacae
atgcgtgatgaagagcgtaataacagtctgctcaggagcatgcggatgcatattgctgaatgggaggctcggcgacctacttctgcaagaagtacgttcatcttcgtttggcttgccatgttcctcggtgcagcagcattggtactcgcgtactacctgactctatgggcactgggtttcctggttgtctggttttttctgagtcaatggatatgcaggcgaattgtcccccgctacaacgaaagctgggcggaggtattcgacaggaagcttactgcttatgaacccctaaacctttccgcctgggaacaactgaaacaccaggctgaaacagaagggctgacagccagcattgtcagacgctggtaccaggaagaagcgaggtccgtctggccagaaaagaaacctgacctgaagttcctcaggaagaaaatctgcgctgacagcaaaaaggacgaagtgaatgaatcgtaa

SEQ ID NO: 150974 - DNA, 381 bp, Enterobacter cloacae
atgaaacgcattgcctcagctttgttgatggtgctctccctcacaacacctgatgcggtgaaagctgccgcgacagtggtggttcttaaccagatggcagcgcaaaagcaaattgcccgcgcagcccggtttgaagccctggaaagcgaagcactggcccttcctgatgcctggaaagcgtatcagcaggtgtctgactcagtccctggggatgcacctaccgaactgcaaaatcgctaccgcagcctcgctgtctcactggcaattaaggccgcaatgacctgttctccagaagccctcaagctccttgagcgtaacgatgtgattgagtttcgtgtactccgttcatcgttagtctcagcctgcagaaccgctaaataa

SEQ ID NO: 150975 - DNA, 441 bp, Enterobacter cloacae
atgaaggagctatgcatagatgaccgtattagttttctgaggagtattgagcgggactggaaagactggtctgcaggaaaaaacacaaaaccccactggataatattagtaggggtattaaccgccacagggatgttgatttttagcttctggacaagcaatcagaggcttaccgtggcttccattgctgttggaatagcatttattctcgccggattgttacagactggtgaaacatgggaagaaaaaatacagagtaaaattcgggcatatgagccgcttgatattgatgccatgcgcaccctggccgtttctgtttttcacaaggataagctgacacgggaagaactcagacagtggctggatgcggagttcagcgccatttcggatgccgttcttcgtgatgggcgccagccacattccggcgacataattaactga

SEQ ID NO: 150976 - DNA, 339 bp, Enterobacter cloacae
atgcacacacaaaacgtcaacgtcaaaaccgttctgggtgatttgccaccgatgcgggggctggagttacgtattcagtgggggatggcccgtgtaatgcacatcatcgactacgtaaaagcggaatgcgagatggtagacgcgcagatcggagcacagtttgagggttatcacgattttagtgcaggggaaaacgagcctccgcacatgatcaccgatgtgcctgaattggtcagcgcgtggaaagacgggtggtttacggcggcaggttttgctgaaacgaaggcctgcccagagtgccagaacgacagcggtgaaccctgctggattcacggttaa

SEQ ID NO: 150977 - DNA, 396 bp, Enterobacter cloacae
atgcacacacgaaacatcaacgtcaaaaccgccgctcaagaatctaccggaagatgggggacagacccgaaaacgcgtctgacctgtgttatcgcggagcaaaagtcatatctggacgagctttgcgggattaaggcgctccagctggaccagcatgaagaggctgaggaagtctgcaacatcctgtgcgccatgagtaaaaacatctggtacgagggggttatcgactggatgcgcgagaaacctctgctgtcattccatgttgttcagccgtggttacaggctaaagcacatgccgcccggttgtatggcgaaacaggccaggaagcatgggcgtatgcagacaagagccttaagaactgcatgatttttgaacttgccatgctggcagagtaa

SEQ ID NO: 150978 - DNA, 192 bp, Enterobacter cloacae
atgcgcatcaccatgacggttaacacggtcaaggacattgagggcgccatcgccgcactgcgcaagttcataagcgagaagaaaccgaatgatgggacgagcgaggtgtggggtatcggcattaccggcggcagctactttgcagtgggtataaagccgaacggcaattatacagttaagcagcaggattga

SEQ ID NO: 150979 - DNA, 897 bp, Enterobacter cloacae
atggtgcgttatcttttggaaaatccagataactatattttttctgctcttaccgcttccgtcgctgttgatgtgcattttgaagcacttaacgatgccgggagcttggggacgttacaagtccccatgggagcccaaattttgattaatgatgggcaacatagacgaaaagctattgaagaagcgttaaaagcaaatccagaattgggttatgacaacattccagttttgttcttcgtagatagagggttagtaagaagccaacagatgtttgctgatttaaacaaatatgcggttagacctagcccttcgttagcgactctctatgatcatcgggatccaagtgctcagcttgcctgttatctggctgaaaatattgagccatttgtcggtttcaccgaaatggaaaaatcgagtatatcctcactttctaacaaacttttcacattgagcagcatcaaacaggcgacgagagcactactcggtaaagggctgaaagatgtttactccaatgacgaaaagcataaagcggaatgtttctggcgtgccgtgtttggagttatgcccgaatggcaaatggtacgacgccgtgagatttcgccagcgagtatgcgtcaggaatttatccattctcacggtgtaggtttacaggctattggtttgatgggtaagggattgctgcaacattcgccatacaactgggagcaaaaattggaaggtttgagagatattgactggcgaaaggcgaatccggaatggctaaagcgcacaatgctgcatggaaaaatcagcaagtcagcaatatcgatacatctaaccagtaatgccctgaaacaaaaacttggcattcctttaaattcagaagaacaaaaattagaagagcaactgaagtcatga

SEQ ID NO: 150980 - DNA, 1167 bp, Enterobacter cloacae
  misc_feature (1115)..(1153): n is a, c, g, or t
atgagtcatttattacaatcatatgatcttgatagttatgaagattttattaatcaggaaacctttgcggggcgtccgctacatgagtttgtatctgaggtccagcggatctatctggctgataaacgtccttgggttattggctacagtggcggtaaggattcgtctgctgtaacaactcttatttatctggcattactgggattgtctcccgagcagcgtcataagcctgtttttgtcgtatgttcagatactttggtcgagacaccagtagttgtaaacctgatcagtcgaacattgaaactaatagaaagaggggctcgccaggatggtttgcccatatcggtgcaacaagttgttcctaaaacgcatgaaacattttgggcaaaccttttaggaaagggatacccggcacctactcggcagttccgctggtgtaccgaacgtatgaaaatcaatccggttagtgactttattcgagataaagtaagtcagttcgaagaagttattgtggttttgggatcccgttctgctgaaagtgcatcccgtgctcaggtaattgcaaaacacaagattgatgggactcgactagctcgtcataccactttagctaatgcgtttatctatacccctattgatacttggggggttgatgatgtctggaaattgttgagaggtgcattccgctattcaagtgatgtaaccgaatgggaaacaccttggggaggtgggaacaaccttcctttatggactttgtatatggattcctctggtcagggggaatgccctatggttattgatgacagcaccccttcttgtggtaattcgcgatttgggtgctggacttgtactgttgtaaccaaagatcgggctatggaaagtctggttcaaaacggagagcagtggatggctccgttgcttgagtttcgcaatatgcttgcgaagactactgaaccagaagagaaagataagtaccggaactttaaacgccgaactggaaaggttagttatcagtatttaaaagagggggaggatatttcggttgaacgaaaacatgttccaggtccctatctattaaagtaccgacaagaatggctggagaagttgctcaactnnnnnnnnnnnnnnnnnnnnnnnnnnnnnnnnnnnnnnnggataaggtcctga

SEQ ID NO: 150981 - DNA, 270 bp, Enterobacter cloacae
atgaagttgattgatcttgagatctcttttgaaggaatgggacgccgtcaaaatgttcaaaagaaagtagaatcgatattgcaacaggattggggaacatttgaagagatcaaggaaaaatactcttcggttcagaaaaagaatcagttcgatatgcttttaaaagaaaaagaagatgttgaacttgctttggatgctctatcaaatgattttgataggcttgagaacatattaaatagtgtaaccagtaatgatgaggtggaaaaatga

SEQ ID NO: 150982 - DNA, 741 bp, Enterobacter cloacae
atgaagacttttgcttcggacatccatgccctgctgcaacgactcgtcagcgaagaaaccccaaacctaagtaagtacgataaggatttgctgtcacatcttgaggtggcgctatataacttgttggaggctgaaaatggactggagtcagtttacaaggttcgtttcgaggatagcggccatctgttaaagcagcaaaatgcaggaatggggcctgattcaacaacagatttaaaggatgattttcaagcacaagcaggtatacacatattgagactcacgaatatattgtgtcttgataacgtatatcgctacctaactgatcgcttcaaaaaaatcacgcttgtagagtcaggccatgttgtaaacagcatgaaaaaagatgaaaaccagcgagaaactaaaaaacggaaaaatggtggtcaaaagagccgtgagcgaatggaaacggtcaagaatcatattcataatcttgcgatggcttttttgaaagctcactctcccagacctctagatgcttcatttacgttgaaagaagtaaatgctgccatacatgacgatgtcatcaatttctttaaagaaaataatgatttaccccagagcaaaaaaatcctcttaaatcccgataactcacctaacgacggacctgacgccacacgtgctatcgcagacaaactaagcttacttagaaaagaaggtcggcttagaccattttttgagccactgacaccggaccagtaa

SEQ ID NO: 150983 - DNA, 3390 bp, Enterobacter cloacae
atggtaaatcctcaaatgaaattcgcaaaacactctctcgcagttctgtgctctgtcgcacttaatgctaatgcctctaacgttgacgttaatcacttcctggaaactgcgaagaaagttcagcagcacgacgcagcagcgattaactccatcgttaaggaatacaaaagccttaacgcccgtgaccgtctgtacgttgacggtatcgctgacctcactgacgttgaatcagttatcaaagaaaccaacgctaaagccgagcaggaaggcaatacccgtgctgacgccccaaccaaacactgggacgctgttaaaaccgaacaacaagttcgtgaagcacacattgcagccaaaaacccacaggctactccagacgctatccctactgcttcaccagctggcaaagcagctccgcaggttcagccacaagctaccccagtagcacacgccaccccttctgtgcaggttgcaccgcagctggttccacaggcagcgccttttgctaaaccatcagtaaaagctgtgccgcaggaaaccgcgcaagctaccccagcactgcaactgactcctgttcctcatgcctcccctgttgcactgcaccaggatactccagtagcactgtctgatgttgattatctcgcgaagaccatcaacgacgttaaaacacactcggaattaaacgacggttctgtagcgcacaacattgaagctaccactctgggcaaagaagcaaaacgcgcttccgatatcattaaagcgaatcaccagactccagctatcaaagccgttccacaggttcagccacaagcgactccagaactgcacgcaacccctgttgctgttgtcgctccgcaggttgtaccgcaggcgactccgttcgctaaaccatctgttcaggccgttccttctgtacagccacaggctacccctgtactgcacgctactccggttgccgttgtcgcacctcacgaagtgccgcacgccatccctaccgttcagcagcgtacgccggatccggttcctaacgaatccattgcgcaccgtgatcgctactctatgcgcccagtgcataaccctgactcactggctaacgctcagcacctggcacacaacccgctgtactccggtactgaaatcggtcagaaagcctctgctgttgatgaaaacgcagttgcgcacaaactgaatcaggaagctcaccacaacgagcgtgtagcgcaccaggcgcgttaccagtccaccccactgctggcgcagcaggaagccgctcaggctcgcgctaatgaagcgactgcacacgacaaccgcgcttatgcaaaagtcgctgtagacgctgctaaacgtgaagacctgaaagcccgtgtaaacgaagtcaacgcccacgataaccgtggctatgcgcaggctgttgcccagtcccagcaaatggctaaactgctggctgatcctgatttcaaccaggctcctgctgttctgtctgaacagactgctgcggttaaaactgccgttccaactacgtctgcggctaactcacagcaagcgattacctctatgtcgtcgtctgatatcgtcatcgcaattgataagcgcgttaacggccaggcagctacccagaaaaccactgatgatgctcaggacgcgaccatcgcgactaaagcagattctgctgacctgcaaaaaacgcagcgtgacctgtctaacctccagaacgtagctgatgaagcgcaccagactgcattcgctaacaaagctgatatcgctaccctgaaaactgacgttaagggcgtgcagggcgaagttgctaagaaagctgatcagtccgaactggctaccgtcaaatctcagctcaacactcaggttgcgaccgttgaaagcaagctgaatctgaaagccgaccagtcagctctggatgtggtgaagactaccgctgataaaaaccagcaggacatcgcgaaccagtccggccagatcactggtaacaccaacgccgttaaaactgcccagaagacagctgaccagaacggccagaccattgctaaccaggctggcttgatctctgccaacaccagcacggctaacactgcccagaagacagccgaccagaacggccagaagatcgctaaccaggctggtctgattgcttccaacaccagcacggctaacactgctaaaaccaccgctgacaacgctgttaaggccgttcagaaggtgcagggtgaagttaactccctggacggcaaagtgaccgccaacaccaccgccctgtccggtaaagtggataccaccacttatgacgctggtcagaaagcacaggacgcggctatcggcctgaaagcagatacctctactgttaccgcgctgaaagctaccgttgatagcaatactcagacgctgggcggcaaagctgatgcaagtgcggttactaccctaaaagcctcagtggacagcaacacccagctgctccagtccacggctactaccatgaagtctgacgagcacctgatcagcgctaacgcccagggtgtgtctgataaccatgacgctatccaggccaacgtaactgcgattgctggtaatactgctggcgtagctgcgaacaaagcggccgttgataccaacgctaagagcattcaggcaaacaccactgccctgactgcaaaagcggatcaggccaccgttgacgctgtgcagaaaactgcggatgcgaacaccaccagcatcaccacgctgcaaactgacgttacagataacagcaaggctatcgctaacaattccgccgccatcagcgccaaagttgatcaggcagctgttgatgccgctgttacagctgaacaaaatcgcgctactggcgttgaagcaaccaaagctgacaaaactgcggttgatgccaacaccaaagctatcgcggcgaacaccagcaacttctccgctctgcaaactggcgttaaagctaacagcacggctgtagttgacctgcaatcgcgctctgcggatcttgatcagcgcatcgccgcccagaaagttgaacagcagaaaaccaacgagaaagttgcacagcattccgcagaactggcagaccacgaaagtcgtttgcaaaacctggaaggcaacaccagcgccaacttcggcaagctgaaaaaccaggttgagcaaaaccgtaaacgtgcatctgctggtattgctggtgtagctgctcaggcgaacataccgcaggttcttgaatcccagacatttaacgtgggtgctggcgtaggtaacaccgatggcgaaaacgctctggccgttggtttttctgcccgggcaagccagaatgtagtggttaaagctgctgtatctaacgacactcagcataacttcgttgttggcgctggcgtggcttacggctggtaa

SEQ ID NO: 150984 - DNA, 381 bp, Enterobacter cloacae
atgaaattcaaaataattactttagccgctctcttcgtcgttcctgttttcaatgcctcagcaatcagcgccagctacgctcgccaactcgaccattccggctgcacgcagcagaccgacggcaacggctgcgatatccacaaaactaaagcagaaaaccgcgcagccgaagcgcgccttcaaaagaaccacggccagacgcttgaccagatttcttctgaagtagatacgattgtcggcatgagttcttacgagttcgacgattatctctaccgccacggctggagccattccgctttcggtgagtacacaaaaggtcagtggaagctgcatttcaaagtagaaggcgggaaagtaactcgctcagagcttgcacgataa

SEQ ID NO: 150985 - DNA, 237 bp, Enterobacter cloacae
atgaggagtgggccacggcttcacgactccctgaataacccgacatcgaaagatgtagcatcagagttgttaaatctacatctcgagcaacaggaaatgaacacgtatagcgtaagcttccaggtgttaagctgttttttgaatatccattgtattacaaccaaggcggtcaaatttgcacagctggcacaaaataaaaggactgaaaaattgaatgatggctattcctgtagataa

SEQ ID NO: 150986 - DNA, 5895 bp, Enterobacter cloacae
atgagcattaaggcatatgtcagtgtcgcccataagttgggattcacttcgcaccaaaatgcggttcccctgttacgtgaattggtattacataacgaatctgaccaaacgtaccaggatttaacactgtacttgcagacaacacctgcggtgctggaagcgaaaatgtggaaaattgatcgcttgcttcctcgctcctcactcgatattcgcgatcgtgatgtcaaactgaatgctgaatggctggctgaactgactgaaagtgtgctttgcgaaatcacgttatgtttacgccagggagaggaagaactttttaccattaattatccccttgaagccctggcaaaaaatgaatggggcggcgatgcgatgatggagttattgccgacgtttattatgccgaacgaccctgccatagaccgactgctcaaagcaacagcaaatgttctgcatagcgcagggaaacgcgaatcacttgatggctacgagagcaaatccaggacgcgagtctgggagcttgcttctgctctctggaccgccatttgcaatatgaatatcagctatgccctgccccctgccagctttgaacgcaacggtcagaagatccgcacacccggcaccattattgaagccagagtcgcaacctgtctcgacacgacactcttgtttgcttctgccctagaacaactgggtcttaatccgctgattttgttaacggaaggacatgcatttgccggtttatggctccagccacaggaattcgcacaactagttaccgaagatgtctcagccgtacgtaagcggattgatttaaaagagatagtggtatttgaaacgacgctggccaccaaagcacacccggcatcctttacgcaggcttccggcgaggcgcttcagcatctaacggagaaaaatttctacgctgttatcgatgtacgacgcgcacgaatgcaaaaaatccgcccgcttgccttgggtggaatgacggcagccactctggccgatggcgcagaacaactcacttcacatgggtttgaagatgcgccgcttctgccctcatttgatcttgatgtcgagatcgctgatgaaaaaaacgcaaccaaccgcctggtacagtggcaacgtaaacttttagatttaactacccgaaaccgtctgctacacctgccggaaagtgcgaaagctatccggttaatctgttcaaatcctggcgtgctagaagacaagctggcagaaggaaagcgcctgcgtattgtctccttgccaaatctggaaatgggtggtcgggacacagagttatatcagcagcaaactcatgagaacttacgcgacgagtatgctcagcttgcattggagcgcggtgaggttgtctctcctcttgagcaagagcgccttgaatcttcactgatcgatctgtatcgaaaatcaaaaagcgatctcgaagaaggcggagcaaatacgctctttctggctgtagggtttctgaaatggaaaaaagcagctgatgaccctaaaagttattttgcaccgttgatcctactgcccattcaacttgatcgtaaaagtgcactgtctggcgtcacgatgcgactgcttgaagaggaacctcgcttcaacctgaccttacttgagttgctgcgtaatgatttcgcactaaccatcaacggcctggatgccgaattgcctaccgatgaaatcgggattgatgttgacggcatctggaacctggtacgtcgtgctgtacgtgatatgccgggctttgaggtgactcgcgatgtggtgattggcacgttctcattcgccaagtatctgatgtggaaagatctcatcgaccgtacaccacagttgatggaaagtccgctggtcagatacctgatagagcgcgggcaggaaaatgcgaccctggagaaaagcggcgacatcatcgatgtcgatgagctggatgatgaagtcggcacgcaggagctttttctgccattgcctgctgattcgtcgcaagtcgcagcggttgttgcttcggccaaaggacgcgactttgtgctggacggcccgccaggaacaggtaaatcgcaaaccattgccaatatgattgcccataaccttgcgctagggcgacgtgtgctgttcgtcgcggaaaaaaaagccgcgctggaggtggtttatcgccgactcgaagcacaaggattaggcgagttttgtttggaattgcactccagcaaaacctcgaaaatggatttccttaagcagctcgaacgggcatgggatgcacgtgatgcactgaccgcgcaggaatgggaagaagaagcaagcaaggtacaaaacctgcgggataagctcaatgaggttgtgcggttactgcataaacgttggcctaatgggctgacgctgcatcacgcaatgggtcgggtgataaaagatgctaacgtcgcgacaccccaattcacgtggccagataacactctgcataccgccgaagagctggaatattttaggcagatcgccagacgactagagttgaaccgcgatgcctttaaacaacatgatgagcactttgctccaattatgcagacagattggacaaacggatggcaatcatctctgatcgccagcgcaaaagtgctgcctgaaaaaattgcaacgcttgagcacgcgaccgatgcgctactgcaggcaacaggcatcaccgtggaagacaaagggccggtaaaattggcgcagctggcctctttctgcgaattgctgacgaaagcaggcggcctcgatctcagcttcatattcactcccgatgcggcatcccgtatagaagcagcgcatacggcaatatccttattgcaggagatcacggcgaccaaagcacggctgtccgtcacctatcctgccgatagctggcagcaggtcaatgtgccgcagctccagcaggcactggcgcaagcagataaaaagttctggttcttcgccaccagtgcacgcaaaaaagttattcagagcatgatgcaacaatatgcactgaattcagcacctgatttatctgccgatctgcctgtgattgatcttctccaggcgctgttacaacgtctgacggcgatcaatagcgatacaactccactgccgggctggaatggactggcaacggattatagaaaactggaaacgacagtggcactcgcggaagaggtccgcagcacactgggttcttttgcctcgtctccgcagcaacttgccgggcttcgcactgccgttaaaactctgcttattgatgccaatgatcttctggggtccgctggcgtggttgccaacctgaaccggaaccttcgcacggccctgaccggtttcgacgaggtaaaaacgacattttgtggtctgattaaagcgcctggcgaaacgctgtccatcccgacattacgtgactgcgcagtgaacatccttcagcactcatcggggctgaaagcatggagtgactggagccgcgtacgagaggaagccatttctcatggactgatgccaatgctggatgcgctggtttatcttgacgcttccgacaccagcgcaaccgacattttcgaaaccgcctattgccgctggttcgcctcatgggttattgactccgagccgctgctccataactttgtgccagcggaacatatgagcgatattgaggcctatcgacagcataccgatcgtctggcgaagttaacggtacggtatattcgcgcgcgtctgtgcggtgttatccccgcgaaaaatgagcttgtcaaacagggggggtttgccttactcaagcatgaactacagaaatctcgccgtcataaaccggtgcggcagatggcggcagagatgggcgatgcaatgtcaaaacttgcaccttgcatgctgatgagtcccctatctgtcgcgcagttcctgccgtccagccaggcgctgtttgatttggttattttcgatgaagcctcacaaatttctccatgggatgctatcggcgcgatggcgcgcgggaaacaagttgtggtggctggcgacccacgccagatgccgccaaccagtttcttcaaccgtggcgccagtgataccgaggatgatattgaagatgatatggaaagcattctcgatgaatgccttgctgcgggcttatacaaccatagcctgagctggcactaccgcagtcgccatgaaagtttgatcaccttctcgaaccatcgttactatgacggtaatttgatcacgttcccggcatcggaaacccgacaaagcgccgtgcagtggtgcaaagttgccggagtgtattcgaaaggtaaaggccgtcacaaccaggctgaagccgaagccattgtcgcagagacggtgaaacgcctgactgacaaaaaattcatcgcgtcaggaaaatcgattggcattatcacgcttaacaccgagcagcagaaacttgtcaacgacctgctggacagagcccgtcagcagcatccggcgatcgagcccttcttccagcaggatcttgcagaaccggtggtggtgaaaaacctcgaaaccgtgcagggggacgaacgcgatctgattattctaggcattggtttcggacctacagaacccggtgctaatacaatgtcgatgagtttcggcccgcttaaccgtgagggcggctggcgtcgtttgaatgttgccgtgacccgcgcacgccaggaaatgatggtctttacctccttcgattcatcaatgatcgatctcaatcgtaccagtgcacgcgctgtcgccgacctgaaacacttcattgaatttgcccagcgcggtccactagcactggcacaggctgttcgcggttccgttggcggttatgactccccttttgaagaagcggtcgccaatggtctgaggagaaaaggctggcatgttgttccacaaatcggcgtgtcccgattccgtattgatctggggatcgtgcatccagataaaccgggtgattaccttgtgggagttgagtgcgacggtgctacttaccatagcgcagcaacggcccgtgatcgtgacaaagtgcgtagcgccatactggaggggttgggctggaaattactccgtctctggtcaaccgaatggtggattgataaagaaggtgcgcttgagcggctcgattccgccatccgtaatctgctcgaagaatccaaatccgctgatgtaatgcatacggcgcaggcagaagaatctgatgatatttgcggtgaaataaccgctattgtagggtcggacaatctccctttaacttccagtgttgtacagggagccaacgatgaagagatctcagcacccgtcgaagtgatagagcaactctgtaaaaagtctgaagacaacgatagcgcagagatcgttgtgtcagagctaaaatacgcttcatcactgcacccggaaattaagttagccgctgagggggataaatacatcgttaatgacctgcaagaatggaatagcagagttgatgccgaacgcttctacattggcgggtatgacgaaacattgaaagggctcatcgactcagtggtgaaagctgaatctccactgctggaaacaacgttggtgcagcgcattgctcgcatccatggtttcaatcgtgctggtaggctaattcgtgaaagggtgatggagttggtagatcagcattatcatgttgcaccagacctttttggtgaaaattttgtctggcagtccacaactcagcaggcagactggaatacgttccgtttgcctgctacagaaaatgatattcgtcagattgatgctatcgctgcagaagagctacgcgcattggtgctgaatacaaagggcgagaacaaaattgcagatattacccgatcattgggcattaagcggctaacaagtcacgcaagacaaaaactggagtcattactctag

SEQ ID NO: 150987 - DNA, 510 bp, Enterobacter cloacae
atgacagccttcatgctttcgcagatcatcgcggccatttctttttgttctgacctcatcgctttctatctgccaaaacgtgtttatgtcctccggacgctcgcgctgtccacgtttctgctttcggttcacttcctgctgctcggccagcttagttctgcggccatgatgtttctagcgtgcgttcgcttcctggtggctacccgcagcacagacaagcgcctggtctatttcttcctgctggccgcactggcgagctgtgcgctcacctggcagggcactaccgacttgctgccgctgggtgggagcctgatgctcacctgggcggcgttccagaccaacgatatccgtatgcgccttttcacaatgggcggaagtcttttctggataacgaataatattgtggttcagtcaccggtggcgatcctgatggaaaccacgtttttcttgagcacgtttgtttcgatgatgcgcctacagcgccgtgaaaataaactgatcgcaggatag

SEQ ID NO: 150988 - DNA, 480 bp, Enterobacter cloacae
atgaaaatgaaaaagactttgatcaccctggctgtatttgctgctattgctgcatcaccggcacacgcgatcagcgctcaatatcgcgcacagctggagcgcagcggctgcacgcaggaaaccgacggcaacggctgcgatatccacaaaacggccgcacagaacggtatttcacgccatgaaatgaacgagcgtcaccgcgcagctgacgcacagcgcagtgaagcccatgccgacggcgtgcgctccatgaagcctttcttgggtaagtggaaagtttaccagcctaacggccagcacacggcggatctggtggtgaagagcgacagcgtgacgatgaacggctctaccgcgcagggctacaacgtgacagacggcaagctgaacatctatatgaatacgatgaccgtcgttctgggtaagggcaaaggcacctgggaaaacagttcaactggtgacaacggttatctgacccgttaa

SEQ ID NO: 150989 - DNA, 441 bp, Enterobacter cloacae
atgaaaaaaataatgttagttgtggcgctggcgctggcaggttgctcccagcctggcgtgtttgaatccaacgcacattttaaagcccgtgaagcagctgcagcggctacgccagctggtgaagaggtggacgatctgctcggtgatttgagtagcaacaaggttactgccgccccagttgcagtctcccgcgctgcaccgttctacccagcccaggcgcaggcgttgaagattgaaggccgtgttcgcgttaaatacgacgttatggccgacggccgcgtggacaacgtggaaatcttaagcgctcagccagccaatttctttgaacgagaagttaaaaacgccatgaaaaactggcgatttattcctaacaagcccattaacggcgctatttccaccatcactttccgcctgaacggcggcgcaaccctggataaatga

SEQ ID NO: 150990 - DNA, 204 bp, Enterobacter cloacae
atgccgcgccgccgcgtgctctggatcgtgctgtttgtactcggcattgccgccctgctgctgggggacgcagcaagctacattgacgattacggcgtgctgcacgactcaattttaatgcctttgggggcgctggtggccgtgttggccatcgcggtgctggtgtttgatgcgctgctgtcccttaaacaaaaaatacagtga

SEQ ID NO: 150991 - DNA, 252 bp, Enterobacter cloacae
ttgaaccacgtagcgttaagagcgtgccgtgatgtcctgcggatgactgttgcggatgccgctaaacacatcgggcactgtgagccccgcacatggcgtttttatgaagccggagagcgtgccgcctttatccagcgtatgcgcacggttctggagcgtcggacgtgcgtttacaacgaactcaaccagctggccgtgcagttctccgcccagtctgagctatgcgctcaggacaaaattttacctttttga

SEQ ID NO: 150992 - DNA, 390 bp, Enterobacter cloacae
atgtttacatccaaattaatcgctgcggcaattattgccgtggcatcactgcccgcgtgcgcaaaacaccacgcacataattgcgaagaagccgtagaacaggccttcgcacatattgaagccgtatttaaggcaaagcctaagctggcttacactccgatccgaacggttgaaacgtccggcatgatgatggaggcctgcaaggacggaatgaagcatggccgcattcacgacacgggcaagctcaacatgttgtatgaactggtggaacagcaagcccacaagccgaacatgagcattgaagaggcgcgttatctgctgagcgacgaggcgacagcgcaatcattcctgtccggctatcagctcacgtctggtgagggggacttttga

SEQ ID NO: 150993 - DNA, 372 bp, Enterobacter cloacae
atgatgaataagctcgcattgtctttagcattatctttagttttcgtttctgccgcccaggcaaataattgcaaccccgatggttttggtggcacccgttgcagtgatggccaacactatacgccggacggtttcggcggtatgcgcggcaatgacggcacgcgtatccaatccaacggtttcggcggccagcgagtcacctcgcctgatggtaacagcgtgaactacaacagcgatggttttggtggtctgcgcggcagcgacggcacccgcattcaatctgatggttttggtggcacccgcattacctccccaaacggccagtctactcactgcacaccgaacggtttcggtggaacgcgctgcaactaa

SEQ ID NO: 150994 - DNA, 285 bp, Enterobacter cloacae
atgccgaagcctggcaagccgcgtaacccgccgacggaaatctcagaagacctgatctgggagttgctggccggattaggcagcagcgggacgcgtaagaagtcggtgaacttactgacctggattgcagagaaccacccgcaatatgcggtgtttgtggaaaaggctttaacgctctgcggtgaaggcaaactctttccattaaaacgtgctcacgtagataaggcattacgtcagcacctggaaaattatgtaacgcgggtgaatcgtccggaatctatttaa

SEQ ID NO: 150995 - DNA, 315 bp, Enterobacter cloacae
gtggccgcgtacggggaagagatcctgaaccgctacgcctacaccatgacgcacacgaatctgtttagcgtgcgcggtgatgcgctcccgttcctgcacctagctggtgatatggaggtttccggcgagctggtggaggttaagcgggatcagcactggatagaggtgcgctttggtgagttgcagcccgtcccggcaccggagaacgggatcacccatgcggcctttggtctgtgtatccggacgagccaagcccgatcatgccgaagcctggcaagccgcgtaacccgccgacggaaatctcagaagacctga

SEQ ID NO: 150996 - DNA, 180 bp, Enterobacter cloacae
atggacacaattaaccgcgagccgaccaccgttggagaaatgctgacaaaagagttttacgatcagtcaaaaataacgcctgagcgcctctctgaggcgttgggagtgtctattggtgatgttgagcagctgatgcagggaaaacgccgcctgtggccgcgtacggggaagagatcctga

SEQ ID NO: 150997 - DNA, 657 bp, Enterobacter cloacae
gtgaaacgtctaaccattgccgccctagcgctgctggtggctggcaatgccagcgcatataacccgttttccgaagtgaccgaatactcaaccgactttagcgaacgcgcggccaaagcgccgcagggcgaccaggctacgctgaacaacatcgggcggaacattgaaaacggtgcctgggttgagtccctgactatcgaatcaacacagtccacgttcgataacgtcccctttgagcactggcgcgtgggcgtgccaaagctggtgcgccacgtccaacaagaacggtcatggcattacaacctgcctaccgagtgtgtttacccgaacggctacgaaacagttatctatgacgtgaccaacccgccgcactttatggccataggtgagatcgtgagtgaccacacctgcaccaacgtggccgaagttgttacaaacgggaaatccagcttgcgctttgacagcctggccgcgtgggcggcgcactgggagcgtatgaataacgccgtgcgtcagatcccgtcttctatcggctctgcgtgggattctgtgacccgctggtgtggccgcaaccctatcgccatcattctgctattggccgtgggtgccttcgctggtatgcgcatccgccgtaaacgcaagaacatcgccagctga

SEQ ID NO: 150998 - DNA, 279 bp, Enterobacter cloacae
atgaactttgaagaagcaaaacaatccctgcgccagattgagcgctggccaacggctgatacgcaccctaaccacgttgcgcacctgcatccactgccggaaggcttgcgctggatgtccgttggcgatgattattcggttctcgccatactggaatcagtaaacggcggtgtgaccgaccagatttttacgtacaacaaggtctgggcgaaccccgtcaagttctctccggaggccgaagacctgatcgccaggctggcgcgaggtgagcccctgtga

SEQ ID NO: 150999 - DNA, 597 bp, Enterobacter cloacae
gtgaaagacgttttatacgcggatctggtcaacgagctgcgcagcgccacgcggccagccattgtggtaatcgacagtctttatttcgacatgcaggaggttgccgaacgtctgaaacaggacgcggggattacgccgttatttcctaaactgacctttagcccgtccgaaagcgcacgccagaggcagcttaacaccctggcaaagatggacggcaagcccgttatgtttgttgaccagtatcctctggccgttcactgggagtctgttttgacgggcttccagctgctaaccgaggaaaagaaagccatctttgaccggattcaggcggaaaacgagtggatcaggagcgccccgactaaagaagaacgcacacgccggcaggacgaatccatgaaccgcgcgatgtccggcatgggtaacgcgatgtccaacatgctggaagagtcacgagctttcagtgaagaactggacgagaaggcggccaaaatcatcgaaacccaggatgaagcggcctttgaggcgctgaagaaagagtatagtgaacagaatattttcaagcggctacagcgccgcatatggggtaacaagttatga

SEQ ID NO: 151000 - DNA, 1314 bp, Enterobacter cloacae
atggcgaagaaacgcaaggcattaaaacccttatccgctgagcagatcgcagcacgcaagcaggaagaactgcgtcttacgcaagccaacgaggttatggcaaacctcaacatttcgaaagtccagcacttgggcgtttctatctggaagaacatcaccatccagctggcacgcggaaaaaacgttgctgaggtcacgtacgacatggaacgagattcgttggtcggccagtcccgtacgatggaggtcaagcgccttcgagccaaagaacaccgacagcgaagcaaagccagcgaggaaaaggttgaaaccgcgagtttcccgcctgccgtaacccctccagtacaaagcagtcctaagtcgggcaagctcagaagcaaaactactcatttgctgaacaaaaggtcgccaacccatacggtggatgcgtgggcggttgcccgcggcaaagcggggccaaactcatctgaaaagaagctgacctttggggcggtattgcatcagaacccagtaacgaagccggaagcagtcagctatagcggcagcatgaagccgttgaagggggtaaacacccctgcggtcaccatcaaaacctacgatctgccgttgccgaagccgaaagagggctatccgacaggtaaatatccgggcattgacgaggcgatgaagctgatccccgcccaccagcgccgcgagtttgctttatgcgttcataaaaaccgcgaaaccatgagcgcaaagcagatggccgagcagttcctgggtaagccgctggtggagccagtgacggctaaaccagctgccaacgatccggtatctgtcacgcaggtggtcaatgctccgattgaggtaacggccgttgaagttgccacgccagaagttgtggagtttgtcgtgccggtatccttgccgctgcgcgatggccgcgagctgaaaggcggatccgccgagcgcctggtgcgccagcgtgacgcggccgtacaggctgagtttcgggcaatggttcgccagaactttgcagaccgttgcgccgtgtccggtaaacacctgggcggcgtgctggaagcggcacacattgaaggtgcagatctgggttgctacagcgtcggcaacggcatcctgttgtcaccgaccctgcacaagttgtttgaccgccacctgatgggtattaaccctgaaacgctgattgttcacttcaaaccaggcgttgagtttgaagagtatgaaggccgcgtgatcgctcccctgatttataacctggataaagctcgtctggccgcacgctgggacgagtatctgagaggttcaaagtga

SEQ ID NO: 151001 - DNA, 252 bp, Enterobacter cloacae
atgaatgaaatcacgctgaccacttttgcagaggcgatgaacatgagcctttcagcctgtcattatctggtgtacggcagctcgcggctcaccccagaaacagcctttcgactcagctatgtattaggcggaacgcccgagcattggctaaaaatgcaaaatgaatacgaattgctgcatatcaaagtagataaacgcttactgacacgcctggacccaataatatttaagctcaataaatcatacagttga

SEQ ID NO: 151002 - DNA, 1794 bp, Enterobacter cloacae
atggcaataatacagcaggaattgatagttcgtggcgaacaagttgagcgagttttcatcaactatcaggataaaaaatacgtagttaatcgtcagtatcagcgtaagctgatttggactattgaagaaaaacagagttttatcgattcaattataaaaggtttccctatacctattatattgttagcagaacctcttgggcgaaacgatggtactctagagattattgatggtatgcaacgtatgaatgccattatgtcttttatcacgaacgatttctcattcgatggttgttattttgatcttaatacttttgcaacaacaaaagacttattagatcgtggagtactagagcaaagggcaccagtcctagaacgagcgaagtgccttgcaattgcatcgtatcctgtacctctttcaatttatgaagctgctgaaagagagtcggttgaagaagtatttcgccgaatcaactcaggcggacgtcaattatcacgacaagaattgcgagcagcgggagcaactaatgctttcgccgattgtgttcgaaaaatatctgcaagagttcgtggtgatacatcgaatacagatctcttactattaagtgagatgcaaaaaattagtatcactaacagggacttgcattatggtataaatgcagacactgttttttggattgctcacggaattttgacgaaagaacagctacgtcaaagtcgtgatgaagagttggtggcggacatagttgcatatatggtttctgacagaccggttgcatcgcgtactgaacttttggatgattattttggcgcaacatatcctgaaacgataactagcaaggcaagatttgattcaatcgatcaagccgtcaaaaagagaagtgtagagcttgttgatcttgattatcaacgagttcatgacgcgttaattttacttctcagtcaggctcaggctactttcgctggattgattttccctaatgggaatggtggtaatccagtgcctcgttatttccaagtaattttcctcgcccttcatgatttgataattaaaaagggtatggttatttctgatagtgcagggcttattgcgcgcttaagggattgtggaaagaatatacaggttcaagatggtgggcgatggggggctgataatcgaagcagaatgatcgattctattattggttgggtgcaaggattttttgagaacgatcataatccggatccagcgaaagttcattggataactaaactccaaaatttgcttacaaactcaattacagaacaagcagcctacgatttcaaacaaggtttctttactttagatcctaaaccttctttcgatgaaaaatcatttgataaaataatggagacttgtgctgcaatcgctaacataggcaaagggcataaaggctatgtcatagtaggtgtagctgaaacggcaaagacagcagccagagtacttgaggtttttggaagcagagcactctcatataatggtttccatataactggggtcgatcatgaagctaatttcacgggtaaagatctagaccaaatgttccaagacatctccgaaagagtggggcgctcagggctttcagaaccattaagatcgtacatttataaccatcttaaatgcgtacgttattatgataagacggtgtttgtttttgaggttgagggtcaagactcaccatctcattggaatggaaagtgggtagaacgtcaaggcgcacaggtcaaagacatacctgctgataaactgggcgcattatttgagcgcttcaggtaa

SEQ ID NO: 151003 - DNA, 3093 bp, Enterobacter cloacae
atggcgggtgagaaagatgccggcagcatcgtctatacagtaagcgctgatatagccccattacttcaggctggccgacaagccattgagtcgcttgacggaatgggtgatggcgcaggtaaagccgcagataacttttccgggcttgaaaaatctgctgataaatcgggcaagtcgatcgcaagggctgcggatgatgcgagcaatgcagccaaaatcatggaacggcttggtaacgaaatagccgttcttgaagaagcaaataaaaatggtgcccgcagcgctgccgccctcgcagctcaaattgcagcgtcaggtgatgcgtcagaggcgcagagcagggaaattggaaaccttgctgtaaagctttttgacgtaaagcaggctgcgatcgatgcagccaaggcgaatagtgatagtgccgctgctttcagagcatcagaatcggcgatctcatcacttgaaggtgagttgtccgtccttaatgctgggatgattgagggatctcgcagcgccgctattttgtctgcccaaatgaaagcggggaatggggcaactgacgagcaaaaggcgcgcatttctcagcttgccggccagctctatgacctcaaatctgctcaaaatgcgtcagcaaaagcatcgtctgaagcagcgaagcaggcggcgcagcaggccaatgacgcggcaagattgcgctcaatttctctgagccttacgcagcagatcgcagttctcaatgaagagcagaagaatggcgcgagaagtgcggcaatgttatctgccaggctccaggctggttcatctgctactgctgctcaaagaaaagaaattggtgagcttgccgggaaattatacgacctcaaacaagcgcaaaatcagacagcaaaatcttctgttgggttaaagacagggctgtctgcaatagcttccgcgatcgccgtatctcaggtagttgattatggtaagcgtttccttgaagcggctgacgccatgtctcaaatgcaggccaggatcgagcggttaactggcagcgccgcggcagccacccagacaatgcagggtttgatgcgcataagctcggcaacgggcggatcgctgcaggacaccgcgaagctgtgggaaaccctaagcacagcgttgcgcgataccggcgcgacgaacggccagataattcagctcaccgaaacacttcagaaaatcgggcgcataggcggatcttcaaccgaggaaatggctaatgcccttcgtcagttcggccagtcgatatcctcgggcactatccgggctgaggaattcaattccatccttgaacaaatgccagaactggcgcgtcagattgccgcggggatgggcgtaagtattggagagcttcgccagctgatgctggacgggaaactgactgcagaagacgcacttaacgccatccagaaacaaaccggctcagtaaatgcagagttcgaaaaacttcctcgtactttggctcaagccaataacgcactgaccaactcattcctgtccatgatcgactcagttaaccaggctactggtgcgagttcagggatggtaacggtaatcgactcgttaacagcagcgttagatagattggcaggcaaagctatttccgcagatgctcagatctctgatctgaacagtacggcagaaatgttcaaccgccgagcgcgcacctggtcatggcttggacttgacggatgggaagcgcaaaacaaagccctggctgggctgagcaataaggcagccatgctggttggcgatctggccgctgtaacaaaagcatctcagaccgcggcaaacaccaagcccatcgagataaaggcggtggctagcacaggcaagcagaaaaagacgcaagccgaaaaggacgctgaaaaattcgctaaggctcaggaggcggttaaccaaaaactggaagagctgaggcaaaaggcagagctatcggcaggaagcgtaggagaactttctcgtgcgcaggcagtgcttaatgcccagcagtctctcgggaatagcgctacagaagatcagatactactggccgggcaattggccgggaaagcctgggataacgccaacgcattgcgcgcccaggccaaggcagaaaaggaacgtactgacgctgccaataagttcagcaccattcagggcaaaaccagtaaaactgccggtctggacagtcagtaccaaaaagatattgctgatatccagcagtacgcccagctttacccgcagaaaataggcgaggcggaagcggcgcgcgccgctatcgagcagcagtatcgtgatcagcgcaacgcggcgatgtgggaagagtggtctcagcagaacctggcaactcaggctgcatcggcagcgtttgaagccttcggtaataatgcgtcgaatgctctaacgggtattatcaccggtagcatgagtgcttcagaagcgcttcgttccatcggtagtacggtcctaaatagcgtcgttaacaccttcgttcagatgggcgttgagtgggtgaaatctgccgtcatgggtgctgctgcacaaacctctgcgattgcaaccactactgcggcgcaaacggccagtcttgccactactaccgccgccagcacagcttcagccgccacaactactgctgcatggacgccagcagcgcttgtagcctctatcggctcattcggcggtgcggtggcgataggtcttggggccctggtggccgccatggctgttggaaagggactgtctgggaagcgcaagaatggcggaccggtatcggcaggatcaatgtaccaggtcggagagggcggtatgccggagatttaccgggcgagtaccggtaagcagtacatgattccaggggataatggacgggtcatcagcaataaggatatgtcttcagctggatctggaagcggtggcgtcgtggttaacgtgaataactacaccggcgctgacgttcagaccaggacaaggaatgataatggaaatcaggtggtcgatcttttcattcaggacgtagagactggcgggccaatgtcatcaacgctggaatcaacatacggactttcacgccaggcaaacggagactactaa

SEQ ID NO: 151004 - DNA, 177 bp, Enterobacter cloacae
atgcaatcaaaatttaaagatattcgctttgatagagtgcagccagtcactaaagctaagcaccgaacgcacatagcttttctgacgattaacggtgacaccgaatcagcattaatttccgaattaaagaaacgataccccaaggatggtatcgaactagtaagctataaaaaataa

SEQ ID NO: 151005 - DNA, 390 bp, Enterobacter cloacae
atgagccgccttaccgccatcatcaccgcggttgtggcttgcctgattgtctgccttggctggctggcaatgcactaccacaacgccgccagcaagcagcaggcgcgagcggaaaccgcagagcagcagattaacgccgctgagtcagtgacctctaacgtcctgaacaccatgaccatcttcaacaccatctctgaggccaatcagcatgcaaaagagcagatcgcactggacgcatcgggagcctcggcagatatcaaggttgctgttgcgaacgatgattgtgctcgccgtcctgttcctgatggcgcagttaagcggctgcagcaatacgcggacggtttacatcaaggtgccggtggttccactcccggcaaacctcacagctga

SEQ ID NO: 151006 - DNA, 450 bp, Enterobacter cloacae
atgaaacagcactactgcatcgttaacgacaccgttaaagagaacctcatcgcgttcattcgcaccctgccggtaaacccgcgcgcgccgatggtggtcgaggcccgggaagagacccgcaccgacaagcagaaccgtctgatgtggccgttgctgaaggacctgtctgaccaggtggtttggcatggcgaaaaactgacccgcgaagagtggaaggacctgatcaccgttctggtgaatcagacccaagatcaggaacagaaatctgctccgggcatcaacggcggccgcgtttatttcggcgtccgcacatccaaatccagcaagcgctacatggtcgatgtcatcgaggcgatttactggttcggcaccgaccgcggcgtgaagttctccgaagcgtccagtaagcgcatcgcctgggcgcaagagtggagggcttcccgtgggtaa

SEQ ID NO: 151007 - DNA, 222 bp, Enterobacter cloacae
atgagcaacatcgataaaccaactgatgaagaaatcgttcaggtgctttgcgaccacggaaactgcatgacctatttcgtgacgaacgttctccgccgcaaatattggcctctgaataccgcatacatattgcgtcgcctgaagaagttagaggcagtaggcaaggttcgccgcgttaaaagtagctacgtagtccaaatctgctgggaggccgcccaatga

SEQ ID NO: 151008 - DNA, 1023 bp, Enterobacter cloacae
atgtcgaacgtcgcctatgcaaactttgcggcgcattctgccgtcaggagcaaccggatggagaaccagaaaaccggattcatcccgttgtaccggagtgttcttaagcaaacctggtcgaaggacgtcttcctgcgcacgctgtgggaaaacctgctgctgtctgccgcccgccagccatacacagcaaacttcaaggggcgccaatggccgctgcaaaccggacaactggtcaccacctcagccgatctcgggctgaatttatgcgacagggaagggaagccatgcagtcgccacgccgtagacaggatgcttgatgttttcgagcgtgaagggatgatttctcgctccggagagaagcgaaaaggctctgtgataaccatcacaaattatgctgaatatgctcaaaaaatggacgatttacccgagcgtttcaccgcgcatgtctccgcgcttaatgccgagcatggcgaagtcagtaatggtgcggcttcggaaggtgatgccgcgcataacggcgcgcatttacccgagcgtttcaccgagaatcatgaacaacaatgtaataacaacaataaaaacattaaaagatcttcgtccgagaattctggcgaatcctccgacgcacgtctgaagaaatttttatctgctcaccctgaagcggttattcacacaccatccggtgcgaagtggggatcggctgaagacctcaaaaccgcccagtggatttccgccagggtgaagcagattaacccaacctgcaaagccccggatatgacctcatggtctaacaccgttcgcctgatgcgccagatagacaaccggtcgcaccaggaaatctgcgcgctgtatgactgggccagcaagcaccatttctggcagaccaatatcctgagcccggaaagcctgcgtaagcagtgggacaagctgacgatgcagcgcagcgctggtggtgagcagcgacgcggaaagccggatctggacttcaacaacactgactgggcctatgaggtgcttcgatga

SEQ ID NO: 151009 - DNA, 507 bp, Enterobacter cloacae
atgaaagagtgcatcaaaagaaaaatttatatcatttatcaagagcacccgttatcattatatgacaatacagggattgaaatacctaactcaccttacattataaaaacagaagagaatatacatactcttctgaacgctacggattactatctttttacacagtcgacgattcagtacgaagcagttttttatcaaaaacccatgggactcctttcaagaagtgttctgggtatacatggtggtgtctatgaaagtgattgctatgatgatataaatgaatttctaaacgctcttattactgacaaagactacgaactacaccagcagcgttcgaaaaaatggctgtcatttatctatcattatttccttataaaaaacgataatgaaaatagaggaagtgagagtcagcgtgtcagcaatcttttagctcgctatagccttccagtaaatatcgacaccatttactctcttgaaagattcattgcgcgatggtgcaagcattaa

SEQ ID NO: 151010 - DNA, 1266 bp, Enterobacter cloacae
atgtgtataagagacaggtttaggggtgttcagggtagctttacagatgacaacggtgtttttgttcaatccgctacatcaggattcttttgggtaagagagggggcaggtagtcatgtaaaaatagaatggttcggcgggaaagctgaagaccctagcatcgaccactcccctatcctggctaacgcgcagaaatcagcaggtcgctctatcgagttccagtacggaagctactacttcacaccgccttgtatcatcaaaccagagatgcatttcattggtagtggtggggctaaaacgttctggcgtaacaaaaatatcaatgcagatgcggtggttttcttcgcgaacacaggggctactacaaattgggctgaaaatgccattttcgaacgcattcattttagcaacgacatccccacaatcccgacccaagctatgctggccatgacccacgtcggtaacttcaagtttaataactgcggtttctataacgcgccaatttacgggtctgacctgcattttgtcacctggaacggctgcacgtttatcaatagcctgactacgataaacgaagatgtagtatcgccaaccttcccgattaatgaaatgccgtcatatatcgactgctacatggtcaaatcgccgattaacatcacggatactgccgatttacatctggtgaataccgtcatgttttatggcccgtacggaattaaaactacagctcatagagctatggatgccggtgctgaatcaaatggcttcccggtaatgataacaaacagcacgattgacaatatcgacggttattgcctggattttaatcgggtggcgataggttcaattactaactcattctttagtggtggtcgtgtatcaggaacagcagcaataaggatgactgaggttctaggcctgagtttcaactcaaacgttatgcatttcgcaggaaaggaatgcatggagctttatgatgttcaaaacctattgatgggtaacaatcaatttagcagctgtaacgggtatgccatcaaggctcaatattcaagaaatatctcattaaatggtaatttcttcggtaatcagaaggtaagtggcggatggaacacatgcacaggcggggtaaactttgccagtgctgataatttgtcatgggttattaccggaaataacttcgttggtatcccaggggtagttgggcaaacaggatcaggccggactgtctatacagcatcagcgaactcagggttaagcgataactaa

SEQ ID NO: 151011 - DNA, 939 bp, Enterobacter cloacae
atggaaaaagagtatagtaaggataggttattggatttaacagcccactttgagcggcgtaagcaatacgcgtcggaaaaaataaagcatttacgagagcaacatgaaatatgttttgctttgtctggtctaacctttagtaaaagtccctatatttttgagggtatcggcgttttaagagaagtactttatccgcctggagaaatcgagcttgctgctgcccttaagaataaatccttactaagccctattgctcgccatatgcctgcattaacgcatgaacttgctttgcaatgctgtaattcaacttttcaacagacagagttaaacataggatggtggatcttatcggcgatcagatgtcgtactctcattgaggtacttgtccccgcggtagcaaatgtatcatgggatgttttccccgcgatgaactcaaactcctgcgaagtacaacttcttgaagacgtacctgcaactcgtcgaatagataccgttaaagaactatcgcttgaggctctcgattgggttcaacaatacttagaaaattggataactttgcttgagttcccggcctttagactagctatagattctcttacgacccacaaccaacacgccaatttacggatgtctgcagcggcgttatgggcaggaattgaggctctttttggcataaactccgaacttcgtttccggctggcgatcatggcggcggcatatcttgaagaaagaggggtacagcgtttagaggcgtatcgcaggataaagaaactgtatgattatcgctctaaagcggtacacggtggagttacgtcagatcatcacttagttgagcatataattgaggtaaggaagctcctatcgcaactagtttgccggatgacagagctaggcagaatgccaactgttgaagattatgaagaaagacttcttacttaa

SEQ ID NO: 151012 - DNA, 204 bp, Enterobacter cloacae
atgaacaccattgatatacataacgataagttcgtcagcatgcagttcattactgaactaactgggttatccgataaatggttttataagcttgcacaggaaggtaagtttccaaaacctgtaaagtttggccgcagttcccgctggattgaacgtgaagtaaaagaatggttagaagctcgcattaatgactcgagagcataa

SEQ ID NO: 151013 - DNA, 1155 bp, Enterobacter cloacae
ttgaatggaaaaatgtgggtagatataaaaaccaagcgtgatgtaagattgtttttatggatggcaggaaacgatgttgctattgaaaattaccggcaaacaaaggaaatcaaaacataccacctgaatcacatatatggtgaagactgtaatttagcagcgctggcaataaacgaggcttttcggattctttataaggattcagacgagttattctcatacgcctatagatttaaaaaagcgaaagaagcattattaccaataaaagagtttggttggtttaaacgtagcaatgatgcctgttattttgcatgggcatatatcagggtttttagtaaaaaaaatagttctttggcaaacgttggtgggaatgactcattctctatttataccagaacaccttatcgtcgttttattagaattgaacatccagtaagtcaccgtgagcgcattgagagtatagaggatttctttgatagatcaccaatggatctttcatctaagttatccattatgttaagtataagggatgcgtgggacagacattctcagttagcagatatattgccgttgaagaaaagtgacaagggaaaaataaactgggcatgggactatatctgcaaagataaaataaattatatcaatggttcgataaaaagagcacaagaaaaattaattgaaaagagtaagactgaagagacaggccaggtttcacaagcagttcttgatgaaatatataaatcgagcattgaaggatatattcatcaacctcattttctcagcctctttagaccatcaacaacgactgagaaatatctggcactacgttgcatttacatttccatgtactattatgataaaaactttatacccagatttaaaaaagcctgggaattaacatcctttcgtaaagcaaaaaagaaaagtaagaacaaaatcttaaagttaactaaaagagaacttgacggcaatgacactccatctgattctcctgataatactgaaaaggaaatagctaaaactgataaagagttcatgagagagaaagcacatgagataatgaagaacatcaagaccagaaactcagaactatcatcagaaaaggatagcgatactcctccagatttaagtagcaatggctggccttttttctga

SEQ ID NO: 151014 - DNA, 573 bp, Enterobacter cloacae
atgctagatgccaattttaataacgaagcgttactaaatagaatatgtgaggtttatgggtttactcagaaaatccaactagctaatcacttcaaaatcgctgccagctcgttacagaaccgctacacgcgcggcaatatgtcttatgacttcgctgtacattgcgccttagaaaccggtgcggacttgagatggcttatgaccggtgagggtgacaagaacctttcatccaaagaacaaaactcatcacaggagttaccattcttcactttaagtgaaggaagtcttcgtgaatctggtgttttgagtattgataatcagctttttggtaaacagctcaaaaatgcaatctgcataaaaagcgaaaacagctgttacatcactgagaaagaagccccattggctgatggtttatgggttgttgatgtcgagggagcagtcagcctccgggagctaacggtactgccagggaaaaagttgcatgtagctggcgggaaagtgccttttgagtgtgggattgatgagataaaaacagttggccgggtggtaggtatttacagcgaggttaattga

SEQ ID NO: 151015 - DNA, 510 bp, Enterobacter cloacae
atgttagattttcgcatttcgtcacatgcacactttgatgatgcatgtagaaaattcgcggctacgcataacgtgaaagaactggcggataaagccggtatcaagccgcatacgctttacaacaaactcaatccggaacagccgcaccagttaacaccgcgcgaaatttggacactgacagatctgaccgaagactcgaccctcgtcgatggttttctggctcagctccattgtctgccgtgcgtgccggtcaacgagctggcaaaagaaaaactgcaatcttatgtcatgcgcgccatgagtgaactcggtgagctggcaagcggggcggtatcaaatgaccgacttacccatgcgcgcaaacaaaacatgattgcaagcgttaacgctggtattcgcatgttgtcattgtcggcaatggcgttgcaggcgcgactacaggctaacccggcaatggctagcgtagtcgacactatgagcggcctcggtgcctcgttcgggcttttgtga

SEQ ID NO: 151016 - DNA, 441 bp, Enterobacter cloacae
gtgaacagagaactaaatgaacacgttatgattgagcgggttgagatgattgcacggctaacagctgagggtgcatgtcaggaaaaagaccgtgaaatcgcgctaaatttgattgcggagatagcaagagggaatttgataaaaaacgattcattctctgtggttttctctgccgagcctgtcggcaaaaaattaaaaaaagaacacgaagtgagaatcaacattacgttagataaagaccagaaaatcgaacagtcattgattgatgctttccagagcgaactaaccagaagagttgcaactatctttccttcaacgcgcgtgtttgtaaggaaagggtctattacaggagttgaactaacgggcgttgaaaatgattcagaccgtgagcggcttgataacattttgcaagaggtatgggaggatgaaagctggaggtag

SEQ ID NO: 151017 - DNA, 732 bp, Enterobacter cloacae
atgagcagcctgatttctttagtagcctttgttctatttgtaggttttatcatcggtctgattaagccttctttggtaaaaatgccaaatcgtaagcgttccagtgcgatcttcttgggtggatttctggcgcttgtcgttgttagcgctgttttagggggaacggaagatagtcagcacgtagcaaaaaatgattctacgaatgttcctgttgaaccggtcaaaaaagtctttaagtacggtgataagtccctcaaagaataccgaaacgagcttaaagagacgcgacataaaatcgttgccaattatgtcgagttcaaggggttaccggccagcgccaatgatgcgttttatgcttgcatgagtgagtttacattctcgaaagatggcgagttacaactaaatcaagttttgggatggtgctttaatgactacgaaagagatccagaatccctaaacagtaaaatcaatctcgatacttttcaggggaattttagcggttgggatggttcatatcgaccgttggaaaaggttataaaagccagcatgaatgatgattcctcctacaagcatgtttcaacggtctaccatcttattttgaataaagacccgcatgccattgttaaaacaacgtttcgtggcaccaatgcttatggtggggtggtcaaacagactgtagcggctcgcgttaacgtgcgaacgggtgaggtcgattcgatactcgacaattaa

SEQ ID NO: 151018 - DNA, 258 bp, Enterobacter cloacae
atgggcgtcaaagactcgaaatttcaggttgtctatcgtggtgaggttttagagcactttaagccgggcgggttggtattctttcagcgacccaaagagtgcggcggtgggtactggttaggacgcacatatcacgatgttttcatgattgaatatgagcggccggtatcgctaaacgagggaatgcaatatctgctcttaatggatgaggtcgggtcgaaaagtgacgaatttataacgaatttttcgctgttttag

SEQ ID NO: 151019 - DNA, 309 bp, Enterobacter cloacae
atgcttttttataaatactcatcgattgataatctcagcatatcaatgcttcgcaatggggaggtcttttttgcttctcctaacgaattaaatgacatccatgaatgtaaaccacaatttatctttaatgctaacaaagaagtttgggaaaggtttgtttattatttaattgtccaagtgtgtttaaaactcaatttagaacataattccccgcttgctatatcgctccttgcattcaaggataaaattttgcggtctttacttaatggtaaaaaaaacaagaaccctcgaccatcaatctctgattaa

SEQ ID NO: 151020 - DNA, 897 bp, Enterobacter cloacae
atgagcactatcctgaaatgggcgggaaataaaaccgccatcatgccggaactgattaagcaccttcctgctggcccgcgactggttgaacctttcgcgggttcatgcgctgtaatgatggcgacagactatcctcattatcttgtcgcagatatcaatccagatttaattaatctgtatcgtactattgcggaagatacagaaaactttattaaccttgctaaagcagtttttgaaagttttatcgtggctgaaaattattatcgtgtacgagaagcttttaaccacgattcgcaattagaccgcctgcaccgcgcagtatatttcctttatctgaaccgccactgttatcgtggattgtgccgttacaacttaagcggtgtttttaatgtcccgtacggtaattataaaaagccgtattttccagaaaatgagatccgcgcatttgcagagaaagcaaaacgcgccaatttcgtttgtgcaagttatgaagaaacgctggcaatggttaagcgtgacgatgttatttattgcgatcctccatacgacgatacgtttacggcctatcacacaaaaggatttaatgaggataaccagtaccaccttgcctcaatccttcttcatctttcctcgctggggcacagcgttgttgtatccaacagtgacacccagctaacgcgctctctttatcgtgatcttaaaatttatgaactagacgcgaaacggagcatgggcgtagcgggtggagaaggtaaatccgccagggaaattatcgctgtatctgaaccagtgcgtgctagctgcaatgagtggcaatggtatggcgttgattatgctgcaggggaaggtaataaggcggccaataagctctccatgatgggtagcaggaatgtctga

SEQ ID NO: 151021 - DNA, 732 bp, Enterobacter cloacae
atgaatagcatggcaaacaatagagttttatttaaatatcgaaactgcaaagatgatggattacgtgttcttcgcgagcgtgaattatggttcgccactgcgaatacgtttaatgaccccttcgaagctgaaacctccttccctgatgttttagctgcagtatgggcccggaaagaactaccgctgaatttgaagttgaaatttcagaaagccctaaaagagtcaattagcacatatggtgtttgtgctttaagccgagcacgtaagaaccaattaatgtggtctcattatgctgatgaacatagaggattctgcattgggtttaaagaaaaggaattaagaggtgaaggctcaagaatacatgccataaacattaaatatcaaagcaactacccttatcaaggtattattgatagacttgaattctttgaaagccacccaagcgaaaatagcttacacaagattgctggtgatataatccactcaatcttaggaaccaaatattccggttggaaatatgagcgtgagcgacgccttataaagttagaatccggggcattaaaatttgaaccaaaagcaataaactctatcgcttttggcttgagaacaagcgaagaaagcaaagaagaaatacgttctttactttcaggaaaagaatggtcgcatgtgaaatggtataaagcagaaaaatccactgctaaatactctttagatttctctctcctaagttag

SEQ ID NO: 151022 - DNA, 357 bp, Enterobacter cloacae
atgatcttcaaaacaattttttcagtaatactttttctatcattttctgccgcagcacaaccatcaaagctggagtgtgtcagccgaaaggatggcacggtaagagtggcgtatgttttcagcagcccgtcaaataaaggattgctcgagtttgacagcgccatttttacgaaggtggagtcaaaaatagaatctgggaatttgaaaaccttgttttctactcaacaagaagagaggcagaaggaaagtcgcgtgctttttctgacgctaagagacagagacgcagaaatatttgtcacaagaaaaactggtaacaatgactatgaagatggggtgatttatgaatgtaagccctga

SEQ ID NO: 151023 - DNA, 159 bp, Enterobacter cloacae
atgactgtcacccacaacggtaagcagtacaccgcaaaaaagctcaacgataacgagtggcagctgacgtcgatatcggcgccgcgtgaaaagctggtacttaaccgccagcagatgcatatcgctggcctcctgaaacaggttgaggtgaaggtatga

SEQ ID NO: 151024 - DNA, 534 bp, Enterobacter cloacae
atgagcaacatcgacaaacaggcgctgcgtgctgatgcgctggaagcaacgggtggtagttgggttagagaatctggtgaaggctgggaggcaatttgttgcgatgatgaccagggaaacgccggttttatcattgcagagttccagggtgaaaatgctacagccaatcgaaaatttgtgcagtctgccaaccccgccaccgtgctggcgctgctggatgaactggaagccaaagacaagagcatcagcttcctgaaaaaccaactcgcgcagctggcaaacttcaatcctgattgggacaagctggaagcagcaactgacagcctccgtgagcacatggcagaactcacagcggcacgcaaacggattgctgagctatcacaccacctgcaaaacgcgcacgaatttatcgagcatacagaggcattcggtcatgaagcatcaaacgggattctgtgttgcggcgatgcgcagtggaatatcgatgcttctaagtcagcgctgtccgcttctggcttcaacggggaggtctga

SEQ ID NO: 151025 - DNA, 612 bp, Enterobacter cloacae
atgacattcaccaaagagcagttgatcgccgcagctgttgggcgaattgaaatggcggaagaggcactcgccaatgatttggtccctctcgcccgccacacatttgaaattgatttggagctggcgcgtatcgcgctggcatcactcgaagcggaggctgttggcgaggttgtcctcggtgagtttgacgatgccggatgccacccggatgcaagggtggcgtgcatagccgctgatggtcaggctgactgggagaatttcaaagatggcactcggttatacaccgccccgccagcgcaggtatctgtgcctgatgctattcattctcaaggcgaaaagtcagcctctgatgattactacgcgctcgtctggaacgcctgccgcgccgccatgcttcagggtgccgatggcaacgctccggcgcacttccgtagccgaccagcgcaaagcagcctctctccggcgcaaggcggcaactctccggtgattccggatggttgggtgctggtgccagaagaacccacccatgaaatgcttgaggctggtgatgaacaattcggaacttatgatgtgtatcgccggatggtagcagcatcaccgcagcagaagtga

SEQ ID NO: 151026 - DNA, 258 bp, Enterobacter cloacae
atgtctgactggaatattgctgcaaagccgcaggaagagcgcgataaggttaatgttgacctggcggcgtccggagtggcgtacaaagagcgcctgaatatgccggttatcgcagaccaagtagcgcgtgagcaaccagagcatctacgcgagtatttcatggagcgcgtgcgatactaccgcgagcagagcataaagttgccgctggcatccgatccgcgttatatcgagatggccagccagaacgagaaaaaataa

SEQ ID NO: 151027 - DNA, 483 bp, Enterobacter cloacae
atgagcccagactcatggagtgctatcgctggttgcgcctctgccgtcgctgctggcatcagtctttttgttacatggaaaggaattaattttcagaagcaagcatttagagaaacattaagaagaaatattcaggatgcactcacttatcaggccgagagggcaaatttatcttctacggggaaaagtgacgctgaatggactttcccgcaatttgcgaacattattctcgccatcgatacggcgagaaatatggtatctcgtatggataaaaacgcaggaatgagcaaggaagaagcgggcgaatttttcttagagcggctgaaccataatatcgtaacctcatttagaaacggatctccacctgatggggcctttcaaagcaaaggtcctatatcggagattcgtgaattagttgcgctatggaatgctaatgcccattttctgggttttagagatgtgaattttaaccctgacctttga

SEQ ID NO: 151028 - DNA, 456 bp, Enterobacter cloacae
atgactctgcccgtagacggcatcaaactccatcgcggtaacttcgcggccataggccagcagattcagccattgttggatgcagggcaatgcttccgccttcaggttaagccatggcgcgagaagcgcagcctgtcgcagaacgcgctcagccacatgtggtacacggaaattagcgagtacctgatcgcgcgcggcaagaccttcgctacgcctgagtgggtcaaagacgcgatgaagcacacctatctcggctacgaaagcaaggacagggtagacgtcgtgtccggcgaggtcaccacggttcaatctctccgccatacgtcagagctggaaactggcgagatgtacatcttcctgtgcaaagtagaagcctgggcgatgaatatcggctgccacctgaccatcccgcagagctgcgagtaccagcaactgcgcgataagcaggaggcctga

SEQ ID NO: 151029 - DNA, 171 bp, Enterobacter cloacae
atgtctactccgctttctcgcgtcatcaccaacgaaatattccgcgttccggcgcgccgccagcgcaagcccgtggttaatccgtccgacatcccgacactgaaaggctacaccgcccgcctggtggatcagaaatggctgcgtctcgcggcacggagggcgcatggctaa

SEQ ID NO: 151030 - DNA, 1191 bp, Enterobacter cloacae
atggcactgacagcccggcaggtcgagaccgccaagcctaaagagaaggactataaactctctgacgaacgtggcctttttctcctggtaaccaccaccggaaaacgctactggcgtatgaaataccgtatcgccggtaaagagaaaaagttatctatcggtgtttatcctgaaatctctctggctgacgcgcgtgtaaaacgcgatgaagccagaaaagtgattgctgatggcggcgatccgagtgagaaaaagcagctcgaaaaactcgccaaaaaaatatccgtcgtaaataccttcagggcactcgccatggagtggcataagcataagtgtatctcatggtcggaaagctacgcagaaagcgttcaggaggcgctggagaaggatattttcccgtatgtgggcaaacgccctgtcgctgagatcctgcctctggagatgctggaagttttacggctgattgaaaaacgcggttcgctggaaaaattacgtaaggtccggcagtactgcaatcagatcttccgttacgccatagcaacagggcgtgcgacgattaatccagctgcggaactgaccggtactctgaccgcaccaaagaccgagcacttccctcacctacaggcatccgagttacccgcgttccttgccagtctggctaattaccatggcagttgcattacgcgtatggcaaccagtctgctgctactgacgggggttcgtacgattgaacttcgcgctgcagaatggcaagagtttgatctggagaatgcattgtggacaatccccgaaagccggatgaaaaagcgccgcaaacatctggtgcctttgtcagaccaggttctgtcgatcctgctggaactccgcacttataccggtcagtatcaactcgtgtttccagggcgctgcaacatcaacaaaccgatgagtgaagccagtatcaacatggttatcaaacgtatcggctacgatggtaaagctaccggacacggctttcgccacactatgagcaccattttgcatgagcaggggtttaatacagtctggatcgagatgcagctcgctcacgtggataaaaacagcattcgcggcacatataaccatgcacagtatctggatggaagacgagaaatgatgcagtggtacgctgattatattgacaatcttctcagttcatcgacaaaaagttag

SEQ ID NO: 151031 - DNA, 1023 bp, Enterobacter cloacae
atgtcaaggctgaacattattggaattgatcttgcgaaaacaaatttttatcttttcagcctttcaccggaagggaagcctggtggaaggattaagctctctcgtgaaaagttgattggctggtttacgacacagtccaggatgattgtcgccatggaggcatgtggtgcttctcatcactgggccagagaaattcaaaagacggggcatgatgttgtgatgctacccgctcagcacgtcagggcttatcagcgtcgccagaaaaacgactataacgatgctcaggccattgccgaagcctgctggcacggaacaattcgcccagttccggtaaaaacgctatctcagcaggatgaacaaacctttttaaaaatgcgacgacttgtttctgaagaaagaacgcagttaatcaaccatatcagagggttaatggcagagtatggtattgttttgcgtaaaggcgcaactgagcttcgacgtaaattacccgagttgcttgaagatgcagagaatggatttacgccccagatgcgtgaactgttacaacggcaatatcagcggctggcggctctggatgatgaactcatatggtatgacaaccgacagcgaaaaaatgccgccggggattcagtatgccagcgcctactttctattccgggttttggtccactggttagtctggcagtgaaaagctggatgggtgatggaaaacagtttaaaagaggtcgggatgcttcagcggctcttgggttggttccacgacaattcagcacaggggggcaacaggttcttctggggatcaccaaatgtggaaacagctacgtcagatcaatgctgatacatggtgcccgagctgttttgttcagatccgcaggcaaaacggatcaacttagctcatgggttaacctggtccgggagaaacgaggatttaacagggcagtcgtcgccctggcaaataagttaattcgtattgtctgggttattatcactcgtaatgaagtttaccgggtttcggtagcatga

SEQ ID NO: 151032 - DNA, 2442 bp, Enterobacter cloacae
atgtcacaagatcctttccaggaacgcgaagccgaaaaatacgcgaatcctatccccagccgcgagttcatcattgaacacttaacaaaacgcgaaaaacccgccaatcgtgaagaacttgccgttgaactgaacattgaaggtgaagagcaaattgaagcccttcgccgccgcctgcgcgccatggaacgtgacgggcaacttgtctttactcgtcgccagtgctacgcgctgccagaacgcctcgacctgctgaaaggcaccgttattggtcatcgcgatggcttcggcttcctgcgcgtggaaggccgtaaagacgacctgtacctctcatccgaacagatgaagatgtgtattcacggcgaccagatcctggcgcagccgctgggtgcagaccgtaaaggccgccgcgaagcgcgcgtggtccgcgtgctggtgccgaaaaccagccagattgtgggccgttactttaccgatgcgggcgtaggctttgtggtgccggatgacagccgtctgagcttcgacattctcatcccgcctgaagaggtgatgggcgcacgcatgggctttgtggtggtggtggaactcacccagcgcccaacccgtcgcaccaaagcggtgggtaaaatcgtcgaagtgctgggcgataacatgggcaccggcatggccgtcgatatggcgctgcgtacccatgaaattccgtatgtctggccgaaagcggttgaagatcagattgaaaacctgcgtgaagaagtgccggaagagtccaaagcaggccgcgtggatctgcgcgatctgccgctggtcaccattgatggtgaagacgcccgtgacttcgatgatgccgtatattgcgagaaaaaacgcggtggcggctggcgtctgtgggtggctatcgcggatgtgagctattacgtgcgtccgcacacgccgctggataacgaagcgcgcagccgcggtacgtcggtctacttcccgtcgcaggttgtaccgatgctgccagaagtgctctccaacggcctgtgttccctcaacccgcaggtggaccgcctgtgtatggtctgcgaaatgaccatctccagcaagggacgtctgacgggctataagttctacgaagcggtgatgagttctcatgcgcgcctgacctataccaaggtctggcatatgttgcagggcgatcaggatcttcgcgaacagtacgcgccgctggtcaaacacatcgaagagctgcacaacctctacaaaacgctggatcaggcgcgcgaagagcgcggtgggatctcgtttgagagtgaagaggcgaagtttatctttaacgctgagcgtcgtatcgagcgtatcgaacagactcagcgtaacgatgcgcacaagctgattgaagagtgtatgatcctggcgaacatctcggcggcacgtttcgttgagaaagccaaagagcctgcgctgttccgtattcacgacaagccaaccacggaggccgtaacctcgttccgctccgtgctggctgaactcggcctggagctgcctggcggtaataagcctgagccacgcgattacgccgagctgctggaatccatcagcgatcgtcctgacgcggaaatgctgcaaaccatgctgctgcgctccatgaagcaggcgatttacgatcctgaaaaccggggccactttggtctggcgttacagtcgtacgcgcactttacctcgccgatccgccgttatccggatctgtccctgcaccgtgcgatcaagtatctgctggcgcacgagcagggtcataaaggcaacacgaccgaaaccggagggtatcactactccatggacgagatgttgcaactgggccagcattgttccatgaccgagcgtcgtgcggatgaagcgacgcgcgacgtggcggactggctgaagtgtgactttatgctggatcaggtgggtaacgtctttaaaggcgtgattgccagcgtcaccggctttggcttcttcgtgcgtctggatgagctgtttatcgacggtctggtgcacgtttccagcctcgataacgattactaccgcttcgaccaggtcggacaacgtctgatcggcgaatccggcggccagacctaccgtctgggcgatcgggtggaagtgaaggttgaagccgtgaatatggacgaccgtaaaatcgacttcagcctcatctccagcgagcgtgctccgcgtaacgtcggcaaaaccgagcgtgagaaagcgaaaaaaggcggtaacggtaaagcgggcggtaagcgacgtcaggcaggtaaaagagtaaactttgagccagacagtgctttccgtggcgagaagaaacagaagcccaaggcggcgaaaaaagacgctcgtaaagcgaaaaaaccgtcgaccaagacccaaaaaatagcggccgcgaccaaagcgaagcgcgcggcgaagaaacagcaggcggagtaa

SEQ ID NO: 151033 - DNA, 300 bp, Enterobacter cloacae
atgagcattatcactaaagaatggttacagaagactattgctgagtttgagtccacttgcgacgagatccccttcgggatggacgaggacgacgcgaagattctacaggtgctgaaattgaagcttgcctcgatggagtttcccccagcgccaaacgccaacgtcgacgaactgactatgtgggttaagcggctagcccactccctgaggaacgccaaatcaggcagcaagttacccgatgatgctatggcctatttgagcgcaaagggactgattggcgttgaagatgctttgcgatga

SEQ ID NO: 151034 - DNA, 387 bp, Enterobacter cloacae
ttgactgacattaacgtgaaaaagctgactgaccacgatctggatgagcttaagcgagatattgcgcgagaaattgaacgccgtgccagtggcccgacccgtgtcgtttatgtggtgactgagtggggagagcatcgggcctttgctgattttcgctgcgcggcgatctgcttttctgatattgccaaaggcgtaatggaggatgcggtaactgaagaaggtaagaaaatttatgatctgaacaaaggcacactgctttacggtatccgaccagttgaaatggcgctcggcgattacgaagcgaaggtcgctcagaaatacttcgacgatgtttgctacgaaaaacggttacatgaatttttccctggtacggaggaagcatcatga

SEQ ID NO: 151035 - DNA, 351 bp, Enterobacter cloacae
atgatttatcgcaggggatgggttcccgtcttatggcggcacgagctggagaagcggctcaaagagcaggggttcgataactggaaagagatctgtaattttctttgcggtgaaggggattattacgctgagtcgtcaaaagtacctgagcagtacgattacgtggtagtcgataatactaaatggatgggacggcgtgatgcaacgttctggcagcgcctgaaccgtttgtggttcgttccgctgtacctgctgacgattccgttccagtggctcattcgtggccgtatggggtttgaatcaacgtcgaaggtgggcgcgttcgtcagccggattaccgggctaaagtga

SEQ ID NO: 151036 - DNA, 126 bp, Enterobacter cloacae
atgaaacattccattatcattctggttttgttcgttgtcttgaaaacgtttagttcgactgaaggcccggcgattaatatcaccggtaataccttacagttcggctcgttcactcagaccaagtaa

SEQ ID NO: 151037 - DNA, 777 bp, Enterobacter cloacae
atgaacgcactttcagtcttctcatttcaggaaagccacctgattcgggtggttcttgtcgagggagagccgtggtttgtagctgctgatatttgcagtgcagccggtattgatacaacgggtatcagaaagttggatgaagatgaaaagggtctgcatttaatgcagacccctggtggttatcaaaatgtctcgattatcagcgagtcaggtctctataccctcatcctccgctgccgtgacgcggtgaagcagggaaccaccgcctggcggttccgaaaatgggtgacgaacgaggttctgccagctatccggaagaacggggagtatgcttttgtggaaccagtgcctaagagcgctggtgaacctctggactggaggcaaaaagaagaactgcgggggctgataaacgatatagcccaaagcttccagtaccgtaatgcatgggttagtggggtctggatggctctgcgccgcgcatgcaggaacccatcaccgaacccaatcactgttgatgatctcccggcaatcatcgccgagctgcgccggatattaactgccgcagaaacggccctgggtaacatgcgagtttacgaacgggaactgctgcgtgatgtagttcgtggcggtcgccggagtatgtcgtgcggggagttaccgatcaccgatattgatacggaactggagaaggtgctgccagcacattttgagctggccatcgagaagctggagacgctttccaccaaactaacctcgtcagcaattaccgaaaaatag

SEQ ID NO: 151038 - DNA, 1896 bp, Enterobacter cloacae
atgagcaaggtaaaaattggcgagttgatcaatgcgcttgtgaatgaggtagaagcaattgatgcctcggaccgcccacaaggcgataaaacgaagagaattaaagccgccgccgcacggtacaagaacgcgttatttaatgataaaagaaaattccgtggaaaaggtctgcaaaaaagaataaccgcaaatacttttaacgcttatatgagcagggcaagaaaacgctttgatgataagttgcatcatagctttgataaaaatattcataaattatctgaaaagtatccgctctatagtgaagaattatcttcatggttgtctatgcctacggctaatattcgacagaacatgtcagcgctacaatctaaattaaaatcaataatgcctcttgccgaagatctatcaaatataaaattaggtgttaaaggcagtgatgcaaaattagcaaagctaacaaaaaaatatccagattggagttttgctattagtgatttatgcagtgatgattggaaggaaagacgcgactacctttataagttgttccaacaaggctcttcattgttagaagatctgcatcagctcaaggtcaaccacgaggttctgtaccatcttcagcttagccctgcggaacgtacatctatacaacagcgatgggccgatgttctgcgtgagaagaagcgcagtgttgtagttattgactacccaaaatacatgcagtcaatttatgatattttgaatagtcctgcgactttatttagtttaaacactcgttctggaatggctcccttggcctttgctctggctgcggtatcgggtcgacggatgattgagataatgtttcagggtgaatttacagtttcagggaaatataccgttaatttctcagggcaagcaaaaaaacgctctgaagataaaaacgtaaccagaacgatttatactttatgcgaatctaaattattcgttgaactattaacagaattacgttcttgctctgctgcatctgatttcgatgaagttattcagggatatggtaaggatgatacaaggtccgaaaatggtagaataaacgctattttagccaaggcatttaatccttgggttaaaacattctttggcgatgagcgccgggtttataaagatagccgcgctatttacgcccgtatcgcgtatgagatgttctttcgcgtcgatccacggtggaaaaacgtggacgaggacgttttcttcatggagattctcggacacgacgacgagaacacccagctgcactataagcaattcaagctggccaacttctccagaacctggcgaccggatgttggggacgaaaactcccggctggtggccctccagaaactggacgacgaaatgccaggctttgccagaggtgacgccggtgtccgtctccatgaaaccgtcaagcagctggtggagcaggacccatctgtaaaaataaccaacagcactctccgggcctacaaatttagcccgacgatgattagccggtacctggaatttgccgctgatgcattggggcagttcgttggtgagaatggccagtggcaactgaaggttgaggcgcctgcaatcgtcctgcctgatgaagatggcgttgatgccatcgacgaaccggatgatgaacctcaggacgacgagctggacgacgatgaaattgaggtagatgaggatggtgccgaagagcataccgaagaaaaagagccagaagaaaatcagcaggctgctttaaaaccagtcttcaaacctgcaaaaaacaacggagacggaacttaccagatagagtttgagtacgatgggaagcactatgcctggtccggcccagccgatagccctatggcagctatgcgatctgcatgggaaacctaccacagctaa

SEQ ID NO: 151039 - DNA, 777 bp, Enterobacter cloacae; identical to SEQ ID NO: 151037

SEQ ID NO: 151040 - DNA, 231 bp, Enterobacter cloacae
atgaaccagattgagctaaacgcccaaggcctgctggagtcgattgaggagcgcctggcgcaggtagaggcgctcgtatcttctgcccaccgcactatctccagttatgaggcttcactgtatttgcaggaggctgccgaactccttcaggtggcgcgtgagcttacccaagaggctcgcggttgctccctgtccttatctgaacagctgaaatcaggggaggcaaaatga

SEQ ID NO: 151041 - DNA, 165 bp, Enterobacter cloacae
atgttcaaattcaagtttgcagctgttgtccgcacggacaaaaaatcccatattcaccacctctccactattgcatcatccgagcgagaagctcgccgccagttcgccagccgttttgtcctcgttctgtcagcccgtatcccggtcagcgaggtgatcgcatga

SEQ ID NO: 151042 - DNA, 126 bp, Enterobacter cloacae; identical to SEQ ID NO: 151036

SEQ ID NO: 151043 - DNA, 351 bp, Enterobacter cloacae; identical to SEQ ID NO: 151035

SEQ ID NO: 151044 - DNA, 387 bp, Enterobacter cloacae; identical to SEQ ID NO: 151034

SEQ ID NO: 151045 - DNA, 210 bp, Enterobacter cloacae
atggctgatttactgctaacgctgctggccacaggtgtcttatcggttctttggtactggtatcggtcgattaaggcgctgaagcgttgccagcaagatacccaggtccgccgcattaaggctcgtggcgcagcctttgcgagcaactaccgcgtgtggaagtgggtttaccgggaaattttggttaactggaggggcgagaaattttga

SEQ ID NO: 151046 - DNA, 4005 bp, Enterobacter cloacae
atgaccttacaagaattctacgcggagcgctttagcagcgatccgtattcgttgcttgaagcagcacgggatgagctaagcgagctggcgcagatggccggtatcaactggcatgcctgcgctgacagaatccagctgaatcctcgtggcggcaaagaacgctacaccacgtacaataatgctttcccagtagcgctggaaaagagcctcaaaggccgcgtcgaaatctactcccgactggagcagagcaaagacggcatcagttaccccttcgtaaacttcgtccataaaggcagcgatgccggttcatggagcggcttctctttcctgttttctgaataccgccgtgagcagcagcggaactgtgcgaccgtggtcgctcagccagaagaagaacgcgcgcgcctggagcgccaggctgaagcacgccgccgccgcgtcgagatgaaacgcatcaatgacttgaaaaacaaccagatagagcatgaacgtttgctcggctggttggcgttccatcatgcctgggaacaggcgccagctgaagatggttcctggccttatgcggttaaaaaaggtattcgtgacgtatttagtgcttgcgatatacgtcgcgtgaccagtcacgacagtgcaaaatggagccgtgggccaacgacttatatggctattcctctgtcccacctggacggaagaaaagacggacgaattgttggctggcaacgtatcgatcaccagggcgggaaattccagaccagcgccatcacgaacggcgatttcgtcgggacgtgtttcgttattggcgacctgaaaggggcgcagaatgtagccgtaacagaaggcttcgcaacaggcgcttctgtctggctggctaccaggaaggacccgaaaaaacgctttgacgctgtggttgtcgcgatatcagccaacaatatgatccacgttgtcgagcagctggttaacgtctatcccgcagcaaaaatcacctgcgcactggataacgaccgcaaatcgtcggctgagggaaaaggcaataccggtctgcgcaccggctttgagattctgtcaaagttccacggcataaagtgtgtttaccctacatttgaagatgatccccagctggagtgcagcgacttcaacgacctgcataaattacgcggcctccgcgaaacctcgcgccagctgtttgccaaatcaaaccgccttaacgccagcaccgacctgctcacgctgacgctgaacaagctgaaaacccttaagcgggataaccgccgcacattcgccaaagagctgctgaacgcggtcgatattggcatgctgacatgcccggtaccgaacagcccatccgatctgttcaacatgttctgcatcgttctgcgggacatggggcttgagaacgtctaccgcgccaccgtcaaagaccatattgcccgtcgcctgaacagaaaatgccgcacggcacaggcccctcgttcattcagcgatcgcattaccgacccaaacaaacgaccacagcacattacctataagcggttcgaaacatcggtcatgaccgaagatgttctgaagtacgtgcaggagctacaggggatcgtaattgtccgtgccggcatgggttctggtaaatcgacaggcctgctgcgcccgttgatgcataatgcagaacgcggcgtttctgtagcacacagggtgagcctcataggtgggttatgggaaatgatgacagaagggaaaggcgctaaggccgacattctgcattaccaggaccctggctatcaggaaatggcgccatacgccagcaagctgaccatctgcataaactccatcgtgaagggctgctggcaaccactgatgcgccagcacgactatttcggttttgacgaggccacacaggggctccgtgccgtgctttcaggccgcgcaatggaaaacccggtcgcggtgttcaatacgctgattgacgcgctggccagaacagaattacacccgatcatggtggatgctgatgccaacgatctgctggttgacctggcagaactggcaatgaagcgccgcgaagagctggggctaccagcatggctgcaaatccacgttatcgaattgccggtcgacgttcgcaaccgcgaaactggtgaacctatccgcgtcttttacaccgaaaaggatcgcatcatgtccgaggtgatgaaggccgtagagctcggtgaaaaaatcatgctggccaccgacagttccacgttcgccgaggacgttaccgccaccctgcgcctgaattacccgcacaagaagttcctgtgcgtaaaccagaaaagcaaaccagagccagaggtggaggagttcaccaacaaaccgaagaagatggtgaaaaagtacgatggcctgatttacagcccatcaatctcatccggcgtgtccatcgagcagaaacacttcgatcgccacttcggcatgttctgcggtgaagtggtccccagcgacgctatccagatgctgcgccgcgaccgtaccgcgaaagaatttatcatcggcttcgataaggttcgcgccaaacgtgaaaccgatcctcaaaaaatcgaacgcgcttacgtccaggcacttctggccactgccggtatgaatggcgagctgacggacgttgtctttgacggcgacacaatttccatgggtgtggccaacaccgatttcaccaggatgaaaatcaaggcatcagccatcgaagcgacggcgcgcaatgattacgccagcaacatgatctgcattatgcacagcgacggctataaagtttcgccgctggccggagacccacaggcgaatgaagtcgggaaggagctgcgtaaggaagcgcgggaaatcgtctgggaacaaacgctagaccttcacctgaacatcgatacgccggacgaatcagaacgcgaagcgattctgaaaaaacgagcgctaaccctggaggaacaggcgaagcttgtccgctgggacatcgagcacgagctgaagctcccggtcgacgaaggtaccctgaaattctacttcgacggcgctcgagataaagtccgccgctatgaaaccatgcggctcgacgaggttacagcgcgtcgctacgaccgcgaggagtcggcgatcaactttacctactcattcagacaagccgggcagtgggaatactttgtcgtcacggcaatgacccgcgaacaggccgatgaagcattccaggctaaacaccctggcatcgtcgattacaaagtcaaaagcctgcctgtagtcgaggtggccatgcgcggcttctatggcctcaaatcgacagcgctgcgccagtactttatcgactgcggcatcgacccggagacaatgacaggcgaggccacccaggagcgcctcaaacgcgccagggataacctcatgaccgccgaacgccgggacatgttgaacaacgttttgcgcatcggtggttttatgacgccgaaaggtaaaccgaaggtgccggaagccctgtttaaaaacatctgtgattcactcggcctgaagaccgacaagcgacgcgccagggatggggataagcggcctactatccgcttcgttgaccagcagtcggcagagttcatgatggacatcctcgccaaacgccaggaagacggcttgagtctacagacgcgtaaaaccgagaagaccgccaacgaagtggatcacgatttggatctcaatatatatatggatcataaatcgcgatccacaagcgagcaggataccgacgcccctcattcagtaataaccgaggcgctggccacactgccggttccggttcctgaggcctgggcgttgaccgcgctgtccggcgacgagctggcaacgatggctacgtggtcgccagccagcatcgcgatgacctttgcctctctgtacctcacagagttcatggagcgcctctccagccacgagctgcgaagtttgcgtgaatacatcaccggaatgactacgggcggctacggcgcacaggagacgttctatggctga

SEQ ID NO: 151047 - DNA, 609 bp, Enterobacter cloacae
atgattaacagtatgaaaacacgaggcgaacgactgaaagcacgccgtttagagctgaaactgacgctgaagcaagtggcagaagctgtaggaatctctcttccgggcgtccaaaacttagaacgtggcgacgtaatgccgtcgctggaaatcgggctgtcgctggcaaagtgcctgcgtaaacccgtgcaatggatactgtatggcactgaaactgatccagaccgcgttcctgttattggtacgacagaaagtgggccggataaagactggcagcctggagaacctgccaacacagagcgattcctgccgtttgtgagtcaacggagtaccgtttacgcactgacggtcgggaaccagattcagcgaaactaccagccgggtgacgttatcctggtggattcctcgctcacgcttgtaccgggtgaggatgtattggtttgtgataataacggcgagatcacaattcaacgattagcccgttatgacgagcagcactactaccttgatagtgctaactctcaacgggttatccatgataaaagtgatcttcaatttgtgcaccaagtagtcggtacgatcaaatcgttcatggttgagggtagatga

SEQ ID NO: 151048 - DNA, 738 bp, Enterobacter cloacae
gtggaactaaatagcattcgggcctgcgtgtccacggcactgtcagatattaactatctccagcgcggcatccttgaggttcagctggagcagctgcgtctctccagctccggccgttacactgaaaaaccaaccagaacgattcgtttaggtgataacgcatctgacgagataaccatcgcagccgagcctgttcgttatcacgtaggtaaatccttcaaacagtcttcaatgcttctcactgaattagatttcatgaccgccagctggcgtcgggctattgagcagctaaatagtgaagaaaccgcatggttacattattgctatggcaccaaacaaaattataagaacgatgtgattatttgccagtggctgtggctggatttcttaatagaacattccagggctggctttaagaaaatgaaagcccccaccaaaaaaatcatgcaaaagttaacttactacggaatacaggaagttaaatctgaaattctgcgtgatgaacaacgggatgagcaagaccgtgacgaacatataagttttttactgggtatatctgtggatagctggcgtaaggattataaaaaacgctggttattaatgaaatcacgatgcatgcatcttaacgataccgcgttattaaatgcggcggagaagcgcagtgaaatcatcgaaagccatcgggcaagatgtgccaatgtgcctgtgtcagcaggttatgtacaggaaaccagataa

SEQ ID NO: 151049 - DNA, 924 bp, Enterobacter cloacae
atggttaatatgcaaaaaaccattttggcgatgattatacataaatggctaaagagcgattatgttgtcatcgacacggaaacaaccgggcttggtgaagatgccgagattatcgaaatagcgatcatcaatatgcgcggcgaagtgttgctcgatactcttgtgaagccgacccaaccaatccctccggaagtaaccgaaattaaccacatcacaaacgaaatggtagccaatgcaccagcgtggcgtgatgtgtttcagatagtgttgatgattatcagtggccataaatggctggcctggaattccggtttcgacgctcgcatgctggatcagacctgcttatacactgggatttacgctaacgaacaagcctattacgcagcccttgtaacgtctcgcattcacaccagccatattgacgccaaagccgtttacgaccagtggtatggtgagttcgacgagaagcgcaaagcattcaagcgccagagcctgacaaccgcagctgcgcggcacggtgtatcagtggagggagcgcaccgcgccctggcagattgcaagatggttctggccgttctgcaaaaagtcggctcccccgttacccaaacagcaaacgttgcagaaacagacctaccaccctgcccgttctgctatggccctccttcactgttcacctattactttgacggggttgagcgtaagccgctttataggccggtgaattacggcgatgacgggctgtatacaggctcttttgtcttttgccatgagtgtggcgcccagggcgaagaaatagagggttacgcctgcgacgattcacacgttgagcagctcgaagcggcggctcggtgtgtctggtccgatagaaacgagcgccactatgacctgtatgtctccagtcaggagaacaagtcatgcggctga

SEQ ID NO: 151050 - DNA, 243 bp, Enterobacter cloacae
atgcggctgaaaatgtacaccccaaatggccatgagattatcgactcttccgaagtcgctcagttttatccggatgcggccagcggcaaccagctaaccaaaattgagacactctcaaccacaggagagagaaagtcggtgctggtaaaacactcattccaccaagttacgtgcgcactggccacggcatggagaatcgacgagcaaaaggccgagcaacaacttacaggagccatccaatga

SEQ ID NO: 151051 - DNA, 300 bp, Enterobacter cloacae; identical to SEQ ID NO: 151033

SEQ ID NO: 151052 - DNA, 327 bp, Enterobacter cloacae
atggcactaacaccagcagaacggcaaagaatccgccgtaagaagctgaaaaagcaagggactaccaggcgggactgggttctggaacccgaggaactgcgcatgctcggtgagatttgcacgcagcgccgtccgggccgagagccgtattcagaaaatgaagtaattggactactgatccgcaaaaactacaaagagctgcaaaagaaactttccggttcgtgtacgcggtgtgggcaggaacttccggtatctgagtgtctgttcgatggcgagggtacgtgccatctgaccactctcagattgaagctggccattaaagcgtga

SEQ ID NO: 151053 - DNA, 222 bp, Enterobacter cloacae
atggataaaaaagcgttactactcgaacgacttcgccagagaagcgaaagcagtctggccagcggaggagacggttttattttcccctcaatgctggcgttcgatatcggtctgaatacaaggacaattcgggaaattctgaacaatgctgtcagggatggaacactggaaaaaatggagcgtggcgttggtcgttcgcataagtaccggacaattcagtag

SEQ ID NO: 151054 - DNA, 288 bp, Enterobacter cloacae
atgaaagtaaaaggcatcccgtttaaccaggttaaagagaagctgctcgacaccccggaggccatccggggatatgaggaagccgataaggagctggcgatggtagaaatgctatacgaaatgagggagaaagctggcctgacgaagtctgcgctggccgaacgtatggggttgcaaccgtcagcaattagccgcctggaaagcaacccactcggtgccagcatgaagacattatctcgttacgctaaggcttgcggcgcaagcattgatatacatgctgtgtactga

SEQ ID NO: 151055 - DNA, 312 bp, Enterobacter cloacae
atgtttaacgtgataacccacccggcagcgctggatgagctacaagaactacctgatgagcttcgcggtcgtatgacccggcttatcgagagactggaaagcgaaggaaacaagctgaaaatgccccacagccgtgttattggcggagggctattcgaattaagggtaggggacaagaacatcgcgagaacgttgtacgcttacgctgttggcaacgaaatctatctactacacgcatttgtgaagaagacgcaaaaaacgcccgcgaaagcgattgatatagccagaacgcgtctgaaggagatgaactga

SEQ ID NO: 151056 - DNA, 222 bp, Enterobacter cloacae
atgaattatcaaggcaacgaaaaaatgcgcaaagacgcggcagatatttccaacgaactctatgagttgtggcaaaaagttaaacgttttgaacgtgaatacagctttaacagcaaggacctgacagagcgccttgcaggccgtcttgttggcacgatggaacctaaactggcggaactgaataaatttatggccgatgtcgattatcagttcgaagactaa

SEQ ID NO: 151057 - DNA, 228 bp, Enterobacter cloacae
atgaacgcgaaagaaatacgccggaacatgaccgaggaagcgttaagtattgagtccgtaatgcgtgggcatccacgcataagcctggcagagctgagtaatgcctgccggataagcgaggcaacagcagagtttatcgttgagcagatggtttgctttggggtcgcacagcgcggcgctttcggacgatactcactcacgaacgagtataaaaaaggaattttctga

SEQ ID NO: 151058 - DNA, 1089 bp, Enterobacter cloacae
atgttaaaaactacacaaatcaacggcgcgcagctcgtttgcgcagattctctgcaattcatcaagaccatccccgataattcagtcaacctgatcgctgttgacccgccatattttggagtgaagtcgaacgactgggacaaccagtgggaaaccgatgcagaatttttgggctggcttgatgaatttctggcggagttctggcgaatattggccccaaatggcagcctgtatatgtttaccggttcgcggcttgcgtcaaaaatagaactgcttacccgcgaccgtttcaatgttctgaaccacatcacctgggctaaacctagcggtgtatggcggcggcaaaataaagagagcctgcgtgcatttttcccggcaaccgagcgcatcatatttgctgaacattacggcgcgtctggctatgcaaaaggccagtcggggtatgcaagtaaatgtgcagcgttgaggaaagacgtattttctccgttgattggggcatttgcgtcagcccgccagcagttgggtatttcagcagcagacattaacgctgcgacaggtaaaaagatgtgttcgcactggttttcagcatcgcaatggcagctgccggggcttgatgatttcaacaagctacacggtttgttccagcggcgtgctgaagtcctcggtgttcaatgccctccgccgtttgatgtgggctataacgaacatgaaaaacagtatatcgacctaaaggcacagtacgatgcggtaaaagcgcaatatgacgatctgaaagctcagtatgaagggctacgccgtccgttctctgtaacagcagatgttccctatacggatgtatgggtatacccaccggttcagtattacccagggaaacacccatgcgaaaagccagccgaaatgatggaacatatcatcaggagcagctcgcgccccggagatgtggttgctgacttcttcatgggctcaggtagtacgattaaggaagctctgaagctgggccgtaaagcgataggtgttgaaattgaagaagagcggtacctgcaaacagtagaagaagtaaaagaattagtagaaaaagaagatagctga

SEQ ID NO: 151059 - DNA, 306 bp, Enterobacter cloacae
atgagaatgaacgatcactcagggaacatcttcacgcaattatttgcgtggcttggaaccatagcggcagcgctgggttttaccacccaggacatgatttacatgtttttcggggctgtggggcttctaatttcccttgcgtctttcatcaacggacgaattgatgcgcgacgccgtcgcaaagaagatgagaagcgaacggcaatgatacaggcttacctggaagaagttagtgataagcctattgaagatcgcccggcagcggtgagcgtagttgctgatgtactcgctaaggcaggcgaataa

SEQ ID NO: 151060 - DNA, 537 bp, Enterobacter cloacae
atggctaacagggcgaaattaagcgcagcggtactgagtttaattcttgctggagcgtcagccccgcaaattctcgaccagttcctgaatgagaaagagggtaacagcctcacggcgtacaaagatggcggtggcatctggacgatttgtcgtggtgctacgaaggttgatggtaagccggtgcggcaaggtatgaaattgacgcaggccaaatgcaaccaagtgaacgctatcgaacgcaataaggcgctggcgtgggttgaccgcaatattaaggtgccgctgaccgaacctcagaaagcggggatcgcatctttctgcccatacaacattggccccggcaaatgtttcccgtcgactttctataagcgtctcaatgctggagatcgcaaaggggcatgcgaggcgatcagatggtggataaaagatggaggccgcgactgccgactgacaaagggccagaagaatggctgctatgggcaggttgagcgacgcgaccaggagagtgcgcttacctgctgggagatagaccagtga

SEQ ID NO: 151061 - DNA, 255 bp, Enterobacter cloacae; identical to SEQ ID NO: 117977

SEQ ID NO: 151062 - DNA, 204 bp, Enterobacter cloacae
atggcgaaaatcaaactgacactggaacagattaaggctctggccaaattcgcagaagaagaaggccagcctgaatacactatctgtcatggccaaatcccaggcttcgataactttcctgattacgatggattgattgcgtattcggggtcagaagagcacagcgttctggctctggaagataaagggcagggcgatatctga

SEQ ID NO: 151063 - DNA, 759 bp, Enterobacter cloacae
atgaaatatttatcgttgcaacaggcgatgctcggcatgcgagtaatcatgaccgacgatggcctcattctgaaaagcccggcaggtagtgcacattacgatttgaaaggtcgccgccatacagtttggggtgatgcttctttcttcccggagcatatgcgcgtgaaggataagcgtaagcctgatctcagtcgtgttgtttttgaaaaagactgcacgactatttacggagctaatggaaaaccacgagtacgcattggtaattgggatacttcgaaggaaccgaaaggccatcaaatatggccaggcgaggtatttactgtcaatgacagtcaggtgttcgttaacgatgcgaagattggcggtggcgtattgtctacgaactatagcgtgaagatgaacgtggattatgctggcaaacggtacgcagctggaatgagcatcggtcagccaagcgagccgcaggcaacggttaaggctgatcgctttaaggtgcaggaagccgcttcatctatcatcgagaacgccgtcgcaacaagcgcgaagacgaagtttaggcttggcgatgaaatgaagcaggccgtcattgatgccgtgcgtgaaagcgatttgttcgcatcactccgggcaaatgttgatgctcagacagcttcaatcgttggcctgcaacaggcggtgcacgatgcggtaaatgatgctctccgcaacgcgctcaagccaggcggtgcggtatgggctcggatgaaacatgggttttga

SEQ ID NO: 151064 - DNA, 1842 bp, Enterobacter cloacae
atgacagctgtcgaatgggccgatgcgcattattaccttccgaaggaatctgcttatcaggaagggcgctgggaaacactgccatttcagcgcgcgatcatgaatgcgatgggcagcgactatattcgcattgttaacgtaattaagtcggcgcgagtaggctattcgaaaatgctcctcggcgtcattgcttatttcatcgaacataaacagcgtaacgagttgctgtggctaccgactgacggcgacgcagataatttcatgaagtctcacgttgagccgacgattcgtgatgttccctcattgctgtctctcgccccctggtacgggaaaaaacacagggacaacaccctgtccatgaagcgttttacgaacggacgcggtttttggtgcctgggtggtaaatctgcaaagaactatcgcgaaaaatctgtcgatgttgttggttacgatgagctggctgcgtttgacgcagacattgagaaagaagggtctccgactttcctgggggataagcgtattgagggttctgtttggcccaaatccatacgcggctcaacaccaaaattgcgtggaacgtgccagatagagcgtgcagcaaaagagtccgggcattttatgcgttttcatgttgcatgcccgcattgtggtgaggagcagtacctcaaatttggcgatcgggatacgcctttcggcttcaaatgggagccggagcaggctgagacggtctactacctttgtgaacataatgcctgtgtcattaagcagcatgaactggacttttccaacgctcgttacatttgcgaactgacaggaatatggactcgcgacggacttcgttggttctcatcttccaatacagaaatagacccacctgaaagcgtaaccttccacatctggacagcttatagcccgtttaccacctgggtacagattgtgaaagactggttcaaaacgcaaggtgatacgggtaaacgtaagacattcgttaacaccaccttgggtgagacgtgggaagcgaaaattggcgatcgccctgatgcggatgttttagctgagcgcatagagcactttgatgcagccgtacctgagcgagtggcatatctgacggcgggtatagattcccagctcgaccgctacgaaatgcgtgtatgggggtggggaccgggtgaggaaagttggcttatcgacaggcaaatcatcatgggacgtcacgatgatgagtcaacgcttgcgcgtgtggatgaggcgattaacaagacatatacacgcctaaacggtgtagaaatgtctatttcccgtatttgctgggatatcggtggtattgatcccaccatcgtctacaaccgctcaaaaaaacacggtttgtttcgtgtgatcccgataaagggtgcttcgatttatggaaaaccagtggcgaacatgccacgtaagcgcaacaaaaacggtgtttatctgactgaagtgggtactgataccgcgaaagagcagatttataaccgcttcacgctgattgttgaaggtgacgagcctctggccggtgccgttcacttccctaataaccccgatatttacgatctttcagaggcgcagcagttaaccgctgaagaactggtcgagaagtgggtcgatggtaaaagaaaaatcatatgggacagcaaaaaaaggcgaaatgaggctctggattgcttcgtttacgcactggcggcgcttcgtatcagcatatcacgctggcagcttaaccttgattcgcttcttgccagcctgctggaagaagaaggctcccgtaacaataacaagaccctggcggattacgcgcgggctttatctggagaggaataa

SEQ ID NO: 151065 - DNA, 1590 bp, Enterobacter cloacae; identical to SEQ ID NO: 117971

SEQ ID NO: 151066 - DNA, 1344 bp, Enterobacter cloacae
atgacgcccgagctgcgtaatcttccacatatcgccagcatggcctttaatgagccgttgctacttgaacccgcctacgcgcgggttttcttttgcgcgctggcagggcagttgggaattacccgtctgaccgattccgttactggtgtcacgctgggtgctgaacagatagcagagcccctggcgctgtttggcgatgatgatgatatgggaccccggccatcacgtagctatcaggtggcaaatggaatcgcggtgttgccggtttctggcacgctggtcagtaaaaccagatctcttcagccctattctggcatgacgggctacaacggaattattgctcgcctgcaacaggctatcagtgaccccggcgttgacggcattctgctggatatggacacgcctggcggaatggtgtcgggggctttcgactgtgccgatatcattgcccggatgcgcgatattaaacccatctgggctctggcgaatgatatgaactgtagtgctggccagctcattgccagtgctgcatcgcgcaggatggtcacacagacagccagaacgggctccatcggcgtaatgatggctcatagcaactatggcgcagcgctcaaaactaacggcgttgaggtcacgttgatttacagcggtgatcacaaggtcgacggcaacccttacggaaaattacctgaagacgttcgcgctgattttcagacgcgtatcgatgccactcgtcagatgtttgccgaaaaagtttccgcttataccggtatgtccgtgcaggccgtactggacactgaagcggcagtattctccggccaggaatccgtagataacggactggccgatgagcttgttaacaataccgatgcgctcggcgtgatgcgtgaagcactcgacagacgcaaaaaaataaccactggaggaattatgccatcaccttctgcatccgcagccaccaataagacagctgaacaggcaacaactcagactactgcaccggctgaacaggtcaccaccattgacacgacaaccgctgccgcagctacccatgaagatgtcagtgctcagatttcggcagccgtgtccgcagagaacggtcgcatcatgggaatccttaattgcgaagaggcgaaagggcgagagtcgcaggctcgagcgctggccgaaacaccgggtatgacggttgaaagtgcgcagcgcattctggccgccgcaccacaaagcgcccaggcgcgcaccgacacggcacttgatcgtctcatggaaacagcaccaggcgcactctcagcaggcagcgcatcttctgatgctgcggacgatttgttaaacacccccgtttaa

SEQ ID NO: 151067 - DNA, 333 bp, Enterobacter cloacae
atggcaactaccgaagttttcactcattaccagccgctcggtaacagtgacccggcgcataccgcgtatggtcctggtgaattgacggcatccacgccagcaatgacacccctcatgctggatgctacttctggcaagctgaccgtctgggacggcgctcacgctggcgcggcaacgggcattctggctgtaacagcagatcagaacagcacagagctgacatatcacaagtccggttctttccgtcttgaagatgtcctctggccatccgctgtcaccgacgaaaatattaagcgtaacgcgttcgccggaaccgccatcagcatcatttaa

SEQ ID NO: 151068 - DNA, 1026 bp, Enterobacter cloacae
atgtccgtttacactactgcccagctgctggcggtcaacgagaagaaattcaaatttgatccgctcttcctgcgtatctttttccgcgaaacttatcccttcagtacagagaaggtctacctgtcgcaaattcctgggctggtcaatatggcgctgtacgtctcgccgattgtctccggcaaagtgatccgatcccgtggtggcagcacatctgaatttacgccgggttatgtgaagccaaaacacgaagttaacccactgatgactcttcgccgcctgccggatgaagacccgcaaaatctcgccgaccccgtctatcgccgtcgccgcatcatcctccagaacatgaaggatgaagagcttgcgattgcccaggtcgaagagaaacaggcagtagcggcggtgctcagcggaaaatacaccatgaccggggaagcgtttgatcctgttgaagtggatatgggacgcagcgctggtaacaacattgtccaggccggtgcggctgcgtggtcctcccgcgacaaagaaacgtatgacccgactgatgacattgaaacctacgcgctcaacgccagcggtgtggtcaacatcattgtgttcgatccgaagggctgggcgctgttccgttccttcaaggcagtgaaggagaagctggatacgcgtcgtggctctaactctgaactggaaaccgcgctgaaagacctgggcagggcagtttcctataaagggatgtatggcgatgtggccatcgtggtctactccggccagtacatcgaaaacgacgtcaaaaagaactatctgccagacctgacgatggtcctgggtaacactcaggctcgcggcctgcgtacctatggctgcattcttgatgctgatgcccagcgagaaggtatcaacgcctcgacgcgctacccgaaaaactgggtacaaactggcgacccggcacgcgaattcaccatgattcagtcagcaccgctgatgcttctggcagacccggacgagttcgtgtccgttaagcttgcataa

SEQ ID NO: 151069 - DNA, 444 bp, Enterobacter cloacae
atgacagagaaagaaaagttgatcgctcggctgagtgaacttggtactcagcttaaccgtgacgtaagcaccagcggcacgattcaggaacttacgatgcgtattgctgaactcgaagaggagctggatggcgacactgattcggttgacggtgaaaacggagaacaaaattcttccgacagcgccgacagcgccgacagcgccgacagcgccgacagcgccgacaacaccggcagtgattttgctgatacggagaaaacaaaatcggtagtgaccacaaccgatgaccgggtatcagttgaaacgttggccacactgcatgttgacgcgctgcatgccacgcggaacgaaacgatatccatcgttgagcccggtgtgattatccgcgtatctgaacaggatgccgacgagctgatcgagaaggggctggctcgcgaagtctga

SEQ ID NO: 151070 - DNA, 354 bp, Enterobacter cloacae
atgtctgatttcgataacctctttgatgaggccatgtcgcgtgcggacggcgctattctcggggtgatgggtgcagaggcaaaggtaatatcaggtgctttatcaggaactaccctggtcggcgttttcgatgatccagaaaacattggttatgccggtgcgggagtacgtgtcgaaggtaccagcccgacgctgtttgtgaatacggctgcggttagccagttgaagcgtatggacgccctgacaattaacggacggtcattctgggttgatcgtattggtccggatgattgcggctcctgtcacatctggctgggtaatggttcaccgcctgcttcctcgcgtcgccgctaa

SEQ ID NO: 151071 - DNA, 555 bp, Enterobacter cloacae
atgtcaataaaagggcttgagcaggccatcgaaaaccttaacagcatcagccaaacggctgtcccgcgtgcgtcggcgcaggccgttaaccgcgttgcaaaccgggccgtcagtcgcagcgtggcagtcgtatcaaaagacacccgtgtaccgagaaaactggtgaagcagcgcgccagggtgaagcgcgcaacggttaataaaccacgcgcacttatccgtgtgaaccgaggcaatttaccagccataaaactcggtaccgcaagtgtgcgcctttcacgcaggaaacgggacaagaaaggggcaaacagcgttctgcgtatcgggcctttccgtttccctggcggttttatccagcaacttaaaaacggtcgctggcatgtcatgaggcgaacgtcaaaaccccgttatcccattgaagtggtcagtatcccgctggcagctccgttaaccacagcgtttaaagaagaactgccgaagctcatggaatcagatatgcccaaagagctccgtgcctctctcaccaaccaactcaggttaatactgacacgatga

SEQ ID NO: 151072 - DNA, 399 bp, Enterobacter cloacae
atgaaacacagcgatatccgcaaggtaataattgacgcgcttgaaggcgcgattggtactggcgctatttattttgatggtagaccagcagtgcttgaagagggggattttccggctatagccgtttacctgacagacgcggaatacacagcggaagagctggatgccgattgctggcaggccattctgcatatcgaagtctttcttgaggcacaggtgcctgactctgagctggatgactggatggagacgcgagtgtatccggtactcgcagaggttccggggcttgaatcccttattaccacaatggttcagcagggctatgactatcagcgtgatgatgatatggcgctgtggagttctgccaacctgaaatattccattacttacgaaatgtga

SEQ ID NO: 151073 - DNA, 738 bp, Enterobacter cloacae
atggccacaccaaatccgctggcaccaacaaaaggtgctggtactactctctgggtttacaccggcaccggagacccctacgccaatccgctttcagacgttggctggttgcggctggcaaaaattaaagaccttcagcccggagaactgaccgcagagtcagaagatgacacttacatcgatgatgagaatgccgactggacatcaacgatgcaggggcagaaatcagcaggtgaaaccaacctgacgctcgcgtggatgccgggagattcaggtcagcaggacctggtgaactggttcgatgagggcaccgtgaggggatataaaattaaatacccaaatggtgttgtcgatgtctttaagggctgggtgagcagcctcggtaaaaccattacttccaaagaggtcatgacccgcacggctaaaatcaccaacaacggcaaaccatcactggcagaggacagtggtaccgcaccgattgctgtcacggggatcagcctggataaatccacggcggctgtagcggtcgcggccacgacgcaactgtcggtttccgtccttccggccagtgcgtcagataagtccttccgtgtagccagctcagatccgtcaaaagcaacggtcaccgtcaacgggaataccctgaccgtcaccggcgtggcggcaggcaccgttgaaatcatcgtcatgagcaatgacggtaactttgtggcgatctgcaaagtcactgtttcctga

SEQ ID NO: 151074 - DNA, 321 bp, Enterobacter cloacae
atgaaactggcgcgtgagttcggtcgcccggactggcgtgccatgcttgctggcatgtcctcaacggagtacggcgactggaaaatcttctaccaggacaattattttcatgatgcgcaactggatgctcatttctccggtttgctctacaccatctcaaccctgttttttgccgatccggaattatccccggacagtttcagtatcctttcccctgcattggaagccatcgacatcgatgatccggatgacgatacgctgatggcgaaagctgaaggtatttcaggaggcgtgcgctatggcccagacgtcagtcggtga

SEQ ID NO: 151075 - DNA, 2517 bp, Enterobacter cloacae
atggcccagacgtcagtcggtgatctggtcgttaaccttgacgttaactcgacgaagttcagcgaacagctcaactacgtcaaaaaagaattaaaacagacaggaaacacggcgaacgacgaagccttacgtatccagcagtccttcagccggcaggaaatcgccgcacgtaaggcgggtatttcagtcggccagtataccgcagcgatgcgtatgcttccggcgcagtttaccgatgtggccacgcagctggcaggtgggcagaatccctggctgattctgcttcagcagggtggacaggttaaggactcctttggcgggatcataccgacattccgtgcgctactggggactatttccccgttgatggtgggtatcggtgctttatctgttgcaacgggggctctgttctatgcctggtaccagggttcttccactctgtctgatttcaacaaaacgctggtactgtcggggaacacagccggactgactgccgaccgtatgctcgtgctgtcgcgaaacggtcaggctgcggggctgacgttcaaccagacaagtgaagctctgacggagcttattaatgctggcgtacgtaccggctcgcgctttgatgaaatgagccaggctgttgcgcgttttactgatgcctccggcgtgccggtggataaggttgctgccgcctacggtaagctcgtaacagaccctacatcgggcctgatcgcgatggctcagcagtttcacaacgttacagcagaacaaattgcgcatgtagcgcagttacagcgtgccggtgatgaggctggcgccttgcaagcggctaacgaggccgcgactgacggattcaacgatcagactaaagccatccgtgacaatatggggactattgaatcctcagcggattccctgaagcgcgccttcaagtcgatgtgggatgcagcacttgatataggtcgtcctgacactgcgcaggagatggtggcaaaagctgaagcagctttcaaaaaggccgatgaaatctggaacctgcggaagggtgaccgttatgtgaacgatgaggcacgtgccaggttctggaatgatcgcgaaacggcaagactggcgctggatatggcgcagcagcaggcgggtattgctaaagccaacgaggagaatgcatctcgtgaagcagctgcggaatcagaccgtcagaaatatgccgcgcaggcgcaggcaaactatgccaaaactcagacagcactggaaaaatacacggcgcgtcaaaatgagcttaacaaggcgctgaaagagggcaggattcttcaggctgactacaacatcaacatggctgtagcgaaaaaagagtatgaagatacccttaaaaagccgaagaaaacccctgctgtcagaaccccttccggtacccgcgcgaccgacaacgccagtgcccagactatggcgctggaagcacaactgcgcacccttcaggagcacaagggtataaatgacaccatcagtcagcagcgccaggagctctggcgtcagcagtcgcgttttgcagttctggaagaggctgccaaaacaaggactctttcagcagaagagaaatccctgctggccagcaagagtgaagtgctttcccgggcagagctgaatgcgaagctcggtgatcagattgtggcgcaggagcgacttaaccggctacaggacacatcacagaagtacgtgacccaaatcggggagaaaactcgcgccctggcggaaagtgctggcatgagtagtcgtgcagcacagcgacgcaatgaagaggcccagcttcttcagggatggaaaaatggtggtggatctgaaaaagatgccggttatcagaaagagctacaggcactgcatgcgtattacgcagagcaggataagcagcgagacgactggcagtccgggacaaaatccgcatgggcagattacgttgattctgcttctgatgcttatggccagatgaagtcgtttgccaccagtacgtttgatggcatcgggcagaatatggctgacatgctgacacgcggaaaggctgactgggcagactttacccgctccacactctctatgctgacgcagattctcatgaagcaggcgatggtcggcctggtggattcagccacgacggcactgggatttgcaggtggaggttataccggttcaggcgggaaatatgagccagctggcgttgttcaccgtggggaatttgttttcaccaaagaggcaaccagccggatcggtgtcggcaatctctacaaaatgatgaagggttatgccagtggcggctatgtgggtggaggttcatcttctggcgtcggtgcgccgttcggtgtcaatgtttatgctccggtgacggtcgagaatgcctccggtgacgcacagcagcaaaacgacggtaacagactgggtaaggcataccagcaggtgattaacaaatctgttaacgagggcattgctaaggctatccagcccggtgggcttatctggaatgcgaacaatcgcaggtaa

SEQ ID NO: 151076 - DNA, 348 bp, Enterobacter cloacae
atgacgatagagacattttcctggagcgttaaggtctccagccagcccaccgagggaagtaaagacacgatcagaaaggtccagttcggggacgggtacgcccaggtgagcggatcaggactgaatgatgagattcgcacctatgagtattccttttcgggagatccaaataccgcgaatgaaattcatgcctttcttcgtcgacacaaggtgaagtcgtttattttcactccgcctttcggcgatatggcgctgtggagagttgaagccaatagcctcaaaaaggtggttaaaaacgtaaaagtgataaccgtaaccgcaacgtttgaacaggcattcgcaccatga

SEQ ID NO: 151077 - DNA, 756 bp, Enterobacter cloacae
atgagtcttaatgctgattatcagaaacttgagccgggcaatgaagtccggcttttttctgtcgatggaacggcgtttggcatgccagatgtgctccgtttccacgcccatactctcgcgcacaccccggaagaaattgaagccgctggcggggatgagaataaacttccggctaagtccatctggtggcagggggaggagtataaagcctggccgtgtcaggttgagggtattgaggcgaccactgacggtaccagccctcagccgaaactgacggtggcgaatctggacagctccatctcagcgctctgtctggcgtatgacgatttgctacaggcgaaagtcagtatccatgacactatggcgcagtatctggatgcccgaaactttccgcagggcaatcccacagctgacccctcacaggaaaagctgaaggtcttttatatcgatgccagaagcaccgagacggatgaggaagtggaatttatcctttccagcccgatggccttgcagggccagatgataccaacacggcagctgcattctttatgcacctggtgcatccggaacaagtaccgaaccggcgatggctgtgattatgccggaacgcgctatttcgataagcacaataatccggttgacgatccttcgcttgacgaatgcaacggcacgctgacggcctgcgagctccggcacggagacggcaacgaactgccgttcggtggcttccccggtacatccctcatcaggagctga

SEQ ID NO: 151078 - DNA, 732 bp, Enterobacter cloacae
atgcgtcagaaaactatagacgccatcatggcgcacgccgcagcggaatatccgcgcgagtgctgcggtgtggtggcgcagaaaagcagggtagagcgctatttcccctgccgaaacctctcagcagagccgactgagcattttcacctttcacctgaagattacgctgccgcagaagactggggaacggtggtggccatcgtgcacagccatcctgatgcaacaacgcaggccagtgagctggataaggcgcagtgtgatgcaacgcttctaccctggcatatcgtgagctggccagagggggatttacgcactattcagccgcgcggggagttgccgttgctggagcgaccgtttgtgctgggccatttcgattgctggggcctggtaatgagctatttccggcagacccacggtatcgagctccacgactaccgcgtcgattatccctggtgggaaaatgactaccctgaaaacttctaccaggattgctggtacgaatgcggattcagggagtttgacggcccacctcaggaaggtgatctggtcatcatgcaggtacaggccgacaagtggaaccacgcggggattttactggagggtaatatgcttctgcaccatctgtacggtcatttgagccagcgtgtgccgtatggcggatactggcaggagcgcacaatgaaaatagtccgttataaagatgtcggaggcggtgaaagatgcaggaagtaa

SEQ ID NO: 151079 - DNA, 591 bp, Enterobacter cloacae
atgcaggaagtaatgagccgtatcgagcttggtgcagagctgggaaaaacgtttggcaaagtacactaccgtctgatttctcgtgtgagtgaggcgggagttgcactggcaaagaccataccggggtttgagcagtttatgatttccagccagcgccgtgggctcacttattcagtgtttaaaggtaaaaaaaatatcggtgtcgatgaccttggatttccggttaccggcgatgttatccgcattgttcctgtgattatcgggagtaaaaaagccggtgtattacagaccattttaggtgcggttctggttgctgtaggggcagtgcttaatttcacaccctgggccgctgcatctccattcttctacaaatttggtgctgcggtcatgctgggcggcgttgtccagatgctttcccctcaaccagggggcctggccagcaaacaaagctcagataaccgggcatcgtacgcgttcggtggcgtcacaaacaccgcagcgcagggctacccggtacctcttctttacggtcgccgacgaattggcggcgcgattatttctgccggaatttacgtcgaagatcagcagtaa

SEQ ID NO: 151080 - DNA, 630 bp, Enterobacter cloacae
atgttagatgggggggactggttacctggcggaataacacttattggccgctggtcgataatggcgccggtatcaatacgtgcatacttatccggatcgtgcatagccccagaaatcgaaaacgttccgtcattattatccgtgacgctgataacacgatattgctgcgcatacagctcatcggattcgactatccacaccgattccactgccggagtttcgctgtatgccgtggttacggtgactgcacgaccgttaacgctctgtatcgttctactctgcgatgcacctgacggcagattaaccataaggcgactaccaggagcagctgccgaatcacgatcgagagtgataacgcgaccgttaacggcgctgatgcggcctcccataacctttccggataacagctcatcggcaaccgctatgatatggccaggctgtggaatcctgccatccaggccaacgctgaacgatacgatgcgatccttgttattggtcagaataccccagcgccccttccggtttgcctctgactggcgggtgcagccgatggctgtaatttcgagctggtttgttccaaagcgagccacaagctcctgctcaaaaacaggctccatcgcgtctgcgtag

SEQ ID NO: 151081 - DNA, 234 bp, Enterobacter cloacae
atgcctactatcaagcaagatcaaatcgagctatatcggaagattgaagcacttgaagcagctttaactgttactttggcagccgtttccacggcactgccatccgtaaaaacggatgttgtgaaaaatctcagactttgggcaaatagcaacaagcaagtcgaaggtgcaccacaggccttctcctcactggctgataaaatcgagcagaccaacttcaacgttgaaaactaa

SEQ ID NO: 151082 - DNA, 129 bp, Enterobacter cloacae
atgacactcatagagcgccttaaaattcttgagaaaaaggttgaagcgatggaatcagcgacccttaaacagatcgctgaaagtaatattagcaatggattaataaaatcgcttgttcggaaaaattag

SEQ ID NO: 151083 - DNA, 195 bp, Enterobacter cloacae
atggataagaaatgtatcgattcacaaattatgactggcgagcgtctcttggtaataagctctcaaatactcgttgttcttaagagtgagctttcctccagaggattaaagcccacgtcgaacaatttgcgcgttgtgatggagattattgataaatctctgcctgaatcactcagcgagttttttatcgagtaa

SEQ ID NO: 151084 - DNA, 180 bp, Enterobacter cloacae
atgactaaagaagaaaaagtaatgtttttaatgcgtcttgccgttgacactcacagtgcatatcgttctgcgcaaatcgcatcgggtaaggcccttcatgcagaccatgatcctatcgaagcgattgaaaggatttacggcaagtacgaagagttactcgataaaaaactcgctgagtga

SEQ ID NO: 151085 - DNA, 231 bp, Enterobacter cloacae
atgaaacttaaaatgcacacgccagacggatcggtgattgtcgaaagtaacctggtaacgcagttctaccctgatttcgaaagcggcggcgagctgaccaccatagaaacggtatcggccacaggagaaactttctcggtgaaagtaaagcactcgtttatgcaggtgactggagcattggctacagcctggagcgttgacgaaaagaaagcagaaggagccgcccaatga

SEQ ID NO: 151086 - DNA, 612 bp, Enterobacter cloacae
atgcggctccttcattgtgttgcttcgtggtgctgcatgaacaaacttgagtttaatggtgttctttctgatataggttctctggctgctgacgcttactctcaagagatgactggactttttcccggaatcgttcttccctctcttcgctttgaagtgtgtactgtgcagcattttagtagagctgagtcttggcctgatacctcagcacaaaaggatgggtatggtggctggtcttgggaagatatttatcataagtccaaatattcccctgaaaagtttgttattgctgtttccagcaacgggatatttggcgggcttttttctgggaaattacttgccactgaggttgagctacagtttgtacaacgtgatattcattgcgcatcacttaaaggtttcatgatcccagcgtctatcacgtacagtgcgatgttagggctggttatgggtcgcgatattctttctgtgtgtgagccagccccggacattgttgaacggtacatgacaagcatgaaaggtgatgtgacttttaattttgggcagaaaggtgaagttactaagatgagtgtaccggttgacgaggttttactcccaccaaccgatcagtag

SEQ ID NO: 151087 - DNA, 171 bp, Enterobacter cloacae
atgacaacttttaaagatatgacaccaatgcagcgcatcgcagctctgcgtaaaacaggtgtaattctattcccaaaactctctaaagacgaaaagagagcggtgctgtatgtcgaaaacgaaccagcagtatcagcacagagaaatgaatataagttagccgtctactga

SEQ ID NO: 151088 - DNA, 333 bp, Enterobacter cloacae
gtgcgcccgcaccgacaccctcacaccttcgagctactgttgccattaaggggtcgtttcgtggtgctgaattttgacgatcggggtaccgtcacccatcgggcgatattgggggaaacctgtacggtgctggagatggccgcaggaacctggcatgccgtgctgtcgctggataccggtggcataatttttgaagtaaaacacggtggctatcaacccgtggctgccgatgactatgcgcactgggctccagcggaaggagaaccaggaaccacggagcttatggcctggtatgcgcaagcgcaggtgggcgacagcgcttttgccgtctga

SEQ ID NO: 151089 - DNA, 876 bp, Enterobacter cloacae
atggttaaaaaatcactgcgtcagttcacgctgatggcgacggcaaccgtcacgctgttgttaggaagtgtgccgctgtatgcgcaaacggcggacgtacagcaaaaacttgccgaattagagcggcagtcgggaggaagactgggggtggcattgattaacacagcggataattcgcaaatactttatcgtgctgatgagcgcttcgcgatgtgcagcaccagtaaagtgatggccgcggccgcggtgctgaagaaaagtgaaagcgaaccgaatctgttaaatcagcgagttgagatcaaaaaatctgacctggttaactataatccgattgcggaaaagcacgtcaatgggacgatgtcactggctgagcttagcgcggccgcgctacagtacagcgataacgtggcgatgaataagctgattgctcacgttggcggcccggctagcgtcaccgcgttcgcccgacagctgggagacgaaacgttccgtctcgaccgtaccgagccgacgttaaacaccgccattccgggcgatccgcgtgataccacttcacctcgggcaatggcgcaaactctgcggaatctgacgctgggtaaagcattgggcgacagccaacgggcgcagctggtgacatggatgaaaggcaataccaccggtgcagcgagcattcaggcaggactgcctgcttcctgggttgtgggggataaaaccggcagcggtgactatggcaccaccaacgatatcgcggtgatttggccaaaagatcgtgcgccgctgattctggtcacttacttcacccagcctcaacctaaggcagaaagccgtcgcgatgtattagcgtcggcggctaaaatcgtcaccgacggtttgtaa

SEQ ID NO: 151090 - DNA, 333 bp, Enterobacter cloacae; identical to SEQ ID NO: 151088

SEQ ID NO: 151091 - DNA, 984 bp, Enterobacter cloacae
atgaatattgccgcctcaattgcccttttgggcgcttgcccatttgtgagtctggcggcagtaccggtgaccttttccgaaactgtcctggatgccgcagggccaaaaggccctttgaaaggcacgttactcaccccgaattcaaaaccaacagccgttgttcttatcattcctggctccgggccaaccgatcgggatggaaacaacccgcttggtgtgaatgcatcgccttaccgacttcttgctgaaggccttgctgccaaaggctttgcgacgcttcgtatcgacaaacgtggaatgttcgctagcgcaatggccgtagaggatgccaatgcggtgacgattgctgactatgttgacgacgttcgatcctgggtagacgtgcttagacgtcacatgcacaccccctgtatttgggttttagggcacagtgaagggggcgtagtcgcacttgcctcggctcaagaagagaatgtgtgcggtgtgattcttatcgcaacgcccgggaggccgatgggcgaggtgttgagggggcaacttaacgctaatccggaaaatgaaattctattaaagcaggcactgccgataattgatgctctggagcatcggcggcgagtcgatattacgaatattcacccagcactgcaaagtatctttaatcctgctgttcaggggtttttgatcaatgcattttcatataatccgggtcatctcatttcgagtatttccaaacccgtgttagtgctacaagggcaacgcgatctccaggtggaagaaacggatgcaagactgcttaaggccgcgaatcctcaagcgtccctggttatactgcccaatatgaaccatgttatgaaagaggtgacttcggacgatcgcaaagcgaatatcgcgtcatacactgaacccgcgctccccttagctcccggtttaatcgactcgattgagcatttcctgatccgcaactcaccttttcccgaaaagtaa

SEQ ID NO: 151092 - DNA, 954 bp, Enterobacter cloacae
gtgaacgcttctatcactgattctcgccgccaggcattgcgctcggcatcgcactggtatgctgtattgagcggcgagcgtgtcagcccacagcaagaagcgcgctggcaacaatggtacgaagaggacaaagatcatcagtgggcctggcaacaggttgaaaacctgcgcagccagctcagccgcgtaccgggcgatgtcgccagccgggcgctgcatgatacgcgccttacccgtcgtcatgtcatgaaagggctactgctgctacttggcgtaggcggcggctggcagctctggcaatctgaagccggtgaaggtctgcgcgcggattaccgcaccgccaaaggcgcggtcagccatcagcggctggaagatggctcgctgctgacgctcaacacacaaagcgccgcggacgttcgttttgatacgcgtcaacgcgctgtccatctctggtacggcgaaattgctattactactgcaaaagacgcgcagcagagacctttccgcgttgtgacccgccagggccaactcaccgcattaggcacagaatttaccgtctatcagcaggacaacgtcacgcgcgttaccgttcaacaacatgctgtggaagtcatactggcaaaccgtccgcaggaaaaacgcatcgtcagcgctggcgagagcctgcagtttagcgcgtctgaatttggtgcaatagcctcagcggatgatgaaagcgccgcctggacgcagggcattctgagcttcagcgataaacctttgggtgaagtgattgccacgctgagccgttatcgcaacggcgtgctgcgctgcgatccggctgtggccgggttacgcctgagtggcactttcccgctgaaaaataccgatgcaatcctggatgttattgccaagactcttccagtgaaaattcagtcagttacgcgatactgggtaaatatttctgcattgtaa

SEQ ID NO: 151093 - DNA, 900 bp, Enterobacter cloacae
atgttcacaccattacgcacactattcgccgctctgctgctcaccggccatgcttttgccgccacggttcatgacgaacatggcacctttacgcttgataaaacgccacaacggatagtggtgctggaactgtcgttcgcggacgcactggctgctgtcgatgtcagtccggtcggcattgccgacgataacgatgccatgcgcattcttccagaggttcgtacccatctgaaaccctggcagtctgtcggcacgcgtgcgcagccgagtttagaagccatcagcgcgctgaaaccggatctgatcattgccgacagcagccgccatgcgggtatttacagcgccttacagcaaatcgcaccggtgctgctgctcaagtcccgcaatgaaacctacgctgaaaatcttcagtctgcggccatcatcggtgaaatcgtgggtaaaaaggcacagatgcagtcacgcctggcgcaacaccaacaacagatgtcagagtgggccagccaactgccaaaagacacgatggtggtgtttggtacgtcccgagagcagcagttcaacctgcacacgcaggagacctggaccgggggcgtcctgacctctctggggctgacggtgcctgcggctatggcgggttcgtctatgccttccatcggtctggaacagctgctggcgctcaatccggcatggctgctggtcgcgcactatcgtgaagagagcatcgtgaaacgctggcaacaagacccgctgtggcagatgttaactgcggcgcagaagcagcagacggcgtcggtcgacagtaacgcctgggcgcggatgcgcggcattttcgcagccgaacgcattgccagcgacacggtaaaaatctttcaccaccagcctttatccgatgtgaaatga

SEQ ID NO: 151094 - DNA, 999 bp, Enterobacter cloacae
atgacagttttcaaacatccagcgctacagtgggggattccccttgtcgcgcttatcgctatcttctggctgagtctgttttgctactcggccattcctgtttctggcgttgatgccattcacgccctgctgccaggccatacgccgacgcttccacaagcgctggtgcaaaaccttcgtttgccgagaagcctggtcgccattttgatcggcgcaagcctggctctggcgggaacgctgctgcagaccctgacgcataatgcaatggcctccccttcactactcggtattaacagtggcgcagcgctggcgatggcgcttaccagcgctatcagccctgcgcccgttacgggttactccatcgcctttatcgccgcctgcggtggcggcgtaagctggctgatggtgatgaccgcaggtggtggatttcgtcacacccaggacagaaacaaactgatcctcgcgggcatcgcgttctcggctttctgtatggcccttacccgcatcaccctgctgctgacggaagatcacgcttacggcattttttactggctagcgggaggcgtatcccacgcacgttggcaggagttctggcagcttttcccaatggtggcggttgctgtaccggttgtattgctgctggctaatcaactgaacctgcttaacgtcagtgacagcaccgcccgcacgctgggggtgaatctgccgaagctccgtttgatcatcaatattctggtgctgcttctggtcggtacctgcgtcagcgtggcaggcccggtggcgtttatcggtctcctgatgccgcatttggctcgcttctgggtgggattcgatcagcgcaaagtcctgccgatgagcatgctgatgggcgccacgctgctgctgctggctgatgttctggcccgagcgctggccttccccggcgaattgcccgcgggggcagtagtggcgctgattggtgcgccctgttttgtctggctggtcaggaggcgtggatga

SEQ ID NO: 151095 - DNA, 957 bp, Enterobacter cloacae
atgaaaattgcgatagtcattctcatcgccctcacgctggcaggattttcggttctgtcgttacaaatgggggtgatcgccgttccctggcgtgccctgctgaccgactggcagaccgggcgcgaatatcattacgtgttaacggcctaccgcctgccgcggctactgctggcgttgcttgtcggtgcagccctcgcggtggcaggcgtgctggtacaagggatcgtgcgtaaccctctggcatcgccggatattctcggcgtaaaccatgccgccagccttgcctctgtaggcgcactgcttctcttaccgtcactaccggtgattgctctgccgctgctggcctttgccggaggcataacgggcctgatcctgctgagattgctggcgaacaccagccagccgatgaagctcgctctcacgggtgttgcgctttctgcctgctgggccagtctgacggattatctgatgctttcgcgtccgcaggatgtgaacagcgccctgctgtggctgaccggcagcttatgggggcgtgactggagctttgtgaaaatagccgccccgctgctgattttgtttctgccgctgagtctgcgtttttgccgcgatctcgacctcctggcattgggcgatgcgcgcgccaccacgctcggtgtgtcggtgccgcgtatccggctccaggctttgctactggccgtcgccatgacatcgaccggcgtggcagtctgcggcccaattagctttattggtctcgtggtgccgcatatggtgcgcagcattaccggtggacgtcaccgctggctgctgcccatttcggccatgacaggtgcgttgctactggtgattgccgacctgctggcacgaattattcatcccccgctggagcttccggctggcgtgctgaccgccattatcggtgcaccatggtttgtctggctgcttgtgagaatgcgataa

SEQ ID NO: 151096 - DNA, 768 bp, Enterobacter cloacae
atgacattacgaactgaaaatctgacggtctgttacggtacaaacaaggtgcttgatggtgtttcactcgccctaccagcagggaagacaaccgccctgctcggccccaacggctgcgggaaatcaacgttgttaaactgtttttcacgactgttaacgccgcagtccggtggcgtatttctcggcgataatgccatcaacacgctctcatcacgccagctagcccgcaggctggcgctgctgccccagcaccatttaactcccgaggggatcaccgtccaggagcttgtttcgtacggtcgcaacccgtggttgtcactctgggggcgtctctccgttgaagacaatgtgcgaattaatgacgctatgagccagacccagatccaacaccttgccgaccgacggttaaccgatctttctggcggtcagcgacagcgcgcatttctggcgatggtcctggcgcaggatacgcccgttgtacttctcgatgagccaaccacctatctcgatatcaatcaccaggtggaactgatgcggctgatgggcgaactccggactcaagggaaaacggtggtcgcagtgctgcacgaccttaatcaggccagccggtactgtgaccatctggtggtcatggcgaacggacatgttatggcgcaaggcacaccagaagtggtgatgaaccctggattgctgagaaccgtattcagcgtggatacggagatacaccccgaaccggtatctggcaggccgatgtgtgtagtgaggtag

SEQ ID NO: 151097 - DNA, 354 bp, Enterobacter cloacae
atgagcaacattaccatctatctttattatctcgatactcccccgactcgtgatgaacttagcaaactgatttcagatatgggcatttcagtacgtacattgctgcgtaagaacgtcgaaccttatgagcagttgggtcttgatgaagacaagttttctgatgagcagttgattgattttatgcttcagcatccgatcctgattaatcggccgattgtagtgacaccgatcggcacacgtctttgtcgtccctccgaaatggtgctggatattctaccggaaggtcagaaaggagtgtttaccaaagaggatggtgagaaggtcattgacgaaacgggtaaacgagttaagtaa

SEQ ID NO: 151098 - DNA, 1137 bp, Enterobacter cloacae
atgtctaattcatttagtgcgcgaattgaacgcatgaagtctcgtcgtaaagggacattcgatcaattaaacgtagccagagagtcaatcagtaaccagaggattgatggactggaaaactatgctttgctagaaggtttcctggatttaaatgaaagttgggaaaccaggggaaaacaagattctgcaacccgctatgttataggtgccatgcaaccggttgataaccgctataccgaaatttcttttgaaactgccaagcgtattgagaaccaactggtaaagaaattagatcttaatctggagtttcgtgtccaaggctctgtaccactggatattcatattaaaagtttcagtgatgtggatctgctgattatagacactcagatgcttatttatgatagcgacggtattggccgctacacccctacgaacaaaaatgatggggatgtcatccttgaactcagggatgccgctagggatgccctgaaagcaactttccctgcggcagatgttgatgacaacaacgccaaatctttgagaataacgggagggtctttgcagagagcagtggatgtggtgccaagcatctggtgggataccaaagagtaccaacatactaaagatgtagatcaacgtggggtcactattatagataaaaacacacgtcaacgtatctacaacctacctttcctccacatcaaacgaattaaagacaaatgcgatcaatgtaatggaggattgcgtaagtctattcgttttcttaagacactaaaagcggatagtgaagctgagggtactaaaattgaactcagtagttatgatattgcctcgctgatgtaccacgcagatggtaacaatctccgacatagccaatactacgagctggctgtccttgtagagactcacagatggctaaattatcttgcacagaaccctaatgctgcaatgctgctctacgttccaaatggcaccagaaagataattgacaagaatgaaacttttgccgaattgcttaaactgacgggaatggtcaatagtattgtcactgaggtgctgcgtgaaataaccggccagcctactgaatattacacacccgccaaaggaattttacttataaaacaagcggtttactaa

SEQ ID NO: 151099 - DNA, 576 bp, Enterobacter cloacae
atggaaaaagacaatactgaaaagtcaatttggtgttcgccgcaagaaattatggctgctgatggtatgcctggatctgttgctggtgttcactatcgagcaaatgttcaaggctggacgaagcgaaaaaaggaaggtgtcaagggggggaaagctgttgaatacgatgtgatgtctatgcccaccaaagaacgagagcaagttattgcgcacttggggttatccacaccggatactggtgctcaagccaatgagaaacaggattcttcggaactgataaacaaattaaccacaaccttaatcaatatgattgaagagctggaaccagatgaagcacgcaaggcactgaaacttttaagtaaaggggggttgttggcgttaatgcctcttgtatttaatgaacagaaactttacagctttataggattttcacagcaaagtattcagacgttgatgatgctagatgcattacctgaagaaaaacgcaaagagattttgtcaaagtatgggattcatgaacaggaaagtgttgtagtaccttcacaggaaccacaggaggtaaaaaaagccgtataa

SEQ ID NO: 151100 - DNA, 228 bp, Enterobacter cloacae; identical to SEQ ID NO: 32370

SEQ ID NO: 151101 - DNA, 1992 bp, Enterobacter cloacae
atggaactttgggtatcaccgaaagagtgtgcgaatcttcctggtttgccgaaaacatcggctggtgtgatttatgttgctaaaaagcaaggatggcaaaaccgcactagagcaggtgtcaaaggtggtaaagcaattgaatacaatgcgaactctttacctgttgaagcgaaagcggcgttattgctgagacaaggagagattgaaacaagccaggggtattttgaaatcgcccgccccacgctggaagcccatgattatgatcgtgaggcactgtggagcaaatgggataacgccagcgattcccagcgcagacttgctgaaaaatggttgcctgcggttcaggctgcagacgaaatgctgaaccaggggatttcaacgaaaacggcatttgcgaccgttgcaggacattaccaggtcagcgcatccactttgcgagacaaatattaccaggtacagaagtttgcgaagcctgactgggcggctgcgcttgttgatggacgtggtgcatcccgtcgcaacgttcacaaaagtgaatttgacgaggatgcctggcagtttctgattgcagattatctgcgaccagaaaaacccgccttccgcaaatgttatgagcgtctggaactggcagcccgcgagcatggctggagtattccctcccgtgccacggcctttcgccggattcagcaactggacgaggcaatggttgttgcctgccgtgaaggtgaacatgcactgatgcatctgataccggcacaacagcgaactgtggaacacctggacgccatgcagtggatcaacggcgacggttatctgcataacgtctttgtacgctggtttaacggtgatgtgatccgcccgaaaacatggttctggcaggatgtgaaaacccgaaaaattctgggctggcgctgcgatgtgagcgagaacattgattcaattcgcctctcgttcatggatgttgtgactcgctacggtatcccggaggattttcacatcaccattgataacacccgtggtgcagcgaataaatggctgacgggaggcgcgcccaatcgctaccgctttaaggtaaaagaggacgatccaaagggactgtttttactgatgggcgcgaaaatgcactggacaagcgttgttgccggtaaaggctggggccaggcaaaacctgttgaacgtgctttcggtgttggtgggcttgaggaatacgttgataagcatccggcactggctggcgcatatacggggccaaatccgcaggcaaaacctgataactatggcgaccgcgctgttgatgcagagctgtttctgaaaacccttgccgaaggtgtggcgatgttcaatgccagaacaggccgtgaaacagaaatgtgcgggggcaaactctcgtttgatgatgttttcgagcgtgaatacgccagaacgattgtgcgtaagccaaccgaagaacaaaaacggatgctgttactgcctgccgaggcggtgaacgtttcacgcaaaggcgagtttacgcttaaagttggcggctcccttaaaggcgcgaaaaacgtttattacaacatggcattaatgaatgccggcgtgaaaaaagttgtggtcaggtttgatccgcagcagctacacagcacggtttattgttacaccctggacggtcggtttatctgtgaagcggaatgtctggcacctgttgcatttaatgatgctgcggcaggccgtgaatatcgccgccgccagaaacaactgaaatctgcaactaaagcagccattaaagcgcagaaacaaatggacgcgctggaagttgctgaactgctgccgcagatagccgaaccagcagcaccagaatcaagggttgttggtattttccggccttccggtaacacggtgcaggtgaaataccaggaagccgatgatgaatatgaaactgatcgtgatgaatatctgaatcattcactggatattctggaacagaacagacgtaaaaaagtcatttaa

SEQ ID NO: 151102 - DNA, 939 bp, Enterobacter cloacae
atgaatatttccgatattcgcgcaggactgcgcacgcttgtagaaaatgaagaaaccacctttaaacaaattgctcttgagagcgggctttctaccggaactatcagtagttttatcaatgataagtacaacggggataacgagcgtgtttcacaaatgctgcaacgctggctggaaaaatatcatgcagttgcagaactacctgaaccgccccgctttgtggaaacgcagacggtaaaacaaatctggacaagtatgcgttttgccagcctgactgaaagtattgctgttgtatgtggcaatcctggtgtgggcaaaaccgaagcggcccgtgaatatcgccgcaccaataacaatgtctggatgatcaccattacgccatcctgtgccagcgttctggaatgtcttactgaactggcgtttgagctgggaatgaatgacgcaccacgccgtaaagggccgctctcccgcgccctgcgacgtcgccttgaaggtacacaggggctggttatcatcgacgaagctgatcatcttggtgccgaagttctggaagaactccgcctgttacaggaatcaacccgcactggccttgtgctgatgggaaatcaccgggtttattcaaatatgacggggggtaacagaacggttgaatttgcccgtctgttttcccgtattgcaaagcgcactgcaattaataaaaccaaaaaagccgatgtaaaagctattgcggatgcctggcagattaacggcgaaaatgaactggagttattacagcagattgcgcagaaaccaggtgcgcttcgcattctgaatcattcacttcgccttgccgccatgacggctcacggtaaaggtgagcgtgttaacgaagattatctgcgtcaggctttccgtgaattagacctggacgttgatatttcaacgctgctgcgtaattaa

SEQ ID NO: 151103 - DNA, 228 bp, Enterobacter cloacae
atgatggcccgaaatataaaaatggcaacggatgcgcagaactggttacaggcgcgcgggagtcatgtaaatgaatcatatctcggcgtggcgcgtccgattcttgaaatcacttacccaccggtggaactggtaaaaaacgcggtcagaattatggagcataagtccggggtggcccgttctgtatggacggcccgtcttaatggttgccagattatctggagatag

SEQ ID NO: 151104 - DNA, 213 bp, Enterobacter cloacae
atgatggtgataaatattcacgataatctgggaatcagtaagttaatcaaccttgataatgtcagtgtaatggaaacgactgttgagggcggtattgcttttgagtttattgatggtcacaggctggtcgttcatgtcggcaaccatcatcacgcagaagatgtgttttgtgaacttaacaaaatcacaaatgcaacacccgttaatcaataa

SEQ ID NO: 151105 - DNA, 270 bp, Enterobacter cloacae
atggcgaaagtaatctttgaatttaacaatacaagaaatattgagtttcaggataatggaggttttgccgtaaatatgaatgtgcgactggaagaatcctcacctgaggaccagaccgggccacatgacgtaatggcaggcatcatcaagagcatggctcctgaaatcattaaaaaagcgaccgaggagttgttgaaatcagccagggagcttgggctggaagccgagggggaattattcagctataacccgaatgcagccagacattaa

SEQ ID NO: 151106 - DNA, 420 bp, Enterobacter cloacae
atgaacgtcaaaatccgaaatgaaattcaggcattaatccgaattcaggaacgcaataacaacggtggtgaattacgcgagtttatttgcgcccggaaagttgatggttgtggtgaaaagacttacctgattgctttcgaccattacagcatctgtgcgcgttattgcggcgaaagcatatcccgcgccattgcatttggcggtgcgttcaatgcggatttatgggaatacgtcatggaccgggaatacatctgcgcatcagaccctgaagcccgtgaaatgtggcagcgcatctggcgcgattaccggttaatggcaaaaggctgggcgcgctgctgttattcctcgcttgccctgaaagcagttcagttatcgctgcggcatattccggcatcactgcgcgagcctctgctgtactga

SEQ ID NO: 151107 - DNA, 288 bp, Enterobacter cloacae
atgaagtgtaatcgtaagcgctggtcacgcgaagaccgggaatttatcgaagccagcgtcgggaaaatgaccgttgaagaaatggcggaaaaactgaaagtcgccacaaccgccctccgggcacatgccagaaggcacggaatatcattgtgtgtataccgaatcagtgagcacgacaaatatttgtgtcgtgaactttataaagaagggctggatattcatgtcattgcccgaaaaatggaattaagcaatcgtgctgtatccagcattgtatacagcggatattaa

SEQ ID NO: 151108 - DNA, 525 bp, Enterobacter cloacae
atggctaaaccagcaaaacgcatcaaaagtgccgcagcggcttatgtgccacaaaaccgcgatgcggtgattaccgatattaaacgcatcggggatttacagcgcgaagcatcacgtctggaaacggaaatgaatgatgccatcgcggaaattacggagaaatttgcggcccggattgcaccgattaaaaccgatattgaaaccctttcaaaaggcgttcagggatggtgtgaagcgaaccgcgacgaactgacgaacggcggcaaagtgaagacggcaaatcttgtcaccggcgatgtgtcatggcgtcaacgcccgccatcagtgagtattcgcggcgtggatgccgtaatggaaacgctggagcgtcttggcctgcaacgctttattcgcacgaagcaggaaatcaacaaggaggcgattttactggaaccaaaagccgtcgcaggtgttgccggaattacggttaaatcgggaattgaagatttttccattattccgtttgaacaggaagccggtatttaa

SEQ ID NO: 151109 - DNA, 531 bp, Enterobacter cloacae
atggttgatgcaaaaattctgaatggtgtcagcacattattacgggcttacggacgcctgacctgcggggttctggctgaaaaaatgcagatgccatcctccgcaatggtgtacttcctgcgtgatgcggttgatgccggaatgctgactgaacttaatggtttttacgacgtaccgcgtccccgtacagagcagcctgtaagacgaaacgcaactgagcagtctgctgttgatgatgccgcgtggtgttccttccgccgcccattgccctggctggaaggcaatgccattccggcactggcaaaagaatttgcaacaggcgtgctgacctgtgaatccgttcacatcgttgcagaagtggacaacagaatgtgcgaacagggaatgccccgttttgtgatggcttatatcgatatccggctggggcgttttatttgcagttccagcgcctggaatatcaccgaccatgtactgcgttatctcattcttgattgttctccggctcccgcagcggtgcaggaggtggcgtga

SEQ ID NO: 151110 - DNA, 531 bp, Enterobacter cloacae
atgttttttaaaacgtcaaatcccgcagcactgctggcatgggaccagtttatggcggactgcctgaaactacgcgaagaagcccgccatcttgataaggttctgggttgtggttgccggtcagtattcagcacaggtattggtgggcgtcattttcatggcgtgaattttccggggaatgagcgacctttctcgccggagttgtggactgtacaacgctccgcatcaggtaacagttgcaggccaagaacatcgcgcattcctgcacatctgcgggagcagtcaaaagagctggcgaaaatatggcaggagaatattccggtcacttatgcccgtactgacgctctcttacccgcactgggactggatttcagcgcaacaatatttggcccgctccggtggttccgtgttggtgatgtgatttacgtcatgacagggatgactcccgcacagggccgcatgactgaaatcctttctgacgaatttatccgggcgcaaaaacaggcggaggtaaacaatggaaaacaatga

SEQ ID NO: 151111 - DNA, 183 bp, Enterobacter cloacae
atggaaaacaatgaaacatcgtattcgtggctggggaaatttaccacggtgaaacaggaatgcccgacctgcggtaatgaatcccctgaatatctgaaagagtgccctcattgtggcgggcagaaatgcaaccactgcgatatgggcgatgacacggcgtgcatgaattgtgaaggtgagtga

SEQ ID NO: 151112 - DNA, 309 bp, Enterobacter cloacae
atgaataatggtgtattttcaaaatcagaagagcttgccgccctgctgattgccggtggtttgccgaaaaaagaagtgcatgactttgtgaattttgtatatgagacgtctcatgaaaaagctattgatgaggtcatggcgtaccggtttggcattattgctgagtcactgagtcctcactggattattgaaaatctccgcgctattgctgatggcaacgataaatcagcagccgttgctgcactggatgtgttacggcaaatgagtctgaaattttatcctgaatttattctgagggccgcaaaatga

SEQ ID NO: 151113 - DNA, 303 bp, Enterobacter cloacae; identical to SEQ ID NO: 14334

SEQ ID NO: 151114 - DNA, 267 bp, Enterobacter cloacae; identical to SEQ ID NO: 14333

SEQ ID NO: 151115 - DNA, 552 bp, Enterobacter cloacae
atgaatcgcacatccctgattaaattaatccatgtcgcccgtcgggagctacaactcgacgacgacacttaccgcgcttttctgatgcagaaaacgggcaacatcagttgccgcgagctgacggttacgcaactggaacaggtgctcgatgccatgaaagaacgcggctttaagaagctgaataaacatccacgtcgccgctttaaggggcatgtcacgccccgcgagaaggtatacaaagtctggcagcagatggcagaagacggttttattaccgatggcggtgatgtggcgctggataaatatgttcagcgcctgacggcgaaacgtaatggcggacagggtgtttccacgctggcgtggtgtcatggcgacaccctgttgattgttctcgaaactctcaagcagtggcatatccgctgtattcgtgaagccttttcccgtcacgggcttccattgccggtcagtccgtccgggcgtgaactgcgcggctatgatgccatgacggcggcttatgcccatgccagaaagacacggaggatggcacaatga

SEQ ID NO: 151116 - DNA, 390 bp, Enterobacter cloacae
atgacggaagatttatttggtgatttgcaggatgacaccatcctggcacatcttgacaatcccgcagaggatacgtcacgctttccggcactgctggcggagctgaacgatttactgcgcggggaattgtcccggctgggtgttgatcctgcccattcactggagattgttgtggctatctgtaagcatctgggcggcggtcaggtctacattccacgcggtcaggttctggactcgctgattcgggatttgcgtatctggaatgattttaacggtcgcaacgtcagcgaactgaccacccgttatggtgtcactttcaatacggtttacaaggccattcgccggatgcgacggctgaaataccgccagtaccagccctcacttctgtaa

SEQ ID NO: 151117 - DNA, 219 bp, Enterobacter cloacae
atgggtaaaggctggaatgcatcctttcatcttggcagacgtgagcggctgcgtcaggaggttttgcaccgtgtcgccggtgggccacggcctgcgccccgcgactataccggtcatgatggcacccacggcagttattacatgaaaggctggcagtcagttgatatgccggaaattcttcatcattgcctgctttacagggagaaacattatgtctga

SEQ ID NO: 151118 - DNA, 363 bp, Enterobacter cloacae
atgtctgagcgttctgctcgtcagtggcctgattttttatcggtggtattactggcgctgttattgtggataagtctgttttgtggctggcgcgcgctgatgttttgctgtgcctcggttttcagtgttgctttatgtgttgccgctgattgtctggatgcgctgataatgagctgccgggtgcctgaacattttgcccggttcgtctggcctctgacctggctggggagtctgtccgggctgggattagccgtgatggcaacgtctcaactgaaaacgggtcctgagcatgtcatctgggcgctggccggattgctgacgttctggctctcctttcgttttcgcgctcgtctgttcgggtaa

SEQ ID NO: 151119 - DNA, 423 bp, Enterobacter cloacae
atgcagcatgatttatttgaacacgatccggcaattcgccagttaatcggacatattgataacatcccggccccggaactggaatcacgctggccccgttcggtggttgatctgattgatgttctggaaaacgaactgaaacgccagaacgtcagcaatccccgtgagcttgcccgtaaacaggccgttgccctgtcctgttttctgggcgggcggcagttttacatcccctgcggcgatacgatcctgaccgcgttacgcgacgatttgctttactgccagttcaatggtcgtaacatggaagaactgcgtcgccagtatcgcctgtcccagccgcagatctaccagattattgcccgccagagaaagctgcatacacgacgtcatcagcctgatctgttctcacctgaaagccagaaataa

SEQ ID NO: 151120 - DNA, 519 bp, Enterobacter cloacae
atgatggcggggataccaaaaaaactgaaagccgcactgctggcggcaacgattgccggtggcggtgtgggtggttatcaggaaatgacccgtcagtctctgatccatctggaaaatatcgcttatatgccttaccgcgatattgccggtgtgcttacggtctgtgtgggacataccgggccggatatcgaaatgcgccgttacagccatgcggagtgtatggctcttctcgacagtgatttaaaaccggtttatgcggcaatcgatcgtcttgtcagggtgccgctgacgccatatcagaaaacggcgctggcaacgtttattttcaacaccggtgttaccgcattcagtaaatcaacgctgctgaaaaaactcaatgccggtgattacgccggagcgcgtgaccagatggcccgctgggtgtttgccgcaggccataaatggaaaggactgatgaaccgtcgcgaagtggaaatagctatctggaatatcaggggggcggatgaccttcgccagtaa

SEQ ID NO: 151121 - DNA, 387 bp, Enterobacter cloacae
atgaccttcgccagtaaaagtttactgctggcagccgtgtttgccgccgttctgtccggggtgttgtggcacaggctggacagcacccgccacgataaccagacgctgcgccgtgaattacagacggagcaacaggcccgcaacacggctgaatggttgttacacggtcaggaacagacgatgcaggtattttccgctatccgtgccgcaaatcgtgccgcgcggctggcagacgagacagaacatcatgatgcaaaacaaaaaattacaaccgccattaccggtgacaattgcagcactcgtcctgtgcctgccgttgctgctgacaggttgcgggaactcgaaaaacgcacccgtgccatcggtggtgatcctgcccgaaactga

SEQ ID NO: 151122 - DNA, 195 bp, Enterobacter cloacae
atgaacgaagaccagaaccgggcggtggcgctgctgctcgctgaactctggcagggggatacccgtgatattccccgcccggcggcgtatgacccgcctgtattgtgtgccggttgcggtcgtgagctgcggcctgatgtgctgagacagcagccgatgacgaactactgccactggtgccgtggagcagaataa

SEQ ID NO: 151123 - DNA, 300 bp, Enterobacter cloacae; identical to SEQ ID NO: 14324

SEQ ID NO: 151124 - DNA, 291 bp, Enterobacter cloacae; identical to SEQ ID NO: 14323

SEQ ID NO: 151125 - DNA, 576 bp, Enterobacter cloacae
atggacaggaaaacacggggccgggcttcaaaagtggatttactgccggaaaacgtacgtaaaacgctgcatgaaatgctgcgtgataaagcgatcccacaggcccgcattctggaagaaattaacgcactgattgaagacgctggcctgccggatgagatgaaactctcccgttccggtctgaaccgttacgcgacgaacgtcgagcaggtaggccataacctgcgacagatgcgtgaaatgacgtcagcactgaccgcagaacttggcgacaagccaatgggagaaaccacaaagctgattctggaaatggcccgcagccagctttttaaggccatgatgcggcaaatcgaaaacccggaatctgacgtggatattgacctgctgaaaaatgccatgctggcggcacagcgtctggaatccacggcaatgtccagccaccggcgcgagaaagaaatccgccaggcattcgcagaagaagcggcaaacgccgtcagtgaagaactgcgcgggcaggatggcatcagcgaagagctggagcagcgtatccgtgatgtgctgctgggtaaggcatga

SEQ ID NO: 151126 - DNA, 1656 bp, Enterobacter cloacae
atgaacaccagagaaaacaatcttaaagcccttcatgccccccgcaaaatcgacctgcgcaaggaggccgaactgcttggcgtgaatatcgtgaccgatatcggggaagcgcagccccgcaatgaaccggttttcctgggctatcagcgccgctggtttgaggatgaaagccagatttgcattgctgaaaaatcccgtcgtaccggtctgacatgggccgaagcgggccgcaatgtcatgacggccgcaaagccgcgtcgccgtggtggtcgcaacgtcttttatgtgggttcccgtcaggaaatggcgctggaatacatcgccgcctgtgccctgtttgcccgcgcctttaaccagctggcaaaggctgacgtctgggagcagaccttctgggacagcgacaaaaaagaagaaatcctcacctacatgatccgctttccgaacagtggatttaaggtgcaggcgctttcaagccgcccgtctaacctgcgtggtttgcagggggacgtggtgattgatgaagcggcatttcatgaagccctggacgaactcctgaaagcggcctttgcgctcaccatgtggggtgcccgcgtgcggatcatatcaacacataacggcgtcgataacctgtttaaccagtacattcaggatgcgcgcgaggggcgcaaggattacagcgttcaccgtatcacgctggacgatgccatcgctgacgggctgtaccggcgtatctgttatgttacgaatcagccgtggtcgccggaagcggagaaagcctggcgtgatggcctgtaccggaacgcgccgaacaaagagagcgccgacgaggaatacggctgtattcccaaaaaatccggtggcgcttacctgtcccgtgtcctgattgaagctgccatgacacccgcgcgggatatcccggttctgcgttttgaagccccggacgattttgaatcgctgacaccgcagatgcgccacggtatcgttcaggactggtgtgaacaggagctgctcccgttgctcgatgcgctgtcgccgctcaataaacacgtactgggcgaagacttcgcacgccgtggcgacctgacggtgtttgtgccgcttgctatcacgcctgacttacgcaaacacgaatgtttccgcgtggagctgcgtaatgtgacctatgaccagcagcgacaaatccttttattcattctgtcccgtttgccccgttttaccggcgctgcatttgatgccaccggtaacggcggttatctggcagaagccgcccgtctgatttatggcccggagatgatcgactgtgtgaatctgaccgcatcctggtatcaggagtggatgccaaaactgaaaggcgagtttgaagcgcagaacatcacgattgcccggcatcagaccacactcgatgacctgcttcatatcaaggtggacaaaggtattccgcagattgataaggggcgcacaaaagatgaaagcggtaaaggccgacgacatggtgactttgccgtggcgctctgtatggctgtcagggcgtcttatatgaatggttttgttatcgacgaggacagcatacaggcgctgccaccacgccaccgtggtgatgatgttgataacgatgattttgatgattatcaccagtttgaacgagggggctggtaa

SEQ ID NO: 151127 - DNA, 1539 bp, Enterobacter cloacae
atgggccgtattctggatatttccgggcagccgtttgattttgacgatgaaatgcagacccgcagcgatgagctggcaatggtcatgaagcgcacgcaggagcatccttccagtggtgtgacgccgaaccgggccgcgcagatgctgcgtgatgccgaacgcggtgatctgacagcacaggctgacctggcctttgatatggaagaaaaggacacccaccttttttccgaactgagcaaacgccgccttgccattcaggcgctggaatggcgcatcgctccggcacgtgatgccagcgcacaggagaaaaaagacgctgacatgctgaatgaatatctgcatgatgcggcgtggtttgaagatgccctgtttgatgccggtgatgccattctcaagggctattccatgcaggagattgaatggggctggctggggaaaatgcgcgtgccggtggcgctgcatcatcgcgatccggcgctgttctgcgcgaaccccgacaatctgaacgaattacgcctgcgtgatgcgtcttatcacgggctggagctgcaaccgttcggctggtttatgcaccgggccaaatcccgcaccgggtatgttggcaccaatggccttgtgcgcacgcttatctggccttttatttttaaaaactattccgtgcgtgattttgcagagtttctggaaatttacggactccccatgcgcgtcggtaaatatccgaccggctccacaaaccgtgagaaagccacgctgatgcaggccgtgatggatatcgggcgacgtgccggtggcattattccgatggggatgacgctggattttcagagcgccgcagatggtcagtcagacccctttatggcgatgattggctgggcagaaaaagcgatttcaaaagccattctgggcggcaccctgaccacagaggctggcgataaaggtgcacggtcgctgggtgaagtgcatgatgaggttcgccgggaaatccgtaacgcggatgtgggccagcttgcccgcagtattaaccgtgacctgatttatcccctgctggcactgaacagtgacagcaccattgatattaaccgcctgccgggcattgtatttgataccagtgaagcgggtgatattacggcactgtctgacgccattccgaaactggcggcgggaatgcgtattccggtctcctggatacaggaaaaacttcatattccacagccggtcggtgatgaagccgtgtttactgctcaaccggttgtcccggataacggtccgcagaaagaggccgcattatccgctgaagatatcccgcaggaggatgatatcgaccggatgggcgtctcaccggaagactggcagcgttcggttgatcccctgctgaaacccgtcattttttctgtgctgaaagatggcccggaagccgccatgaacaaagctgcttcattatatccgcagatggatgatgcagaacttatcgacatgctgacccgtgccatttttgttgccgatatatgggggcgtctggatgccgcagcagaccattga

SEQ ID NO: 151128 - DNA, 1320 bp, Enterobacter cloacae
atgccgcagcagaccattgatctggcgtatgccgcacgcctcccgccaaaggaggctgtcgcgtatttccgcgccaaaggctacaacatcacctggaactggtacgaacaactggcagacgcgcacgcccgcgcctttaccgttgccaaagccacccggatggatgtcctgaccacaatccgtgaggaagtggagcgggctgtcagtgaaggcatcacccgtgaggaatttacccgcacactggccccccggctgcaaaaactcggatggtggggaaaacaaatcatcgtggatgcagacggaaacgcgaaggtaatcgagctgggcagtccgcgtcgtctggcaaccatttataacgtcaatacccgtacggcgtatggggcaggacgttatgcgcagatgatgaataccgccgatttgtacccgtactggcagtacgttgccgttatggatggcagaacacgcccggaacatgcgcggctgcacaatatggttttccggtatgacgacattttctggcagacgcattacccgcccaatggctggaactgccgctgtcgcgtccgggcgctgtctgcggcccgcatgaaagaactggggctacaggtcagttatggtgcgtcattcatgaatacccgcgaagtggatgccggtacggatgaaagcaccggagagattttccgcacatcgtcaaccacgtttgacaacggtcgggtaaaaatgacgccagatgtgggctggtcatataaccctggttcggcggcatttggtacggatcaggcactgattcgaaaactggtggaaattcgcgacgcgcagttgcgtgagcaggttgttcagacgctgaataacagccgggagcgtcagcttgctttttccctctggcttaaacgcctggcaggatcacgtcagaccggtcatgaaatccgggcactgggttttatgacggaatcggtagctgaagccgtacatcagcgcaccgggaatatgccagcccgtctgcttgtaatgaacgggaaaagtctggcgaccactgctgatgccgccctgaaaacggaagatttacagcgtctgccgtcgctgatggcaaaaccacaggcggtattgtgggacagggagaaccaccagttgctgtatgttgtggcaacccgtgacggcacggcccggattgtggtcagaacatcacagacagtcggcaggcagaatgaccgggcggatgtgctggtcagtatcagccgcgtatctgcacaatcgcttgaagccgcgattgctgacgggatgattgacatactggaggggcatgtggaggtgaataagtga

SEQ ID NO: 151129 - DNA, 459 bp, Enterobacter cloacae
atgaacgttgccgtggatgtgcgacgtattcagcttgcgctggatgaactgggaaccgtcacacgtgaccgcgtcattccccgtgtgatggctgcggcgctgctgtcatccacggaacaggcgtttgaacggcaggcagacccggatacagggaaaggctgggaagcgtggagcgattcgtggctggcatggcgtcaggatcatggttttgttccgggcagtatccttaccctgcatggcgatctggcacgcagcattaccaccgattatggacaggattatgccctgattggttcgccaaaaatttatgctgccattcatcagtggggcggtacacccgatatggcaccccgcccggcaggcgttcctgcgcgtccttatatggggctggataagaccggggaacaggaaatttttgatgccatcagaaaacgcgtcagcgccgctctgaggcaataa

SEQ ID NO: 151130 - DNA, 1086 bp, Enterobacter cloacae
atgaaaaaacacgcgattggcattgccgcactgagtgcgctgtccattgacgatgacggctggtgccagctattgcctgccggtcatttcagtgcccgtgatggtcgtccgtttgatgtgacaggcggtcaggggtggttcatcgacggtgagattgccgggcgtctggttgaaggcgttcgcgcactcaaccaggacgtgctgattgattacgagcataaccagctacgtaaggacaaaggattacccccggaacaacttgtcgcggctggctggtttaacgccgatgaaatgcagtggcgtgaaggtgaagggttatttatccacccacgctggacggcggcggcccagcagcgcatcgatgacggcgaatttggttatctctctgcggtttttccgtatgacaccgccaccggtgcagtgctgcaaatccgccttgctgcgctgaccaatgaccccggtgccaccggcatgaaaaagctgaccgcactggcggcagaccttcccgacatccttcaacaggagaacaaacccatgaatgaaacgctgcgcaagctgcttgcgcgtcttggggtgacggtccccgaaaatgcagacatcaccgatgaacaggccagcgcggccctgagtgcgcttgatgcgctcgaaacagatgccggaaaagtggcggcgttgtctgccgaactggaaaaggcacagaaagccgccgttgacctgacgaaatacgtcccggtggaaagctacaacgccctgcgtgatgaactggcacaggcgactgcacaaagcgccacagccagcctgagcgccgttctggacaaggcggaacaggaaggccgcattttcaaaagcgaacgtacctatctggaacagcttggcggccagattggcgtggcggcactgtcggcacagcttgagaaaaaacagcccatcgctgcgttatctgccatgcagaccaccacagcgaaaatcccgtcgcaggaaaaaacggctgtggcggtgctgtctgctgatgaacaggcagcagtgaaggcgctcggcattactgaggctgagtatctgaaaatgaaacaggaacaagaaaaatga

SEQ ID NO: 151131 - DNA, 918 bp, Enterobacter cloacae
atgattgtcaccccggcatccattaaagccctgatgacctcctggcgtaaggattttcagggcggtcttgaagacgccccgtcgcagtacagcaaaattgcaatggtggtgaactcctcctcccgcagtaatacctatggctggctgggtaaattccctgccatgaaagaatgggtgggtaagcgaaccattcagcaaatggcagcgcatggctactccatcgccaataaaacgtttgaaggcaccgtgggcgtaagccgtgatgacttcgaggatgacaatctgggcatttatgcgccgatgtttcaggagatgggccgttctgcggcagttcagccggatgagctgatttttaaacttctgaaagatggctttacccagccgtgctatgacggtcagaacttcttcgacaaggagcatccggtatatccgaatgtggacggcacgggcagcgcggttaatacctccaacatcgttgagcaggacagcttcagcggtctgccgttctatctgctggactgctcccgcgcagtcaaaccgctgattttccaggaacgccgcaaaccggaactggtcgcacgtacccgtatcgatgacgaccacgtttttatggataacgagttcctgtttggtgccagcgcccgccgtgctgccggttacggcttctggcagatggctgtcgcggtaaaaggtgatctgacgctggataacctctggaagggctggcaactgatgcgtgcgtttgaaggtgatggcggtaagaagctgggcctgaagccgacacatatcgttgtaccggtcgggctggaaaaagccgcagagcaactgcttaaccgtgaactgttcgcggatggcaataccaccgtctccaacgagatgaagggcaagctgcaactggttgtcgctgactacctgtaa

SEQ ID NO: 151132 - DNA, 411 bp, Enterobacter cloacae
atgtcaggcacttcgcttaattcacaacggctggacacttctcgcatcacttgcacggcgattattaaatgccttcgtccggtctaccgccgcgccggaatcgcctttacacgtggcgaaaacaccgtggaagtcaccgaagaacaactggcgatcattcgtgccgacagcgtgctgtctgtggtatctgcatcgtcagcagaaacgctcgctgaggctggggggctggacgttctgggtatgggcgatctgaacgcccgtatccgtgcgaccgttgccggtctggataaggcaaacccggaacactttaccgcagggggggaacccaaagtgaaagccgtcagtgcggcgctgggggaaccggtgagcagtgcgcaaatcaaagcggcgctggctgaggcggatgcatga

SEQ ID NO: 151133 - DNA, 426 bp, Enterobacter cloacae
atgaattacgcgacggtaaatgacctgtgcgcccgctatacacgtacgcggctggatattctcacccgccctaaaacagcggacgggcagccggatgatgccgtggcagaacaggcactggcagatgcttcggcctttattgatggctatctcgccgcgcgctttgttctgccgcttaccgtcgtcccctcactgctgaaacggcagtgttgcgtggtggcctggttttatctgaatgaatcacaacccaccgagcagatcaccgctgcctacagggacacggtgcgctggctggaacaggtgcgcgatggcaaaacagatcccggcgtggaaagcaggacggcagcctcgccggatggtgaaaaccttgtgcaggtgcagtctgacgcgccggtcttctcacgaaaacagaaggggtttatctga

SEQ ID NO: 151134 - DNA, 549 bp, Enterobacter cloacae
atgctggaagaaaccgaagccgcactgctggcgcgcgttcgtgagttgtttggggcaactctgcggcaggtggaaccccttaccggcacatggactaacgaggatgtgcaccgtctctttctggccccgccatcggtatttctggcatggatgggctgtggtgaggggcgtacgcgtcgggaagttgaaagtcgctgggcattttttgtcgtggcggagttgctgaacggggaaccggtaaaccggcccggtatttatcagattgtggagcgactgattgccggtgttaacggtcagacgtttggcccgaccaccgggatgagactgacgcaggtcagaaatctttgtgacgacaaccgtatcaatgccggtgtggtgctttacggcgttctgttcagtggcactaccccgctgccgtccgtggtggacatggattcgctggatgattacgagcgtcactggcagacctggaaattcccggacgaaaccccggaatttgccgcacatatcaatgtgaatcaggaaaaggatcatgatgctgaaaattaa

SEQ ID NO: 151135 - DNA, 207 bp, Enterobacter cloacae
atgatgctgaaaattaaacccgcagcgggaaaagccatccgtgacccgctcacgatgaaattactggctccggagggagaagaaaagccccgtaacagtttctggatacgtcgccttgcagccggtgatgtggttgaagtcgggaacaccgaaaacacggcggatgataccgacgctgcgccgaaaaaacggagtaaatcgaaatga

SEQ ID NO: 151136 - DNA, 1488 bp, Enterobacter cloacae
atgagcgatatttcatttaacgcgatcccgtcagatgttcgcgttcctctgacgtatatcgaatttgataacagtaatgccgtcagcggaacaccggcaccccgtcagcgcgtgctgatgttcgggcaaagcggaagtaaagccagtgcggcaccaaacgtgcctgtccgtatccgttccggctcacaggccagtgcggcgtttggtcagggttccatgctggcactgatggcagatgcattcctgaacgctaaccgcgtggcggagctgtggtgtattccgcaggggaacggcaccggtaatgcggctgtcggtgaaatttcactgtcaggaacggcaggcgaaaacggctcgcttgtgacttacattgccggtcagcgactggcggtatctgtcgcagcaggtgcaacgggagcggcgctggctgacctgctggttgcccgaatcaaaggccagcctgatttaccggtgacggcagaagttcgcgcagacagcggggatgatgacacccatgcagatgtggttctgagtgcaaaatttacgggtgcattatctgccgtggacgtgcgctggaactattacgcgggtgaaacgaccccttacgggattatcacggcattcaaagccgcctccgggaaaaatggcaacccggatatcagcgcaagtatcgcgggaatgggcgatctgcaatacaaatatattgtgatgccctataccgatgaaccgaacctgaatctgttacgcactgaattgcaggaacgctggggaccggtcaatcaggctgatggctttgccgtgacagtgctgtccggcacgtatggggatatttccacgtttggtgtcagtcgtaatgaccatctgatctcctgtatggggattgccggtgcaccagaaccgtcatatctgtacgccgccacactgtgtgccgttgccagccaggcgctttccatcgacccggcgcgtcctctccagacgctgacgttgcccggaagaatgccgcctgcggtgggggatcgtttcacctggtcagaacgtaatgcgctgctgtttgacggcatctccacgtttaacgtgaatgatggtggtgaaatgcagattgaacgcatgatcacgatgtaccgcacaaacaagtacggtgacagtgatccgtcttatctgaacgtgaataccatcgccacgctgagttatctgcgttattcgctgcgaacccgcatcacgcagaaattcccgaactacaagctggcaagtgatggcacccgctttgccaccggtcaggccgtggtgacgccatccgtgatcaaaacggagctgctggcactgtttgaagaatgggaaaacgccggactggtcgaggatttcgacacgttcaaagaggagctgtatgtggcacgtaacaaggacgacaaagaccgtcttgatgtgctgtgcggcccgaatctgattaaccagttccgcattttcgcggcacaagtacagttcattctgtaa

SEQ ID NO: 151137 - DNA, 357 bp, Enterobacter cloacae
atggctggaaatcagcgtcagggggtggcgttcatccgtgtcaatggcatggagcttgaaacgatggaaggtgcctccttcacaccttccggcatcacccgtgaagaagtgaccggctcgcgggtttatggctggaaaggtaaaccccgcgccgcaaagctggaatgcaaaattccgggcggtggtgatatcggtctggatgaaatcatcggctgggaaaatatcacggcagagtttcaggcagataccggggaaacctggatgatggcgaatgcctggcaggcagatgaaccgaaaaacgacggcggcgaaatttcgctggtactgatggcaaaacaaagcaaacgcattgcataa

SEQ ID NO: 151138 - DNA, 435 bp, Enterobacter cloacae
atggacgaaatgaatttaagtcctgaagcacaggaactgcgtgacagcattgtggcggagcttcagtccggtgggctgaaactgaaagacggcctgccgttcggcaccggtgacgagactgaaatgcagtatgacgtgacactgcgtgaactgaccgcaggcgatctgattgatgcccaggcggctgctgaaaagctggtaatgagcaaggaaggcccggtgctggtcagttccccgtcccggatgggactggaaatgctgcgccgacagattgccagcgtgggttgcatcaaaggcccgttatcgctggcgctgatgcgcaagctgtctgttgatgacttccagcgtctgtcgctggctacagaaatgtacgacatggctgtggcggcatcgctgacgcaagaacgggggcgagtggctgcggtgccggaatga

SEQ ID NO: 151139 - DNA, 2073 bp, Enterobacter cloacae
atgaccgggaaacgcttaaaggcgtctgtcattattgatcttaatggcaatctttcccggcgttcccgccagtattcgaaccagataaacgccctgtcccgtagcgggcaaagttccctgcgtgccctgcgtatggaggttgtgcgcgtttctggtgccattgacagaatgggttcactgtcaacccgtacattccgaatgctgtcagccggggcgctgggtatcgctggtgtgggttacaccgccaataaactgtttattggtgcagccgcccagcgtgagcagcaaattatcgccatgaactcgctgtatcacggcgataaggtcagagcgcaggccatgatggcctgggcaaagcagaacgcgaaggacaccacgtgggggctgagtggtgttctggatgagatccgttcgtcgaaaggcttcggcatgacggatgaacagacgaaacagttcatcaccatgttgcaggatcagggggccatgcacggctgggatttacccactgcacagggtgcctcactgcaactgaaacagatgtttgcccgccagcaaatcacggcggcggatgccaacctgctgaccggttacgatattaacgtttaccagacgctggcggatgcactgggtaaagacgttaaggatatccgcaaacaaggtgaaaaaggcaagctgggtctgaaatccattctgacggtattcagaacgctgtcagaacagtcaaaaggtgcacaggccagtgcgatgaactcctgggacgggatgttcgcccagatggaagctaacctgcttgaatttcgcataaaggtggcaaacagcggcccctttgaagaaatcaagaacgagatgcgccgggtgcttaactggcacgacatggcggataaatccggggaacttgacgcactggcagaaaacattggtcagaaatttctgaccacgttcagaacggtaaaaatcgcggcgcaggaattatggcgctggctgaaaccgggtaaagatgcgctggcatgggttgaccagaatattgtcagcctgaaaaaactggctgctgttctggtgtctgtctggcttgccaataaagccctgagagcaggctgggccgtggcaaaaccctcatggcaggttgccagttatccgtttaaaaccgggcgtcgtatgtggcgctggatgcgaaaccgcaaacgtgggcaggcaggtctgccggtcccggatgccatgacgtctgagacgctgttgcagggtatcggcattcagcgtgtgtttgtcatcaactggccccgtggatttggtggctacgggagtggcggcggtcgtcgcggacggagcggcggaagaatggccccgctgttaccccgccagccgttattgctgtccgggccacagccgctggcattacctgcaccacgccctgtactggcattacccccacccggcgtaccggtaacagcacggcctgcaccattacctttacccggtaaatccggtcttctgagcaggcttgcaggcagtgctgccgggcaactggttacgggaacggtcggaaagctggctgatgctgggcgtgctgttggcgggtggttttccggtatcggaaacaaacttgcaggcagtgcgatcggtcgggttgtgacaaaaggtgccggggcgctgggctggatggggaaaggtgccggtcgtgcgttgtcacgtctgggtggcccggtaatgggggcactccagcttgcccccgtcctgatggatgagcaggcgtcaccccatgaaaaagcaggcgcaattggcagtacagccggtgcatggctcggcggtgccgttggcagccttgccggaccgctgggtacggttgccggtgccacgctgggcagtgtcgccggggagtatctaggcggttttgtaaccgacctgtatcagaaatggacggccccggataaggaaccgcaggaacaaaaagtgaatgcggaagcctcgctgcgcgtcgaacttggcgaggggttacgtctgaccagttcccgcgtcaccgaggacggtatggggctgaatatttacgcgggcgataactacattacaggctggtaa

SEQ ID NO: 151140 - DNA, 1488 bp, Enterobacter cloacae
atgtttgaagatgctttaaatgccgttaatgctgtccgggataaaatcagcggtggtaagaaaacaaccggcaaaggcacgtttcgtaacgtgccgtttctcgtcatcgaggagcaaaaacaggctggcggacgtcgcctggttaaacgcgagtacccgttacgtgataccggcggcgtcaatgacctggggaaaaagcttcgctcccgtacattcagcgcctgcattctgaacagcaacgcagaaacagccagagatgaagcgggtgcgctgatggatgctcttgatgctccgggtagcggtgagctggtacatcctgatttcggcactgtggacgtcatggtggattcatgggaatgccgcactaaagcggatgaactgaattattacgcgttcaccgttaccgtttatccgtcgttgcaggatactgccccggactcagagacagacaccagtgcagccgtaccggcacaggccgttgctgtaaccggttctctgggagatacgctgtcctctgtctggcagaccgtaaaagatggcactgcggcggcaaccgccgtgatggaagctgtaaccggtgtcatcgatgatatcagtgatgcggtggacaatctgggggttacgcagactgtcagcggtctgatgggatcgctttctgcgatgaaaggctctgtgaccagcctgattaaccagcctgccatgctggcctcctcgctgatgggggcgctgtccggcgtttcatcgttatgcgatacccggacagcattttccacatggaaccgtctggcgcagcgattcgaacgtcgccatgccgccaccgcaggcagacaggggacaatcacaacctcgtacaacagtccggttgcagaaaaaaatattgccacactgaactacgtcatgctggcagcagcacagacataccgggcggaggcagcaagccaggcactgactgcggcactggatttcagtcgccggatggataatgccgcccgtgcacctgtactggacgccccgtccaccacaaccggcacagccagcggggccagcagcacatccgctaccgtcacacagggacagttacagttaactgccataaccccggacggcggcttttcacaggtatccttttcagacagtggtacagccacgcccccggtatttgaaagtgtgtccgatatcggaaaaacagccgccatgctgggggcagcgctggataccgtcattctgacggcatctgagcagggcttttcgacagacagcgttcagcttacgcaactgcgtctgctggttgttgccgacctggaaaaacgcgggctgcaactggcaggcagtgaaacgcaccgcctgccggagacgatgcctgcaatggtggctctgtaccgttacacaggaaacagccggaactggcaacggctggcccgcaggaacggtatcagcaacccgttgtttgttcccggtggggtcagtattgaggtgattaatgagtaa

SEQ ID NO: 151141 - DNA, 1140 bp, Enterobacter cloacae
atgagtaataccgtcacgctgcgaacggatggcaggctttttaccggctggacgtcagtctctgtcacccgctccattgaatccgtagccggatattttgagctgggggtgaatgtgccaccgggtacagatttatccgggctggcaccggggaaggcgttcacgctggaaatcgacgggcagattgtctgcaccggttatatcgattcgcggcgacgccagatgaccgctgacagcatgaaaatcactatcgccggacgtgacaaaacggctgacctgattgactgtgctgccgtttacagtggcggacagtggaaaaaccgcacactggagcagattgcgcgtgacctgtgcgctccttatggcgttaccgttcgctgggagctttccgataaggaaagttcggcagcttttcccggcttcacgctggaccattcagaaaccgtttatgaggcgctggtgcgtgcctcccgcgcacgcggtgtactgatgaccagcaatgccgcaggagagctggtattcagccgggctgccagcacagccactgatgagctggttctcggagaaaatctgctgacactggattttgaggaagacttccgcgaccggttcagcgaatacaccgtcaaggggtatgcccgcgcaaacggtgctgagggtgatgatattgatgcgaaaagtatcgtctcccggaaagggaccgccactgacagtgatgtaacccgttacagaccgatgatcatcattgctgacagcaaaattacggcgaaggatgcacaggcccgcgccctgcgtgagcaacgccgcagactggcaaaatccatcacctttgaggctgaaattgacggatggactcgcaaggacgggcaactctggatgccgaacctgctggtcactattgatgcctcgaaatatgccatcaaaaccacggaattactggtcagcaaagtcaccctgatactgaatgaccaggacgggctgaaaacccgcgtcagccttgcaccacgcgaaggctttctggtgccggttgaaagcgaccgtaaaaacaggaaaggcggcgacagtaacggcagtattgatgcgctggttgaagattattatcgcagacacccggagaaaacgccgccgtggaaagagtaa

SEQ ID NO: 151142 - DNA, 594 bp, Enterobacter cloacae
gtggaaagagtaaatgattccgccctgaaccgcctgctgacgccgctgatgcgtcgtgtgcgcctgatgcttgcgcgcgctgttgttaacgtgattaacgacgggcgaaaggttcagaacctgcaggtcggcctgctggatgatgaggaatctgatgaagtggagcgcctgcaaaattacgggcatttcagcgttcccctgccgggagcagaggcgctgattgcctgtgtaggcgcacaacgtgatcaggggattgccgttgtggtggaagaccgccgctaccgcccgacaaatcttgaaccgggtgatgcaggcatttaccaccacgaggggcatcgtatcaggctgacaaaggacggacgctgcatcattacctgtaaaacggttgaggtttacgctgatgaaagtatgaccgttgacacacccagaaccacgtttaccggcgacgttgagatccagaaaggtctgggcgttaaaggtaaaagccagttcgacagcaatattactgccccggatgccatcatcaatggcaaatcgacggataagcatatccaccgtggcgacagcggcggaaccacggggccaatgcaatga

SEQ ID NO: 151143 - DNA, 438 bp, Enterobacter cloacae
atgaccgatttagccattatctggacgaacggacgcggcgatattgcacaggatggcattgatatgctgaccgacgacagcctgacaaccgatgtgacaatctccctgtttacagaccggcgcgcgctggattctgacacgctgccggatggttcagatgatcgccgtggatggtggggtgacagttaccgcgaccgccccatcggttcgcggttgtggctgttatcacgtgaaaaagccacaccggatacgctggaacgcgccagagggtatgccgaagaggcgctggaatggctgaaaacagcgggccgggtaagtgcgattaacgtcagagcggaacagttacatcagggctggttatacctctacattgcactgacattaccggatggttccgttattccttatgagtttaaagcagcatttaacggggtttaa

SEQ ID NO: 151144 - DNA, 1083 bp, Enterobacter cloacae
atggcttattcaccaccgacattatcatcgctgattgcccgtacagaacagaatattgaacagcgcctgccgggtagctggcctcaggcccgtgaaaaaacgctgagtgccattgcttatgctcaggcgggccttgctgccggttgtcacgagcatatttcatgggttggacggcagattatcccgtcgacagcagatgaagatgagttgctggagcactgccggttctggggcgtgcgccgcaaacaggcgacagccgccagcggcccgctgactgtcaccacatcggcagcgaccaccattcctgccggtacacgctggcagcgtgctgatggtgtggtttacagcctggctgatgccattgtgattgaccgtgcaggaacgacggaaattaccgttaccgcactggctgccggtgaagcaggaaataccggtgagaatacccttttaacgttgatcaccccggttgcctgtgttgtttccgatgccatcactgtaaaagggttttccggtggggctgatattgagagtgcagcggagctgctgtcacggctggaatatcgtgtccagtatcctccgttcggcggtaatcagtttgattatgttcgctgggcgcgtgaagtcagcggcgttacccgtgcctggtgttttccgacatggaaaggcggtggcacagtcggggtgacgtttgttatggataaccggagcaatatttttccacaaccggcagacgtggaacgcgtggcggattatatcgccggtcatactgacccgatcaccggtctgattgtcggacagcctgacggtgtaaatgtcactgtatttgcgccaaaggcaaagccggtaaatccacggatttatatatcaccgaagacagccgaactgaaacaggctattacccacgccattaataccatgttttttaatgaggtgacgccgggcggcgcacttgccccctcccgtattatccgtgcggtggcaggtgttaccggtctggatgattttgaagtgcgtttcccgacagagatccagcgttcggagaatacggaactgttaacaccggggacaattgaatggctgtaa

SEQ ID NO: 151145 - DNA, 543 bp, Enterobacter cloacae
atggctgtaacaccctatcagacggcctttctgcaattactgccgtcagggcttgcctggaataaaagccccgacagcaaattatctgcgctggcgcaggccatcagcgacgtgattgccactgcggcggatgatgcgcggcaaatgctgcgggagcgtttcccgtccacatcccgctggtatctgggggagtgggaatcatttctggggttgccggactgtaccagcgaaaacggcaccttgtccgaacgccagcgggctgccgcgaataaaatgcgtatgaccggcaatctgagtcggcgcttttatgaatggctggctgcacagtacggttttaccgtcaggctgacggattccacagaaggccagtgggttacgcaggtcaatatttacggtattaaaaattatcgcaacgcaacggtgctggataatgttctgacgccgttacgtgtttatgaatcgggtgcgctggaatgtttactggagaaatataaacccgcacatcagatttataaatttgtttaccatgacggagataactaa

SEQ ID NO: 151146 - DNA, 1530 bp, Enterobacter cloacae
atgttttatattgataacgacagcggcgtaaccgtcatgccgcccgtatccgcccagcgtagtgctatcgttcgctggttttcagaaggtgacgggaataatgttatcacatggcccggcatggactggtttaatattgtgcaggcggagttattaaacacgctggaagaagccggtattcaaccggataaaacaaaattaaaccagcttgcactgtccattaaagccattatgagcaataacgcgctgctgataaaaaataacctcagcgaaattaaaactgccggggcatcagcacagcgtacagcacgtgaaaatctggatatctatgatgccagcctgaacaaaaaaggactcgttcagctaaccagtgccactgacagccccagtgaaacgctggcagccaccgcaaaagcggtgaaaattgcgatggataatgccagtgcccgtctggcaaaagaccggaacggagcagatattcccaataagccgctgtttatccaaaacctcggtttacaggaaacggtaaacaaggctggtaacgctgtccaaaagacaggcgataccttgtccggcggacttacttttgaaaacgactcaatccttgcctggattcggaatactgactgggcaaagattggatttaaaaatgatgccgacagcgatactgattcatacatgtggtttgaaacaggcgacaacggcaatgaatatttcaaatggagaagccgccagagcaccacaacaaaagacctgatgactcttaaatgggatgctttgtctgtccttgttaaagcccttttcagcagtgaagtaaaaatatcgacagtcaatgcactgaggatatttaattcatcttttggtgctatttttcgtcgttctgaagaatgcctgcatatcatccctacacgagagaatgagggagaaaatggtgatatagggccactacgcccctttacgcttaatctcagaactggtcggataagcatggggcatggtcttgatgttacaggggatatatttgcaaaccgttttgcaattaacagtagtaccggcatgtggattcatatgcgtgaccagaatgttattttgggacgcaatgcggtatccaccgatggtgcgcaggcattacttcgtcaggaccacgctgatcgcaaatttatgattggtggactggggaataagcaatttggcatctacatgattaataactcaaggacagccaatggcaccgatggtcaggcgtacatggacaacaatggcaactggctttgcggtgcgcaagttattcccggcaattatggtaattttgattccagatatgtgaaagatgttcgacttggttcacagcaatattatggagtgaacaactggcaaacatggaatttccagtgcccgtcaggtcatgtattgtctggtattaatgttcaggatacagggtccaactctgccgataatatagcgggcgtttattacagacccgttcaaaagtatataaatggcacctggtataatgtagcgagcgtttaa

SEQ ID NO: 151147 - DNA, 528 bp, Enterobacter cloacae
atgatgcacttaaagaacataaaagcgggtaacgctaaaacactggaacagtatgagttaacaaagaaacacggagttatctggctttactctgaggacggaaaaaactggtatgaggaagtgaagaactttcagccagacacaataaagattgtttacgatgaaaataatattattgtcgctatcaccagagatgcttcaacgcttaatcctgaaggttttagcgttgttgaggttcctgatattacctccaaccgacgtgctgacgactcaggtaaatggatgtttaaggatggtgctgtgattaaacgaatttatacggcagaggaattgcagcagcaggcagaaaatcggaaaggcagacttcttgcagatgctgaatccgtgattttgccgctggagcgcgctgtcaggctgaatatggcaacagacgaggaacgcacacgactggaagcatgggaacgctacagtgttctggtcagccgtgtggatacggcaaatcctgaatggccacaaaaaccagagtaa

SEQ ID NO: 151148 - DNA, 534 bp, Enterobacter cloacae
atgatgcacttaaaaaacattactgctggcaaccctaaaacaaaagagcaataccagctaacaaagcaatttaacatcaaatggctttattcagatgatggaaaaaactggtatgaggaacaaaagaatttccagccagacactttgaaaatggtctatgaccataacggcgttattatttgtattgaaaaggatgtttcagcaattaatccagagggtgcaagcgtcgttgaattacctgatattacagcaaatcgccgggctgatatttcggggaaatggatgttcaaagatggcgtagtgataaagcgaacttataccgaggaagagcagaggcaacaagcggaaaatgaaaagcaaagcctgttgcaacttgtcagggataaaacccagctatgggactcacagctacggctgggcatcatttccgacgagaataaacaaaaattaaccgagtggatgctctatgcgcagaaagtcgaatctacagacacttccggcctgccagtaacgtttcccgaacaaccagaatga

SEQ ID NO: 151149 - DNA, 660 bp, Enterobacter cloacae
gtggaagttattggcactcgcggcgcaatgaccatacgcgttactacgccgagcacgtccagcggtggcggaattactaacgctcaattcacttatattaatcatggtgatgcttacgctcctggctggcgacgagactacaacacgaaaaaccagcagcctgcatttgctttagggcaaacaggacgcagggtcgcaaatgataaagctgttggctggaactggaatagcggtgtttatgatgcagatatcagtggtgcatcgacattaatcctccacttcaatatgaatgcggggagttgccctgctgtacagttccgcgtgaattacaggaacggcggtattttttatcgttcagcgcgtgatggttatggctttgaagctaactggtcagagttttacaccacaacacgcaaaccctctgcgggggatgttggtgcatatacgcaggcagaatgtaactcaaggtttattacaggtattcgccttggcggtctgtcatctgttcagacatggaaaggccccggctggtctgacaggtcaggttatgtcgttacgggttcagttaacggaaaccgtgatgaattaattgatacaactcaggcaaggccaattcagtattgcattaatgggacgtggtataacgcggggagtatttaa

SEQ ID NO: 151150 - DNA, 594 bp, Enterobacter cloacae
gtgctgattggctatgtaagggtatcaacaaatgaccagaatacagacctgcaacgaaacgctcttgtttgtgcaggatgtgaacaaatatttgaagataaattaagcggaacaaggacagacagacctggattaaaacgcgctttaaagcgccttcaaaaaggtgacacacttgttgtctggaaactggatcgcctcgggcgaagcatgaaacatttgatttctctcgtaggggaattacgagagcgagggattaattttcgcagtcttactgacagtattgatacgtcatctccaatggggcgttttttcttccacgttatgggtgccctggctgagatggaacgagaactaatcatcgagcgaacgatggctggacttgctgccgccagaaataaaggccgtattggtgggcgaccacctaaactaaccaaagcagaatgggagcaggccgggcgtttattagcacaaggaatcccccgcaagcaggttgcattgatctacgatgtggccctgtcaactctgtataaaaaacaccccgcgaaacgaacgcatatagaaaacgacgatcgaatcaatcaaatcgatcggtaa

SEQ ID NO: 151151 - DNA, 189 bp, Enterobacter cloacae; identical to SEQ ID NO: 14298

SEQ ID NO: 151152 - DNA, 696 bp, Enterobacter cloacae
gtgggaaaagagaaaaaatcacgcattctgacgaaaccgtgcgttattgagtatgaaggccagattgttggctatggttcaaaggagctgcgcgttgaaaccatatcctgctggctggcccgcacaattattcagacaaagcactattcccgccgttttgtgaataactcttacctccacctgggagtattcagcggacgcgatctggttggcgttctccagtggggatatgcccttaaccccaactcaggtcgtcgtgtcgtgcttgaaacggataaccggggctatatggagttgaaccgcatgtggctacacgacgacatgccccgcaactctgaatcacgggccatcagttatgcactgaaaaccataaggttactgtatccgtcagtggagtgggttcagtcttttgcagacgaacgctgcggacgtgctggcgttgtgtatcaggcgtcaaattttgattttattggcagccatgaaagcacgttctacgagctggatggtgagtggtatcacgagataacgatgaacgcgattaaacgcggtggacaacgaggcgtgtatttacgggctaataaagagcgtgccgtggtgcacaaatttaatcagtatcgctacatcaggttcctgaacaagcgagcaaggaagcgactaaataccaagctattcaaggttcagccataccctaagtga

SEQ ID NO: 151153 - DNA, 471 bp, Enterobacter cloacae
atgaaaagtcacgagtacattgtgatttgcggttttaaccgcagtaaagtcggccgatatattgccattgttgcctcagttatatcgttcgttctgattttactagcactcacactaatcgaatggctgaaaaactttcacattaacagccacatacctgcctcagttttttcacttattagcgccggtgggatctacatggggttgtatacatggtttgataaaaatctctggcataacacctacctcgggaaatttttatgtgtgccaaatcttgcaggccgctggaatgttgaaggccatacccgatctgaaggtggtaaaccctgggaaggtgagctgagaattgtccagtcatgggacaaagtcagaattcatctgaaaactcaatcatcgcattcggatagtgtgacagcctccatcattcatgacgagggaattggttaccagctgctttataactaccgctga

SEQ ID NO: 151154 - DNA, 585 bp, Enterobacter cloacae
atgaatgaaaacgccggagaaagcgaatcggtgagtgcgactcgattagcgcctgtgctttttgcagccctgctgtccatgatttgcttcttcaccagcattatcatcattccgcaggtgtttagctgcatggctattggggcagcagaaaccggatactttctgtcgtttatctcactggtcgccgtcggggctgctgcgatgatgccgcgcctcatagcgcgtttacgtgagtacggaaatctgtacacggcgtttagctgctacgctgccggacatttcatattttcattcgctgataatgtagtgttctacatcgctggcggggttttaatgagttgtgggtttggtctgtcggtgccgcttgtgaatcatatgacagtcgagcagagtcacgctcgcgtccggggacgtaaccttgcctggctttctatggctatattctccggccagtttttatcatcattcatggaaatcatcctaggagattcatcagtcgtcttccgggggaccgcgacaattgcggtggcggtaattgtcgctctcatggtgatacaccggaaacgtcgctttaaaacggcataa

SEQ ID NO: 151155 - DNA, 2139 bp, Enterobacter cloacae
atggaaattgaaattaattgctgtaataacatcgataaagcaaatataactctggcagaaaaaaaactaaatattaaatttgcgcctaacggcaccggaaaaagcaccatttcccgcgcgattcagtgtacggtaaacggggatgaacagggtctcagcgacctgcttccgtttagataccgtggttctaatcccgatgcagtacagcctagggtaactggtgtcgatggcctgcaaaacgtcatgtgctttaatgaaaaatatgtcgatcaattcacttttcaaccagacgagttagtaagtaatagttttgacatcttcatcaaaagtgaagcgtatcacgagacagaacgcgaaatcgaagccatggtcgtggccatacggcagcagtttgctgataacgtcgggcttgaagaattcatcacgcacctgggggaactcagcgccgcatttaagctgagtagtaccgggattgcaaaaacgtctaccggtatgaaaggcttatccgctggcaacaagcttcagcacattcccgacggtttggaatcttataagccgtacatccaaagtaaaagcagcgtagagtggatcgagtggcagacccgggggtatgagaaattctccgcgctatccgacggctgctgtccgttctgtactggcgactcccgtgaaaaggccgagcagattagccgcgtcagcgcggagtatgataaggctgtcattaaaaacctgatcggcctgatcggcgtgctagataaactcggcgaatatttttcagagcctgcccgtgcccgcctcgctgatattacaaccctaaaaagtgggctggaaaaacagcacgaagaatatctcgtgacagtgaagaagcagacagacagcctgataaatatgctgaatacccttaagactcttaacggctttacgttcagcgcttcaaccaacgtcaaggctgcactggaagcctgtcgcctagacgtgaagtttttcccggagctgcagtcggataaaacggcccgcaccgtagccagtctcaatacctctttagacgacctgacgacgcaggccggacgcctgcagggtcaaataaataagcagcgtcagggcatgcagaagctgatcctcaagcataaaaccgatatcaatacctttctggcttacgcaggctatcgttatcaggtggatatcactggggaaggcgataaatgtcggctgaaactgcgccacgaagactttgaaggctacgtcagcggcggcagccagcatctcagctacggtgaacgcaacgcctttgccattgttctgtttatgtatgaatgcttagccaagaagccaggcctgatcattcttgacgacccgatttcatcgtttgataagaacaagaaatttgccatcctggagatgctgtttcgccgcaataccggtgagtgcctgaaaaatgaaacggtactgatgctgactcacgatgttgagcctattattgatacactgaagtccgtcaggaagctgttcagtaatctggttacggcctcacacttgcactacagcgcaggctgcatcaccgagcagctcatcggtgaaagtgatatccgcacttttgctcagatctgccagtctgtcactgactctgatagtgaagacatcatcaagttgatctatcttcgccgacattatgaaattatggacgacctcggtgatgcctatcaggtgctgtcaaacctttttcatcaccgtgaaacgcccatcgacacccgtgaacccgttgtgcagggagtgggacatcctgaaatgtccgcagaaaaagttgccttcggctgccaggcaatcgccgatcgcattcccggctttgactaccaggccactttcgttcagctcaccgacccggatcgtatacgtgcgctttatctgctctgccgtaatggctacgagaaactgcaggtgttcaggttgcttcagaccggactcgagaacgcagtaatacgtaaattcatgaatgagacctaccacattgaaaatgaatttatctgtcagctggatcctgcccggtttgatctcattcctgaatatgtcatcagggagtgcgacgcgcttatacttcctcctccaccggcaaatgacgatgcgctggaagaaattgcctga

SEQ ID NO: 151156 - DNA, 249 bp, Enterobacter cloacae
atgaaccatcctgaaattcacgtcaaagactggattgatgtgggcaatcgtgagtgtgtggtgcaacgacttcttcctccagtgtctcccgtcggcgtctgtattgttgttctgaataaaaccaaaccgaccacccggatcgctggttggaaaggtgaaaagtggtacttcatgcccagccatgactttggtggctatgcagatgagtatgatccctgtgtacgtgaactgaaacggggccgtcgctga

SEQ ID NO: 151157 - DNA, 1356 bp, Enterobacter cloacae
atgtttaatttaatagttgctggtgatatttataacttcatcaaagaagattctggccgagaaaatttttcagtttcgcgtttacttgaatcaacaccagaggatattagaaataatttactacctctcactgatgaatctctagaatatctctcctcattacctgtattatttatgacggaaccggaaagagagtggggcgaggattttgacacatctgaatactctgagatcagaataggtagtattagtgatttaaaaatcactaaattggggcgagatacagttattgcgttcaactttaaaattgaaagaaatctcggcaaatgcaagttaaatgatgaaagtcattattccgatgctctatccctaggtggcttcggactacacagaactcactggtcaataaaacgacttgatattgacacagtattagatttacttggtatagagggacaattaccaccagttcagcctaaaaaaaccaacctcccaaacaaaaccgaagatatcgtaatatctgatgttaatacctatcttgataaagtattgaaacataactttgatgagaatgaagaggtattttatcgcggacattcagatcatcggtatgaattggaaccatcattataccgtaaaagtccggagggggtttttcgttataggcaacatgaatcagaaatgattacagaattattaacagtccaaccatccgaatttactaccgatagatatatgctcgacaaactggttcgaatgcaacactacggtcttccaacacgtttacttgatgtaaccacaaatcctctcattgccctttacttcgcatgttccagtaaaaaaatagaaaagggaagtgaggttgatggtaatgtgataattattaccacaaaaaaaaatcaaattaagttctttgactctgatacggttagttgtattgcaaacctttcgcgtttgcctgaacatctaaaaaaggaattagatttcaaccttaacaagcatgaatttaataaaactgatccttgtgcgcaactcttacatttaatcaaggatgaaaaatcatatttcaaacatgtcattgaaccttctgacttaagaagtctacttgttgtgaagggaagaatgacaaacccaagaattaactctcagtcaggggcattcttaatattcggtgaagatgccgttcttcctgaaacaggttttagtgagataaaaataaaaaaactacgtatacaaaacaaaagtggtttaatgaaagagctcgcacgctttggtatcaacgaaagtacagtttatccaggcattgaaaaagcggcaggggaaattgcaaaaaaatatgatatttcaaaaatataa

SEQ ID NO: 151158 - DNA, 966 bp, Enterobacter cloacae
atgtgtataagagacagtgataaaacggcgcattcaaatcttcatgatccccttctcagatggtgcgatttcgtattgcgatatataccaccagcaaagagacttatttataagtcagatcgctttcccgtgagtgttagtgatgacgaaaaaattggtttgaaaagaatagaatatttacttactgcgggtggagatgttaatccgtatcaaagtaaaacgctgacactttttaataataccagtagtaaaaaagagaaaaagagaaccgatgggctatgggctgactgggatattcatcatttgcatttgccactgaacccggcagatcccatgaaaaaatattctgaccgttctgattgggttttgttcttgagggtatacaaaaatgcagttctttttattgatataaaaaagcatgatagtaacgttgagcccgatctcttttcacaacaagatctcatgcgaacttttatacgaaactggccggaggaagccgaaagacatcagatgaaaggcgtagcggggctcgccagaaaaggacccatcactgatgcagatgttgcaaaattgaggagcaatggaataaatgtcccctttgaaattgatgggaaagtctatgttccattgggtatgggaatgactacggctgtaactgctacgagggtatcaatatttagagacaaaatatatcgctatgccagagaaatagaagaagtattgctggatgacaaaaaacaattcatgcaggaattacaacatctctcaatagataagcctgattttcagataatgatgtttgatgatggtggtttgggtattcatgagaaaggatcagataaagcatggaaatttgcgcgcgtaaatcctcaagtacataatgatcttttttgcgtgttcaataattctttaatgcctgagtgggctgggcctgtagtaatatctcactggataaacaatccatag

SEQ ID NO: 151159 - DNA, 285 bp, Enterobacter cloacae
atggtatcattttcaaacatggatggtgctcactgcgattccgtagtagatcactataccttgccatcaaatagtattcagatggatgtaaaagttcctgttcaaccatcaaattttgaccctttgcagaagggggccttaatgggggcctcaacgtttatggaacaagataaaaaccattctaatcaatgcaattacaaaacaaaatccattccgagtccgggcaccactattttaaagaaaccagcctacgggctggttttttgctttctggggttctggtag

SEQ ID NO: 151160 - DNA, 654 bp, Enterobacter cloacae
atgcggcaatacagctacgactgctggctgatggaggatactgatacggccatgaaagccattactcgcaatatcgatcgtggtatatggcgggatctgatgcaacgctcgggaatgctggcgctcatggacgcacaggtccgcgacgagtggtacaacagcctggagaaagacgatattccggctatcagtgaagagaatattctcaacacattcgaacaactgcatctgaataaaggtgaggtgtttgaacgaggtgtgattaacgtgtttaaaggtctgagctggaattttaagacaaacagcccctgtaggtttggcgggaaaatcatcgtgacggggcttgtcaaatatgaccggtggggatttggtctgaactggggctggcagcgtgaccggttaacggaccttgagcgcatgctgatgctgctggatgggaaggccatccccgacaatcgcgccgacgtcacgcgccggttaagcgaccatatccatgagaacaggcatagcacccgttatgaggatgagatgtctgtgattaagtattttcagaagggaactgtccatatcacgttcaggcgatcggagctggtcgataagctgaacgacattatcgcgaaacactatccaggggcgttgcccactaaacagtaa

SEQ ID NO: 151161 - DNA, 189 bp, Enterobacter cloacae
atgtcagatcttaccctcaccgaacctgaagtgttaaccggccataccgatgtgatttgttctaccagtattgagcgcatcatcaccggacgtaatttcgcgattgcacagattgaaacgctgatacaacaacttgacgatatctcgacgctgacccgcagcatcggcggtggtaaagcgaatgaatag

SEQ ID NO: 151162 - DNA, 204 bp, Enterobacter cloacae
atgccggaattaaccaccgaagtggctctcaacattctgattggctggctgcaggacaacatcagttgcaacaccggcattattttcgacaacgacgaagacaagacggattcagcagtgctgttgccctggattgagcaggcgcgaaacgatgttcgtaatctccgccatcttcagcttctgcaacagaccagaacctgttag

SEQ ID NO: 151163 - DNA, 492 bp, Enterobacter cloacae
atgaagctgtccctgacggtggaagccgatgccatcaacgtactggccctcaacatgggccggatcgtcgtagacattgacggtattgaactgaccgacctgatcaatgtggtgaaccagaacggttattcgcttctcgttgctgacgaaccggggaaattgattgttgaagatccaattccgcccgttgcccgcctgaacggcattcagtgcagcactgcacatatcacggcggaagacaatgctctgctgtttaccctttcacaccagcatgaagactttggcgagtctgaatggattagttataccggctcgggttatctgctccacctgggcgcgtggtcgtttccggtcttacgcctcaaacgcctcggtctgtcaaaagcctgccgtcggttattagtgacgcttatgcgtcgctacgccgctggcattgttcatctggatgcctttggcgaagtgctaccaagttttacaacctttgactggtaa

SEQ ID NO: 151164 - DNA, 378 bp, Enterobacter cloacae
atgcaaacacaacctgttcctccgaaacgggaggtttcgccacgcccgtcacccgtggcgatctggcagcgcctcctgagtcacctgctggaccgtcactacggtctgacgctcaacgacacgccatttggcaaagatggtgtgatccaagagcatatcgatgccggtatctcactgtgcgacgcggtgaatttcatcgtggagaaatacgacctggtacgcactgatcgtcgcggttttaacgcggaaactcagtcgccgcttctcaccagtatcgatattctccgcgcccgcaaagccaccgggctgatgacccgtcatagctacagggccgttaccgacatcaccaccggcaaataccgtgaggtgcaaccatga

SEQ ID NO: 151165 - DNA, 360 bp, Enterobacter cloacae
ttgtcgaatacaataccgcctgtaaaccacgatatcgccgccccttggtgggggcttaaacgcgatatcaccccctgttttggcgcacgtctggtgcaggagggcaaccggctgcattacctgaacgaccgcgccagcatcaccggcaccttcagcgacgcggatttacgccatctcgaccaggcattcccgctactgctgaagcaactggagctgatgctgctttccggtgagctgaatccccgtcatcagcactgcgtcacgctgtatgcaaaagggctgatatgcgaggccgacagcctcggctcgcacgggtacgtctatctcgcaatttacccgacacctgcaacaacagaataa

SEQ ID NO: 151166 - DNA, 483 bp, Enterobacter cloacae
atgaatataaccccttgcccccccgacagcgggggaatatctcccgccgcacagcgcactatccgacgtgcgctgaccctgctggaacgccagttacgcgagcccggcgcctcctttacctccaccaccgccgttcgtgactggctgcgtctgcaactcgcctcactggagcgtgaagtattcactgtactcttcctcgataaccagcatcgtctgatagcccacgaaacgctcttcaccggcaccatcaatcatacgcaggtccatccccgcgaggtggttaaggccggtctgaagcataactgtgccgctgtcattgtggcgcattgccacccgtcaggccttgccgaacccagcaatgcagatcgtcaggtcactacgcgtattcagcaggcgctggagctggttgatatccgactgcttgatcacctggtggtgggcggcatggagatcgtctcgtttgctgagagagggtggctttaa

SEQ ID NO: 151167 - DNA, 219 bp, Enterobacter cloacae
atgtcgtatgaactgtctcacctgaataccctgtgggatgcgctggggaaaataacggtcagggatgaggacggagacgttgtgaccgacgaactcttcctgcattttctgacgggcacctctctcttccctatctggtcatggtttgaatcccagcacgacgagttcgtcgttgccgtgaaactgtacaacacatcaatcccggacgggtcaacataa

SEQ ID NO: 151168 - DNA, 474 bp, Enterobacter cloacae
atgaccgacattattaaccttcacgatacccttccgttaccgccacaacctgccggttctgcgccagcgctgaccgccaccctcgtacaggacgagcagcgcatcggcttttggccgcagtacttcggcagcataccgcagtggataatccttgagccgacggtcttcgcgtggatggaccgtttctgcgccgactacaacggcggtatctggaatttttatacgctcagcaacggtggtgcgtttatggccccggaagcggagaacaatgaaccgtggtcgctgttcaacactatgaacggcaacggcggtgaactcagtgccgacgctgcggggattgccgtctgtctgatgacttacagccaccatgccatgcgcaccgaatgcgatgccatgacggagcactactaccgcctgcgggattacgcgctcagtcacccggaatgcagcgccatcatgcacatcatcgactga

SEQ ID NO: 151169 - DNA, 255 bp, Enterobacter cloacae
atgcagcacattcctgcaaatacccgtctgacggctgtctggcccgtttccctgcaaaaccagtccggctgccgttccatctccgacgatgacctctgcgcctggtgcagacatctttgctaccgtcccggcgagctcagcctgtgccgactgtctgtatctgacagcatctggccctcacggtgcgatgaagatggctatgcgcagtcctgcccgtcactcctgctgaaccagcatccccaacccgataaataa

SEQ ID NO: 151170 - DNA, 819 bp, Enterobacter cloacae
atgagactagccagccgctttggacggacaaaccagatccgtcgcgatcgtccgttaacccgcgaagaactgatgcaggtcgttcccagcgtattcagtgcagatcgccacggttccaggagcgaaaaatacgcttacatacccaccattactctgctcgaaaatcttcaacgcgaaggctttgaacccttcttcgcctgccagtcacgcgtacgcgaccctgaccgccgggagcacaccaaacatctgctgcgcctgcgtcgtaccggtcagataaccggccagcaggttcccgaaatcattttgcttaactcgcacgatggtagcagctcataccagatgctgccggggctgttcagagccatctgcaccaacgggctcgtctgcggacagtcgttcggtgaaattcgtgtaccgcatcgtggcgatgtggccgggaaagtgattgagggggcttatgaagtgctcggtgtctttgatcgggtggaagaaaagcgcgaggccatgcagtcacttcgactaccagcacccgcgcgacatgccctggcgaacgccgcactgacataccgctttggtgaagaatatcagccggtgaccgcagcgcagatactgacaccgcgacggtatgaggaccatcaggacgacctgtggaccgtttataaccgcattcaggaatcgttgctgaaaggcgggctgagcggacgcaccgcacagggtaaacgtacccacactcgtgcggttaacggtatcgacggggatatcaaactcaaccgcgcgctctgggtgatggccgaagaactgcagcaggcactgagctga

SEQ ID NO: 151171 - DNA, 234 bp, Enterobacter cloacae
atgcaagtcactgacgatacgtcgttaccgccagggcaattcacccgccgacaggctgaagccgtggtcacgctttaccacaacgtcactatagaagatgaccagggtacgcactttcggctggttattcgcgacagcgaggggacgttaatctggcgggcctggaattttgaagccagtgccggggaatggcttaaccgctatctgctcagccacgggatccccaaacactga

SEQ ID NO: 151172 - DNA, 222 bp, Enterobacter cloacae
atgacattactgaaaatcgtgctcaacaccctgcgtcaggtgctgacgtggtgcgccagcagccgggcgcagcagtttgtggaagaccacttccgcgaagaaggctatgacgaagacagtatttacatcgccagacaggcggcaaccctgctcgcaggtgccttaatcacagcgctcatggaacagatactgcagcttattgccacacacttaacccactga

SEQ ID NO: 151173 - DNA, 969 bp, Enterobacter cloacae
atggttgtacattacgacaatggcagacaacatcttataaaaacccgtgacctgagagtctgtgctttttatgccgggtggctgggtgttaataaaataattaacacccgtgacattcctcaccaggatgcagaaagttgtcgacaggcactcaacaaactgattaatcagttcataccgaatgcagaacagcgggcaagacttttttctgatatggaaacagcccgtgatgaaaacatccttccgctggaaagttttgactggctagaacaggatgaacgggcaacattctggttatgggcgtatatttgcaaggccggagactacgaacttggtattgacaaaccagcaaatgcagagttcggaaagaactggtatcagcgaatgaatctgagtgtatctccgacaagccaccaggaaagaattaatattatcatctcttttttcgacaacattattattccgaccccaccggtaaatcatctcaagcgccaggtcatggacaggctgaaagaccagtggaaaaatatttacagcaaaccagctccgctgaaatggttacctaatgaagaagacgcggtactgtgggcatggaacagcctcaaatcgcttcaggaagaaagaaatgcgcccactatcgggctctcattaaatatttcaacgccaggaatgagtacctggtttacccccctgagtcattctgaacgcaatttagccctgcgcacggcgatcgacttatgggacgatgcaccggatacaaagcgtttattccttctgaacctgaataaagcctggaaccagcaaaaattacgtcagtcccgtaccgataaaaaagcactcaatacgtacctgaagaacgaaacaaaaactcgactggactttatggcagaacgtagcggagttcgcatcagtgatatgctggaaatgctgattaatgaccattaccgaaaaacctgtggtggtgagtga

SEQ ID NO: 151174 - DNA, 279 bp, Enterobacter cloacae
atgtactattacactttcagtggagtggattataagcgcaggataatagcatatgaggacagcattaaaattcattacattcccaaatcctttatctatattctcgctagtataaaatcatgtatagcgaaagaaaaccctagcaccttaaataagaccgcaccgacagtcttttgcgccgaggttcttctcccccccataaacaatgaccacgaaaatatcaggaaaactacgacatcacatgtcagatgggccgaatcccagcttaaccagaattga

SEQ ID NO: 151175 - DNA, 213 bp, Enterobacter cloacae
atgaaaaatatcaaactgcttgttgctgccagtatgctctccgtagtctctttctctggcttcgcccagtcagtcagtgttactgctgacacactcagcaacgcggaagcgaaaattgccgctatcgccaaggaatccggtgcttcgtcctaccgcatcaccagtgctgaccagaacaactttgcccgcatgactgcagtcctagataagtaa

SEQ ID NO: 151176 - DNA, 351 bp, Enterobacter cloacae
atgttatggctactgattaagtacgcgatcaccgccggaatggttgtttttatctctgaagttgccaagcgtagtgatcggcttggtggtcttgtcgccgcgcttcccctggttactgtgcttgtgctcgtgtggatgaagctggaaggacagagtcagcaaaaaatagccaatcatgcgtggtatacattctggtatgtagtgccgacactacctatgtttttactattccctgttttctgtcagcgatttggcttttggatcacgctgggtagctgctgcgtcgtaaccgtccttattttctttttgtgggccagtgcgttacgccgttttggcataaatctgatgtga

SEQ ID NO: 151177 - DNA, 141 bp, Enterobacter cloacae
atgactggcggcaggattataacgagtgccgtccacattcatcgctggattaccagactccagctgaatttccagcaggctggcgaaacgggaaatatgaagaaaaaccaaccgacattactaattgaaggttatatctaa

SEQ ID NO: 151178 - DNA, 267 bp, Enterobacter cloacae
atggtgcaggatctgctgacagagagtgtggaaaagcgctttggcaatacgctttacctgccacatgccgttgagtggctgaccgataatggctgttgctacatagcggactcaataagaacgttcgccacctcactcaggttcatcgtgtgtacgacgccagtgcgcagtccggagagcaatgggatggctgaatcgttcgttaaaacgttcaagcgtgactacgtgtatgttaatgacctgccggatgccatgacagtgatgtga

SEQ ID NO: 151179 - DNA, 324 bp, Enterobacter cloacae
gtgcaaagaatcgaagtgatcactggcgagcaaaaacgccgtcgttatactcctgaagagaaagcccgttttgttgcgctcgccatgcagcccggctacaccgtctcactcgttgcccggcaatatgacatcacacccagtcttctttttaagtggaaacggctcatgaacgagggtggaaagtctgcgatcgtcgctggcgacgaggtcgtcagtgtctccgaggtccaagcgctggagaaaaaagtcaaacagcttgaacaaatgctgggccgcaagacgatggaagccgaaatccataggaacgcgcttgagatagcctag

SEQ ID NO: 151180 - DNA, 330 bp, Enterobacter cloacae
atgaaaactgtcgaatttttgctgtacaccctcaaacccggtactggaaaagactttcatagaataatgaaagaagtgagtgttccacttcaccgttcagtgggaatggatgttatttcttatggtatatcagcacatgacgacgatgcttactatctgatcagggcttataacagcctctctcacctgaaaactgcccaggacaccttttatgatagcgaagcatggcgtcatggtccccggcaggccattatcgatagaataagcatcagcgttaaatcggtactgactctcactgagagtgccgttgagcatttacgaacccactga

SEQ ID NO: 151181 - DNA, 525 bp, Enterobacter cloacae
atgttaaatgatattagcgtcagaaccttcattattttatttctgctcatttcggcgattgctctcaatattgttgagatgattttctcggccacgtcggaaattataattggtacgaatgtggtaagtcttatttctatattatgcttatggtggtatatgacgaaatacctggtcatgccgatcaatacggtaaaaaggagcattgaggaagtgacgtctgggaatctggcgatcagtattccagagtttggtaataattgtgcaggtagactaataccgggcatcaatagtttatcgagtaatatttcaacactcgttaatgagatcagaacatcctcgcaaacggcgatggcgctctctgagcagcttgcggaacgcagcgccgagctttcagtgaaaacggaacaacaatccggagcattgatgcagacggctgctaatatggatgagatagccgttaatacgcgaaataatgctgacaacacgcaaatcgccggtgatgctgccaacttactgatttag

SEQ ID NO: 151182 - DNA, 2115 bp, Enterobacter cloacae
atgttgaacgtgtcgtgggaccctgtattgattgggatttcctttgttgtcgcgtttattgcctcttttattgctctcgatagtgcgggcaaggtggcaatctccaaccgacgagaatctaccttctggcggctgtctggcggggctacgctagggatgggtatttggtcaatgcattttatcggtatgctggccatgaagatgagtatgccgatcaattaccatttttcgctcacggcattttctttctttattgcgctcatttctgcaactctcgctattaatatcgccatttccggtaatacgctttcaacaaaacgattagtcgtagccacaggaatattaagcgccggtgtcgtcaccatgcactacgttggcatgtatgccatcattgagcatgttgccatcctatggagtcattcgctgatactgctctcagtgatgattgccatcgttgcatctggtgtgggtttgtggctggcgtttcatttacgccaaaatacccgtcgagccctgatcaatcggcttgtcgccgcccttattatggcgctggcgattgcctctatgcattacaccgggatgggagcggcaacattcacccattttggacactctgtacacaatgggctcagcacactggaactctctgtctgggtctgcgccgtcacgctggttattttgggtatcatgctggtggtgtcgatggtggattcgcaactgcgtacctcccggctggcagacaacttacatcaacttaattgccagcttgagcatcaggtccacttcgacgcactgaccggacttgccaatcgcacacagattgatgcctgcttacaggcctgtctgcagcattccaaactggatcagcatcaatttgctctggtattcatcgacctcgatcgcttcaaagtcgttaacgatacctggggacatcacatcggcgatcagttgctgatcgccagtacgcaacgaatctacagctgccttgatgacaccatgacgctggcgaggctggggggagatgagtttattcttctggttcctgactgcaataaagaggatatcaccgctctgctgacccggattgccgctgcgattggcgatcctttcacgctttttgggtacaccattcgggtttcgttaagtgcgggaagcagtatttatcctgagcatggttccacgttgcatgagttaaaagtaaaagctgatatggcgatgtatcatgtcaaacaggctggcagaaacggttgggctatttatagcccggaaatggaagctatcgccgatacaccgccgacatttttacaggaactgtcacaagctctggaacacgatcaatttgagctttggtaccaacccaaatacaccgccggagatcattccctgaccggttttgaagcgttattacgctggcatcacccggaacgcggcatgctgttacccgcagagtttctgcctgcgctggaagaaacagggcttatcattccggtcgggaaatgggttatccagcaggcatgccagcagttacatcaatggaagttacagggccatgcggaatggaccctcgccgttaatctttccccttcccagtttgaacaacatgacatcgttgatgtggtttgtagcgcccttgcacaatatcaactatcacctgcatatctcacgctggaattgactgaaagtacagcacttaaaaatttaaaacgtagcgctgaagtcttaaatgcattttcagctttagggatcaccgtttctattgatgatttcggtaccggttattcaaatatattgatgttgaagtctcttccggcacgggaattaaaaattgacagagtatttgttaaagatatcagcgagaacagcaaaaatacaaagattgtgtctactattattgacatagcccactccatgaatatgcaagtggtggctgaaggaatagagacccaggagcaggaaatactcctgacccagatgggatgtggtgtgctgcaaggtttcttgtttgcaaaaccgttgcctgcgcatcagatccatgaattgattccaacggaaagcaacattaagcagcagcgaatcgtacagtctttgtctcctcaacaatcaataacattatga

SEQ ID NO: 151183 - DNA, 1233 bp, Enterobacter cloacae
atgagcacaaccgagctgcattcactggatttattaaccctgccggtgtggattgtttcgccgcataccgaagaactggtgttcgctaataccgttgcacgggaactgatgcaggccccctgcttttctctactccgcaagggcatattttcaactcatgcccagaatgatttaaccatgtatctcagcgatttgagaaatcatcacgacattgtagaaatccttacggtttgccgcgaaggtgaagacgtcgcgatggccagccgcctgtccatccgctttctgccggaatcaggtgacgtcattcttttcgaaggcattgaaacaccgacttcgcaaggtctgaaagcgagtcgttcagcgaattatcagcgaaaaaaacagggattttacgcgcgttttttccagaccaactcggccccaatgttgcttatcgatccgtcccgtgatgggctgatcgttgatgcaaatctcagtgcgctaaatttttatggctatagccatgatacgatgtgccagaaacatacatgggaaatcaatacgctgggccgtcatatactcccggtgatgcatgaaatcgcccatcttcccggtggccataagcctttgcattttgtgcataaactggcagacggcacatcccggcacgtacaaacctacgccgggccaatcgaaatctacggtaataagctcatgttgtgcattattcatgatattaccgagcaaaaacggctggaacaggagcttgagcgtgcggccctgcgtgacgccttaacgggattgcttaaccgccgacatttttatcaggtaaccgagccggaacagacccacgcgatgtcattgacacaggattacagcctgctgttgatcgacaccgatcgctttaaaagcattaacgatctttttggtcatttaaaaggtgatgaggtactttgcgctctggcccgcacacttgaatcctgtgcaagaaaggacgatctgatttttcgctggggaggtgaagaatttgtgctgctgctgccgcgaacctcgttagatattgccctcaatctcgcagaagtgatacgggcgacagtggccaaagtgactctccctggccttccccgctttaccgtcagcattggcgtagctcggcacgaaacaaatgaaagcatcgatgagttattcaaacgcgttgacgacgcgttgtacaaagccaagaacgaaggcaggaacagagtgctggccgcctga

SEQ ID NO: 151184 - DNA, 564 bp, Enterobacter cloacae
atgaaccttgatgatgcatcgctgtttcttgacgctatgggggatgttcaaccgctgaaaaaacatgccgatgtgcactggcagcccatgcgcaatcttcgcactccggcgcgtattgatacgcttcaactggataattttctctcgacgggatttctcgatattgtcccgttgaatgtgccgctcgagtttcgtcgcgaaggtttacagaacggcgtgactgacaagctgcgaaacggaaaatacccgcagcaggcgagccttaatcttattcgccaacctgttgaaacatgtcgccagatgctctttagctttattctgcaggcgcagcaggaagggttgcgtaacgtgttggtgatacacggcaagggacgtgacgataactcccatgccaatattgttcgcagctacgtggcgcgctggttgacggaatttgacgacgtgcaagcatactgcgccgcactgccgcatcacggcggcagcggggcatgttatgtggcattgcgtaaaaccgcacaggcaaaacaggacaactgggagcgtcacgctaaacgcagtcgctga

SEQ ID NO: 151185 - DNA, 516 bp, Enterobacter cloacae
atgcttaacttactggaagacaccatcgacacgccgctgggcccgctgtgggttatttgtgatgagcaatttcgcctgcgcgcagtggaatgggatcagcacagcgatcgcatggaacaattgcttgatattcattaccgtacagaaggttatcagcgcattaccgccaaaaatcctggtggattaagcgacaaactctctgagtattttgccggaaacctcagcataattgacacgctggaaacggcaaccgctgggacgcctttccagcgtgaagtctggcaagcattacgcactatcccctgcgggcaggtcatgcattatggtcagttggccgaacagttggggcgccccggcgctgcaagagccgtcggcgcagctaatggctccaatccagtaagcattgtggtcccctgtcatcgcgtcattggacgtaacggcaccatgaccggatatgccggcggtgtacaacgaaaagagtggttattgcgccacgaaggttatttgctactctag

SEQ ID NO: 151186 - DNA, 903 bp, Enterobacter cloacae
atgatcccggaaaagcgaattatacggcgcattcagtctggcggttgtgctatccattgccaggattgcagcatcagccagctttgcatcccgttcacacttaacgagcatgagcttgaccagctcgataacatcatcgagcgcaaaaagcctatccaaaaagggcagacgctctttaaagcaggtgatgagcttaaatcactctacgctatccgctccggaacgataaaaagctataccattaccgaacaaggcgatgagcaaattaccggtttccatctggcgggtgacctggtaggttttgacgccattggcagcggccatcacccgagctttgctcaggcgctggaaacctcgatggtatgcgaaattcctttcgaaacccttgatgacctgtccggcaagatgccgaacctgcgtcagcagatgatgcgtctgatgagtggcgaaatcaaaggcgaccaggatatgatcctgttgctgtcgaagaaaaacgctgaagagcgcctggcggcctttatctacaatctgtctcgtcgcttcgcccagcgtggattctcgcctcgtgaattccgcctgaccatgacccgtggcgacatcggtaactacctcggtctgacggttgaaaccatcagccgcctgctgggtcgtttccagaaaagcggcatgctggcggtgaaaggcaaatacatcactattgagaacagcgacgcgctggcggttcttgccggccacacgcgtaacgttgcgaaatctttccgcaagcctctctgttatccttctgtcaaatcgctaaattttcccgatttattgatctggcaggaggttattccctgttttaataatcaacttgtaatgtgtgcacccgccgtttatccatactcagacaaaggaatgttatga

SEQ ID NO: 151187 - DNA, 816 bp, Enterobacter cloacae
atgaatcatattcacagggaaagcacctgcgcgcgtttgcaattaaactcaagcctggaccatgagcttgatggctataaatgggcacgtgaccatgtcggtcaatctggtgctgccatctaccgactttacgacaaagtggatgcccctgaattatatctgaagcaaggtaacggtagcgttgccaatgatattacggatgaaatggtcaggctcatctggttgaaagattacatccctctgccaaacgttaagcatttttcccgaacgcctgacgtagcattgctactcaccacggcaataccagggaaaactgccttccagatgttagaagagcaccctgatatgagtaatgatattgttgatgctttggcgacatttttgcgtcggttacatgccattccagtaaatagttgcccctttaacagcaatcaccaatttcgtctcacactggcacaaaaccggatgaaaaataatcttgttgatgccgaggattttgatgatgaacgcaatggctgttctgttgaacaggtctgggaaaagatgcacactcttttgcccttctcatctgttcctgttgttactcacggtgacttttcactggataacattattttttgtaatgatgaaatagtggggtgtcttgatgtgggacgagttggcatcgccgatcaataccaggatctcgctattctctggaactgcctcggtgaattttcacattcactgcaaaacaggctttttcaacaatatggcattcctcaacccgacgagaaaaaattgcagtttcacttgatgcttgatgagtttttttaa

SEQ ID NO: 151188 - DNA, 951 bp, Enterobacter cloacae
atggctatgtataaaaatatgctggtcgtcatcgaccctaaccaggacgatcaaccagcattacggcgagctgtttatttgcatcaacggattggtggcaaaattaaagcctttttgccgatctatgacttttcctatgaaatgactaccctgctgtcgcctgatgagcgtacggcaatgcgtcagggggtcatcagccagcgaactgcatggatacgtgaacaagcgaaatactacatcgaagcagggatccctctggagattaaagtggtctggcataaccgaccctttgaagccatcatccaggaagtcatcagtgccaggcatgatctggtcctcaagatggcgcaccaacacgaccgcctcgaagccgtaatatttacaccaaccgactggcatttattgcgtaaatgtccaagtccggtatggatggtgaaagaccagccatggcctgaagggggtaaagcactggttgccgtaaacctcgccagtgaagaggcttatcacaacgcgctcaatgaaaaactggtcaaagagacgctacagcttgcagaacaggttaaccataccgaagtgcatctggttggcgcctaccctgtcacaccaatcaacatcgcgattgaactgcctgaatttgatcccagcgtttataacgacgcaatccgtggacagcatctgctggccatgaaggcgctacgccagaaattcagtattgatgagaaagtgacgcacgttgaaaaaggcttacctgaagaggtcattcctgatttagccgagcacttgcaggcgggtattgtggtattggggaccgtcggacgtaccggtatttctgctgcgtttcttggtaataccgcggaacaggttatcgatcatctacgctgtgacctgctggtcatcaagccggatgaatatcagacgccagttgaactggacgacgaagaagacgattaa

SEQ ID NO: 151189 - DNA, 261 bp, Enterobacter cloacae
atgatcatggctaagctgaaaacagcgaagggacggaagtttctgttgtgcctgcttggagtgtttattatcgcagcgtcggtcgtgacgcgagcgacgatcggtggcgttattgaacagtatgacattccgctatccgactggaccgcttcaatgtacgccattcaatctgcaatgatttgtgtctacagcatggtgtttacgattctgttggctatcccgcttggtatctatttcctcggcggtgaggagcaacactag

SEQ ID NO: 151190 - DNA, 1032 bp, Enterobacter cloacae
atgatcgctgaactgtttatgaataatgcgtttaatttgacggtaattcttagctgctgtgccgcgctggtcctgatgagcgtctggtatcatcgtggggagcgtcgctgcaaaggattcatatttcatgccgcacaattttttgtctatgccattatcattgggacgtttggcagcattgctaataacgttatcgaaagttacagcctgaaatttatctcccccagcgtggtcgactttatctgcacctcgttgattgcgttgatcctgaccatcaaactttttctggtgattaatcagtttgaaaagacgcagattaataaaggcagagatatcaccagcgcgaggatcctgtcgcgtatcatcaagatcaccatcgtggttgccatcattttactgtatggcgaacacttcggtatgagcttatccggcctgttaacctttggcggtattggcggtatcgcagtgggtatggcggggaaagatattctgagcaactttttctcaggcattatgctctatttcgacagaccgtttagcataggcgattggatccgctccccggaccgcaatattgaaggcacggtagcagaaattggctggcgaatgactaaaataaacaccttcgaccatcgtccgttgtatgtgccaaactcgattttctcctccatcagcgtagaaaacccagggcgcatgaccaaccggcgaattaaaacggtgatcgggttacgatatgaggatgccgataaagtcggtgccgttgtcgagtcggtcagagaaatgctgcaaaaccatccaggaatagaccagaaacaaactctgttggtctattttaatgaatttgccgattcatcgttgaatatcatggtgtattgcttcacgaaaaccaccgtctggaaggattggctcgcggtacagcaagacgtttatttaaagattatcacgatagtccaggcaaacggtgccgactttgcattccccagccagacgctgtatatggataatcctgaagcatcgccatcgacacactaa

SEQ ID NO: 151191 - DNA, 1053 bp, Enterobacter cloacae
atggtcatgaatgtgaagggttatgctgctctggcggtgaaagaagatttagtcccccataattttgttcgtcgcgatccgcgtgaagatgatgtggttatcgatattttatacagcggtgtatgccactcggatattcacaacgcctacaacgattggggcggcgctaaatatccgatggtaccagggcatgagatcattggccgcgtggtgcatgttggtaagtcggtaacaaaattcaaagtgggcgatctcgcaggggtcggctgcatggttgattcgtgtcaacactgtagcgcctgcgagcaggggctagagcagtattgcgaagaaggtaacacgctaacgtataacgatatcgaccgtcatgacggcctgcctactttcggcggctattctgacaaaattgtcgttaccgaaaagtttgtggtgaaggtccctgaagggatcgatttacgcggtgcggcgccgctgctttgcgccgggatcacaacatggtcgccactgcgccactggcaggtaggtgagggcagtaaagtcgcggttgtcggtctgggtggactcgggcatatggcaatcaaatttgcaaatgcgctgggcgcggaagttacgctgtttacgcgttcaccgggcaaagaagctgatgccagacgtttgggtgccagtcacgttgtgctttccactgacagtgaacagatgaaagcgacagcgaatcagtttgatctgattatcgatactgtgccctacgttcatgacctgaacccttatatcccaaccctggcgctaagcggtacgctggtgctggttggttatcttggtgcgttggatccgttgctgaatacggttcccctgatccttgggcgtagatccgtggcgggttcagttatcggcggtattgccgaaacgcaggagatgatggatttttgcggtcagcatggtattaccgccgatgtcgaagtgatcgatattcaggatattaatcgtgcctggcagcggatgttgaaaagcgatgtgaaataccgctttgtaattgatattgcttcattgaaataa

SEQ ID NO: 151192 - DNA, 408 bp, Enterobacter cloacae
atgaacgaacaatttgatggtaacagcgtctttccacgtggagagaaaaatgaagcgtatgcgaagtatttcactggcgacagctatctgaccatgctctccatggaaggcgtggtaattggcaatgtcgcatttgaaccgggttgtcgtaacttctggcatgttcatcatgagggtggacaaatattgctggtgaccggtggcagaggctggtatcaggagtggaataaaccggcacgtgagctgaaaaccggcgatgtcgtgcacattccggctggaatgaaacactggcacggtgctgcgcgtgatagttggtttgctcatatcgctgtggaaatcccggctcctggcgcgtcgaacgaatggctggaaccggttagcgacgctgagtacaacctgctgccctga

SEQ ID NO: 151193 - DNA, 630 bp, Enterobacter cloacae
atgcaataccaactggatgccagacaacaggcaatcatccccattgcggcattcactgccacaggacagatggaaaagctggacgtcgcgctcaatgccggactggatgcgggactcacgctcagtgaagtaaaagagatcctgctacagctctacgcatactgcggtttccctcgcagcctgaacggtctgtcctgctttatgtcggtggtaaaaagtcgaagcgagaaagggctttcagacgacgaaggtagaacggccacgccgccacctgcagactggaacagtgttcaggctgggagcctaactcagacgcaactggttggacagcctgtaagcggtccgctgtttgactttgcacccgctattgatgtctggctcaaagcacatctgtttggcgatatttttcagcgagatgtacttgactggcaggaccgtgaatgggcgaccgtttcggcgctggccgttgtgggcggcgttaacagccagttgaaaagccattttgcgatatgccttaacatcgggatcctccctgagcaacttagtgagtttattacgatacttgaatatcactgtggagccgggattggggaaaatgcccgtagggttcttgatgaatgtctggcatga

SEQ ID NO: 151194 - DNA, 384 bp, Enterobacter cloacae
atgaagattgcgcatatggccttatggacacaggatctcgagcagcaagcttgcttctgggtctcgttttttgacggcaagatcaacgagaaataccgcagtaaaaccaatcctggttttgaatcttattttgtcaaaattggcgaggaaattgcgattgagttaatgaccaaaccgggtcttatcgggcagcaatctgacaataatcgttgcggatgggtacacctcgccatttctgttggcggcaatgaaaatgttgatgccattgcattgcaagcgcaggaacaggggatattagtctcaggtccgcgcactactggcgatggttattacgaagcggtgataaaagatcctgacggcaatttaatcgagattgtggcgtaa

SEQ ID NO: 151195 - DNA, 771 bp, Enterobacter cloacae
atgctcgattacgccgcattcccggaacagcgccaggcgcttatctttcagatcctgcaagaaaacggcagggtcatttgttctgaactcgctaaccgattaggcgtttctgaacatacaattcgtcgtgatttgcatgaattgagcaaagatggcgtgtgtaaaaaagtttatggtggcgcggtcattacactccctgaatccgaagacatcgacgtacgcaagagtattaatgtagccaaaaagagcaacatcgcgcagagatgtgcgcgactggtcaaatctggaagctgtatttttatcgacacgggtagcaccaatctggcaatggcagaagctctgcccgccgaactggcattaaccgtggtgacaaattcaccggagattgccgccgttttgctaaaaaaaccgctgtttgaagtcattatgctgggtggcgtggtgcagagatcttcaggtgggtgcgtgggagcttccgccatcgcgcaagtgcaggacattttattcgatcagggatttattggcggctgcgcgatgtcgcctgaatccggcttaacgggatttgattatgcggattgtgagttcaaaaaagcggtgattaaacaatgtaatgaaactatcgtcgcgctaacggctgaaaaaatcccagccgtcgcccgatatgtcgttaccgaaagcagcaatatcgatgtgattgttgtagaggacaacatcagcaaagagtacgccacagcgttccaggcgcacgacattcgaatttatacagtctaa

SEQ ID NO: 151196 - DNA, 285 bp, Enterobacter cloacae
atgaaaacggccgaagagtatcacccgatagattgcgatcttcatgattatctggaaatcgcctgcatgtaccactattggttgcacattgaactaacggatggcacatgttttgatgctaaagcgctgacgacgtgtaccaccgtggaaaaagaagaatttctggtagtggagcaatctgaaaaccagcaaaaaatccgtctggattgtctgtcagcgatcaccgcgctgacgcccggagcgacgtttagcacagttagttttcagcgagcctaccgcggttag

SEQ ID NO: 151197 - DNA, 231 bp, Enterobacter cloacae
atgactaaagctcgtttctatcatgcaggttgcccggtttgtgtttccgcagaacagacacttctgcagcatttgtctgcggatgttgaaatcgatgtggttcatctgggagagcaacctgatcgggttgctgaggctgaagtggctggcgtgaaatctgttccggcgctggtgattgacggcaatgtgctgcatattaatttcggcgctcccattgaagcgttgaaatag

SEQ ID NO: 151198 - DNA, 564 bp, Enterobacter cloacae
atgcccgacatgtcacttttcgacgtacttgaccggctttccagcctgacaaggatgtggtttcgccagcaccctttactggcggatctacagccagtacaactcagcgcgttaatgtatctggcccgttgcaaccgttattccaatacgccgcttggcgtaacggactaccttggcctcaccaaaggcaccgtatcgcaatcgctgaagctgctagaaagcaaaggactgattgttcgtaatcaggatgcccgcgataaacgcagcgtacatttacagttaactgaatcagccggtacgttactggacgccctgctcccgccaacgtttttggtggcgggtgaaacggcgatgggtgaacgcgcgactgtacttaaggagctactgtttgaacttttacgtgggatccagaggaccaacaatgtacctggctttggtctttgccatagctgtcggttccaccaaaaaattgatggtcagggattttgtaatctgacgaaagagagattgagtgaagaagattcattgctgatttgccgggagcatcagccgccggaaacataa

SEQ ID NO: 151199 - DNA, 729 bp, Enterobacter cloacae
atgaccgttacccgtccccgtgccgagcgcggcgcattcccacctggaaccgaacattacggacgttccttgttaggcgcaccgctaatctggtttcctgcactggcagccgatcgtgaaagcggcctgatactggcgggaacgcacggcgacgaaaactcctctatcgttaccctttcctgcgcattgcgtacgcttaacccttccctgcgtcgccaccatgtggtgctggccgtaaaccctgacggttgccagcttggactgcgcgcaaatgcgaacggcgtcgatctgaaccgtaactttcccgccgcaaactggaaagcgggcgaaacggtgtaccgctggaacagtagcgcagaagagcgtgatgtggtgttgttgaccggcgaaagtccgggttcggaaccagaaacccaggcgttgtgtcagcttattcaccgaattcatcccgcctgggtagtctcttttcacgatccactggcctgtattgaagatcccagaagcagcgagctgggttcgtggctggcacagtcgtttgaattgcctctggtcaccagcgtaggttatgaaacgcccggctcttttgggagctggtgcgcagacctgaatttacactgcataaccgccgaatttccgcccatttcatcggatgaagcgagcgaaaaatacctgctggccatgtccaatctgctgcgctggcaccctagggatggagctgcccggtcgtaa

SEQ ID NO: 151200 - DNA, 966 bp, Enterobacter cloacae
atgagaacagttaaggtatatgaggaagcctggccgctgcacactccctttgtcatcgcccgtgggagcaggaccgaagcgcatgtggttgtcgtcgaattgacagaaaatggcgtcacaggtattggcgagtgcacaccgtacccacgctacggtgaaagcgatgcctctgtcctggcgcaaattatgagcattgcaccacaactggaaaacggactgacgcgtgaagaactgcaaaaactgctgccagcaggagctgcgcgaaatgccgtagattgtgcgttgtgggatctgagtgcgcgtcaacagcagaagtcgttggcggaattggtgggaagtgaactggcggaagtggtgacgacggcgcaaaccgtagtgattggctcgccggaacaaatggctgcgagcgcggctgcgctgtggggaaatggcgcaaaactgctgaaagttaaactggatgctcgcttaattagtgagcggatggttgccattcgtgcggctgttcctgacgccacgattattgtcgacgccaacgaatcctggcgggcagaaggccttgcggcacgctgtcagcttctggctgatttaggggtggcgatgctggagcagccgctgccggcccaggatgatgccgcgctggagaattttgtgcatccgctgcccatctgcgcagatgaaagttgccacactcgcagtagcctgaaagcgctgcacggacgctatgaaatggtcaatatcaaactggacaaaacaggcggtctgacggaagcactggcgctggcaacggaagcccgcgagcagggatttgcgctgatgctgggctgcatgctgtgtacctcccgggctattggtgcggcgttaccgcttacgccgcaggttaactttgccgatcttgatggccctacgtggctggccagcgatgcggagccagccctacattttacgaccgggcagctccatccctag

SEQ ID NO: 151201 - DNA, 507 bp, Enterobacter cloacae
atgtcacaaaccgttcatttccagggcaacccggttgcagttgccggctccattcctcaggctggaagcaaagctcaggcttttacccttgtggctaaagacctgtctgacgttacgctgggccagtttgcaggcaagcgcaaagtgctgaatattttcccaagcatcgataccggcgtttgcgcggcatcggtacgtaagtttaaccaactggcgacagaaatcgacaataccgtcgtactgtgtatttcggccgacctgccattcgcccactctcgtttttgcggcgcggaaggtctgagcaacgttatcacgctgtccaccctgcgcaacgcagaattcctgaaaaactacggtgttgaaatcgctgaaggcccgctgaaaggtctggccgcacgtgccgtagttgttatcgatgaaaatgacaacgtcgtcttcagccaactggtcaatgaaatcaccaacgaaccagactacacagcggcgctggacgtactgaaagcgtaa

SEQ ID NO: 151202 - DNA, 1545 bp, Enterobacter cloacae
atgcgtttggaagtcttttgtgaagaccgtcttggtctgacccgcgaattgctcgatttactggtgctgagaagcattgatttacgcggtatcgagattgaccccatcgggcgaatttaccttaattttgcggagctggagttcaccaacttcagcagtctgatggctgaaatccgccgtatttcaggggttacggatgtgcgcaccgtaccctggatgccttccgaacgtgaacatctggcgctgagtgctctgcttgaagcgttgccagaaccggtcctttctcttgatatgaaaagcaaagttgagatggcgaaccctgcgagctgtcaactttttgcgcacacccaggagcggatgcgcaaccataccgcagcccagttaatcaatgggtttaacttccagcgctggctggaaagcaatccgcaggattcccatagcgaacatgtcgtgattaacgggcagaatttcctgatggaaattacgcctgtccatttgcagggcgaaaatcaggagcagatgctgaccggcgcggtggtgatgttgcgctccaccatccgaatgggacgtcagctgcaaaatatgacaacgcaggatctcagcgcgtttagccagattattgccgtcagcgccaaaatgaaacacgtcgtagaacaagcgcgcaagctggcgacgctgagcgcaccgctgctgattactggtaataccggcaccggcaaagatctttttgctcatgcctgtcatctggcaagcccgcgtgcgtcgaaaccgtatctggcgctgaactgtgcgtcaatccctgaagatgcggttgaaagcgagctgtttggccatgcgccggaaggcaaaaaagggttctttgagcaggcgaatggcggttcggttctgttagatgaaattggcgaaatgtcgccgcgtatgcagaccaaattgctgcgttttctcaatgacggcacgttccgtcgcgtgggagaagatcacgaagttcatgttgatgtccgtgtgatttgcgcgacgcaaaagaaccttgtggagctggtgcagaaaggacttttccgtgaggacctctattatcgtctgaatgtactgacgctaaacctgccgccgctgcgcgattgcccacaagatattatgccgcttaccgaactgtttgtggcgcgttttgccgatgaacagggcgtgccgcgtccgaagctgtccgccgatctcagcacggtgttaacccgttacggttggccgggcaacgtgcgtcagcttaaaaacgctatctaccgggcgctgacccagcttgaaggttatgagctgcggccgcaggatattttactgccggattatgatgcggcaacggttgcggtcggagaagaggtaatggaagggtcgctggatgaaattaccagccgctttgaacgctccgtgctgacgcagctgtatatgaattatcccagcacgcgcaagctggccaagcgcctcggcgtttcgcataccgcgattgccaataaattgcgcgagtacggcctgagccaacagaaaaaaagcgaagagtaa

SEQ ID NO: 151203 - DNA, 1062 bp, Enterobacter cloacae
atgagcgagccgttaaaaccgcgtatcgatttctcaggtccgctggacgtggaacaaaacacggcgtttaaagcgcagcaaatgttcaacgaaatggaggcgcagactttttctccggcgaaagtggatgaacccctggaagacgaaggtcaggcggaggccgtcattgatgcggccttacgccccaaacgcagtctgtggcgcaagatggtgatgggcgggctggcgctgtttggcgtaagcgttgttgctcagggtgtgcagtggaccatgaacgcctggcagactcaggactgggtcgcgctgggaggatgtgccgcaggcgcattgattatcggcgcaggtgtcggatcggtggcgaccgagtggcgcagattgtggcgattgcgtcagcgcgcgcacgaacgtgatgaagcgcgagacttgctccacagccatggaaccggaaaaggtcgtgcattttgtgaaaaactggcgcagcaggcgggtatcgatcagtcgcatccggctctacagcgttggtatgcctcaattcatgaaacgcagaacgatcgcgaagtggtcagcctgtatgcccatctggtgcagccggtgctggatgcgcaagcccggcgtgagatcagtcgttcagcggcagagtccacgctgatgattgccgtcagcccgctggcactggtggatatggcgtttatcgcctggcgcaatctgcgcctgattaatcgcattgcatcgctgtatggcattgaacttggttattacagccgtctgcgcctgttccgcctggtgttgttgaatatcgcttttgccggggccagtgagctggtgcgggaagtagggatggactggatgtcgcaggatttagccgcccgcttatcaacgcgtgccgcacagggcattggcgcggggttattaacggcgcgtctgggcattaaagctatggagctttgccgaccgctgccgtggatcgatgatgataagccacgactgggcgattttcgccgtcaactgattggtcaggtgaaagagaccttacaaaagaacaaatctccgcgcgaaagttag

SEQ ID NO: 151204 - DNA, 1398 bp, Enterobacter cloacae
atgaagcgacttaaaaatgaactcaattcgctggttaatcgcggggtagaccggcatttacgcctggctgttactggacttagccgcagcggtaagacggcgtttatcaccgcgatggtaaaccagttactcaatattcatgccggtgcgcgtctgccgttgctcagctgcgtgcgcgaagagcgtttgctcggcgtaaaacgggttcctcaacgcgattttggcattccgcgctttacctatgatgagggactggcgcaactgtacggctctccgccaacctggccgacccctacgcgcggcgtgagtgaaatacgtctggcgctgcgctataaatccaatgactctttactgcgccactttaaagacacctccacgctgtacctggagatcgtcgattatccgggggagtggctgctcgatttaccgatgcttgcccaagattatctgagctggtcgcggcaaatgaccggattattgcaggggcagcggggcgaatggtcggcaaaatggcggcagttatgccaggggctggatccgttggcgcctgctgatgaaaaccgtctggcggaaattgctgccgcctggacggagtatctgcatcagtgtaaacagcagggcctacattttattcaaccgggccgttttgtcctgcccggagatatggcgggcgcgcctgcgctgcaattcttcccgtggccggatgtcgatgcctggggggaatcaaagctggcgcaggctgacaaacacaccaacgcgggcatgttgcgcgaaagattcaattattactgcgaaaaggtcgtcaaagggttttataagaatcacttcctgcgctttgaccgccagattgtgctggtcgattgcctgcagccgctcaacagcgggccacaggcgttcaacgacatgcgtctggcgcttacccagttgatgcaaagcttccattacgggcagcgtacgctgtttcgtcggctattttctccggtgatcgacaagctgctgtttgccgccaccaaagccgaccacgtcacggtcgatcagcacgccaatatggtgtcgttattgcagcagctgatccaggacgcatggcaaaacgctgcgttcgaaggtatcagcatggattgtctggggctggcatcggtgcaggcaaccaccagcggcttgatcgatgtgaaaggtgaaaagatcccggcgctgcgaggtaatcgtctgagcgatggcgaaccgctaaccgtttatccgggggaagtgcccgcgcgactgccaggacaggcgttctgggacagccagggctttcagtttgaagcatttcgcccgcaggttatggatgtcgataaacccttaccacatatccgcctcgatgccgcgctggagtttttaataggagataaattgcgatga

SEQ ID NO: 151205 - DNA, 318 bp, Enterobacter cloacae
atgttgaaaaaaggcgtattagcgttggcactggtcatcggcatgccggtttatgcagttgaacactggattgatgttcgcattcctgaacagtaccaacagcagcatattcagggggccgtcaacattccgttgaaagagatgaagacgcgtatcgcagctgaagtgcctgataagaacgacaccgtgaagctgtactgcaactccgggcgtcaatcggggcaggcgaaggatatgttaactgaaatgggctatacgcaggtgacgaatgaaggtggcatcaatcagatagcgcttcctaaagtagagcataaataa

SEQ ID NO: 151206 - DNA, 1011 bp, Enterobacter cloacae
atgtctcctaccatttatgatattgcacgagccgctggcgtatcaaaatccacggtatcgcgcgtgcttaataagcaaaccaacatctcgccggaagcgcttgaaaaggtgctgcgcgcaattgatgagttacagtatcaacctaataaacttgctcgcgcgctgacctcttccgggtttgatgcaataatggtgatatctacccgttctgcaaaaacaactgccggtaatccgtttttctctgaagtgttgcatgcaattactgccaaggctgaagaagtcggttttgatgtcatattgcagacgtcgcgaagcaccgaagatgatttacaaaaatgtgagagcaaaattaagcagaagttgatcaaagggatcattatgctgagctctcctgccgatgaatcattttttgctagtctggataaatacaacgtaccggttgtggttattgggaaagttgaaggtgactacgccaatgtctattctgtagacaccgataattatcgcgacagtattacgctgacaaatgcgctgattgagagtggccaccgtaatatagcctgtttgcatgcaccgcttgacgtccatgtttctatcgaccgcgttaacggttataaagccagccttcaggcacataacattaaaatgcgcgatgagtgggttattgacggcgggtatactcatgaaaccgccctgcttgcttctcgaaaattactgagccagcagccgctacccgatgccgtatttgcgacagacagcttaaagttaatgagcttatatcgcgtggcggccgagaaaaacattgacatcccacaacaacttgccgttgtaggctatagtaatgagctactttcttttatactcacaccagttcctggtggaattgatgtacctactcagcagttgggtgaacaaagttgtaatttattatttaatctgattgcaggtgagaaaggattacagaatataactgtaagcacgcaaatatctttggccgactcactggtgtaa

SEQ ID NO: 151207 - DNA, 906 bp, Enterobacter cloacae
atgaaaaccctactgtccgctactgcgctgattatgagcgcaggaatggcctgcgcgcaggctgctgaaaagaatgactggcactttaatataggtgctatgtacgaaatagaaaacgttgaaggtcagggcgaagatatggatggactggctgagccgtccgtctattttaatgcgtccaatgggccgtggaaaatatcgctggcctattaccaggaagggccggttgattacagcgagggtaagcgcggtacgtggtttgaccgacctgaactggaagtccgctatcaattcctcgaaagcgagaatgttaatttcggcttgacaggtggcttccgtaattacggttatcactatgtgaatgaacccggaaaagacacagctaatatgcagcgctggaaagtgcagccagattgggatgttaaacttagcgatgaccttcgctttagcggctggtttgcgatgtatcaattcgttaatgatttgagcaccaccggctactctgatagccgcgtcgaaagtgagagcgggttgaattatacgtttaacgaaacagtagggttaactgtgaactattaccttgaacgcggctttaatctggcagattcgcgtaataatggtgagttctcaacccaggaaattcgtgcttatttgcctctgtccttcggcaatacaaccctgacgccgtatacccgcctggggcttgatcgctggtcaaactgggactggcaggatgatcctgaacgcgaaggccatgatttcaatcgtctcggtttactgtatgcgtatgatttccagaacggtttatcaatgtctctggagtatgcttatgaatgggaagatcatgacgaaggcgaaagcgacaggttccattatgctggtataggcgtgaactacgcattctaa

SEQ ID NO: 151208 - DNA, 1083 bp, Enterobacter cloacae
atggcacagctttcgttgcagcatattcaaaaaatttacgacaaccaggtacacgtcgttaaagacttcaatctggaaatcgaagacaaagagtttattgtttttgttgggccttccggttgtgggaagtcaacgacgttgcgcatgatcgccggcctggaagagatcagcggcggcgatctgctgattgacggtaaacggatgaacgatgtgccggcgaaatcgcgcaacattgcgatggtttttcagaactacgcgttgtacccgcacatgacagtctatgacaacatggcgtttggcctgaaaatgcagaaaattccccctgccgtgattgaggagcgtgtcaactgggcggcgcaaatccttggcctgcgcgattatctgcaacgtaaaccgggggcgttatccggtggtcagcgtcaacgtgtggcactggggcgtgcgattgttcgtgaggcaggggtcttcctgatggatgaacccttatcgaacctcgatgccaaacttcgcgtacagatgcgggcagaaatcagcaagctgcatcagaaactcaataccaccatgatatatgttacccatgatcaaaccgaagccatgaccatggcgacgcgtattgtgattatgaaggatggcattgttcagcaggttggtgcgccgaaaacagtttataaccacccagcaaatatgtttgtcgcaggatttattggttcaccggccatgaactttattcgtggcgcgattgacggtgataagtttgttactgaaacactgaaattaacgattccagaaaataaattagtacaattaaaactacagggttatgaacatcaggcggtcacgctgggaattcgtcctgaagatatacatccgcaggttaataataaaaatagtgtgtcggcaaaaattagcgttgcagaattaactggcgctgaatttatgctttataccattgttggggggcatgagttagtggtccgtgctggggcagtgaatgattatcacgcaggagaaaatatcactattcattttgatatggcgaaatgccatttctttgatgctgaaactgaagtagctattcaataa

SEQ ID NO: 151209 - DNA, 669 bp, Enterobacter cloacae
atgatcctcaaaccacaggccatcatttttgatttagatggcgtgattaccgacactgctcatctgcattttctcgcctggcggcaggtagccggtgaaataggaattgcgattgacgaaacatttaatgacagcctgaaagggattagtcgcggcgaatcgctacagcgtattttgcaatatggcgggaaagcgggggaatttacacctgaagtttgcgcacaattggccgagagaaaaaacaggctgtatgtccattctttgcgccagttgacggtgaactcggtactgccgggaatacgtgagctgctgatgacgctgcgggaagagcggattccagtggggctggcctccgtgtcgctcaatgcgcccactattttacaggcgcttgatcttagcgcttgttttgacttttgtgcggatgcggcgctgattacccattcaaaaccggatccggagatttttctggcggcctgtgcggggcttggcgttgacccgcaacagtgcattggcatagaagatgcacaagcaggaattgatgcaatcaacgcctgcggcatgctttctgtcggcatcggtacggggctgaacggggcaagcctgcaacttccttcaaccgaatttctgacgtggccgtgcttatcggctctctggcaacacgacaagtaa

SEQ ID NO: 151210 - DNA, 2277 bp, Enterobacter cloacae
atgacgaagccagtaatgctaaccgaaccggctttttgcccacacagcctcaacaaatatgcgtcgctgatgacgcttggcaacggctatatggggattcgcgccagccacgaagaagcctacaccttacaaactcgcggcatgtatctggcgggactgtatcaccgggcggggaaaggtgaaattaatgaactggttaatctgcctgatgtggtgggcgtggagatcgcgcttaatggcgagattttctcactaaccagcggcgtgattgagcgctggtatcgtgaactggattttgccagcggagaattacgccgtaccctggtctggcgagcgcccggcggcgcacgtttcgctattgagagtcggcggtttgtctcggcgcaaaaactgccgctgtttgctatggaagttgccgttaccccgctggatggtgatgcgagcattggcatctcaaccgggattgatgccacgatcaccaatcatggacgtcagcatctggatgaaacgcaggtccgggtatttggtcagcatctgctgcaaggcatttacaccacccaggacaatcgcaacgatatcgcgatcacgacgttttgcgacgtagacggtacggcgcagcgctgcttcaccgcgaaagaacgtcggttgttacaacacaatagcgtgcaggcgaaaactggacaacgcgttacgctgacgaaaattagctggatcgactgggcgagcgagcgcagcctgtcgctggaaacctggggacgccagtcgctgcgtaatctggaagcgtgcgcccagcagggatatgacgcactgctggcggaatcgaccgctaactggcatgcctggtggcaaagccatcgtgttcaggtcaccagtaatgatatgagcgatcagcgagcgctggattatgcgctctatcatttgcgtgtaatgacgccagatcacgatgagcgcagcagtattgcggcgaaaggtctgacgggagaagggtataaaggccacgttttctgggataccgaggtctttctgttaccgttccatctcttcaccgagccgaaaaccgcaagaggtttattgcgttaccgctggcataatttgtcgggcgcgcgtgagaaagcccgccgcaacggttggcagggggcgctgtttccctgggagagcgcgcgcagcggtgaggaggagacgcctgaattcgcggcgatcaacatccgtaccggactgcggcagaaagtggcctccgcccaggctgagcatcatctcgtggcggatattgcctgggcggtgatcaattactggcatgcctccggggatatgaactttatgtcccgtgaaggtataacgctgcttctggaaacagcgaagttctggataagcagggctgtcatggtcaacgatcgtttagagatccacgatgtgattggtccggatgaatacactgagcatgtgaacaacaatgcgttcaccaactacatggcctggtacaacgtagagcaggcgctcggttttgcgcgtcgcctgggctgtaacgatgagatctttattcatcgtgctgagcattttttacgccatctctggcgtccggaagcgttgtccgatggtgtgttacctcaggatgacaccttcctgagcaaaccggttatcgatctgtccagttacaaagcgaaagcgggcaagcagacgattttgctcgattactcccgtgcagaagtcaacgagatgcaaattctcaaacaggccgatgtcgtgatgctgacttacatgctgccggagcaatttagcccgcaaacatgtctggctaacctgcgttattacgagccacgcacgattcacgactcctctttgagtaaggcgattcatgggattgtagctgcgcgttgcggtgattcggctcaggggtatcggttctggcgcgaaggttcgcttatcgatctcggggatgacccgcacagctgcgatgatggtattcatgcggcggcaacgggcgcaatctggctgggcgctatccagggatttgccggagtgaatattcgccatggggagttacatcttgcccctgcattaccggaacattggcaaacactgtctttcccactgcgctggcagggttccactatgcagataactatcaacgctgccgaaatccgtattcgcagtgctgagcaaattatcctttggattaatggcgaaaaaatctccgtgcagggggaggccgtaatctgctatgacgccattatttcgcccacctatgggaccgctaccactagaaggggcgatgaatga

SEQ ID NO: 151211 - DNA, 1056 bp, Enterobacter cloacae
gtgaaaagtgcactgacaagcgctccgctacgtgtcgccattatcggcgccgggcaggtagcggataaagttcatgcttcgtactactgcacccgcaacgatctggaactggtggctgtctgtgacagccgcctgtcacaggcgcaggtgctggcagagaaatacggtaatccgcaggtttgggacgatcctcagacgatgttacgcgaggctaagccagatatcgtcagcatctgttcgcccaatcgttttcattacgaacacaccatgttggcgctgaacgccggctgtcatgtgatgtgcgagaagcctccggcaatgacgccagacgaggcgctggagatgtgtcaaacggcgcggcgtatggggaaggtactggcttatgattttcatcatcgtttcgcactggatacacaactgcttcgcgaacaggtaatgagcggcgtgttgggtgaaatctatgtcactaatgtccgcgccttgcgccgctgcggcgtacccggctggggtgtttttaccaacaaggaactgcagggcggcgggccgctgattgatatcggtatccatatgcttgatgccgcgatgtatgtgttgggcttcccggcggtaaagcgcgttaacgcgcatagctatcaacgtattggtacgcgtaagaacagcggccagtttggggaatgggatcccgcgacgtacaccgttgaggattctctgttcggcacgatcgaatttcataacggcgggatcctgcgccttgagacctctttcgcgctgaatattcctgaacaatcgattatgaacgtcaatttctgtggcgatcttgccggggcgaccttatttccggcgcaggtctataccgatcgtgacgggacgctggatgtgctgttccagcgcgaaatagccgatgacaatcgtcattttcgcagcatggaggccttcgtgaatcacgttcagggcgagcctgtcgctattgcagacgcagagcagggcgtcgttattcaacaactggttgccgcactgtatgaatcggctgaaacaggaacatatgtagacttatga

SEQ ID NO: 151212 - DNA, 789 bp, Enterobacter cloacae
atgaaaatcggaacacagaatcaggcttttttcccggaaaatattctcgagaaattccgttacatcaaagagatgggttttgatggttttgaaattgacggcaaattgctggtcaacaatcttgaggaagtgaaagcggcgatcaaagaaacgggtttgcctgttaccaccgcctgcggggggtatgacggttggatcggtgattttatcgaagaacgtcgtttgaatggtttacagcagattacccgcattctcgaagcgctgtccgaagtaggcgggcaaggcattattgtccctgccgcctggggtatgtttaccttccgcctaccgccgatgacctctccgcgtagtctggaaggcgatcgcaaagccgtcagtgattcattgatttatctcgataaagttgccgagcgtacggggacggtggtgtatctcgagccgctcaaccgctatcaggatcatatgatcaacaccctggcggatgctcgccgctatatcgtggaaaacaacctgaagcatgtgcaaatcattggtgatttttaccatatgaatatcgaagaagatgatatggcacaggcgctgcatgacaatcgcgatctgttgggacacgtgcatattgcggataaccatcgttatcagccggggagcggtacgctggatttctctgcgctttttgaccaactgcgtgaagataattatcagggctatgtagtctatgaagggcgcgtacgggcggagaacctgccggaagcataccgtcagtcgctggcctggctgcgtacctgctaa

SEQ ID NO: 151213 - DNA, 1053 bp, Enterobacter cloacae
atgaagaagttagttgccaccgaaccgcgtgttgcagcgctggtggaatatgaagacagagcggtatccgccaatgaagtgaaagttcgcgttaaatttggcgcgccgaaacatggcacggaagtggtcgattttcgcgctgccagcccgtttattgacgaagattttaacggtgaatggcaaatgttcatgccacgtccggaaggtgcaccgcgcgggatcgaattcggtaagttccagcttggcaacatggtagtgggcgatgtcattgagtgtggtagcgatgtgaccgaatacgccgttggcgattcagtttgcggctacggcccactggcagaaacggtaatctttaacgccgtaaacaactacaaactgcgcaaaatgccagaaggtagttcgtggaaaaatgccgtgtgctatgacccagcacagttcgccatgagcggtgtgcgcgatgccaatgtgcgcgtcggcgactttgttgtcatcgtcgggttaggggcaattggccagatcgccgtacaactggctaagaaagcgggcgcgtcagtggttattggcgtggatccgattgcccatcgttgtgatatcgcgcgtcgccatggggctgatttctgtctggatccgattggcaccgacgtgggcatggaaattaaaaagctgaccagcaaacagggcgcggatgtgattatcgaaaccagcggctatgcggatgcgctgcaatcggcgctacgcggtctggcttatggcggaaccatctcctatgtcgccttcgcaaaaccttttgctgaagggtttaacctgggccgtgaagcgcacttcaacaacgccaaaatagtcttctcccgggcctgtagtgaaccaaatccagattatccgcgctggagccgcaagcgcattgaggagacctgctgggaactgttgatgaacggttatctgaactgtgaagagcttatcgatccggtagtcaccttcgccagcagcccggaaagctatatgcagtatgtcgatcgccatccggaacagagcatcaaaatgggcgtgacgttttaa

SEQ ID NO: 151214 - DNA, 843 bp, Enterobacter cloacae
atggcaacaaataaacgcacgcttggccgcatcggcttttactgtggattaattgtcttcctgggcatcacgttatttccgttttttgtgatgctgatgacctcattcaaaagcgcaaaagaggcgatctcgctgcatcccacgctgttacctcagcaatggacgctggaacattacatcgacatttttaacccgatgatcttcccgtttgttgactacttccgtaatagcctggtggtatcggtcacgtcatcggtggtggcggtgtttctcggcgtgctcggggcgtatgcgctttcccgtctgcgttttatgggacggatgaccatcaatgccagtttttacacggtgtacatgttttcggggattttgcgggtggtgccgcttttcaaaatcattacggccctcggcatttatgacaccgaaatggcgttgattatcaccatggtgacacaaacgctgccgacagccgtgtttatgctgaaaagctacttcgacaccattccggatgagatagaagaggccgcgatgatggatggtttaaatcgtctgcaaattatctttcgcatcaccgtgccgttggccatgtccggtctggtttcagtctttgtgtactgctttatggttgcgtggaatgactatctgttcgcctcgattttcctctccagcgccagcaattttaccttaccggtcggtctgaacgcgctgttcagtacgcctgactatatctggggacgcatgatggccgcgtcgttagtcaccgcattgccggttgtcattatgtatgcgctttccgaacgttttattaaaagtggtttgaccgcaggcggcgtgaaaggctaa

SEQ ID NO: 151215 - DNA, 903 bp, Enterobacter cloacae
atggggaaatggaaagccgtgatgaataagttcttttcaggtcgatcggatatgccatttgccatgctgctgctggcgcccagcttgctgttattgggcggtttagtggcgtggccgatgatatctaacatcgaaatcagctttatgcgtttgccgcttaatccgcaaattgagtctacgtttgtcgggctgagcaactatatccgtatcttatccgatcccggattctggcattcgctgtggatgactgtctggtataccgcgctggttgtagcagggagcacggtactggggctgggagtggcgatgttttttaaccgtgagtttcgtctgcggaaaacggcgcgctcactggtcatcctctcttacgtaacgccatcaatttcgctggtgtttgcctggaaatacatgttcaacaatggctacggcattgtgaactacctcggcgtggatctgttgcatctctacgatcaggcgccgttgtggttcgacaatcccggcagcagcttcgcgctggtcgtgttgttcgccatctggcgctacttcccgtatgcctttatctcgtttctggcgattttacagaccattgataaatcgttgtatgaggcggcagaaatggacggcgcaaacgcctggcaacggtttcgtatcgtcacgctgccagcgatcatgccggtgctggcgaccgtagtcacgctgcgtacgatctggatgttctacatgttcgctgatgtttatctgctgaccactaaagtcgatattctcggggtctatctctataaaacagcgtttgcatttaacgacttaggcaaagcggccgcaatttccgtcgtcctcttcgtcatcattttcgctgttatcctgctgaccagaaaacgggtgaacctcaatggcaacaaataa

SEQ ID NO: 151216 - DNA, 1293 bp, Enterobacter cloacae
atgcttaaagctaaaattgtgctgatttcagcactggtttcctgcgctctggtttccgggtgtaaggatgataaaaagtcctctgtcgcgattgaatttatgcactcttctgttgagcaggagcggcaagcggttatcgcaaaactgattgagcgttttgaaaaagaaaacccgggcatcagcgtcaaacaggtccctgtggaagaagatgcttacaacaccaaggtcatcaccctggcgcgcagtggttctctgcctgaaatcattgaaaccagccatgactacgcgaaagttatggacaaagagtccctcatcgaccgtaaagcggtagcgcaggtcatcaacggcgtaggtgagggtactttttatgatggcatcctgcgtattgtacgcactgaagacggtagtgcatggaccggggttccggtcagcgcctggattggcgggatctggtaccgcaaagatgtgctggcaaaagcgggactggaagagccaaaagactggcagcaattgctgaacgtggcgcagaagctcaacaatcctggcagtaagaaatacggcattgcgctacctacggcagaaagcgttctgaccgaacagtcattctcccagttcgcgctctctaaccaggccaacgtttttgatgcgcagggaaagattacgctcgacacacctgaaatggcgcaggcgttgcagtattaccgccaacttgccatgaacaccatgcctggctcgaacgacatcatggaagtcaaagatgctttcatgaacggcacggcgccaatggcgatttattccacctatatcctcccggcggtgatcaaagagggcgatcctaaaaatgttggctttatggtgccgacggaaaaagattccgctgtttacggcatgctgacgtcgctaaccattaccgcaggtcaaaaaaccgaagagacagaagcggcagagaaatttgtcacctttatggagcaggcagacaacattgcggactgggtcatgatgtcgccaggggcggcgctgccggtcaacaaagcggtggtgaatacttcgacgtggaaagataacgccgttatcaaagcgctgggtgaattacccaatcaactgattgccgaactgccaaatattcaggtctttggcgccgtcggtgataagaactttacccgcatgggcgacgtaaccggctccggcatcgtgagtaccatggtgcacaacgtcacggtaggaaaagctgatctttcaacgacgatgaaggccagccagaccaaactggatgaccttgttgaacagcgctaa

SEQ ID NO: 151217 - DNA, 1707 bp, Enterobacter cloacae
atgggaccgctaccacgagaatcgaaggtgaaccaaaaaatccaaaaatgcctgacagaagtttatggtcatacatttacttcatgccactatgaagcgctgtttgcacgtttagagaaatcacagggattaattaaaaaaatccgtaaagcgcattgggacgagggcgatgtggtgcttattacctacgccgatcaattccacggggctggtaaaaaaccgctaccgacgtttaatcagttttataatgaatggcttaagtcgacattttctcatgtgcatctgctgccattttatccgtggtcatcggatgatggtttttccgtgattaattaccatcaggttgccaaagaaaccggtgactggaatgatattaaggaattaggtgaatccagtcgactgatgtttgattttgtttgtaaccatatgtcagctaaaagcgagtggtttaataattatttgcaacagcttgacggttatgaaaatttctttattgcaatggatcctgatacggacctgagcaacgtcacacgtccacgcgcattaccgttactgacaccttttacgctaaaagataacaccgtgcgtcacttatggacgacgttcagcgatgaccagatcgatctcaactatgccaacccggtggtattactggcgatggtcgatgtgctgctaagttatcttgagcagggcgctgattatgtccgcctggatgcggttggctttatgtggaaagagcctggaacgagctgtattcatctggaaaaaacgcatcagcttatcaaactattacgcgctattgctgactgcgcggcgcctggtacggcgattattaccgaaaccaacgtcccgcataaggataacgtgtcctactacggtaatggccatgatgaagcgcatatggtgtaccagttctcgctgccgccgctggtgctgcatgcggtacaacgccaggatacaacgacattgtgtcagtgggcgcaatcgctggaactgccatcgactgagaccacatggtttaatttcctcgcatcgcatgacggcattggtctcaacccattacgcggtttgttgcctgaagacgagatcatgcggctggtgacggaactacaacaggaaggcgcgctggttaactggaaaaataaccctgatggcagtcgcagtccgtatgaaattaacgtgacatatatggatgcgctaacgcctggtaattgtagcgatgccgaacggttttctcgctttattctcgcacatgccattttgctgagttttccaggagtgccggcggtttacattcaaagcatccttgggtcacgcaatgattataaaggtgttgagacgttcggttataaccgtgcgattaaccgcaaaaaatatcaggtaagacaaatagaaacggagctgaaagatgaaaccagtttgcgtcacgctatttatcatgagttatcccgactaattgtaatacgtcgcaataataaagcatttcatcctgatagtgattttcaaattagcagtattacaccggccgtaatgcaaattaaacgtatggcggaaacaggtgagcaagttatcggattatttaatgtcagcggtcatactcaaaccattcgtattgacattgaaaatggagttgatttgattagcggtaaaactatttcaggtaaggaattaacgttgtacgcctggcaggtcatgtgggttaagtaa

SEQ ID NO: 151218 - DNA, 231 bp, Enterobacter cloacae
atgaacaatcgctggcaacgtgccgggcaaagggttaagccgggctttaaaatagcaggtaagctggtgcttctgaccgcgctgcgctacggcccggcgggtgtagcagggtgggcggtgaagtccgtcgcccgacgcccgctaaaaatgctgctggcgttggttctggaaccggtgttgagtcgggctgcggcaaaattgtcgaaacgttattcaggtaatcaaccctga

SEQ ID NO: 151219 - DNA, 360 bp, Enterobacter cloacae
atgggaggcgttaatctgaataaaaaactgtggcgtataccgcagcagggcatggtgaaaggggtttgcgcgggtattgcgcattatctcgatgtgcctgtgaaactggtgcggatcctggtggtactgtccatcttttttggtctggcctttttcacctttgtcgcctacatcgtgctgacgtttgtgttggatccgatgccggacaacgtggtttccggcgagcagcagccatcaagcggtgagctgttggatgccgtcgatcgcgagctggcggcaagtgaaaagcgtttacgtgaaatggaacgttatgtgacgtccgatactttttccttacgtagtcgcttccgtcaattgtga

SEQ ID NO: 151220 - DNA, 225 bp, Enterobacter cloacae
atgagcgcgctatttctggccatcccgttaaccatctttgtgttgttcgttttaccgatttggctctggctgcattacagcaaccgttccagtcgtggtgaactgtcgcaaagtgaacagcaacgtctggtcgaactcaacgatgacgcacagcggatgcgcgagcgcattcaggcgctggaagacattcttgatgctgaacatccaaactggagggaccgctaa

SEQ ID NO: 151221 - DNA, 669 bp, Enterobacter cloacae
atgggtattttttctcgttttgccgacatcgtgaacgccaacattaacgcgttgctggaaaaggctgaagatccgcagaagctggtgcggttgatgatccaggaaatggaagacacgctggttgaggtacgttccaactcagcgcgtgcgctggcagaaaagaaacaattatctcgccgtattgaacaggccagcgcgcaacaggcagagtggcaggaaaaagcagaacttgcgctgcgtaaagagaaagaagatttggcgcgttctgcgttaattgaaaagcagaaactgaccgatttaattgcctctctggagcatgaggtgacactggttgacgatacgctggcgcgtatgaaaaaagagatcggtgagctggaaaataaactcagtgaaacccgtgctcgtcagcaggcgctgatgctgcgtcatcaggcagcgagttcttcgcgtgatgttcgtcgtcaactggacagcggtaaacttgatgaagcgatggcgcgttttgaatctttcgagcgtcgtatcgatcagatggaagccgaggctgaaagccataacttcggtaaacagaagtctctggatcagcaatttgcagacctgaaagcagatgatgaaatcagcgagcagctggcgcaacttaaagccaaaatgcagcaagacaagcaataa

SEQ ID NO: 151222 - DNA, 981 bp, Enterobacter cloacae; identical to SEQ ID NO: 118127

SEQ ID NO: 151223 - DNA, 606 bp, Enterobacter cloacae
atgcggctcctgctgaatgatagattcgaacaaaattacgaaggatgcggtagtccaccagcactgatccccggtagcggtaaatgcgaaggcgctgccagcgcgcgcgtagtacctcaagcgtttctggcttcatgtggcctccccgatgataatttgcccggtttctccccagattttggtaacccgcccgtcccagacatggctatcctcgtcaaacactgcatccagcagagctttttccagattgtctttgtccggcttttgttgatgagtctggccgacatattgcgcccgcttcgtcttactccagctctttggcatggggataacgaacgtgacgtgatatccggaatctggcaggcggatccccagcaaccggacctgttctttgtatgccccgtaagctgctgttgctggccgtttatgccatctgtcgcgctgagtcattcggggtttgccgatcggcgtaatttcgtaaattttcatgcgggcaccaccagcccgcggcgggcaacttcaatcactgtcagaacaatcgcgcggtccataagttgccgacgctcgtcccggttcagcttattcccgttatcaatgctgtcatga

SEQ ID NO: 151224 - DNA, 453 bp, Enterobacter cloacae
atggaaacgctccttcgaactgacccggagaaatacggttatcaggctggcctgagtcgtcttcagcgatttctttctaagatccagtacgactggagcctgcgggattatatcggtcgtaaagtgttcgaaggcggatatgtgcgtcttcaacccaatatcttttcttcgtccctgactgaacgtctttttcatgcctgttgcagccttgattatgttgaagcaagacgtgcggcagagcatcgcagaaagctactttccggcgaggttgacgatacggcttataaccgtcgtatggctgagccacaatttcggcttgtacaggaagcaaacgtgatccacgttgatttcctctggtcgttgcactgtttcaaccctcgcccgtttcgggcaattgagatctatcgcagggtctgggaagaggccgatctggaccttcttgaggatggatga

SEQ ID NO: 151225 - DNA, 426 bp, Enterobacter cloacae; identical to SEQ ID NO: 129404

SEQ ID NO: 151226 - DNA, 423 bp, Enterobacter cloacae
atggcagagaaaaggatgacgtccacagagatatggttacggcttataaacatcgggtcgttatacggtgacgcgatgctggagattgcgcagaggctgcttcgccaggcaaccgtcgatgctgaagctgtcaacgcgtcagggctttcgcccaaacatgccgtaaagtttttttcgttcagtgagagtgagcttgaacgtagtctggaatggctggaacacaccgacaaccaccttctcacagcggatgatcctcgctttccgccattgttacgttctatacctgattttcccggggcgctatttgtgcgaggccgcgttgacgtgcttaatagcatgcagcttgcggttgtgggcagccgtgcgccctcgtggtatggcgagcggtgggggaaaatgctgagtgaacaaaatgctgagtga

SEQ ID NO: 151227 - DNA, 1299 bp, Enterobacter cloacae
atgcgcaccgacaacgctaaatttcgttttatcgggcgcgatgcctacgaggcggcagggggttacgtccgtgaagatctgttcagccaggacgagggcgacggtacggctgacagcgtgctggttgagcgtctggtgcaggaaaagctggagcgtatcgcgcaggacattcagcagcgggagggctgggcatggagtcgcggacgcgcagcccgcatctggtaccacggcgaagacggtaaggagttcgtgcagcctgctgaacccgatccggtgtacacccctgagcagcagcagcgtcttggtgcgctgcgggagcagtacgatacatatgacagcgtttgcgacgagtcagatgcgatcgaagcggacatcctcgccattcaggcggcggcagaagccagcgcgtggactgacgacatgaagtcaggcgcgggagtgatggtcagcctgtacgaagggcaggtgtacgtgcagcgcggtgtgcgcctgaaagcggatatgcctgaagaaaccgtaaccagcagcgtaacggtgccattcacctcacaccagcccgacgccgcagaggggatcagtgttccgctgctcacgaaaatgacctccgaacgtacgctggcagtccaggcggcgctgatgcagcagcccgaaaaggcggtggcgctgatggtctggcgcatgtgtacctgcgtcttctcgggctgcctgaccacgacgcatccgttccgtatcagcctcactgtatctcacggcagcctgacggagaacgccccgtccggtaaggatggcgcagcgtttaacatcctgatgaccgaacgggcaaggctgaaagccctgctgccggaagggtgggagaaggacttcaccaccttctttgcccttgacggcggggtgttgatgtcgctgatggccttctgcacggcctgttccgttgacggggtgcagacccgcgatatggggcacacctcgcgcagtaccctcgatgcggtcgaggcggcaatcggcttccacctgcgcgactggtggcagccgacgaaggacaactacttcggcagcctgaaacatccgcagattgtcgcctccctgaaagaggcggggctgacgggcgcggcgggtgacgcggagaagatgaagaagggcgatgctgcagcgcatgcggagcactttatgcagcacacccgctgggttccggcatggctcaaaggaccggagtcagcgggtgaatccggtgcagacgacgcggcttcagataccgacagccctgacaacgacaccaccaacacggcacacgccgcctga

SEQ ID NO: 151228 - DNA, 966 bp, Enterobacter cloacae
atggcgatttatcaccttacggcgaaaaccggcagcaggtcgggcggccaatcggccagggccaaggccgactacatccagcgcgaaggcaagtatgcccgcgacatggatgaagtcttgcacgccgaatccgggcacatgccggagttcgtcgagcggcccgccgactactgggatgctgccgacctgtatgaacgcgccaatgggcggctgttcaaggaggtcgaatttgccctgccggtcgagctgaccctcgaccagcagaaggcgctggcgtccgagttcgcccagcacctgaccggtgccgagcgcctgccgtatacgctggccatccatgccggtggcggcgagaacccgcactgccacctgatgatctccgagcggatcaatgacggcatcgagcggcccgccgctcagtggttcaagcggtacaacggcaagaccccggagaagggcggggcacagaagaccgaagcgctcaagcccaaggcatggcttgagcagacccgcgaggcatgggccgaccatgccaaccgggcattagagcgggctggccacgacgcccgcattgaccacagaacacttgaggcgcagggcatcgagcgcctgcccggtgttcacctggggccgaacgtggtggagatggaaggccggggcatccgcaccgaccgggcagacgtggccctgaacatcgacaccgccaacgcccagatcatcgacttacaggaataccgggaggcaatagaccatgaacgcaatcgacagagtgaagaaatccagaggcatcaacgagttagcggagcagatcgaaccgctggcccagagcatggcgacactggccgacgaagcccggcaggtcatgagccagacccagcaggccagcgaggcgcaggcggcggagtggctgaaagcccagcgccagacaggggggggtcggttccggctgagggcgaaatgacaccctaa

SEQ ID NO: 151229 - DNA, 285 bp, Enterobacter cloacae; identical to SEQ ID NO: 31406

SEQ ID NO: 151230 - DNA, 741 bp, Enterobacter cloacae
gtgggaaagaggagggtaaattttcagcgttgctggctccccgtcagccggattgggttgcatcgcaggggtgtcgaaagagtcaactgcggtccaaagctgttggacttgggtgaaaagggcgtttattcttcctatacgtgggcgacgccgctattgcggcgcgaatacaaagaggaagagatgaattatcaaattgtgaatattgcggaatgcagcaattatcagttagaagcagcaaatatactaacagaagcgttcaatgatcttggtaacaattcatggccagatatgacgagtgcaacaaaagaagtaaaagaatgtattgagagtccaaacctttgtttcggtctgctaataaataactccttagttggctggataggcttaaggccaatgtacaaggaaacctgggaattgcatccattggttgtcagaccagattatcaaaataaaggtattggcaagatcctgcttaaggaattagaaaacagagctagagagcaaggtattattggaatcgctttaggaacagatgatgaatactatagaacaagtctctctttaataactataacagaagataatatatttgattcaataaaaaatattaaaaatattaataaacatccatatgagttttatcagaagaatggttattatattgttggaataattccaaatgccaatggtaaaaacaaaccagatatttggatgtggaaaagtttaatcaaagagtaa

SEQ ID NO: 151231 - DNA, 489 bp, Enterobacter cloacae
atgaagcaatgggatcagcgtccattcgagataaggaatcttttcaatcctgcattttgtggtgttgtactattcagagcaatgcagagctacgaagaggaaaactcacagggcatgccattttctctcgctcttttagttttaccattatgtctgcaaaaagattctcgccaagtgtttgctgaaaatcctcgccgctaccttttgaaaactatagaaaacaatcccaaattactcattaattttgctaaccgcgtcaataatatgctgccatttacgcttgaagcttttggagtgctcatggaacgaggatgttttgtcgtaacgcaagacggccgattgaaaacaatacctaataaagttcgcaaatcggtcatagggactgaagaatcaatctcatgccagcgtgtcgcgcgctatataggaaaagaatttgcccgtattgcagatcgcgttacggtgtacacgacctttggaatacgcccatga

SEQ ID NO: 151232 - DNA, 1962 bp, Enterobacter cloacae
atgaaaattaagtcgattcatgtctacagccatgatggccaacgtcgggacctgcaatttaaggttaatggtttaaatgtcattactggccgttcctcaaccggtaaatcagctctttctgagatcattgaatactgtatgggtcgatctacttttaacgtaccagaaggtattattcgcgataaagtgtcatggttcgcagtcatttatcaattttcacaggaacaagtactaatcgcgaaaccaacaccaaatgcaggagccacaagctgtggcaccgttatgctgcgacgaggaaatgaactgaccgcaccaaatttcaaagacctctcggttaacaccgatgatgattctgtagtcgcactgttgtcacgattacttggcatccgcgagaaccgtacagacgtggcaattgggcacagcagagaaagctttgaagcaaacatcaagcatactttttattaccttttccaaaagcagggccttgtagcaaataaagatcaacttttttatcgacaaaatgaggcatttcagccacaagctattcgcgacacattaccgattcttttaggtatttcatcaaatgatcgctatgaacttgaggccaaactccgaacagcacaacgagatctgaaaatcaacgccaaacgtcttgaacaagctcgcgatacaatcgatacatcactgctaaaaggttctgggcttttatctgaagccagagccgtgggtatcatcacacaagacaaagagagaatcggaactgacgaagtaattgatgttttgcgttctgcaatgcaatggattccgtcccccctacctgaagacgatggacatagaatatccattcttgaaaatgaaattgctggtttacgacaagacagacgtcagacccagtcccgaattgattctgctcggatgtatgccaagcaatcaggtaattttgaaaacgaagttttagagcagcaagaccgattatcttctatcaaggctctaccgaaaaatccggaaactggtgaatggcaatggccattctgtgaagcaaatttagcactggaatctccaattgctaaagcactcctgagcgaactaacaactctcgacgctgaaatgagcattgtggctggccaacgccctaaaatggatgtttatcttactgaactagaagatgaggttcagaccattgtaagttcgataagagccaaagaagtggagcttgctgcggcaatcgcggcaaacgaagttattgagcaattaggcacacgcaataatgctgcggcaagagtaattggtcgtataagtttgttccttgaagaccttgtacctaactcagaactggccacatatgaagcagaaaatcgtcgtctaaagctcaaagtcgaagacctacaaaggaaatttggagctgatagcagccatgaaagactcatatctattctgaataacatttcgtcacagattacacgctacatccaggcttttgatgcagaatttcaggggctccctgcacggtttgatctaagccaaatgactattatctttgatcgtacagatcgtccggtaccaatgagtcgaactggcggtggcgaaaatcatctcgcttatcacctgtctgccttgttagcccttcatctctttgcttcaaagaacaattgccccattcctcagtttcttttaattgatcagcctacccaagtttatttcccttctgaaaaaatttaccaggaagctgatggtactgttcagaaaacggaagctgatgctgacttagcagcagtacgtagactgtttgcgttactgctgaagtttacacaagaagaagtcccaggcttccagcttatcgtgacagagcacgcaaatcttcgcgaccagtggttccaggatgctttaaccgagcttccctggaccaagccccctgccctggtaccagaagactggcctttaccgtcagaattaccaaattaa

SEQ ID NO: 151233 - DNA, 213 bp, Enterobacter cloacae
gtggttgcgctggggcgccgtaactacatgttcttcggctctgatggtggtggtgacagtgcggcagtgatgtacagcctgatcggtagctgcaaacttaacggcatcgagccggaagcctggctgcgccatgtgatcagcgtcatcaacacctggcccgccaaccgcgtgaaagaactgctgccctggaacgtcaccctctctgtaaactaa

SEQ ID NO: 151234 - DNA, 354 bp, Enterobacter cloacae
atgaaatcaaaatcagctaatcgttacccgccggaattacgtgagcgcgctgtcagaatgctcattgagcatcttgatgaatatgactctgaaccggatgctatccgtgccatatcgtcaaaaattggttgtcattacgataccctgaaaggctggctacgccagcacagaaatgacttacgcggtggtatcagccccgtcaggactggtgatggcgagctgaccagtaacgaacgtcaacgtttaaaagagctggagagggaaaaccgggagttgcgtcgcagcaatgatattctgcgtcaggcatcagcctattttgctcaggcggagctcgaccgccactggaaaaaataa

SEQ ID NO: 151235 - DNA, 357 bp, Enterobacter cloacae
gtggagaaaagcgccactctgtcgaaaaaatcccgtctgggcgaagcgttcgcttatgccctgaaccagtgggatgcgctgtgctactactgtgatgatggcctggcagagcctgataacaacacagccgaacgagcccttcgtgccgtctgtcttgggaaaaagaattttatcttcttcggcagcgaccacggcggtgagcgcggagccctgctgtatggtcttatcggaacatgcaggctcaatggtatcgatccggaggcctaccttcgccatatcctgagcgtactgccggaatggcccagcaacaaagtggcggaactgctgccatggaacgtggttcttaccgataaataa

SEQ ID NO: 151236 - DNA, 1221 bp, Enterobacter cloacae
atgccggttcgggcgtacagctactcgcagttctgctgccgctaccagacctggtgccagtcacagaaacgctccatgcgccagcagcatcttgccggtgaaaaatgctttatcgactattgtggacccacagtgtcggttatctcacctgagacgggtgaatgccggcaggcccagatcttcgtggcggtgctgggcgcatcaaactacaccttcgcggaggctacctatacgcagtcgctgtcagactggcttctcagccacgtcaggatgctggagttcttcggtggagtccccgaaatcctggttccggataacctgaaaagcggggttagcaaagccagtcgttacgatcccgaactgaatccctcctatcagcagctggctgagcattatcaggttgcggtgatacctgcccgccccagaaaacccagagacaagccgaaggcggaagttggcgttcagatcgtcgaacgctggatcctggcccggctccgtcaccaggtcttcttctcgcttgctgagctgaaccactgtatccgtacgctggtaaccgggctcaacgaacgtcccttcaaaaaactgccgggcaatcgccgtgaggccttcgaaaggctggacaaaactgtgctcaggccattaccggtgcagcagtggcgctaccggcacatcaaaaaagcgaaggtgaatatcgattatcacgtggaatatgaacagcatcactactcagtcccccatcagcacgtcggtaaaacggtggagcttcatgccttcgacaacctgcttgaagtctggtctgacgggcagatgatcgccagtcacccgcggcgtcttcatccgggcaacagtacggcagcagaacatatgccggagcgccatcgtcatcatcagcagtggacgccagagcggctgaaaagctgggcggccggtgtgggctccgacaccttcacgtgggtcagcgagcgtctggctgaaaaagcgcatccggaacaggcctatcgcctgtgtctggggctgctgagcctgacgcgtgaatatccttctgagcgcgtcaataacagctgtcggctggccaatgcagaggggttaacccggctgaagcagataaagtcgatcctgaagaataaccgcgacctggttccggcggacaaagatctgcacccgtcccgggagcttcctcaggaacatgaaaacatccgtggcccacgccacttccactga

SEQ ID NO: 151237 - DNA, 3441 bp, Enterobacter cloacae
atgtcagatattattcccggatattgcacactttgccgttcgcgttgcgggacgttgaatgaagtagcaaatgaccacctgatcaaggtacgggccaaccctgaacatcctaatggtaaggccatgtgtatgaagggcaaagcggcacctgagctggtggacagcgcaaatagaattctgtacccgatgaagagaacccatcctaaaggtgccgagaacccgggctggaaacgtataagttgggaagaggctatgtcaacgatagccggacaactggaaaaatttaaacgagagaacggagctgaatctgtcgctttcggttttacgagcccaagcggtacccccctcagcgatgcaattgaatggttagagcgatttgttcgtatctatggcagcccaaacaccagctatggaactgaaatatgtaactggcataaagacgttgcacatcgatggacctttggctgcggcatccctgttgctgactattcccatgccgatcttatccttctttgggggcataaccccgcgaatacttggcttgcccaggctagtgcgattggtactggtcgaaataacggtgcaaaactgatcgtcgtggatcctcgcccgacacctttagcgaaagaagcaaatgcctggcttgatgtcaatcctggaactgacggtgcattagctttggggttaagccatctcctggtagaaagaaacctgtttaatcatgagtttgttcgaaactggactaatggtcctttgttggttcgaaatgataatggttattttcttcgggaaaaagatattaacccacttgccatcagtaatcgctatacagtttgggacgaacacaaccagcaagtcacatttatcgattccgagactcgaactgaagaaacgctgacgcctacagctgcacttgagggtaatgttgaagttgcaatagctgatggtgcaaaaatttcctgccaaacggcgttttcatcttttaaagatatgttggctaattatgacccagaaaacgtaagccgtatcaccggggtatctgttgcatcaattgaagccgctgcgagtttgattgccggggccaagaaaatcgcctaccacagttggtctggagtggcacaacacactaatgccacccaaacagaacgtgcgattgcgacactgtatgctttaaccggttgtttcgatcaggaaggatgtaatcgaatctatgccagccacccggtgaatgtggttaattcaccgacactgatgccaaaatcacaatgggataaagcattaggtcttgaagaaaggcctatcgggccgccttcacaaggttgggttcattctcaggatatctggcattcagtattagaaggtacaccctataaaattcgcgggttaattggctttggtgccaacatattactttcacaaagtgatacttctctcggacaacaggcgcttgaggcacttgagttttatgcccatgtagatttgtttgaaacgcctacatcaaagtatgctgatatccttctgccagtaaacactgcctgggagcgcgaaggcctaagaaccgggtttgaaagtagtgctgctgctcaggaccacattcagttgagaaaaaaaatggtctctccgcgcggtgaaagccgttccgaccttgagattgttttcgatcttgcatgccggttaggaatgaatgaagcgttcttcgacggcaatattgaggcagcctggaattatcaactagaaccattaggtttgactgttgagatgctcagaaataagccagaaggttacgatatcccgcttgagcataaagtcagaaaatatgctttcagagacccaaatagtggatatctggcaggtttcaatacagaaacaaaacgtgcagagttttactctgagatccttcatcgctatggttacaatcctttacctgagtatgtacagccgcaagaataccagcgcaacgatcctgattatccactaatgctgacatccgttaaaagcggattcttctgtcatagccaacatcgaagcctgactagcctacgaaaaaaagcaccttatccaacggtagacatttcggcagctctggctgacgaagaaggtatcaagacgggggattgggtagaaattgaaacgagagcaggtcttgctcgatttagagcaaaagtggaagccaaactctctcatgaaactgtaattgctgagtttgggtggtggcaggcttgtcctgattttggcaaaccttcatacccggttaaaggtgagtacagtagcaattacaatagcttaatcagcggtgatagctatgatccagtcagcggtgctttacctttgcgttcattccgctgccgcattcgccgcttgaatgattttgagctgataagacgcccctgggaaggtcgtaaaacattcaaagtcattgaactgaaaaaagaagcagataatgttacgacagttaccttccaatcgaatagtgaaggctacttacctgattatgaaccgggccagcatatcactgttagctgttgtccgatgagcgattctgaagagatcgttacccgggcgtattcgctgacaggccctgcgtttgttcatgaccgtaaaacctattccatttctgtccgtcatcagaaagcgactgatgagaaaggtgaatatgtagaaggaataatgtcatcctacataaacacgcatttgcagataggcaaggatgttgaacttacgcctcctggggggaatttcattgtcccgctcaatgccgtccagcctgtcgtaatatttgctggcggtattggaattactccattcatttcctatctggagtctattaacccccaagcggaaggtccggaaatctggcttttctatgctaatcaaaatagtaggctacatgcgtttaagaaaagaattgcggagctaaatgcgtctattgacaggcttaaagtaattaatatctacaaccagcccctcgactgtgatattccaggattggattatgatagagctggttatgttggtgcgggagatgtcgaggcatatcttattgagaataatgctcgttattacatgtgtggtccgcagcctatgatggatgcgatatcccgagggcttcaggagagaggtgtacctgcatttgctattttctacgagatatttcgttctccgacaaaaataaataatgatccctcattacgtcataaagtaatttttgcaaaatcaggaagagaagagatctggaccacggataaaggtactctgctgaattttggagaaaaacttgggattaaaatgcctagtggttgtcgtgttggacaatgtgaaagctgttcaactaaggtgattgccgggaacgtgcagcatctgaatggtgtggaaccctctgatgagggtgcatgtttgacatgccagtgcattcctgccggtgatatcactattgatgcctga

SEQ ID NO: 151238 - DNA, 1362 bp, Enterobacter cloacae; identical to SEQ ID NO: 98090

SEQ ID NO: 151239 - DNA, 2985 bp, Enterobacter cloacae
atgaaacagctcaaatctattaccctctccaatatccgccgttatggtgccaacaccaaaatcgaactcagcccgggagcaacaattcttcttgccccaaatggcacagggaaaaccgcgttcttcgaagcgattgaatttagcctaacaggtggtatctcgagactgggggcaaatctttcacccatcatcagggacaatcagtccttggctaaagttattctggatttcggtgatgtaagcgcctctgcccaggtaactccccaaggaaatgtagaaagggcgggtgatctcagccccattttcccggaaacgaacgcggaagatatcccttttttactgagactgacccatttattggatcagcgcgagggagaatggcttgtcaaagcagaggccaaaattgcgggctcgcagctggaacgtttaccaatcggtaaggacggatcccaggtcagcacggctctgggcagtattcgccgagtcctgaatgataagcttaagcatgcaaaggaggcagttgagcttctcgaaacagaatatgcggaatggcaaagcctagtgcttgaacgggatatggccgcaacccaatctcagggcggtctgcgcagtaaagaaagcatcgcagaatccatctcgaacatcgcgaagcaaactcagggctcagaggcattacctgcaggactattggtgccgccagtgggagtggatagcctggaaaccatgcgcgatgcgttagagcaaacagtacaagtcagtctgaaaagactcagggagcaaattgaagggcttgtggaggtggatggactgattggccgtttcattgctgagcagacgcgatcagaacagcttggtcatgaacttatagcggccagacaggctttaacgcaaaaacagcaggaacgagcacttatcgtcgggacacaagagcgacttcagcgtgagttgctgcaggcagaaggcgagcgggatttaattatccagcagcttaaccggcttgaccgggaggcgcaaaccaaagaggcccttaaacaacgcaagcaggccttggaagtggctgataaagcgttaagcgatgccgaatctctagcctcaaccttccggaatatacatgaagggagtgaacggctcagtgccgagcatgaactcatcaataaacagcgtaaggcactgcagatcattgatactgagcttttggccgctcgacagctcatcaggcgctgggaggataaccttcagcaccttatctccattacctcagccattacacaggaagaatcacaagaaaaattactgcaggagcgagttgggcaagcaactgtattaaagaccaacgctgaagcagagctactgacgttgaagcaggctcacgaaacgttaacgtcaacggctgataccataaggcaatctgttgcatccattgcggcatatttgcctaaagatcgaggggactgtcctgtctgtggcgtagatcacggtgctgcaagccttcatgaaagaattaccaaatcattggaggctatcgatccgaaagttgtcgaggctgaacgacgcgttaagattgcattggatcagttacgccagtacgcggaggcagttactaatgccaaagctgaactagatacgtgccagcgtaacatgactgagttgagctctcgacaatctcttttaacatccgaaatcaaccaaatcaaaacggacatacttttagaaggtgatacgattgaattagcaaaagcagctattcagcgtcgtgacgagtcaaatgcttcagccaagcttcagctcgacgaaaaacagcataaccttgcatctcctcctacacctgaaatgcttgaagcgtcaaaagcaactcaccaatcggcgatccattctgtggatacggctcgggaggctcgagcgggggccctggcaagccttgagcaatcaacagccgcattagcagcaatcattgcagatgcgcgtcccttgaggacactggatgaattgtcggcggcgcaaagcaaaaatatagcccagctcagtgaactcgaaacgaaagctgcggcagagcaatctgctttaaaccgacaacaaattcagttaaccgaaactaatgaccgactgactggcgtcgaagaacagtttactgacgcccaggctaagctggcagcgatccgcttctcatggcgacagctgtctttctccggcgatcccgcggtcgacgtggcgaagagtaaagagactcaattacaatcatctgttgccgagctatcacgccaaacagaacagttacaaacgctcaaagtcgaaattggagcttggtttaagctggagcagaaacgtatagcgcaaggcatcatagatcgtcgtcgtggctccttatcagaggaagagtttgttgccagcctgcggcagcgcattgaaaacgaaaattcgagccgaatgcagttgttgcaattatctcaagcaatggagacgctcaataccaaactgtctgccgaaatatcgaatgtgcaaaaacatgtactgtcggtcattccaaggtggcagtcgctcctgaagcgcgtcgtcagagagcagcgttttacgggtaccaaactaggttttcgcagtatttacaaaaaggggcatgctgaagtgtccgtgcctttacatggaggagttgctccggtcccggcgattgcaagcgaagctcagttgacagatctgcagttgacatttctgctttcaatggcgcttgaacatcagtggtcctcatggcgcggcctgctgctggacgatcctacgcagcatcatgatctagtccacgccgcgtccgtattcgacttgctgcgtgattacatcgttgaccatggttttcaggttgtcatcgcaacgcatgatgcccttcaggcgcgttatttcatgcgcaaactgcaaaatgatggcattgatgcacgtttgtggtcactcgttccaacacctgaaggggtgacggcatctgagatgcggataacaaggtaa

SEQ ID NO: 151240 - DNA, 600 bp, Enterobacter cloacae; identical to SEQ ID NO: 98087

SEQ ID NO: 151241 - DNA, 1908 bp, Enterobacter cloacae
atgctcagaaggttccggttagagcggaagtctgattatgagaagctggtgattgctcaacgtctggcagatatgcttgaaaatttcttgatcggcaggcttacacctcttgcaatcggtgccgaacagggaagcattgaggagtgggacgatgtggtgattatgtactcaacagaccactacgagcatttacagattaaacgtcagtcaactgacttttgtactaaaaatcctgatcagactaaacagcccaaaaggaaacccagaaacggctctgtagacaccgaaccaaccccctctgttctagacactgcattctcgagcctagcccgcaacgctgcatcgggtaaacttgacgaaacaccagaccgcaaattcaaactaatcctcgtcggtctacacctttttataaaaaacagtctctccgttaatcacctcgaagaactttgtgaactttgccgtcgcccagggctgagtcttgatgatcttgccagcagacaggatattccaactcagaatgcgtacttatggctaacgacctggtgtggatttaaagactgggaccagataagagatgtgcttcgccgagttgagatcgtttgtgtaggtaacgatgcaacactaaaagaacgaacgcttcattcgcttgggcgtaactttagcaatccggaacgcacactgcagcgtctgattaactacattgctaccgagacaactgacgtttcggcgataagatgccatgacgttgtcaatgcactgcgaagcgaacttcggcctgataccgtaacttgggctcagtatcagttaagtgacggttcttcagcggccagcggcccttggtcattagctggtacgctcgatcttgccaatactacagtcagtccagcaaaggccattgtcgaacacatgtgggggattaattctgccccccgaacactcagagtgtatgctgcatattcccaacctcccgtagctaatctctctctttcctcagcgattgtgcgtatggctttgcatctgccaaatggcattcaggtcctgatgttaggtgaatccatatggcgaagcagcattgcccaggaaatcggtcacacacttggtggggccgaggatgatttcagcggcttgccatggattgagaatacagaatgtctaacatgcgcgcaggatcatgaattcaatacgttgcgcactgtcagggaagaagctgaagcactcgccagagctatggacgatgtgctatggcagcgtctgcttcagcatgtggcggacaaactcggcactatctccgatccagcactcgccgatgctatggacgcagtctggaattcatggttagttggattcacggctgtacctgaaagccgccgcagatttctggacaggcttttgtatccgaaaacggagaataaaaatgaaaaacatgcgcttcgcttgggaccccgaaccttaagcctgctcgttgatgcagtggaaattttgttgttggtatctgtgggtttttcaactcgcaacaaccactgggaattctttgaggatggagggacagtaatgagtatcgctcttcaatactggtctggcccagctagcggtcgaactggggtccgtgagttgtctgatgatccgttaatcgacgtgatcggtcctgaccctgatcctatcatcatcctgtctggcgtgcgggcaccatcatcaatgttattaaatgcaggaatggctgacgacgctgagacagcgactagcatggcggctgagcgtcagccacatctgctcgtgacccgatctgaaatgtatcgccatttgagtagggggacgcttgagtccgtacgcaaatacttcggccagcaaaggatagaaaggcaacgcgcgcgtgaagcggcaattgataagacgacaaagggagcctga

SEQ ID NO: 151242 - DNA, 240 bp, Enterobacter cloacae; identical to SEQ ID NO: 118566

SEQ ID NO: 151243 - DNA, 1164 bp, Enterobacter cloacae; identical to SEQ ID NO: 118569

SEQ ID NO: 151244 - DNA, 1020 bp, Enterobacter cloacae; identical to SEQ ID NO: 118568

SEQ ID NO: 151245 - DNA, 480 bp, Enterobacter cloacae; identical to SEQ ID NO: 118565

SEQ ID NO: 151246 - DNA, 240 bp, Enterobacter cloacae; identical to SEQ ID NO: 118566

SEQ ID NO: 151247 - DNA, 357 bp, Enterobacter cloacae
atgggatttgcatcaccagctgctgattacgttgagcgccagctcactcccgaaattctgtgcaacatgggtgccgatagccgggtacttgagactgatattggctttgcagtcattgaaccagccacgaaaaaaactccaggtgatgtgttgttaattctgtgcgacggccacacacagtttgcaaagctcatgggtgaagcgctaattactaacgatggcgaagcgatagaaggttccgcgttggagtacgtagaggtattggggcgggttacatttttcatcaaccgcgtgataagtgatgattgtcggtttgggaagtgccgcaacagccgcactaaccacatcatcaactga

SEQ ID NO: 151248 - DNA, 825 bp, Enterobacter cloacae
atgattgtcggtttgggaagtgccgcaacagccgcactaaccacatcatcaactgatatgactctaggtcgggttctgaaagttggtgactttggattaggcagaacaaatctgaatgcgtctgacgccactttaaatgcaaatgacgtaactttctcgtgttttagttctggccctggtgccagcggttctaattattatgacccctattccaccatgataactggcgtacgtgcggggggaggtgatggcacaggttatgtatcgcaaatacagctaacagttgataatcgaatggcatcacgtcgaagatatcttaataactggtcaccgtgggccgtctattattcctcggcgaacaccactacggcatcagatggcacgcttaaggcagcttcgccggtgatcaaagtattttcagatggcacatatcagactaacgatgaatcagaaggctgcactgtaacccgtctggccgcaggtcaatatctgattgaaggatgccagggtctgaactcagatgctgcatggggcggcattgacggaggttttgacatccccaccgatcgtaacaggcagcccctcgtctggctggattatgaggttaacggggatggctcggtgctggtgaaaacctatcaccgtactcaccctgatgcgccagcgttcgccaggaacgaaatagacggcgtaggtgatggagatccggtcgacatcccccgcgaccagtttgtgtccgtgcgtgtcgaaatgcctgccgattctttgtacaaccaaaaactcagtgcggcagagctggccatgactgccgatgcaggtgaataa

SEQ ID NO: 151249 - DNA, 195 bp, Enterobacter cloacae
atggtgtctccaaaggcgtcactgataaacgatgagtttgcatcatttggccttggagcctggtatgttccaaccccaaaagcccccactggcatgacattaccggagtccgttccgacgtccctcgtcgcggatgttcccaaaccgacctttattcacctgcatcggcagtcatggccagctctgccgcactga

SEQ ID NO: 151250 - DNA, 423 bp, Enterobacter cloacae
atgtgggttaccactggcggagctggctattgccgttttctgttaaacacgaatcctcaaactgcaaaaacagatgctccatggacggtatttcagtcagcaggaacatcggacattaactttaagaaagtgaccggggatctggatctaaacgaatcgctgtcaaacatcgaggcaatggattttaaaaccttctactatcttgctgatgaagataaagtcattcgccgcggcgttattgctcaggaactggaaaagatagatccccagtatgttcattcagctgaggaatcggggaaaatgacacttgacctcaaccctctagtgctcgatgcgcttgctgccatcaaagccctgacaatccgtgtcagagagctggagaaagaggctcaagctgtggttcctgtctcatccgctgattaa

SEQ ID NO: 151251 - DNA, 1329 bp, Enterobacter cloacae
atgatttatactactggcactatcgccatcagcggaaacacccttacaggtaccggcacaaaattcactgctgctggttctcttattcgtaacggctgtaccgttattgcaatgaccagccctgtgcaggtatttcagattaccaccatcggcagcgcaacaagtctcaccgtaacgccagcagctaacccaactgttcccgctggaacccggtttgccattcttctgagtgacagtctgagcgtggatgggctggcgcaggatatcgctgaaaccttcacgatgtaccagcgctacatgagcgggttcgctgatgtgatgaacggtactacagacgtcactatcacgattaacggtgtggccgttaccgtgccgggccagaaatcactggcgaagaaaggggctaacagcgatataaccagcctaagcggcctgactaccgcactcagtatcagtcagggcggaacaggtgcaaagaatgctgatgacgctcgcacaaacctcggtttgggaagtagcgcgacaaaggatgtgggcactgcaacagataacgtattgcaagtaggtgcttttggtttaggagcaaccttaaattcaactaacgccagacctatttcccctggatcatcagatcagccaactggctatggatattggtcagcaacagaaaatattggagcgtttcctagagcatggcaaggggtcattaacgtacgtacagcaggagcgatctattctcagttatctatgactggaatcagtactgcgcgtatggcaataagggtatctaatggtagcaatggatttacaggctggtcagagttttacacaacgacaaacacgacaaaagcatcggatggaacacttaaagcagcttcaccagttgcccgtattgtgaaaagcctggaggaatgtcagcgcactgatatagctgaggatggattttcatggtgcggatgcggtacggctaatgctgaggcggagggaataaccctttcccggctcgatgttggtgtttatgtgctcaccggttcagcaggactggcgtctgatggatggcagttactgccgccaatggaccctggcggcatgggcgaactgggtgtagttgaggcagagcagaccgaaagcggaggactgactatccgcctgtttaagcgaaaatacatgctgagcgatgaaggggagatcgtcaaaacaaaaggggaaccgatggacgtgccggtgaacagctggatcgatgttcgcctggatatgcctgatgattctgcctttaatcagcggatgagacaggaaccacagcttgagcctctttctccagctctctga

SEQ ID NO: 151252 - DNA, 921 bp, Enterobacter cloacae
atggagataactgcgggcctgcgatgcccgtcgtttggggccaactttgacagtggctaccagaaagccaagtacgctgatgttgccggttatgtttccggggcgcaggtgctgtttatccctcacgcgacggcttatcttgattcagggctgcttcataaaatgaactcggtcaccatatccggtggccgtgtgacgcagaactccacgatgaaggatgtaagcatcagtgagcgtgagagtacgtacacgttccccggcagcatctggcagatatttccatcaggccagcgtaagggagaaggtctgcttattgatgacagcactgacttcctggcgatcactaatgccacgcagtcagggcagtgtatctggaaggggaccgtcaatgttcccacgggcggctggtcggttcccacgatagcggggtacgacaagtcgaaatatatcgtctttggacgctgtaatagcggtaacaccgtcgatttcgatggcaacacggtcaggttcttcagccctccatccaccaacgatgatgctccgacgaccggcacgatagatatcgtcatctttgccagtggcgtggcgccgcaaccgggcaccggcctcaacatcttcaatgcagccggggcctgcacgttttcaacgacaaagcggcctttcgtttacctcaatcaactctggacgccttcgaaaaatgccgtgagcatcggcagcggctatgttccgctgggcaggttcgggctgatggctcacgaagttaatggcatgtacgtgtatcgaatgttcggaataaaaatacagaacggcagtgcttcagttcagggtgggaaatatcttgggcgcgagcggtatgcaatttttggtaatgacacggtaacgccactgaaccttcccgttcttcccgatatgtacgtctga

SEQ ID NO: 151253 - DNA, 282 bp, Enterobacter cloacae
gtgtttatccgggaaaccttgattcaggacggcaccatcggcaacgccaagattggcagctatatccaatcttcaacctgggacggcaccgggaacgttggctggcacatcaacaaatctggctacgcgacgtttaacaacgtgaccgttcgcggctcgatttacgccacaaacggtaatttttctttcaatggctccggcaacacaacggtgattaatggtaatggcgtaaccattaatattccgggtggcggccgcatcgtgctggggacgtggacataa

SEQ ID NO: 151254 - DNA, 369 bp, Enterobacter cloacae
  misc_feature (307)..(316): n is a, c, g, or t
atgactcgtattgcattagcgccttcaaagatggttttgcttatgtctttggtaattactggtgcccacgccagccctgagcaacccctaataaaagatacgccctttgtatctggccaggcttataagaagggtttcttctggtatgacgatcctgctaaaaaaagcgaagctgaagaagaagaggttttgccaccaaccggtgctgctagctcgccttcaaaagaggaaatggtagatttaaattcaaaatggctaaaagagaatatgcctcgactgttaacgcaggcaatggataaccctaccnnnnnnnnnnagataaccctaccgcagacaatctatcacgttataacacggcgcaaaggttaa

SEQ ID NO: 151255 - DNA, 867 bp, Enterobacter cloacae
atgaagtatgtcttcatcgaaaaacatcaggctgagttcagtatcaaagccatgtgccgtgtacttcaggttacccgtagtggctggtacatctggcatcagcgtcgttatcaggtaaaccggcgtcagcagttccgccttgtctgtgataacgtcgtccgggaagcattcagtgacgcaaaacaacgctatggagcgccacgcctgacggatgagcttcgtgcccagggttaccgcttcaacgtgaaaaccgtggctgccagcctgcgtcgtcaggggctacgggcgaaagcttcacgaaagttcagtccggtcagttaccgcgaacatggtctgccagtctcagagaatctgctgaagcaggacttttacgccagcggcccgaatcagaagtgggtgggtgacatcacgtatcttcgcactggtgaaggctggctttatctggccgtggttatcgatctgtggtcgcggtcagtcattggctggtcgatgtcctcacggatgacagcacaacttgcctgcgatgcgttacagatggcgctgtggcggcgtaaacgtccggaaaacgtcatcgtgcatacagacagaggcggtcagtactgttcaacggattaccagagcttgctgaaacgccacaatctgcgggggagtatgagcgccagaggttgttgttacgacaatgcctgtgcggaaagcttcttccatacgctgaaggtggaatgtatccacggagaggactttgtcagccgggaaatcatgcggacagcagtgtttaattatattgagtgtgattacaatcggtggcgtcgtcacagtgcctgtggcggtcttagtccggaacaatttgaaaaccagaacctcgcttag

SEQ ID NO: 151256 - DNA, 1176 bp, Enterobacter cloacae
atgagtctggataaggaactgaatgattttctggcaaaactgagaaagcatcaggatatacgttatcttcagggtgtcacgcctgcgaccttgttccgttttttaaatggcagcgtccatcttagtcacatcgcggaaccggccaaaaattccgtgctgaacgttctgcaggacccggatcaggctgattttatctcttcctttttttccgatttacgttaccgggggaaggggctaaaaatacaggccttcagggatagcctgatgtggagttatatccggctgtatcacccgcagcaccttaaggtgaatatttatcatgatgcttatgtttttaatcagataaatgcactggagacattctttgatacttattgttcaggcaccagcggcgtttattttccggcaatggataatctttatgcaaatggcagcctgtcttttttccccactatcaggggcctttcacattctccctttgaccgtcgcacgtgtaatgatgccctgaagaccatccgaaagacggggatggactctctgtatgtgctggataaggatttaatgaaggtactgagtttttccgcccaggacgggatacagcaggttatgcagctctgccagccggcggatccggcatcggcgacagcgattattgaatatgcgctgcagctgtaccgggaatgcagaaaggatgctgatgattttgcaaataacttttctgtcagtgattacaatgaaaaaagaaaggtgctggaaaagaaaatcgcctttgataccgttttcctctatgtgctgttgaccgacttttgtgatgcagccgggtttggggcctttgacaaaaaggcgctgaacacgattaagcctgtccggccaacactttcctatataaaaaaccgtttcggtttatccagcgataacgttctttccctgcaaaaaaacattgtcgtgaaggcggtgctttatgctgtgctgaaaagaatgcaggcagatagcagtacgcaatatacccggctacgttttctccgggagattgataaacattatgcctggctggatgcaaatacttctcgccggaatgaggatataaacaagctgatagacagtgacacccatgagcattgtatcaaagcgctgtggaatgtcagaacgtctgttgaactcttcactgtcgggtag

SEQ ID NO: 151257 - DNA, 558 bp, Enterobacter cloacae
atgtggattctgaaaataagccacgtcaacgggcataaatttactgatggttctaaaaatctctattgctatctaaggggatttgaccgcgcatttccttcttatgcaaaaataggtgatgtgtttggaataacgccaagagccgcagaggaacgagttaagaaactgcttgaaatgggattgattattaaagatccgcgccctgggacttctaatctttatcaagtattagagattccacgagaagaatctccagaactacagcctactccccttgaagtgcatgaaagtgctccagcacctacgccagcctctgaaccagtgaagaccgcagaggaaaagccggatgatgatgtgattattgattcagtgtgcgaactgctgtcaaagcctgacagtttacgacagcaaaacaggggagatacatttataaattatgctcgtcgtgtaatgcaaagtaaccataagaaactaccttccagattcgaagataagttagagatgagatttgaaaatcgttatccacacttctatggacgattcgggataccattttaa

SEQ ID NO: 151258 - DNA, 1002 bp, Enterobacter cloacae
atgaacgcaccaaccattctcaccggcgatcgcccaaccggcccgctgcacctcggtcatttcgtcggatcgctgcgccagcgcgtggcgcttcagcagacgcacaaccagtttgtgctgattgctgaccttcaggggctaaccgacaacggcagcaacccgcaaaaaattcgcgacaacatccccgaagtgctggccgactacctcgccgcgggcattgacccgaaccagaccacgatctgcctgcaatccgccctgcccgcccttgcagagctgacgatgctgtatatgaacatcgtcaccgtcgcccgcgtggagcgtaacccgacggtgaaaaacgagattgtgcagaaaggctttgcccgctcgctgccggtcgggtttatggcctaccccatcagccaggcggcggacatcaccgcgtttaaggccgagtgcgtgcccgtcggcgacgaccagctgccgatgattgagcagaccaacgagattgtgcacaagatgaacagcctgctgcccgccccggtgctgcgccactgcaaggcgatgctgagcgacaccagccgcctgcccggcatcgacggcggtgccaagatgtcgaaatcgctgggcaacacgctgcacctttcggccagcgaagagaccattcaccgtgcggtcagcgccatgtacaccgacccgaaccatctgaaggtgagcgacccggggcagattgaggggaatgtggtgtttacgtacctcgacgcgtttcatccggacaaggagaaagtggcggcgatgaaggcgcattatcaggcgggcgggctgggcgacagggtgtgtaagaacgagctggaggcgtgtttgcaggaactgattgcgccaatgcgggagcggagggcgatgtacatgcaggataaaggggagctgatggcgatgctgaagcgcgggaccgaatgggcgcagggggtgacgcaggagacgttgagggaggtgaaggttgggctgggggtgccggtgttttga

SEQ ID NO: 151259 - DNA, 720 bp, Enterobacter cloacae
atgcgtcagaaaacaattgatgcaattatggcgcatgctgccgctgaatatcctcgtgagtgctgtggtgtggtggtgcaaaaaagccgtgttgaacgttattttccgtgccggaatcttgccgcggcgccggaggaaaattttgtcctctgcccggaagattacgcagttgctgaggactggggtacggtgatcgccatcgttcacagccaccctgacgccactacgcagccgagcgaactggataaagcgcaatgcgactcaacgcttttaccctggcatatcgtgagctggccagagggggatttacgcaccattcagccgcgcggagagctgccgctgctggagcgtccttttgtgcttggtcacttcgactgctgggggctggtaatgagctatttccggcaaacgcatggtatcgaactccacgattaccgggttggttatccctggtgggaaaaagactatccggacaacttctatcaggattgctggtacgagtgcggattccgtgaattcgacgggccgccgaaacctggcgatatggtaatcatgcaggttcaggctgataagtggaatcatgcggggattctgctggaaggtaacatgctactgcatcacctttatgggcatctgagccagcgcgttccttatggcggctactggatggaaagaaccatgaagatactcagacataaaatcttattagagtgtggttga

SEQ ID NO: 151260 - DNA, 630 bp, Enterobacter cloacae; identical to SEQ ID NO: 115988

SEQ ID NO: 151261 - DNA, 276 bp, Enterobacter cloacae; identical to SEQ ID NO: 36785

SEQ ID NO: 151262 - DNA, 696 bp, Enterobacter cloacae
atgatttttaccaaaatcattaggggattcatcagcgcgcagcctattttaaaccgtgcggataataaccaggttgatgcctgggcaaatgaagcagcgcttcgcaactccattatgaacgggttaaaagacgcggcagacgacgatctgattctggtgtcagacgttgacgaaatcttctctcccgacacggtcagggccattaatccgcgcgcgctctgcacgactattcatcaaaacgtgttcaactatcagtttaatctccaggttcacaacacggatggtacgccgagaaaatgtaccttgccccgcgcgacgtcctattacaaccttaagcatttcttccacggtgagcctgaatctttcagaaactggaagcgtgcgcgcaaagataaaaactggtcatggtttaaatggaactggctaaaaatcaataataaaattgtgaaagatggcggctggcatttctcatgggtaatgactccagaaagaatttccgaaaaaatgtctaccatttctcataccgaatacgatctgccggaatttaataacccggaacatattatgaaggttattaccaacgccgaagatatctggggacgagaccgaaaactggtcaggcaagaggtatcaaaacgcaccctgccttcttatctggtagacaatcagcaccattactcgcaatttattttatga

SEQ ID NO: 151263 - DNA, 174 bp, Enterobacter cloacae; identical to SEQ ID NO: 10355

SEQ ID NO: 151264 - DNA, 240 bp, Enterobacter cloacae
atgtttgatgttcacgttgttttagataatcaaataggacaattagcattactaggaaaaacattaggtaataaaggtatacaggaaaaaccgggggaacttggcgaaatagcacgagtattggcggagaataacattaatattttagtgcaatacagtgaccatgctaaccaactgatattaataacggacaatgatagtatggctgcatctgttacgctcccttgggcaataaagtga

SEQ ID NO: 151265 - DNA, 960 bp, Enterobacter cloacae
atgagtgttttactgacagaacctacacagcaagctaatgacaaggtctttaaaacggcccatgttgccttttcagtagttactggcacaggtcgttacgtcactgggcttaaacagttccgtgatgcaaaccctgaactttgtactgaagtaagtgaccagaaagcatgggctatccacccttcagtaattcaggtcacgccaggcttcaactcccgcgaaatgggaatgggtgacgattactataagctccctgaggttgaagaacacatctacaacatcaagaatgcctacattcgaggtgactatgtagaccctatccgagtacgtgtcattgatggggtaccttttgttcgccaggggcactgccgtttaaaagccgcaatgatggcatgtgatgaagatcatgacatcacaatcctttgcgttgagattaaagaagatgaaattggctgtgagctcgcgaccattgatggtaaccgtggtcttgcgctttctcctgttgcgcttggcgagtcctatcgtcgcctacattctcttgctggctggtcactcgaacgaattgctcaacgtgaaaataaaagcccgacgaccatcagttctcttatccgcctgacaacctgttctgttgttatcaagaaatggattcatgctgacgctatttcgtatgttaacgtgctttcactgatcgatgagctcggtgaaacagaagcaatttcacgtatcaagaagatgatcgcggaacttgagcaggccgatgcgaatggcatcacggtgaaaaaaacccaacatggtcaggtacgagtcagaccttcagacttcaagccagcacggattccgccggttattgccacaaaagccgtagaaggcgtcaaactcatcaccaccagcttattacagaaactgggggatattgaattgccggagatgacagattcaagtgctgacgggctttgttga

SEQ ID NO: 151266 - DNA, 1206 bp, Enterobacter cloacae; identical to SEQ ID NO: 19666

SEQ ID NO: 151267 - DNA, 327 bp, Enterobacter cloacae
atggttggtgatggtatcaatgatgcaccggctctggctgcagctgatatcggttttgctatgggcgcaatgggtactgatacggcgattgaaactgcagatgtagccttaatggatgatgacctgcgtaaaatcccagcctttgtaaaattatcccgacaaacgtacagcttactcgtgcaaaatatcagcctcgctctaggtattaaagccgtattccttgtactcacgctcatgggaatgggaactatgtggatggctgtatttgctgatgttggtgccagtcttctggttgtggcaaatggcctgaggttattacgaaaataa

SEQ ID NO: 151268 - DNA, 306 bp, Enterobacter cloacae
atgaccggcaaggcctaccggtgtcacatcacctttgtcaccacgaatagtgaaatttggatccacgtagttatgtggaatgcgccccgtttccaaagcgcggaaaatccgcgagagtgtagttttaccagagtagttccgtccgtagaggatgttgagcctcttgaaattctggacattgttacctgcatccttaaggctctttctccaactgaggcccgcaaaactaccgaaactatcgatgtcaacctgactgaacatgaacactcccttagcgctggctattggctgccgatttgcaagtga

SEQ ID NO: 151269 - DNA, 129 bp, Enterobacter cloacae
atgaagttaagaaaccattaccagttaaaattggtgcaattgtacctcaagttgataaaggtgcgaatgtatatctgcctggcggcggttcacaagtcgaaatggctgtgccacctgcagaacgcatga

SEQ ID NO: 151270 - DNA, 570 bp, Enterobacter cloacae
atgggctggtcttcgttggttaggataaccattggcatatttctgttagctggattgtcgtcttctgcatacgcaaagaactgtaagaaagggattccatgcggtaattcatgcattgcggttggaaaaacgtgccggattggatcaagctccgcatctacatataaaaattattcctactcttacccgtcatcttcttttcatagttcaaccacgaaatcttcttcacattccccatcagctaagggtggcggaaaaaacacggcgtcaactgcgaaaacttatctctgtcagtatgctattgctgcggtacagaatgggagaataggcgcattgcgtgtgctgggtaaggctgaggtaacgttgtatgttgatagcttcaaagcaaaccgtctggacggtacatacctgctcaggccaaagctgaaaactaaggggatattgatgatggcagatgataaaagcaaagtttatgcttatgatccgtcgctgaagaactttgcaattagtgaccgcatcgcaagaagcactgaacaatgggatcgttgtgaattggtgcaaaataaataa

SEQ ID NO: 151271 - DNA, 1986 bp, Enterobacter cloacae
atgagccctattatttatttaacccttgagggcaatattcagggacagatttccgctggctgtgggtcagtggcctctatcggcaatctctaccagctggggcacgaggacgagattcaggtgttgagcctgaagcagacagcgcgcgactcacggggctgcacgagccatcacagtctggatttttgcaaacgcctggataaaagctcgccgctgcttagcaacgccattaataataatgaataccttaaacttacgtttgatatctatcgcataaataaatttggccggctggagaggttttatcttatcgaacttcgcggcgctacgctgcaatccatccatcagacgtttacggccaatcatccagactatgaatatatatcggtgcgctacgattatattctttgccgtcatctgatcgcccaaaccgaattcgattacctgctcacgccggacaatttcaaccgtctttttccggtcgtgcagaaaacgctgctttcaccggagccaccgccgcgtaaggtgacgctggtactgggcgtatttttcgacggcacgggcaacaacgctgtgaacacgcaaaacatgttaaagaccctcacggcgcagcactatgatattgataactccgacgctgaaagcatacttgccagaaatacgtcagagaaaatggggatcagcggcataggggcgggcagctaccttggatactatacgaatattcattggttgaacgaattatacgagcaaaaattctcaccagatggcagatacattcaaggtgcgatttatatcgaaggaatcggcactcgggcaggcgaacccgatgacccgattgggctggggctaggcaccgcagaaacggggattattgccaaaacggacgacgcggtggcgcagctggctaaaacgatagatgccaccttagcttcactgaaggggaggtttgtcgtcgataatctgctgtttgatatcttcggtttcagcaggggcgcagcggcggcccggcactttgcaaaccgtgttcagacaaacgatcacagcattcaggatgccataacgacaggtatgcgaaaatttacctatcgcggcacgccgaccggtaacacccgctttctcggcattatggacaccgtagccgcagtcggcacggtggcgaacggcctcaacccgcatagcgccgatacgggcagcgtcaatatcgcactgcatcccggcgtcgcgcagaaggtgtttcacatcaccgccggacacgaatgccgctataactttgccctcaacagcgtcgcccccgcctggccggaactggaacttcccggcgcccattctgatatcggcggcggttatctgccacagcttcgcgaggatctctaccttacccgccctcaggttgaaacgctgcccctaagcaaacccggaacagcgtcccgcgtctaccagcaggccctggcgcagctcgaggagctggcgcacacgccggccattatgtccatcactcattctcataccttctctcccgaagtctgggaggacgattatgcgcctgccgatcgctacagccagccgcagaaacgtacctttgcggccctgacgctacgccatcgcaccgtgagatatgactgggcgaaggtggtgttacgggtgatggtcgatgcgacgacagaagcgggggcggtatttatggatatggagaagatgattgagcatcgcatgccggaagaactaaaaccgttttgtgaacgcgcgcggagaatggggaaagcggttcgtcagcatacgacgccgtccggttttgcacccgaagaggtagacatgatcgcaagcaactatatccactgctcagcgcactggaacgcggtgcaactcaatctgtccggcgaattacagggcggcgcttccgcttctgaaacggtcagctttgtgaacaggccggacaccaactggaggagaacgatttacgctatggacggaaaaaaacgatga

SEQ ID NO: 151272 - DNA, 678 bp, Enterobacter cloacae
atgaaactacgcaacctgtttgccgttgttctgctgctgacaaccgctggctgcggcccccaaaaaacctacccgttgcagtccaggcaggccgccagcggcgactggacactgccctacggcgaatggagcttttccttcattacgccaaaggatttgatcgctgaaactacccatgcccgggtcatcgatacggatggttatctttatacctttaacacgctcgatcaaacttctccaagtccagattctacagagaaatggtcttcggccgtgcatggcggaggagtatatttcaacaaagtcaaaaaaccgccgcagtacatcgtcttctgctgggattcctatgccgatcagaaaacctaccagaccagcgctatgttcgggccggaaacctggcaaagaatgaaaacgcctgccgaccatatctggagtaatggtgatttagtctggtatgacagaatggtgtttggcctgtcacccggcggaaaagtcaaaatctggttttcagatgttgccgggcaccccagcatccccgttaagcccagaacgctggtgacccgctccggcaaggatctgactctctgcaaagacttcgagacccccggtgaaaactacattcagtctattgaggagatcggcaaaggcagaatctacccctacggaaactgggattaa

SEQ ID NO: 151273 - DNA, 558 bp, Enterobacter cloacae
atgaagataaaagacagccttattctcgctgtgatagtcgccctcgctggctgtgcgacgcaaaaaacctacccgttgcagtcgaagcaggccgcgaacggcgactggaccctgccctacggcgaatggagcttttcctttgtcacgccaaaggatttgatggctgatacccgtcatgtgcggataatcgatacggatggttatctctatacctttaacacgctcgatcagacttctcaaagtccagattctacagagaaatggtcttcggccgtgcatggcggaggagtatatttcaacaaagtcaaaaaaccgccgcagtacatcgtcttctgctgggattcctatgccgatcacaaaacctaccagaccagcactatgttcgggccggaaacctggcaaagaatgaaaacgcctgccgaccatacacgtccttcgggagctcctgtctggtatgacagaatggtgtttggcctgtcacccggcggaaaggtcaaaatctggttttcggatgttgcggacgccccagcatccccgttaagcccagaacgctggtga

SEQ ID NO: 151274 - DNA, 477 bp, Enterobacter cloacae
atgaaaaataaatattcaattattactttatgcctgtttttgatgggtggggtttataatttatggacattacggcctgttaatatattacatattgattctgatggtggcagtgctgttgttctggttgttgaccatcttccatggacagacagaggcaaaatcgactggtttttagcccgtcgggaagaagttcgagctaagtatccattatataatgaaggttggcatcgctattacatcatgagcattggcgacggattcacgaatcatgagagcagcccacatgaagatctactttgttttcctgttatcactaaccacaataactgtgtcataaaagactatcttttaatcgtagatgaatatcaaaacaggaatacccaattttatgtttcagatgcagacatcgaatatcagatgacaccggataataaaatagaattctttccgcggccaggatctttagcggaataa

SEQ ID NO: 151275 - DNA, 549 bp, Enterobacter cloacae
atgttttcatttcaaggggagtataaagcgttaattggattgatgattgatcattttcgttatgggaatggtagtcatttttacaatcaacgattagattcagcctttcatagcagagtaaatagttactcacatagaaatccatttttcataattaaaaataacattaagaataaatttatcaataatgctgactcaatggattttctatcatttttgaaggagatacagagagatatatatcgctcagagttgccaaaattcaatgagaaaaaagacagaattaacggccttgggataaccgttcatgatattgcagcccaaaaaataacgcttataaacctacagcgatacgcaatgggttggagcgctacagtatttttcgaggctcaggatcactttggactcgacatcgccgatattaaaaatccgctttacagtcagtttcgttttttccgcatatggttttttctacagcggcatcgagatttcgcgtttaagcctttctttactaattttaaaactattgaaagaatgagtgaatattaa

SEQ ID NO: 151276 - DNA, 222 bp, Enterobacter cloacae
atggttcattctttcagctcatcaatatacctcccctttaccctttttgaaacggttgcatgcttcaatgacgttaatgctgacgatatgaaatgtggggatatgggggagcaagaactactgtcgcttggtctaaaggatatctctgcaagagtagacccttatcaacttatccgttacgacttcccttataaacatcatctggatggatttttaaactga

SEQ ID NO: 151277 - DNA, 210 bp, Enterobacter cloacae
atgagccgctacccgtcgttattcgcccctctcgatctggggttcaccaccctcaaaaaccgcgtgctgatgggctcgatgcacaccggactggaggagcgtctggcggccttttatgccgagcgtgcccgacacggcgtcgcgctgattgtgaccggcggcgtggcctctgctccttctggcagcaggttgtcaacctgccacaggtaa

SEQ ID NO: 151278 - DNA, 471 bp, Enterobacter cloacae
atgaacaagaaatttgcagtcatgctattatgtttattcctttttggtgcattttataacttgtgggaatcgagaccggtcaatattttatacgcctattccaatgaaggcataacagtgacattagtcgttgatcatatgccctggacagacagagctaaaatcgactggtatcttgctcgtcgggatgagtttgaaaataaatatccttattctggtaatatatggcaatctttttacatcaccgatattggtgatggatttactaattataaaaaaagtcctcatgaggaccttttatgcttcacagtaataaaaaatgagagcaattgtgtcgttaaaaattattttttaatcgtttatgaatatgcagacggtactccccgatttttttcggatagtgaaatggagtaccggctcactcccgataacaaaatcgagcgcgtcttccggccagacgcactggagtag

SEQ ID NO: 151279 - DNA, 822 bp, Enterobacter cloacae
atgtttctcccttgcacgctcttcgaaaccgtggcccgatttgatgattatcgtgctgatgacatgcagtgtggcgacatggaggaggatgaactgctggcgcttgggctcagggacgtatctgcacaggttgatccctatcggttagttcgttatgacttccctgtaacgccttatctggacggcataattagtgatacagcctctggcacaaaaataacgcacgaagaatgcgttgatattttattcgctgaaatgaaagaactttcatcgatgttttcgttttatggtaaatataaaatgctcattggggagatgattgatcattttaggcacgggaacggtagtgggttttatagcgagcgactgaatgtagcatttcatgagaggttaaatagctaccagcttaataaccctcgtgtgttaatagagaatgctattaaaaaactttattcaaattctaaatctaacgctgttaactactcgatgcttttgcgtgaaattaaaataattttattaaactcgacattgcctaaatttaacaatgatgaggatagaattaatgggttatgtattaccgtgcatgatatcgcagcccaaaaaatagaactttccgccttggccagggatgcttttagttggaatgcgaccttatttttcaaggcgcaggatcactttggactcgatgttatagatattcagaatgtaatatttagacagtttcgatttttccgcatttggtttttcttgcagcggcacaaagattttgcatttaagcctttctttactaattttcatagtgtagagcggatcggtaattag

SEQ ID NO: 151280 - DNA, 327 bp, Enterobacter cloacae
atgcttgataagaatgtggtgaaacagcattgccgcattgataccgactttatgggtgatgatgctctgctggagatttacgcaggtgcggcggcccggtacgtccagacatggacacgccgaacgctctatgaaaaggaaagcagccctggctacgctgacgacccggacccgatcctgctcaatgatgatgtgaaggcagccatgctactgcttatcggtcactggtatgcaaacagggaagcggtaaacatcgggaacataacttcagccgtaccttttgctgtggaagcgctattgcagccataccgcatttatggattgtag

SEQ ID NO: 151281 - DNA, 240 bp, Enterobacter cloacae
atgccacgcacagcagacatacatgccgcttttatcgcggcaatagaggttaacccaaaaggttaccgctatctacgaacagacagcttcatcaaaaagctgcgggggtttaactggcacttcagccgtgcagaagcaaactcatggatagaacgctatcaacccggttttgcagataagacaactgacggcagtgataacagatactggatcctgcgtaacatggggagggtccactga

SEQ ID NO: 151282 - DNA, 717 bp, Enterobacter cloacae
atgtctaaacgctacgagtccgacactttccgcactcgcctgtacgactatctaactttcgactcaaccataccggagctactccgagttaagaaaccttacggcaaatccaggcgtacaaccggagagcctgtgagtttcgctgtaagtgagcaaggctacgccaatgtgaatgtactgggtaagacctatcgtcgctccagagtcatctacagcctgtgtaaaggccgcatccctgactggtacgtggtagaccacatcgacggtaatcgtctcaatgaccatcctgacaacctacgggtctgcacgtatcaggagaaccgatggaacgcagatagtcacggcggtaagcgtcagaactatttgcctaaaggcattagctactacgccaaagctgaccagtaccgggctatgcttcgtcttggcggtcgacactacacgcggttgtcgccttcagtctccgacctgattctcttccttcaggagctgcgccaagaacatcacaaggagtttgcttttgatggttggaccgagtggacggagaaggaccagaaggctgcggacatcaagtaccagactggacctgtagtcggtaagttattgactggcggtaagccagctcacgtccgactaaaccgcgccactggtcaaatgtacaggcaagcagccgatggtaagcgacgttcggtagctgagtctgaccttattcaactgtga

SEQ ID NO: 151283 - DNA, 567 bp, Enterobacter cloacae
atgtcaaaccttaacgctaaccacatcatctacatcgatggtcagcccttcaaagcgaatgaggacgggatgtggaacctgaccgaaatctggaagaccctgaaactgcatcgcgggaagtcaccctccgagtggaggaccaaagacgctaagcgtttctctaccgtcccgcaaaaaatgcggtccgctcgtaatgagctgggtcatgattatattctggctgacaagcaagtgaccatgaagtatgccggatgggtctccccagcctttgaggacatggtctacgctgcctttgaagctgttctggcaatgcctgaagtccagaccgttgtcgtcaacaagatggttgagctgggctatcatgccgaagctgaactactggagcgacactctaacgctgaccgagactacgcccatcaccagatgtctaccctgtttagcagagcggacggacgtaagcctgagcgcctgtataaggctgtcaaagctggtcacgtgaccaaggataaggccttaagtctcatccccgcagggagcgtctgggcgtcccgagtggaggaactctaa

SEQ ID NO: 151284 - DNA, 168 bp, Enterobacter cloacae
atgtggattaacccgcttataggtatgatacttggtattggcctagtgtgcggtcttggttggttaatgcttagattttggccttatatcttcagtgtagtattcatactggcgacgatttatgaactgtggaacgtcttcatatgtaaaatgttaccaaagccatga

SEQ ID NO: 151285 - DNA, 1047 bp, Enterobacter cloacae
atgcttgttaaatattacaaactcgttttttctgaagaatttaatcggttggctccaagatgtgattttttgttgaatggtctttttagaatgacacagcccaaatatctaaatgataagggcagcgaatctaggttacttccttacttcaatcagttttctccagcagattatgaatgggctaaaaaagaacatgctaaatgggaatctaatccatcttacgaaccttcaaatgaagagctggaattttatttgagaccggtaggtagaagatatggcgaagacttccctcatctattaaagaatgaaggcttcgaatccatggaggaatttgattacgcagaactatgcaaaatagcaacatccattaacaattatttggtcgaagtattaagttgccagctaggtgttttttcactttgcaacactgacacaaatgaaaacatgtggacttattatgcaaatgacggggaaggtctggcaataaaattcaaagaagaacattacttctttaaaatatttcaacccaaaaaggtaaattacaaaccggaaaaaagagcatctttaacttattacaaaggaatggtgagattaaacggcttaccactgaagaaattcttccccaacaattacgtgaattcttcatttgtactaagtcctcttttaaatgacgaaatcaatctcgcaggactagcagaaagaatcctttattcaaaagctgagaactggaaagtagaggatgaagttagaattatctgccctttacgttattgcgaagaaaaaaaaggccagaaaacaaaaccaaaaattgaaatagaattaccacccaccatgcatgactatcacaatgaacattttgagattaatttaaaaaaaataccatttgatgcgtttgattctttgatttttggctacaacatgaaagaggaagatatagtgctggcaattaacaaagcgaatcaaaacccagaattggcacacctaaaattcaaacaagccaagcatgatgcttttggaaatataaaaatatacgattataaaaaatga

SEQ ID NO: 151286 - DNA, 1092 bp, Enterobacter cloacae
atgggatatgaagttgattttcttgctgttggtgacaaaaagagtggtgatgctatatgcatcagatggggtaatttacatgggacaagggaagaacaaaaagttgttgtgattgacgcaggctactccaccacagggcctcaagtcatagagcaccttgagaaatattaccataccgacaaaattgaccttctcatttcaacgcatcctgatggagatcacgttggtggcctcacctatgttctagagaatgctgttgtaaacgaattctggattcacaaaccatgggagcataatgaaaatcttgcgaaagagtttgctgatggccgaattacagatgctagcattgctgagcgtatgaaggaaaatcttcaaaaagcttatgacgcagtcaaattggcagaaaaaaaagggattgatatccacgaaccattccaaggaaaaacatgggacactgcgaaacttatcgttattggtccaacccaagcattttatgaaaccttaatccctgatttcgcaagaatgcctgtaagagcagaagcaacggcgggtactgaaagtattaaatctgcttatgactttctaaaagagcaggcaaaaaaaataatagagtacgttgctgattggttctccgatgaagggcttgatgacaaggatacaaccagcgcgcaaaacaactctagtgttattttaaaacttgaaatagatggaaaaacacttattttcactggtgacgcgggtgtaagagcattagatatggcatccgagtatatcaaccatgaagaagtgtcattcattcaagtaccacatcatgggagcagaagaaatgtaggccccgaagttctcaataaaattattggtaacattgttaacgagggagagaccaaaaaaatcactgcatttatatcttgtgcccctaattgtcaaaaacaccctcatcaagcagtaattaatgcattcactagacgaggggtcaaagttatcactacagaaggttctggcaagtatcattacagtaactctcctgctcgtgaaggatggacttctgttaccccacgagaatatgtccgcaactataatgttgaggaataa

SEQ ID NO: 151287 - DNA, 489 bp, Enterobacter cloacae
atggaaagtttacttgaaagaatatcatcttataatatcttcaacaaccttttcccgggggctctttttgtttatttgcttgagaagtcgacgagtgttattttatcagttgatgacattgtaaaaaatgttgtgctttattattttatgggtcttgtcattgggcgaatcggttcaattttgcttgagcctttgttaaggtttatccgagtggttcgttttgttccttattcagagtatctggcggcatgtcgaaaagatagtaaaatagaaattcttcaagaaagcgcaaatatgtacagaacacttctctcaatgtctctgttgtatcttttgtcattgtatgtaatgggttttttaactgggtacgaatacgtattttcaaaatatgctgctttatttttcgtgataatgtttattatctcttatataaaacaaattcgttatatagtttcaagggttgataaggttaatgataagctgccataa

SEQ ID NO: 151288 - DNA, 558 bp, Enterobacter cloacae
atgtctaaagggataatggtggttgtcattccactaattgtttttatcattatcgcagctgcgataggggtaggagcatatatatatgaagacagtattaaaaaagctttgcttgatgggacattgaaagttacggatcttaatagcactctaatcaatattgcatcaattatttttgcaataagtggtgcctggattgctcttatattccctaagtcaattaaaaaacttaaaagtaatcaagttaaagaaattacatctgaggatgaggaagccgcgttttatgatatatctatatgttcggtgataagtttattagtcttattcgtaattatgataataaattatctgctttcgattgctgtgatatatgaaaataagcttgatgtattttattattctttcattattgtaagcgttttgtatctcttggaatcggttgtggtactttggacagcgaaaacaacattcaaagtttttgcatcctatagtatggcaattatgaatcgcgcaactgttgagaacattgaaagtgttcaacgcgaggatgaagagtga

SEQ ID NO: 151289 - DNA, 885 bp, Enterobacter cloacae
gtgattttatggattggtgtaagtggaaataaaaataatgttctctctcttccgcataatggcaatgtaggagataagaattctgttgcccgcacacgtataggaaaagaaaggattccagggattccagcatatttttatattgcttcaaaagaaaggatgttagtaactttagattttaaaggctcgtcttcagaaactggagtccttcttcagtacataagagatttcatgcataattactcagcattttcggatcatatattgggtgccaatgggaaatttagcggtggttataaagtcaaaaaaaatgatgaaaattattgttatttttcacttgattgcaagagatatgtaaatgcttcggtagaaaaagatcttattttgaattttaaaaacatcactaaaattattacaaaagaaaaaataacggttagtactagctcctcgcaatctttagttaacttaaagccaataataaaattatttacctctcaaaaagataaaactaccctagaatcagtagttaaggtggaggttgatgttgcttttgataatgaagcgcagattaaagagtatattgataatattaaaggaacatatgatgttggcaatgttaatttccttgtccaaaaggaaaaaggcattgagactgtaaatcttcaaaatagctatgcaaaagaaaaggttgttttagaggctaagttgaatggtgttaatagtattataacatggccttatgatgctaatgatattataatggcattgaacaatcaaaattatattgatagcttcatcaaattatcatgtaaaaaaacagatgaggttaagtttgataaagcatctgatgccgtttcggaaattaaggtctcggcgcaatcgtga

SEQ ID NO: 151290 - DNA, 1467 bp, Enterobacter cloacae
atgaaaaatatcaattttagagacataaattggggaccagatgaagcaaagggagataaaaatcttccaaattatttctttgaattcccagacttcaaagaaataaaagaggggaattgtagatatgttattgggcgaaaaggaacagggaaaacagccgtaattgaagctgttaaaaacaaagttgaaaatgaaccattgaatttcgcaactgcactgtcattgcgagatttccctcttgctattgtcagaaaactacgtgataaaacttttaatgataagtcgcaatttgtccctgtatggaatttcttaattataattgaagtttgtaaacttatcgcgcaggatgctggtgcagagccagtggaggaggttgattatttaaaaagaatgttagtatctaacttcggttctattgatttcacaattgcagaaactctaacgtacttagataaaaaacagtcaaaactcaaattatttagctcagtcattggaggtgagtactctgaggagagtgccaaaaatatttccggagaagttcattaccagaaagccgggaagtatataattgataagataaagaacatccggagtgattcaagctattatctatttattgatgagctggatgaaggttacaaggcaggggatgacaatctaagattgttaatattatcactacttcgatccactgaagatttatatattgaactcaatggcattggattaaagttcatcccaatacttgctctgcgaaatgatattttcgaccgacttgaagataatgatatcaataaattagatgattatatcactcgcttaaattggctatccataaaaaatggaagaatgtcgctctttgatgtagtaaacaaaagaattcaggcctcctttaaggagttagttacttgggatagagtagctatagacgatgataaaaacttaccccatggtgtcgatagcctttggaaatacattacaaatagaacttttgagagacctcgtgatttagtaaaattcctcaaaatttgcagtaaagaaaccactgctggtccattgacatttaaagatgttagcgcggcagaggataaatattcatcttggttttatcaagagtttcaaaatgaggttcactcctacctccctgtctggagagaatctctgcaagcattgacgaagttaggtaaatggcacttcacttatgaagagcttactacaaaattaatggccgatgaggatatatctcgcttcctcagtgaaaaaaggtggtcctccgataagataataaacttgctttttgattttagtgttataggaaacattgactctaaaagaaggtggttatttaaatacaaagaccacgaccttgcctgggataaagaaatggatatgataatccattttgggtttgcaaaaaaactaaggctcaagcatgtaaataataagggcaaatacaacatagagtaa

SEQ ID NO: 151291 - DNA, 198 bp, Enterobacter cloacae
atgcttgagaattatttctacgataaaactggttttgagcaaaaagatgaagttaagcgcgaaaaagcagtagccgctgtacttgaaatccttaaagtttcagcgagccattcggcaaaccatgttgttattacttctctgaaaaacgagataagtgaagcagcagacgcgattcaaaaagcgttagataaacagtaa

SEQ ID NO: 151292 - DNA, 189 bp, Enterobacter cloacae
atggattggataaatattgaagaacaggaaccgccgaagtttaagatgatcattgtcgatactgacaaaggtatagcggttgcccagtatgatggattcggtaaggtttcagatgtacttttcggatttgtaggtgtgaattacggaaacttcagagtacatcgctggatgccgatgccagagagataa

SEQ ID NO: 151293 - DNA, 276 bp, Enterobacter cloacae
gtgggtatcaaaacgataatcgggctggccgcgttggttatttccgctatcgccggcgcttttggcctgggccatattcgcggcaccagcaaagcggaagcgaaagcgaaagccgaccagcagcgcaccgaagataacgccgcggcaacggtcacggtagccgaacgccgggtagaagcaacgaaagaggccagcaatgtacatcagactgttaaccatatgcctggcgtcgatgttgatcgcgagctgcgggacaactggacccgtaagggttga

SEQ ID NO: 151294 - DNA, 339 bp, Enterobacter cloacae
atgagaacagtagcgagacgatcgatacagacgattgagcatagaactcaagtcgtcggttcttttgtggactcaaacacagcgaaagagttcttcgtgagaaggttgagtgatcgcgtctccccatctcgtcagctttttatcgttacgataaacaatgatgtctgcaatggcgacgttatcccatttgctgaaatttccctgtctaacgataagatgcgttatgtggtaaaaccgtcaactcagtaccctcaatacgcgcaagacggcttgctcaaacgaattgaagccgctattgccctatacatgaagaactacagggaaaaaaactatcattaa

SEQ ID NO: 151295 - DNA, 771 bp, Enterobacter cloacae
atggctccagcattaatacctacttatagcaaggatctgagcatcacgccttttggtgaaaagctccttattgaaactttctattttttcacccttgaagcagggctcctcagggctgatgaatacatcgtcactgctggcgattatcactactatctggatgtttaccaactcggttgcacaaccgatgattttttcctggaacatggtgatcagcttcttgattccggcgcgtctatgcaggatgttgtaaacaccctgctctcctttgacatggttgacgataacaagaccattaagattggacggatccaatataacgattttaattttatagaagaaaacggtcagatgatgaccggcaagcaaattaaaagcgctgtcataaatcaggatttccaatcaactggtctcgccagattcatctacgtcatgctcactaaaaagcatgagtacctcatatgcgataacgtccagagcgttgccggtggtgcattatgggcaagtagcattcttagaattgcagtggtaagaatttacgattcaaagacgaaaaaatttgttgatatccttggtcgtggaggaatgggtttctcgggcctaataccgtggagttctcagaacctgtctattgatgatgtcgtaagatgggggagagctttggatgacaaaaactgttgtcgccatatcgttcatgtcatatgcaaagacaaactcattgattacgattttcatgattacgtctcttacagcagcgaagagtttgagtaa

SEQ ID NO: 151296 - DNA, 798 bp, Enterobacter cloacae
atgaagctggaaagtttgccgaaatatttttcaccgaaatcgatggtacccggtgccgtcccctgcggaaaaactactgatacgctgaccataacagatgtaatggcatcattaggcctgcttacatcaaaagctgcggtcggaattgagatgtacctggctaaggccggtgtgatgtcaccggataatatcgtcgcctacattcagcaactggctatgcagcgagctgaacggcatgcgccgctgcgtaaaatgtcagaaacggacaaggtgattttcctcagcaccatggcgcagtacgttttccgcgactactcactaagtgccgccagcctggttcagtgcagcagctgcgccggtgagaagtttgttgtggcggaggtattcacgaacaaagttacctatccagacggcaagccgccaaagtgggtgaggaatacaaaaggcatatctgcctcagactgggaagtctggaaagaggttcgtgagcaggtccgtgttgtatgtaagagctgtaacggaaaaggctacgagaaaaatgagtgtcgttgccgtgggcgcggcgtggtgctggataagaaaaaatcagagcttcaaggtgtgccggtctataaaaaatgcccgcgctgttcagggagagggtatccaagcctaaaagataccgaggtgtttaaagcgcttaacgttaccgaaacgacatggcgccgcaactacaagctattttttgagaggctggtggagcattgctacattgaagagtcttacgcagaaaaagttcttagccaggtaacaaggtag

SEQ ID NO: 151297 - DNA, 477 bp, Enterobacter cloacae
atgagcactattaccaaagaatggctactgaagaccattgcggagcttgaagaagagcgcgatgctgtgcccggcgccgtaaacgaagatgcggttaaggcgcttgctgcgatgaaacttgcgctggaaatgttgagtgctgagccggtctatcagtgcgagttttgccatcaggactcaaatggtgagcttcagtggcactgggaagacgttaataaggatttttatgaccaatacgactctgaacgtcgcggcgagcgtcgggtgctttacactgccccgcctgttattgataacctggctgaagcaattatcgctgcgatcgaaaaagagcagaaccgtcttttcaaacaggtttatttgatggattcgaaagattgcattgatgtgatccgtgaagagatgcttcgactgagcccttgcaacgaagcacagctcgcaaggacttctgcgcatgaggtgaaaaagtgtacctga

SEQ ID NO: 151298 - DNA, 306 bp, Enterobacter cloacae
atgtcgctcagcacagttaagccagaggggccttttgtgctcattacttttgatggcgaggggttcctatttgatgagcatcacgagctagtaatcatcaatggtaagccgaaacaacggaatgtaaaacgcaattattttgagtccgatcttggagagggcaaggcaaaatactggacgttaaacatccatgaggcgcataaattcgccacgatagatgaagcaacagcgcagctctgtaggctcaaacaccctcacttaattcgggtgcgtcggttggaagtgggggggagtgattatgcctga

SEQ ID NO: 151299 - DNA, 249 bp, Enterobacter cloacae
atgagcaatttgttatttctcaaatgcatcaaagataccgaaggctggtggactgaaggggacaggtacccagcccgagtagtagcaggcggtttcgtactggttagtgatgatgatgaactggatggagagggatggagcgccgcgccgatagaatatcgtgaagatggttcagtgctttatcaggttggcggcgttgatggtgaggtttggtttgaggagtctgctcatgtcgctcagcacagttaa

SEQ ID NO: 151300 - DNA, 381 bp, Enterobacter cloacae
atggaatcaccaaaagaaccaacgatcattgccaacggtttgaatgacgagcagttagcagcgtggattgaagacaagcatttctcattgaatcgcctgcgtgaattgcgtgaaagcaaggcagagttggagggtcagctggcactgattgatgagcggatccaagcctgtgccgctcaggccgccatcgacatttcaaatcagccagccagtatggacgatttcttccgggaggcagaaaagaaaatcaagttcacctcagagcccggtggggtgaacgtgatttaccatgaaacattggttaaggctttaagaatcgagcttgatgggcttaggcgtaagatcgtgatgaacgaaatcgttgccaaccatggcggctga

SEQ ID NO: 151301 - DNA, 342 bp, Enterobacter cloacae
atgagcaagttttatgttcacgttcgcttatttgaagccacagccgaacagacaaaaaaatttgaagaacttatgcttaactttctttaccagaaaacaatcaaagagtctgacgacgactgctgcagactgattcctgaaggttacatcctcaaaagcacaatgaactgccaacaaatcgtcgatcaaacatttgcgattgccagcagcgccggagttaacgcaaatatctttgtctgtaaatttgatcaaagcgcgcacttactcccttcagccgccatggttggcaacgatttcgttcatcacgatcttacgcctaagcccatcaagctcgattcttaa

SEQ ID NO: 151302 - DNA, 243 bp, Enterobacter cloacae
gtgctactgattaatcgcagcgcgaacgacagcataggcgggccagcatgcgccgccgcactcaaatcgcattatgagaaattcggaaatcatggacgcagccatacccaaacgttttacacagtaatggtaggcaaacagaaagtgatcgtagaggtaattaacagacgccgcagctatgttgccaccgcgatgctaggagcccggaacataaaacgaatggctgatctgggtgatttctaa

SEQ ID NO: 151303 - DNA, 219 bp, Enterobacter cloacae
gtggttatcctgcacaaactcgactttacgacctaccgcctcttcaaatactttttggctgaaactttcaaagaaaaaaccacgatcgtcaccaaatacttttggttcaaaaatcagcacatcagggatatcagttttaattacgttcatgtcttaataacctttaatcatcttcaacaggtattggccataggcattttttttcaatggctcagctag

SEQ ID NO: 151304 - DNA, 1146 bp, Enterobacter cloacae
atgtccgcaggaacactgactctgacaaataattcagccgcggtaacaggcagcggtaccacctttaccaccgagctggccgtcggcgattttattgttgtgacggttggtggcatcccttatacgctcgccatcaaaacggtgaacagcaatacctccctgacgctggtcagtaactataccggaccaactcagggcggcgctgcatggtatgccgtgccgcgcgttgcgatgaaccttgttactgctgcgctggtggcacaaagcgcagaagccctgcgcggcctgaactatgacaaacagaactggcagcggttattcagtgcatcgagcaatataaccgttacgctcccggacggttcttcatttaccggtccgtcatggcagtacatggttaatacggttgccacaaaaacgaacggagctgttcctgttaaccagggcggaaccggggcaactgatgccgatatcgctcgcactaatctttatgcggcaaaatctggagacaacgaagatatcactttgatacgtgggttgaaggggcgcgcccaattgtggactgacaccgattattccacaggtacgctggtaagttacaccgggactattgtaggtgccatagtgcgagccaccacatccattgtggcaacatctacttatgcggccagtgcatcctttggttactggattgatgcgaacagcattggtagcagtgggccagcactggcaagtacaggttcacaacaaaatagatggcttttcagaaactcgtctggcgttattagcacggcaaatggtgacataactccgtcagcttctgacgagcgcgttaaaaacataataagagagattaccgaagaggaggcggttgacttcatatcaggactaaaacctattagatataccttcaaatgggctcctgaaaagataaaggtagggtatagcgcacaaaatattgagactctcgattcggagttaatctcggtatcagcactgaccgtaattgacccagtaagcggtgaaagcaagacattcgaggatggaaaaattatcgatcctggggaagttggtgccgcttatcttgttcccgtggttaagcagcttctcagaaggctggatgatcttgaaaacgcgatgagaaattaa

SEQ ID NO: 151305 - DNA, 198 bp, Enterobacter cloacae
gtgttcgtacatgccgcgaccgtaaacgggatcgaaaccgccaaccttctctatggcgctacggtggtaatacagcatcacgccgcgctgtccggtgtaagcaatgtgcttatcatcccggtacaggaccgccatatccttcagcttattcgtccctgccagatcgagaaactgataagccaggtgcggctcgggtga

SEQ ID NO: 151306 - DNA, 240 bp, Enterobacter cloacae
atgtcacgcatatcagacataaaaattgctttcgttgcgtctatacagcttaaccctaagggttatcgttacctgagaactgacgacttcattgaaaagttgcgagagttcagctggcatttcactagggccgatgcaaattcatggatagagcgcaaccagccaggcttcgctaacaagacgacagacggcagtgacaatcgttactggatcttacgcaatatggggagagttcactga

SEQ ID NO: 151307 - DNA, 321 bp, Enterobacter cloacae
atgggcttcccttcaccagccatggattacgtggagccccaactttcaccatccgttctgtgcaacataggggctgaaagcagggtgcttgaaacagatgttgggtttgcagtcattgagcctgccacgaaaaaaagctcgggagatgtattgttaattctgtgcgacggtcatacgcagtttgctaagttaatgggacggtctcttataacagacgatggcgaggcaatagagggaacagctctggaagaggtagaagtgttgggcagagtgacgttcttcatcaatcgtgcattagacgatgattgccctgcaatatag

SEQ ID NO: 151308 - DNA, 474 bp, Enterobacter cloacae
atgtcagagcaaacaatcctcgatatgtgctgtggttcccgcatgttctggttcaacaaacgcgatacacgcacgctgttcgctgatatccgcagcgaagagcatgaattatgcgatggccgccgccttgtcatccgtcctgatttgattgctgacttccgcgcgctaccgttctctgatgcgtcattcccggttgttgtgtttgatccacctcatctggagcgtgtcggtcaaacggcgtggatgggtaaaaaatacgggagattgaacaaaaaaacttggcgctctgatctgcgcgccggtttcaaagaggcgttccgtgtattgcggccacacggtgtgctcatcttcaaatggaatgaaacgcagatcccggtgagccagattttggctctaacaaatgagaagcctgcaatcggccagcgtaccgggaagaacgataaaacccactggatcatctttgtgaaggactaa

SEQ ID NO: 151309 - DNA, 393 bp, Enterobacter cloacae
gtgagcaacatcgacaaacagtcgctgcgtacggcagcagaaaacgcaacgccgggagagtggtgtactgatgactaccatggggtaattgctgatgccggtctgaacgccaattactacattgcatcatgctcaggaccagataatcgatccaataagcgcttcatcgccgcagctaaccccgccaccgtactggcgctgctggatgagctggaagccgcagagaagcggattgctgagctatcagccagccatggcaatcttcgcgaggcaatggctggcattcacaacacaatcacggccggaggtgcttacacgccgctggcggcaattttaaattcttccaaacgcgcctacgaagagtcggctgccgcagccggtaaaggagagtga

SEQ ID NO: 151310 - DNA, 189 bp, Enterobacter cloacae
atgtgcaagccaggcaagtacgacagccagagacgtttcaccaccgtggcgatcaggtgtgacacctcggaagagacgaggataaatcaaataaaaaagcacccaatgatcgctaagctctttaaaaatctgaaaatatcaacctattacattctattagttactttcaaggttggaataggcgagtag

SEQ ID NO: 151311 - DNA, 807 bp, Enterobacter cloacae
atggaaaaaatattcagttgtgtaaatggcaaaataagaataactttgtgggcttcatttgttgcatatggcattttaaacgccataatctattcatggtttttctggaggaaatttaatgtaaatatcatgcattttgcaaccattagcgacttgataccctttattgtatacgcaatggcagtgcctattttattaatatttattacatttctttttttgagtgtttgggagttggttattggccatgtgttccctaaaataggcgttctcgctcaaagatataatataaactctatctgtatacctttagttaagtgcctgataactttttcgtttgtgtttgggctgttatgtacgatttttttaatttacccaggttataatttggaagttatgcttaatgacgaatctggctggattaaaggtttgatcggatttagctctgcaattttaggcggggttctatcaagggtcacaacatttctccctgaggtgcataaacttagaagtattattttttgtttatttctcgccattccgggattaacatatgcttttgctgacgatcaagctggatttataataaaaggaataaatacatttattattacatctaaagttgattgtgagccaagacaaggagagacgtttaggtatatttctaccatatcagataaaacttttgcgctttctcttttggacggatcagtttgtatatacaaatattctcatctgcgattacagaaagaagataatatacactactcgcctattccaaccttgaaagtaactaatagaatgtaa

SEQ ID NO: 151312 - DNA, 159 bp, Enterobacter cloacae
atggccaacggactcgacaacctgttttgcgtttgccagcggcatctgggcaacatgttgctccagttcgcccattgcggccttcagggttttttcagcttcacgcagcgcgttgaactcagaagccattttatcaacggcagcttttgtttcttctga

SEQ ID NO: 151313 - DNA, 567 bp, Enterobacter cloacae
atgattgcttatgtttatctagagtcgttgaaatttgttgatacttgggtaaatggtggaagtctacctataagatctgttcttgaatacaaatgtaaagaagaaggcagagaaggtaatctcactcctgacgaaggcgtcatcgatacatctactcatgcgcaaaatctcttcggcattagtgcagaagattcctccataaccattggaaaatttttagtggctggtaaggttgttgctagtaacattaaaattgaacggtttagtgaaactggaatagttttatgtgcggcagctaggttggaccgaaaaatagctgaaggtttcaagcggaattactgtgtaaggattaatgattttgattctctcaaatcagttatagatactcaacttggagttgttgggaagttgggttactgttattacacgaccggccacaaaagaaatacatttctaaaatcatataaagattcatggcaaaatgagattaggattttttggaaggatctatcacctaccgaagtaatattacctaaaggattagctatacaaattgatgtaccatga

SEQ ID NO: 151314 - DNA, 435 bp, Enterobacter cloacae
atggatacttttatcaactgggttgtgaatagtcctgaaaaatctttacctgctttaggcgctgcattaggtcttgttttgggtgggttatggactgcattaaccttctttcagaaggtgcttgttgagaaagagcagagacaatttgaacgttaccatcaccttatagatcaattgaatagaggtattaaaggtgatgttagagttgattttcagcttaatgcggtttatgaacttcgctttttcaggaagtattaccctcgatctgaaaggattgtagaattactaattccaagatggattgagagcagtagctacaacgacgataatgtcgatgagctgagagctacgttatctttcataaggtggcgtaaatctattattgggactgtgataattacaattttaaatattgtctggccttggtggaaataa

SEQ ID NO: 151315 - DNA, 306 bp, Enterobacter cloacae
atgatttcgtatgaggttgagtttccgactcaaaaatcttttagcttaaaaattaatggttactcttcagcagaagggctggattgtagaacagttgaggcgattggcggagacgtcaaagttcagatcgaaaagaaaacgttactaaccgtaccttaccatgaggatatctcggcagacttcacccttgaaggttacaaacagcgcgcaaaggtacatgccgaaggtacgattacaaaactgttggaagcggccaaaggaatgaccgctcattacgatgctgcaattagaatttcggttagttaa

SEQ ID NO: 151316 - DNA, 207 bp, Enterobacter cloacae
atggaaaagaaatacgttgatttgtgcttcaccatgtccgagaaaatcccgcgagaaacagctttagaaatcgttgcaatcaagcaggttctggctgcgattttggcaaaaatgccagataaacgtgaagcaattatcgatgacctctcggctgtcgacagcgacatcatgagagatatcgtatcgaatttcagaaaaattaactaa

SEQ ID NO: 151317 - DNA, 288 bp, Enterobacter cloacae
gtggatacggtctactggcttacctgcttctgcacagcgcgcatagcagcgacgccgacggtggccttcaacaacccacactccaccttcatcgcgggcgataacttccagtggaggaacagaaccaccgttcatcaggtagttgaagaggtcatcatctgcctggcgggtacgctcatcatcttcgcgtttgttgaaaccttcccgcacatggatttggtcaaggctgatgaacatcccggtatcggtgcgcttgatggtcccgtcacgggtcatttgcttgaatga

SEQ ID NO: 151318 - DNA, 141 bp, Enterobacter cloacae
atgattcaaaaaaaacggcttgcaaaacgagaagaaaacaaaacgtacggaggtaaaatgaataccaaagaaaaagtagtattcagtgaggaatataaaagtactttacatattaaaggacgacttactcacacaaactaa

SEQ ID NO: 151319 - DNA, 213 bp, Enterobacter cloacae
atggcagtccataatattgatataactgttaagactaacgcgcaaaccttccaggaagttaacgaacaactgagcagaatgaaagttgttattggtgtacttcttgcgaaactaccgccacacgaaagaaacaaagttattgatgacttgaaaggttttgcactctacgaagaagccgacttactcgatcagttcaacccgaaagaatcgtaa

SEQ ID NO: 151320 - DNA, 435 bp, Enterobacter cloacae
atgaagggctttacctgggtaaagttcaacccactggcagagcagcatatcaacaaagcacttcaggcagggcgtgtggaggatttttacgacttcctcgacctgctgaacgtacaaacacgcatgaacggcgggaactacacccgagccaataccgaagacctgctaatctccaccaggggaaatggactggaacgcaagtgcgccagcatcaagcaggttatctacagtccactcggtgagcacagccagaagccagcagaggcgcgtttccgtctggaaaaactttatggtgacgttccgcgcatcgaactattcagccgttgcggtgcgcctggatgggaccactggggaaatcagtcagtatcaccagctgttgagcttattccggcagttgccgttccaatggccaaacctcaggagcgtgctgcatga

SEQ ID NO: 151321 - DNA, 126 bp, Enterobacter cloacae
atgaaatttgacttaggtgctattgttaaaatagtcaggataatttcggggtgttactatcttgagggcatagctaccgcacgaacctttcagaataaggcccagcgtcttcctgacatattttga

SEQ ID NO: 151322 - DNA, 879 bp, Enterobacter cloacae
atgagcagcattgataaaagcgggacgtacgcgctcggtacgcggacggttaaacgactggggtacggcgcgatgcagcttgccggaccgggcgtatttggccctccgaaagataaaaatgccgcgctggaggtgttacgcgaagccgtggcggcgggggtgaatcatatcgataccagcgatttttatggtccccatgtgaccaatcagctgatccgcgaggcgcttcatccgtaccgggacgatctcactatcgtcaccaagatcggggcccgccgcaacgataaaggtgcctggctgccggccttttccgcgcaggagctgactcaggcggtgcatgataacctgcgtaatctgcaggtggatgtactggatgtggtgaatctgcggatcatgtttagcgctcatggcccggcagaaggatcgattgctgaaccgctttccaccctcgcagagttacagcagcaagggctggtacgccacattggtctgagcaatgtcacggccactcaggttgcggaagcgcagaagatggtgcctgttgtctgcgtgcagaacatgtacaacatagtgaaccgcggcgacgatgcgctggtggatttactggcgcagcaggggattgcctatgtgccgtttttcccattgggcggctttacgccactgcaatccagcgatctgcaggccgtcgcggattcccttggcgcaaccgcgatgcaggttgcgctggcatggctgctgcaacgttccccgaatattctgctgatccccggcacctcttccgtggcgcatttgcggcaaaatctcgcagcaggagaactgcaactgccgcctgacgctctggaaacgctgaatacgctggtaggccgatcgttgaactaa

SEQ ID NO: 151323 - DNA, 405 bp, Enterobacter cloacae
atgtctgcatccatgacggtgtcagatgtcaatcaggggcttagcctaggcgcactaagtgcctggcttgtcggggtcccgcctgaggttgtaattggtagcctggctggtgcggtaatttttgttaccttcgcgacagagtttccaataaaacgtcggttgctactggcggttgtcagcttcttctgcgggctggtcatctataagcctactgcaatcatcctcattggcttcgccacacttctcccatccgtaacatccgatatgttcgataaagggatcgctcattctgccggagcgttcgtttcctctatcgtggcagtagggctgggcaaatatatttatcaccgttctgaaaatccgcgcgacctgatcccggggagaaaagacgatgaccagtcctga

SEQ ID NO: 151324 - DNA, 972 bp, Enterobacter cloacae
atgcgcaacaatgcattggatgcagctaagctacttgcttgcttctttatcatagtggttcacgtgggtaattacccagaaatgccacaatattttggtgagttgtttcgcgcatcatcaagatgggcgctacctttcttctttcttgcctccggatacctgatgggctcttctgggcatgatgatattggcaaaaagctcaataagctagttagcatccttttttgggcgtcagtattatatatccctattttatatagaatgacacatggagacgtgtggaagattattggcaaggttgtatctaacgacactattcacagtggaacgttcttccatttgtggttcataaatgcattaattcttggctttgtattgacaaactattttataaaaaacgtaagtgttaaagtatctttgtttgtttcaatagcgattttgctggcatgctggtacggcgaccttgttaagtcactgcactatgatatttatatattttatgcattaaggacactgatagcattttcactggtttaccttggatattacttcgcaaaaagtggaattctaatgcatgtttcaaaaatagctgcagtctctgtcatcatttctggcattgcactgatgatcggggaggtatatgttcttggtacagaatataatgcagatatgatagaaagacaattcccattttttgccactcctatatgtatcgcacttcttagtatatgtgtgaatacgaagatcgaagataatatattctcaaaacttggaagagattattctcttggtgtttatcttttacaccctttaatactatatattctcatgcatgatgttggtcagtatgttgctaacaattcaatgattaaattaataatcagctttattttatcaatagttgtactaaaagtagcaaaggaaataattccattagcatacaaaaaacttaacggcattggtgttagatga

SEQ ID NO: 151325 - DNA, 2286 bp, Enterobacter cloacae
atgacggtatcaaccgtagttgaccataacgattacactgggaacggggtaacgacatccttcccgtataccttccgaatttttacaactgacaatcttttggtgaccgtaactgacctaaacctcaccgaaaccgttctgacccttgatactgactactcagtaacaggcgccggagggtactcaggtggtaacgtggtcctttcctctccgctaacaactggctggaagatctcgattgctcgatatctggagccaacccaggaaactgaccttcgtaaccagggtaagttcttcgctgaggtgcatgaagatgcattcgataaattgacgatgcttattcagcaggcgttttcatggctaactactctcaatcgtcgtgcggttaaagttcctgaagatggcagttgggtggcgccaagaattgctgatcgcaggaataaattgtttgcctggggagacagtggtcaaccaattgctgttcttccaccaagctcatcagcttctgacgtaatgattgagcttgcaaagccaacaggcgctggattatctggttataacccctcactttattatgatgatggaacagttggaagatttttgaatgatgctgtgaactaccttactccacaaatgtttggagttgaacctggactgggaattatcggggcagggcttgatgctatgtttgctatcggaggcgatattcggtttgagaaaccagggacatacatcacagatagaacatgggtactccgtagtggtactcggctttggataggtccaggcgtaacaataaagttggctaacgcttcaaatgtaccgatatttaagaactacgcatacgctaactcggcaacaaatgactcgttcatagaaatttgggggccaggcacaatcgactataatggtgcaaaccagactattgtcggtcttggatcgatggcttcaatccttaaaggaataactatccttagaattggtggtggtattaaagttgttaatgccagcaaatatgcttggctggtatgtaaaataacctatctcaccgctgatggtcttgattttgacactataagcgacggcctacattgccaaccaccgatactccatgcgtacattcgtaaccttaagggtaaaaccggtgatgatatgctggcattcactataggtgattatgctaactacaacattagcgaacctggtgatttttctaacattgatgttgcaggtttgttctgtgaaagatcgttatgtgcaatgaagatgactggagatggcactggaaactttgtcaggttccgtgtttctggaatatacggagatacattgcactcagttttccgcatatggggcgatacaaatctgacaaaaacaactgttaaaaatctaactatagaggatgtttatgctattcctggttccgcgtacagcactattgaaattgatgatagagggtttggaactacagggtacagcattgagattgatgacattcacattaagaatgtttactctataaatctaaatttagaaactgtcagatttgctggtagcttcggctcagtgatacacaatgctattcttgatggggtgccgaggagtgcaataattgcgtttggtgttaataacacaactactgctattgacaatttgaccattaaaaacggaaatattattttccctgataatgcaaacgcggccgttgttgtaaatcgtggaactataactaacctaaatatagaagacgtagtgtgcaatttcggtagcacaaacaatggacaggttgctagactgattgcaggctgtactgtggttagatctaactgggtcaatgtatatcagttgcgtggtcagcgcgggtggaacaacattacatcggcaatgactggtagcacagagcttaaccttgttaactatacctgcgatggtgatggtcgcatagctcagataactgggtcgacattgacaattaggatgtctaactgtcgccgcattaatgatagcggtactcagactgcgttcttcgcaagcggtggaactatcacactttctggcagtattgaaaccggttataacacaatagggtcaaactctggcggtgtaattaaaacaacgccaggggtacacaacataccatgcaatgttgaccttcttacctctgtagatggagctagtgttcataatctcaatgcgtctctttcatgcggtgcgggaagagtcttagtgcaaactaaggtatggaaaaaccttttctctggcgctacatataccagcagcatttga

SEQ ID NO: 151326 - DNA, 948 bp, Enterobacter cloacae
atgaatactttagcactgaagcaaaatcattgcaccatcagcgtaccattccacggcacagatctgtttgtcgtcaaccacaacggcgagccgtatgtaccaatgaagcctattgttgaaggcatgggattggcatggcaaacccagcatcgcaagctaagtgagcgcttcaagaaaggtatcaccgaaatggttataccttccgtgggtggtgcgcaatcaatgatctgcctcgccctccgcaaactggcagcctggctcaacaccatcagcccgaacaaagtccgccctgaaatccgtgaccgtgtgatccagtatcaggaagagtgtgacgatgtgctctatgaatactggacgaaaggccaagtggttaacccgcgcaaagctgtgaagactcaaccgggtaaaatcaccgctgatcagcagtacgccattaaagaaatggttatgtctcgcggccaggctctcccgaaggataagcaggctaaggccattatcacaatgtggtctgcgttaaaatctcactttggtgtttcctataaagatatcgaagctgggcagttcaacgaagcggtttctctggttgcaagaatccctcttgaaggagagttgatatccgcaagagatgtacttctggctgaagaaaaattgagcgctgaggtagtggcagcgatccgtggagtagtaaaaaacaatacgaagcgatacgaggcttctttgaagcctggctaccgcgagtatatccattcacctgaaggtgtccttggcctgacggagcattccctgctgatgaatctgcttcgccaaatggaagatgatgggcatgatgtctccggtgcggcggcggagttgaccacgattttctgctatgtgacaggggttaggcgctgcataagcgacattactaccaacgcgcagtatattcttaagcaggtgaatgatttttag

SEQ ID NO: 151327 - DNA, 351 bp, Enterobacter cloacae
atggacaaattcccaagtcagacgcaggataagttcacggttagattccccgatgggatgcgtgacgccgtcgctgagcgagccaaaagcaacgggcgatccatgaactcagagatcgtgcagataattgaggatgcgctttctggtgccccggctgtcgccattggcagccacaaagaactggttgatcgctatagggcgctggcgaaatcactccctgatgatggcaatagtgatgagtggcagaaggaatttgataaacttactatcgcaatagtcgatgcaatgacaccattggtgctcttaagatctgagcttgtgaagctattagaaaaacgtggaagaagttag

SEQ ID NO: 151328 - DNA, 300 bp, Enterobacter cloacae
atgcttccaatggagttatctgaggggatgagcatgtacgctattgactcatcagttaacaaaatcgttgccaaagtcagaatcgcgatgacggaagagcaaatggattattacgccaagaaaaatcacatcacccaaggtgttgccaaagatcggatgtcagatcaagtcaagatggcggtttgcactaaaagcaacccattacgctctttcgtaagactgggtggagaaatgcaatatacatatttctatccttccggaaacgaatacaccaccataaacataacctcgtgcacataa

SEQ ID NO: 151329 - DNA, 201 bp, Enterobacter cloacae
atggaactgaacatcatcactttaatgaaagccattattggtggggctggaagcggtttcgctctatctggcggcctgtctatgatcattcctgcgttcacagttactactggtgtggcctatcttttcgctattaccggtggccttgctatggcaggaacctacatttttaaaaaaatgagtgctggcagtgcagcctga

SEQ ID NO: 151330 - DNA, 348 bp, Enterobacter cloacae
gtgcagcctgagatcgctcaagtatcacactggtacaatccacaaacggcacaggaactggcgatcttttattgtatcctgtgccttgtgtatatagtaatccacctgatatgggattttttctcaaaagagactggtaacttttccgttgttaaccttcagtacaaactgaacgaggtgtattcatcaactacattcgcaacgagtggttttttcctcgttatgctatgtgacatgaagaaccctcttagaacatcggatgcgttcatcatacctctgatactggctatgctgactggattcatgatatcaatagccgcaatagcgccaaagaaagtcaacatttaa

SEQ ID NO: 151331 - DNA, 582 bp, Enterobacter cloacae
atgtgtagcccggctatcgctctcgttggcgccagtgtcgcactgagtggcatctcagcttataaccagtaccagaatggcaaatatacggcagcggtcgctgagcagaatgcgaacgttgcagaagcccaggcgcaggactcaattaatcgcggcaacgcgcaggctgatgaagttcgccggcgtaaccgtcaggccgccggaacacaggctgccacaatgggcgcaaccggtgcggatctttccactggtggagcactggatatctttggcgatactgcgcagttcggggctctggatgcgctaaccacagtcaacaatgcccagcgtgaagcatacggctatcaggttcaggctgaaaactacaaatcacaggcaagctctgcgagaaagcaaggcaataccggagccatgacaacccttcttacctctccattaaaggcttacggggcttatcaaatgttcggtgggacctggagtccattcaaaacatcactttcatctggtggtggaactaccccgatgttatccaacaagggttttattaatagcagctcacagttcaaattagggggctactga

SEQ ID NO: 151332 - DNA, 324 bp, Enterobacter cloacae
atggaactggtaaacctcaaaaccggcaccgatacatatcaggatgaggacgggaaaacccagactcgtgatgattatccatggggcctgtgcattagcctggacaatgacacgctgaacagactcggcattaccactccaccagttggtggcatggtgatgatcgctgctaaagcgctcgttaaatcaacctcagaacgccaggatgaagacggagtgtgccgccgggcagagctacagatcaccgatatggcaatggcgcctgattccagcgagccgccaaagaccgcagcgcaaactctctatggtggggaggatgattaa

SEQ ID NO: 151333 - DNA, 351 bp, Enterobacter cloacae
atggaaaaagcaaaataccgcgtcctgcgcttatcccatattcacaacaacctctggccggaaggatcagagattgaatatgaaggtgagccaggttctgcgctggagcctctaaacgcagcggcggaaaaagccaaagccgccgcacttaaaaagcgtggtgttgaatttgttaagccagagttgaaagttgacgatggcaatagcaacgacaatgccggcggtgatgacgagctggagaagcttcgcgaagagtatgaagtgctcttcaacgataagcctcatccgaatactggcgtcaaaacactccgcgagaagatcgcagagaagcgtgcagaactgggcgtgtaa

SEQ ID NO: 151334 - DNA, 702 bp, Enterobacter cloacae
atgaatttatttgaacgtttgctgcatcgccgtctttgcaatgagcaacctgctgatggtggcgctgcaccagcaccttctgagccagccgcacctgctgctgatgctcctgcacctgctgctgacccggcaaaaccagaaggtgataagccacagcctggcgctgaaggcgacaagcctcatgacgacaagcccgccgatggtgataagccagcagataagcctgatgacaaagaacagaagcaggaaggcgctccggagaaatacgagttcaaaccagctgaaggtcaggagcttgacactgctgcgctggagcagttcgagcctattgcgcgtgagcttaacctcagcaacgagcaggcgcagaagatggtcgacctgtacggcaccaagatcctcccaatggtgcagcagcagcaggcggaagcctggcagaaaaccaccgaacagtgggccgaagatgtgaaggcagacaaggagatcggcggcgacaagctgactgcgaacctaagcgcagcgcagcgcgctctggacctgtttggatcacccgcgctgaaagaatatctcgaaggtactggccttggtaaccacccggagctggtaaagaccttcatcaaaatcggtaaagccatgtctgaagacggcatggtcgatggcagtaatcaaggccagcgtagtgcggccgaagtgctttatggctaa

SEQ ID NO: 151335 - DNA, 402 bp, Enterobacter cloacae
atgccagttgtatcagctggccacgagttaagttgctttgccaatatctctacggtcttcatgattttcaccttaaaaaaatgcccggacgaaccgggcgaatggaagcaatggactacggagtgccttccttggcgggtgatgcagggtttacagcgcaacgtcatcgggatggcgttctgctgtaaaaaaagtgtcggtaccagcgagcgccaactctggatggatctggtaccgacaaagtcacacagcaattacatgggcactacggtttaccacggtcctaacgtgattgggttgtggtgccggattcgaaccggcgcggcgatcctttcggaacccattacccgcccattcagcaatggcaagaatggatggagctctaaccaattcctgagctaa

SEQ ID NO: 151336 - DNA, 273 bp, Enterobacter cloacae
atggtgagcaaactcaaacagcggcgaatgcgccgccttaaagcggacgtggcctggtggcgggatgaggcagaggattgccgttcccgcctgctggaactggccggggaactcgacaggctcaagaagctagttatccgagtgccgatgccggtggtggtcccggcggatatcatgcagggcattaacgtgaagggtgcgtttgcgatggggatcgaacgctatggtgatgcgatgctgaagctggcgaaaaaggaggaaggcaatggctaa

SEQ ID NO: 151337 - DNA, 600 bp, Enterobacter cloacae
atgagcaacaacattcaagtgctgaaagcttactacgtgcagggcgatgagtacgggattatccgtttcgctacaagtaatgtcgtggctcgccgtgagggtgcgaacgaactggaagaggaattcaactgcgtatcatgcaagcgcattcctggcgctgataaatatgcagaacttggtcgcgttccttctcgcgttctggttgaagagtttggcttttggcaagagtgcacctattgcaaatgtcacgttgatgaagaaacagagggacgcgtgtgggatggcgattctgtgtattgcgatatggagtgcgaggcgcgctggattaatcatcgccttgattgcgaagcggaacgcaaacgtactcatgaggcagagcaggcagccattgcggaagcggaagcaaagttccctggaattacagacgtcacggcctacatcggtcacaagaaagacatcacggtttattttagattccctggtggattagcaaaggcctcatggactgttggcgagaatcacgctggcaccagccgtgatgatggagaggcgtttaaagcgtacatcaactcagttcaccaaggggaggccgcccaatga

SEQ ID NO: 151338 - DNA, 885 bp, Enterobacter cloacae
atgaaaccgagttatgaagagttagagcagaagctcatcgagtcagagcgctgcggtcgccaggcagatatcacaatcgagaatctggagcgcaaggtggagcatctggcggcggagaatgcggcgctgaaatctgcgcatcctcagccattcggcagggagatgatgaaagccctcgatgcgtatgagaagcatcaggatgaaacgcctgaaacagggatgctcgatgcgttctttgtcctgcgagacagcatccgcgttgatacgaccgccaccgacgctttcctggctgaagtgaaacgcgaggcaaccgaaccactgcagaaagagattgaagtgcttaagaaacaccttcttatgtcagtaggtgatattcgcgaccttattgattacaacgcagaaaccggggttcttacagcaaaggttaatttcagtggcagacaggcgggctcggtcatagggtcgcaaacgtggcaggggtattacgcattctcactgtttggtaagaagtgttttgctcaccgtcttgcatggctactgcattacggcgaatggccttcacagcctatcgatcacataaatggcattaagacggacaacagcataagaaacctgcgtctttgctctctttcgcagaaccaattcaacaaaccaacccagaaaaataacactactggggtaaagggcgtttattggaacaagagagataagcgctacgtcgccagcgttcagtttaacggtaaaaaatacagcgctgggcatcataaggatatcgaaagcgccaaagaagaagttatgaaactgagagaaaagctcgcgggagaattcactaaccatggcgaattcgaactggctgaacaaattcgcaaaggagtgcagtcatga

SEQ ID NO: 151339 - DNA, 771 bp, Enterobacter cloacae
atgagcagacacgcaacagagtgggcatggagaaccaacccaggcagctcatcactgaaactaatcctgctctccatggctgatcgggccgatgaatacaatctctgctatcccagtatcgaacgcctcgtagtggacacaagcctgaataaaaaaaccgttcaggccgggctgatctcgctaattgctttagggcttatttccgacaccggggagagaaaaggggcaaccaggagggtcagggttttctctttaaacatacccaaaaacggtaatgttaccgaaaaaggaaatatacccaaaaacgggaagttgaatgatcccaaaaacgggaagttgaatgatcccaaaaacgggatgcagaacctatcagttaatcagtcatgtaaccaagagaaggagagctgcgtagaaaccggggttttcatgcctacagaaccctccgcaaacaacaatgtgatcgataactttgctccacctggtgggctgggtcagttcggtaaattttccatgcatgattcatggatcccgtctgatgattttctccgggtgtcatcgttgcagggaatccacctggattgccagccaacgcctcaggagctggctgaattcaggatctactggatggccgagggcaaggcattccaccacgcacaatgggagcaaaaacttgcccggcgtctacaggtcagccggcagaacaaacttacctcacctgaaaacaacgtaccgcactggaacagtccagaagcgtgggaggatttcctgtga

SEQ ID NO: 151340 - DNA, 264 bp, Enterobacter cloacae
atgaaaggtgcattgggtaagaaaaaactccttgaggtggtgccactgtcatggagcacgatcgaacgcctggaagctgctggcgagtttccaaagcgctggtacatcactgaccgccgctgcgcatggacacaggaagaagtagagcagtggcttgaagagcgcaaaaaaaatagcccggaagtattccagggaaaaaagccaccggttgaactgcggaagtaccgccctatgaagggtgaagcagtgagtgcagcagcatga

SEQ ID NO: 151341 - DNA, 660 bp, Enterobacter cloacae
atgagcctatatcaacgcatcaatggcgctgactggcgcaatatcttcgtcgtcggcgatctgcatgggtgttacacgctgctgatgaatgagctcgaaaaggtttccttcgaccctgcgtttgatttgttgatctcggttggtgaccttgttgaccgaggcgcggaaaacgtcgagtgcctggagctgattactatgccgtggttccgggcggtgcgcggaaaccatgagcagatgatgctggatgcactggtcaacggcggaagtttcggacattggatgtcaaacggcggtggatggtggcaccaacttgattctgagcaggatgtgaaactcaaataccttctgccaaagattaccaacctaccgatgattatcgaactggttaccggcaataagaaggtcgttatctgccacgcagactacccgcacaacgaatacgcattcgataagccagtaccagaagaaatggtgatctggaatcgtgagcgggttagcgacacgcaggacggtattgtctcggagataactggtgccgatttgttcatcttcggtcacacgccagcgcatcatcctctggtatatgcaaaccagatgtacattgacaccggggctgtgttctgcggaaatctgacgcttaccaaagtccaggaaggataa

SEQ ID NO: 151342 - DNA, 654 bp, Enterobacter cloacae
atggttcgtcgtctgctcaacttaaccggcggctacctcgaaagctatcactcggtcagtatgggcaacacggcggcagccacgccgtatacctatggcaccgctgccagcggcagttctctggacacgctgcttgatacgaaactggtcatcctctgggggcataacccgacggagacgatttttggtcacagcaactacttcttccagaagatgaagcaaaacggcacccgctttatcgttgtcgatccgcgctattcagacacggtttcctcccttgccgatcggtggatcccgctgcttcctgccactgataatgccctgatggatgccatgatgtacgtgatcgtcacagagaacttgcacgatcgcgacttcattcagcgctataccctgggctttgacgaagcatcaatgccggaaggcgttccggccaatgaatccctgatggcttacctgagcggggcaaaagacggcgtggcgaaaacccctgagtgggccgagaaaattacccatgtgcctgcgcagactatccgtcagctggctcgcgactacgcaaatactaaacctgctgcactgatccagggttgggggccgcagcgtcacaactgcggcgagcgcaccgcgcgcgctcaacgttactggcgacgctaa

SEQ ID NO: 151343 - DNA, 1002 bp, Enterobacter cloacae
atgacaagtaactccgatttttttgatgcttctgagctttttaatattcctgaacaatttgatatccccgatactttttgtcgtgctgacgagttctcgaaagaatttaaagtgagcctgaaggatattatatccacatggctggatgataaaatcagtctctatgttaaccttcattcagaatactgccgaataattcgttatgcgaataaaaaagagcatcgttatgatacttttgatatcagagcaggaggagacttttatcaacatgaggatagctctcagtttgcagtaagaacattcataccttgtgaccaatctgaaataaatgagtatccggtttttagcggcagttctttttttaaatatatttacaatggatatgctagtggtttttggcggctacaacctacaagcaccactcgattagcaagagataattacagtctcaaaaatgctaatgaatcttggaatactattcctggggaagttaaaatatttggtcgggatgaacgtgattgtttgctttttaataaagatacttatgtttcctttgaaacggtttatatagctgattctggatgtaaagttttgcgtgacttattttcatctaatgaagataatgatatagaaaaatatgacccacccattaacagagttgcaatggttttgcttattaatgaactttttagcattaatggaaatgtgacttattcaaatgtcagcacaattcttttaagtaatggaattgaagttacgcaatcaaccataaaaaaagtcctcgaagaaacatctgaaaaaagagatcaaccttacaaacatcagcctcagcactcaaagatagcttcgtgcttaatcacactttattgcaaaggcaaaaatcttgctaagacaccatcaagtgtagctcaaatattgaacgaacttgccaggtcatcaccaagaaaatggagtatcattttcacctctaaaatggctgctaacctaatgaaagtaaaatga

SEQ ID NO: 151344 - DNA, 237 bp, Enterobacter cloacae
atgagtacaacatctatcattccaacccctgaacaacggctgcaaattctgcatgtctatggtgagaaaggtgaccgtctggtgcgggaaaaagagcgacagtatatcacttcgatttctcgctcgacagcctggaagctcgaaaaggctgggcggtttcctcaacgaaaatcacttggggctaagtcgtgcgggtggttgcttagcgatctgctctactggattaatgaacgctaa

SEQ ID NO: 151345 - DNA, 240 bp, Enterobacter cloacae; identical to SEQ ID NO: 150241

SEQ ID NO: 151346 - DNA, 129 bp, Enterobacter cloacae
atgagcatgatggatttcgcagaagctaaaaaggcggtcgacgccatcacaaccgactggtctatccgtggcccatatcacgaagaatcggaaaacgtaaggctcttgatgccattctcgaaaagttaa

SEQ ID NO: 151347 - DNA, 1374 bp, Enterobacter cloacae
atgagccgttttatcgatttgtacgttgagcaggccgtcatcggcgggatcatgctcgcagcgggccgcacagacggcgttgacatggcgactgacgcgattgaggggctgactgaggaccacttcacagcaacgcctcacaaggtggctttgcggtcctataagcgccttaacgaatccggggagaagatagacctgctgacactgaccagcgaccttgagcgccttggagcgctggagagtgcgggcggattcgcttacctggctgaatgcagcaagaacacaccgtcgttcgcgaaccttgccagctactgcgagaagcttagggaaatgtaccttggtcgccgtatgaccctggcgttacaggtcgggatccagaagctgtccgaaccaactaccgagggtattgctgacatcattggcagcattcaggccgacatctctggaattgagcacaacaccgactacggcaccgagcacatcaccaccgggatcgacatgtccctcgagactatccagtcgattatcagcggcgatatctggaagcacaaaaccgagctgggcatggcaaccatcgacaacgcattcggcgggttcaacaacaccgatttcatcgttgtcggcgggcgccctggcatggggaaaactatgttcagcaccaccgtgaccgagacagtcggcctgaaaaacaaaaagccggtgctgttcttcagtctcgagatgccagtggaacaaatctctgagcgagtcgctttccaccgggccagagtaagcaaagaagacctgctgagcaaggttagcggaaaaatggacgaggcatgggggaaggttagtcactgcatgaaggagttcatcgattctccgatctacatcaatgacaagccatccctaagcgttcaccaggtgcgtgctgaagcgcgcagaatgagcaagaagctgggcggcctgggcgtggtcatcgtcgattatcttcagaaaatgcggatgtcagacccggagaacatgaaccgcagcgtaggggagatcgccactggactgaaaaacctggcaaaagaattgcgttgcccggtcatcgctctggcccagttgaaccgaaacctggagcagcgcgctaataagcgtcccgttgcggcagacctgcgagagtctggcgttattgagcaggaggcagatgtgatcttcatggtgtatcgggatgagaagtacaacgaaaacaccgaactgaaaggcatcaccgaaatcatctgtgtgaagtcccgccatgcgccgggggcagaaaagacctaccacttcagcagccgctactcaggactggatccggttgcattccaccatagcgagcagcaggagattgaccatgattacgagtgctaa

SEQ ID NO: 151348 - DNA, 678 bp, Enterobacter cloacae
atgaagacctgttccagatgcaatcagcagaaggaagaaagggaatttcagattagaagagcatccaacgatggactttcagcagcatgtaaagcctgcttatcagattacgatcgcagtagagcaaaccttccccagcgagttaaggctcgcgctgagtaccaaaaatctgacagaggaaaagccagaggcaatgctgcaaaagtcaggttctcattaagaaacccatggaaaagaaaagcccacatcatcgtgggcaattttttgcgcgatgggaagttaatccggcctgtgacatgtaagacctgtggcgttaagtgcaagccgcaggcccaccactgcgattacagcaagccaaccgaagttatgtggctctgtacttcatgtcacagcaattggcacaaattcaacacaccaatttacccagagaatgcatctcccggtcaggagaaaccaatgaacaaatttacccccgagtatcgaaaatatcttctccggccaatccctgaccggaagctttcaccctctgagcgagcagatcgcaaagagctttaccaaatcatccagcaagaaagagccaacgacgattcaccccctgccccatccaactacacgccagctgacccatacctaaacgacaaccgcaaaggcctctgcggcgcttcaaggagtgactaa

SEQ ID NO: 151349 - DNA, 351 bp, Enterobacter cloacae
atgccacgaaacgtactgcatttgctgcgtattgctgcgccagtggttcatgccaagcagacggcgcgctgccgcgttactcttcataatctctcctcatgccgcacgctgggcgcgcagcttcttcaggtattctgctgtttcgatttcttcggcgatccgctcggcctgtgctttggtcagcggctcgaaatcctgattaaagcggcccatgctggcgatgcaggtgcgaccgttgcgggtgtagtggatgacttcgtgggtagcgcggaggatttttcagggcgcgccgtggggatcggcgtaccaggtattaggctggattatcctgaacatttggcaccaccttaa

SEQ ID NO: 151350 - DNA, 1242 bp, Enterobacter cloacae; identical to SEQ ID NO: 120936

SEQ ID NO: 151351 - DNA, 573 bp, Enterobacter cloacae; identical to SEQ ID NO: 94577

SEQ ID NO: 151352 - DNA, 321 bp, Enterobacter cloacae
atgcaaacctcaactgtaccggccacgttgccggtttcgtcacgcctgtcacctgtgcaggtctggcagcaacttttaacgtatctactggagcagcattacggcctgacactcaacgacacgccattccatgaggacgcgaccattcaggaacatattgaagcgggaataacactggctgatgcggtgaatttcctggtggaacgttatgaactgatacgcactgaccgcaaagggtttacatggcaggagcaggcaccgttcctgaccgctaccgatattctcagagcaaagcgagctaccggattaatgaatacgtaa

SEQ ID NO: 151353 - DNA, 339 bp, Enterobacter cloacae
atgatgaataaagatgctactcaaacctggggtcttaaacgagatatcacaccgtgttttggagctcggctggtgcaggaaggtcatcgtctgcattttctggcagaccgggcagaattcaacggttcattcagcgagatgcaggcccgagatctggatgaagcttttccgcattttgtcgcacatatggaattgatgctgctctccggtgagttgaatccccggtgcgcgcactgcgtcacgctgtaccgtaatgggctgacctgtgaagccgatacgctgggcagttatgggtatgtatatatcgcaatttatccatcaaatcaggttaaagactga

SEQ ID NO: 151354 - DNA, 2439 bp, Enterobacter cloacae
gtggaagctaagacacctggtgaggatttggatagcgcatttcaggaagctagattatatgcgctagaattaaacgcgaaatatgaaagtggattgaatcctctcacaaagattatagctacagatggctatgagtggcttgccggtgagtgggataataatcagggaagttatcgattaaatgaaatatcgcctgcggataaagtttgtgcaagttttctggaggaattttcttttgattccctttcgaagttgtctgaggagtttatcgcaaagtctgagcccaaaaggtactggaaacctagaagaatgatgggtggaaaggctgctcaaaacgaagaggttggtcataacacttttggtgcaacgttaatctctgaatatggaaatattttcaatcccaatacactaaatgatcgccagtttattgctcgtgaaggatatatttcctctaggcgtcgggatcgatataccaagccgattgataaaatcatcagagcggcgcaaccagtaagtaatagtgactctaggttaattgaggataccgataatcctaaggaaataattgataaattcagggggcgttctcctcttgaaaataaagtcttattgattgttggtagcgttggatcaggcaagacgacttttattgatcatttaaaagaggttgccctgccaaatgatattgttaatagcaccctttggttgcgttttaatatgaatgagtcacctgtatcctccgaggaagtttatgattggcttaggggtaaaatcattcaacaatgcgagttatcctatcctaatattgactttgatttattagacacgttaaagaaactttattcggtgcagataaataagtttaataagggtgaagggcagttgctggctggtgacgaatataatagagagttatacaaagttatcaaagactgtaagtcagatttacatgaaacagctcttgcatatactagatattgcggaactgagcgtggtaaactagtcgtgattgtgcttgataactgcgataaaaggactttgcctgaacagttattaatgtttcaggctgctcaatggttacaaaatgaattcaggtcgttgataatccttcccttaagagaagagacttatgataattatagagatcgccctcctctcgataccgctttaaaagatatggtttttcgtattgagccgcctttgttcaattatgtacttcattcgagagtgcaattagttctcaaagaaatgacgaggaatagcagtagtaacactctttcttattctcttcctaatggttttaatgtggaatatagtaaggatgagcgttcttattatttgacttcaattgttaattctatttttgtgcatgatgcgcagattagaaggatgatagttgggctttcagggagaaatataagaagagcgttagagatcttcttggagttttgtactagcgggcatattactgaagatgaatttttgaagataaggcaaagtgaagggcggtatgctcttccattacatatagtcactagggttttattaagattaaatcgtaggttttacgatagcgataactcttatctgaaaaatatattttcaacagagagagatgatgaaagaggtaatcattttacaaggttcgcaattctgaagtggttttataatcattttggttcgagcggtccaactggtctgaaagggtatttccctttatctacattaaaaagagatttagttaagtttggtttctctccaaaagtgattactcgtgaggttgattacttacttcatgggcaatgtttagtctcagaagattttagagaggcaggaataactgatgaagacttgctacgattatcttctgcaggttttgtccatttagatatgctttcaaatataagttatcttgcagcactggcggaagatactcttttccctgctgaacatattgcaaaaagagtttctgaccgtatgggctcggttcagaatcagtataataagcaaatggtgagtgccaatgctaaggagttagttgatttccttgaggctcagcgtgctacaattgcagatttttcggaagagtttattgcagggagtgactatcgcgatttaactgatattcaggctgcggtaaatgcagttcgggcatttgaggaaaaaatccgcgatcctgagtgggctgatttcgaatctaagttccagtctggagatgtattagaaggtacggttagaaactgtgaccaaaaatatgggatttttgttaatttcacagggaaaattactggtttaattcataaatccaagttaccaatgggctatgtccgaatgaatgagttttcaagagggaacagaatcagagtacgcatagaaaatgatttcaatgcagttgaacaaaaaattagtttatcacttgttgaaaagaatgattcttaa

SEQ ID NO: 151355 - DNA, 708 bp, Enterobacter cloacae
atgcactcaaccccgaccaacctcatgacctgcgccagcctgccagtagatcgccctttctttgctttccagcatgaatggaacattgccgcacgcaccaggaaccgcgtactaacaaaaatgcgccaggcgggcgcagattattttttcgcctacgaagccctgaacgatgcactgcataccggacgcaaccagatttttctgggctgcagcccggcatctgccctgacagtcaaagcctatatgtcagcatttttaagtcaggccgcagcccacacgcatctggggaaaataaaatcagataaagcgcatctggaactaccaaacggttcgaaagtttattttgtcggtccaaaaagcctttgcgccgcgcttaatgggaacgtctacgtattagagtatgcttgggcagattcccctaaaaatatgattgctctcgccaaaagtatgtccatgcacgcgcgctatcacgctacctactacaccacccctagccccagcttggaagcatggcaggaatacaaaaagctgattgcccgtaacagcacaaccatcatgacctttaccgcagatgatgcggcagcaaccggagccgaactctttgatgatgaatggctggatgacatgaaaaaagaattatctgtagaggactggaaaatgctgtttatgtgcgaatggccccaggctgataaggagctggcggcatga

SEQ ID NO: 151356 - DNA, 231 bp, Enterobacter cloacae
gtgtatggaaatataggggccaatccaggtggcagttactactatctggtggatatggaggagaaaaccgtccagccgctgatgaatgcgctttgtattgccgacaatatcaaactggaataccacgaggttacggaccggcatacgaaggaaaaatactttgagtactcccatgacggaaaactgatgggtcgactgctgataccctcaaaccctgagaaccacgaataa

SEQ ID NO: 151357 - DNA, 546 bp, Enterobacter cloacae
atgaataagaaaattttcgatgaaatggttctgcttaatgagcaaacatgggaaaggctatcttcgataatgcaaagcgaagacgacataggtgtcgtcttgcgccttcacctggtaaccgagaaaattattgaagcgtggtgctgtgcggcatcaaacaacgttaatttttttgatggtttcggcgaaaacttaactatgtcatacgcggcaaaactcaagctcgctacaaattttggtttgaatgagttttcctaccaggagcttaaagtcgtaaacaaaatcagaaatgcacgctcacatcaaattgataattcagaaattaccaatgaagagataaataaattaatcacactcataagcaagggcaatcaaagagagctaattgaaaaccccaaatttggcatcctgattggtgacaaaggaatacatctcaatgacgaagggatttcaaatcgtgaaaagttcattgcctctatagctgcggtaattctcaggattgccaagcaagttaacgacggcgataaatttataaaattactctaa

SEQ ID NO: 151358 - DNA, 930 bp, Enterobacter cloacae
atgggtcagaaaattattacgttgtccggtgcggcgactgatgttctgtatgcgctgtttttccgtggtgcgctgcaaagtggcgagctgccatctaaatctggtgcagcacagcttcgcgagctggggttggctgaaacccgactcacagcaacagcctatgggaaggtaaatcattttacgttcctgactgctgaagggcaggagtttgctattaagcacctggtcaatacgcgctttggtgagacggtgaagcaggaatactactccccgctcggggttgagcttgaatgcgctcaaaaggcgctcgatgaaatttgtgaagagattcgcagcagcaaagcatttgaaaagttgataaacggaacgccgattcactgtcaggtgcatattaccgatacgatgattggtgatgccgcagtgtctgccaactatagcgtaaagatgaacgtgaaccacggcggcaaactgcacgttgctggcatggccgtctgcattgaaggtgaccagcgcaaggtcgtgtttgaggctgaccgctttaaggtgaatgaagccgctcaatcagccagcaataatgaagagacggccttcaatggtggtctggcttttggtggtttccctggggcaattagtcatgatggagctaatcccgctgatggcaataatgccaccgctgaaccaatcagttcaattgcttcagcgactggcatagccaccaagacgcgactaaccgacgagatgcaagaactggttgtcaaggctgtacgcgaaagcgatctatttacatccactcagactgcgatagatgctcaggcagcatcagccgttgctctgcaacaggcagtgaatgatgtagttggcgatgctattcgcaacgcactgaagcccggtggaatgatttggacgagctttcaatcatgccggcattaa

SEQ ID NO: 151359 - DNA, 873 bp, Enterobacter cloacae
atgtcagatgaggcagggagtatttttaatggttatacattaaatgagctaccactcattaataaaatgtgggatggatcaacctattcagtagaaaggaaaaatgagccagaaagattaataaaagatgcccgactgacgctatctttgatggttcagcctttagtcatgaacgggtatattgagaagaaaggtgagatggcaaaagggataggattttttgctcgtactctgattagtcatccctactcaacgcaaggacagagaaaaataactaatccggttgtttctagtgagcacttaccagtatttcacaagcgattaatggagatcgttgatgaaggtattattaaccatggtgaaagactttgtttgtatttttccgctgaagcggaactggcatggattgatttttacaatcgaatcgaatcagaaatggggcttatcggcaatctgtcagacttcaaagattacgcatccaaagtagctgaaaatatggcaagaatcgccgcattgttgcactacttcaacgaagataaaggagatatatctcttgtggccgtggaagctgccatagcgatcagcctgtggtatgcaaatgaacacattaatcttttttctaaacctaaggaatcgatgatggtaaatacagatgttgatgaaatgtactggtgggtgaaaaattactgcagccaaaatcttttgccatacatcagaaaaaacaccatacagcaatatggtcccaatcgcttcagggataacaaaaaaacgacagagttattaggcatgctttattctcaaggtagaataaagacctataaaaaaggaaagactatttttatacagcctgttgatttattagatgtgacttaa

SEQ ID NO: 151360 - DNA, 621 bp, Enterobacter cloacae
atgcatttatataatggcactcatggtgaacatatttttgattataaagtcaaaattgagcagaccttaaaaaatgccatcaggcaatatcctcgaacaatggcattgcgggtagatcttcattacccaccgattctggatagaggtgatactatctcctgctttcataatcaggaaccaggcgcgatctcccgcttcctgaatgcactgaaagcaaccctcagcgccagtgaggatcgcagaatgcgtgacggtaccagaatacacccgaacaccttacgtaatatctgggtcagagaatttacgctgctgggtaagtgccactttcatatctgtctgttgttcaataaacatgcctattaccatttaggtgattttaaatacgaagacagcctgggagtgatgatcatgaaagcctggtacagcgctctgggtttgacgtttgaagattgcccacaactcgtccattttcctgacaactgcaggtatatgctggaggtcaatgatcctgattatgttgaggtttactatgatcttcttaaccgactggattacatgacaaaactcgataccaaagtctttggtgagggtgacaggaacttcggttgtagtagaggataa

SEQ ID NO: 151361 - DNA, 999 bp, Enterobacter cloacae
atgccaaagcgaacaaacagcgttgataccacattttttgctcttgagctgttgcgtcgtattccgcgtaatcagcgcattactgcccatgagttgcatcaacaactcatggatgcaggtattgagcgtaatgtgcgtaccattcagcgccagcttgaacgcctgagccaacacttcgatctggagtgtgatgatcgctgccgcccctatggctggcgatggcgggtaggttcgcgaggcctgagcttggcgcagttatcgccagcagaatcgctgctgatgcagatggcgcaggcgcatttaaagcatctgctacccgcacatctgatggcttcattttcgccattttttagccaagcgggacacactcttagccacagcgaacaggcgcagcgagagcgggaatggtcgcagaaggtgcgggtagtcgctgccagccagccactcctaccgccagtgatccaggaaggcgtgtttgacgcggttagtgaagcgctttactacaaccgctggctgaatattgattacagcaatgcgcacggtactcgccgtcaggtcgaggtgatgcccctcgggctggctcaacagggctcgcgactgtatctggtctgccgctttaaaggctacgataacgagcgcagcctggctctgaaccgcattacctcggcggtctgcagtacctttcacttttcccgccccacggattttaacctcaaacgttacgacgatgacgggcgtttcggattcggcgaagggcgacatatccgaattcatttcacgcttgaaaccgcgcgggcgcaacttttgctggaatcgccactttcatccgaccaacaggtcagcgagcttgacgacgggcggctgcgctttagcgccacggttgttgacagtccgatgctcgatggctttcttgcaacctttggtaacaccatcagtaacattaaacgcgacttagacgatgttagtacagaacaggaaaataatgatgagtacaggtga

SEQ ID NO: 151362 - DNA, 1215 bp, Enterobacter cloacae
atgatgagtacaggtgatagtcaactgctgccagtattaagcaacgcatcggatagcgaattggccccgctggtggaatacatcacgaaggcgttcagcagcggcattgagagtaaagcacgttataaaacccattgcccggcacacagtcagtatgccgatctgattgcccacgagctgtgcgagtttggcggaaataccgtcgtcaatctgtttcgcggcggtggccctgagtggaaaaccgtggtgatcgatgtggcggacaagcttgacgcgacgtacgagaaggactggggcgttgaccttatcgaactggctgtgctggcggcgattactcgcaaggcttggtcggatatggaccaagctcaacgcaaaaatctgcttgaaaaaatggatcttactcagggtagtacgatgcttttcccagaagcaaaattaatgacgcagttgcagtctagccgcttctcaagcttgctcttggcatcgttaattgccaacgtctttgccagccaactgctcggacggacggtggtgatgtccgcagcctcgtttgtggctgcgcgaggggcagcttctttcttggggccgattggctgggtgattactgggctatggaccgccctagacctggcgggaccagcgtttcgcgttacgattcctgcagtggttcaggtagcactacttcgccaacggattcacgctacggcggaagccgataaagtttggtgggagtatcatcgctggcaggatgagaaagatgctgacagctgggtggcgaacatgtttcgtatggtaggactttctactgcagccagtgtaaggcgtgagcgcaatatggcgtttgagcagggagtagtggccgggcaacagcagacgacggaagagtatgcagataaggtcctcaaacaaatggatgaagttcagcgttttgaaaaacgttgtgaggcaatgctggctgttgcctttgcttgtgctaaagaggaaggtatcgcgccgtctgacgtgcgcagcgatatcgaaacctgctgcttggggatgatgagcgggcatctttcctcgatattacaagccacaattaatcgtcttattgccaatccgcctgatatccacactgcgcttgaacaggcgttcgagttaggtattcaggaaactgaggctgctgagctaatggcggtgcttcgtgaggcatttagccagcgtgcaggtgtgttttaa

SEQ ID NO: 151363 - DNA, 1587 bp, Enterobacter cloacae
atggacagaaaaacacttttattgcgtctgaaccagcagcgtcaacgacagacaagagagctcataccatcaccaacaaaagaggtcgttacagtatccgatgtcagtgtttggcaggcacatcagcaagttcggcagtatcaacagaagtggcgcacggaacaaacaacattgatgctggctgagtgccgacagcgtcttctgcatagcattattggtccgtttgggctggggagtattgtctctgcatgggacaaggtgggggggaatgtcgataccattcataatgttcgctccggggtgtatgccacggaagaggagcaagtgcgttatgaaagccgcggtaagtacaacagtgatccataccataagcacgacaactacaagaagaccaacgccgaaaacagtaaaaaacaggatgcaggcgaagcagtggatgcctataccggacaggcactgagcaggaataccgatgcggagcaggatcaccttatttctgccgcctcaatccataacgaccctgcagtctggctggcggaggccaatggtgcggatctggcgaaccacaaaaccaatctgcatcagacgcaccactcgatcaatgaatcgaagttgcaaaagagtgcagaggagtacatcgcctggttgaacaaaaaccgcgccgatcgcgattccaaaattgcccggttggaagagaaagccaaaaatgagcctctgagcaaaaaagatcagaacgcactggagaagtacaaacagcagaacgccgtcgatcaggaaaaattgcgcgagctggatgaagtggcgcgcaagcagtatgaaagcagtcttcgttggggctactacggtagtgcgaaattcggtgcatatttactgaaaaccagcgctgtcgaagcgggaaaaatgggcctacagcaggcgattggcctggtgttgacggattttgtcgacggcctgttgttggaagttcacgacagctggcataacgggttttgtgatggggtggaccaggagcatgtctgggaggcattaaaaatccgtgctgggcgggtggcaaaaagctgtctcgataactggcgtaacgtgctaacggcgtttcgtgacggggctattagcggaatcattagtaacttgatgacaacgctgattaacaccttcttcacaactgcccgcaacctggtgcgaatgatccgagaaggggttttttcgctgttccgcgcagccaaaactgtattgatacgaccagagggtacaagccgtgccgaagcactagatgcagggctaaagattgctgtcagcggcgcattcgtcattggtggtgtactgcttgaagagtatctcagcaaaactctcggcgcgatgtttaccgttcttcccggtgggctgatcactaccctagtggctgtgctgacggggtgcgtcaccggccttggtaccgtattaacggtctatatgctcgatcgattagatctgtttggtgcgcagcaccagcaggaagacaacgcagtattaacgatgttacagggcggcagggcgcaggccgatgcgcgtttacaggctttgttgggatcggacccggaacctgtctaa

SEQ ID NO: 151364 - DNA, 1029 bp, Enterobacter cloacae
atggatttacatggtcatttgctttacgtggatatcacccagatctgcggcatcggctgtgcgttctgcatgtatgcggataagcacgtaacgggtaagagtatggtgctgtcaacgcaggcacgtgacaacctgtcggcgctcattaatgatccctccgtaaagcgtatttccgtgagtggcgaaggtgaaccgctcaataacattcataccttttatgagttactggcgttgtcccgagggggcaacagctttgagtttattaccagcggtttttttcgccatgagaagatggaaaagatctttgatgagatcaatcgtcttgcctccgacaatggtgatacctgtaatattcgcctgagttcagatagccaccatattgaaaaagtaaaatggcgtgcacatggatttagcctggattatgttcagcgcaaaaaaccgtcatcgctcagtttttcatttcgctcaattgatatcgatcgggccttcactcgcgaatatctggtgagtgaactggcctcatggggaattaacgccagcataaagccagtcagcgtactggaagacaaattattaataggtgcggacacgtttaacatcgactacaaaaatctggttcatccggcaagagatacgccggagggttatctggacttacagggatatattgccgcgattgagtccaaagtggataaaccttttacctttggcagcctgaaccgtgcaccccagcctaatggcatggacgtgacaattaaacccaacggcgatgtgtttctgtacggtattgagaccgagcgtgttgcaaatatccattctgatgcgatcgactggcatcatctggcgagccatgtgcgggataatcccttgtcccgcgcgttatatacccagccgttaaccgaactgctggcgcggctagaagacacccctcagctgcgcgcgatcatcgcgaccgccaataatccttactggctggtcaaagagatggggaagcattccgggttgcttgaacaatggaaggcagcatga

SEQ ID NO: 151365 - DNA, 846 bp, Enterobacter cloacae
atgattgattcgcactgccactcgttctactcgaaacatgctgtaggtactatcgacgaacttgtttgtgcctcgattgctgcgggggtgacggtactcaccatcactgatcatgctccgttcccagtggatgcgcagaaccgtttgctggaatcggaactggagagctatttcaccgatattgataaggcgcagcaggcctataaaggcgagatcacgctgctacgcggactggaactcgattatatgccgggtactgagcgttataaccggcaattacttgcccgctatccaatggattttgtcatcggttcaattcactacgtcactgttgccgatgagccgatagtgaaggtctgggaactgccccggttagcggcagactcctttctggacaagtactttgctcagcttgaagcgttgctggaaagcaggttgtttgatgcggttgggcacgctgacacgctactgcgcgcgatcccaaaggatgtgtttttgcgtcgcgttgaaccgttgattgcgccgctcgtacgcagcggtattgcatatgaactgaatgcttcgggcctgcgaaaatctagccttgatcctacgacgggtaaagaaattgcaggaagatggtcctatccttcccgcgctttgctggagaaattactgaggaacaatgttccattgaccatcggatccgatgcgcatgatcctcgtgatgccggaacggggatcgccgagttgatggaggcacttaggccattagggcttcaatccatcagctattatcagcagcgtcaacgtattgatgttctgttggatgaccttcaatttcacactgtgccagtgtctcgctaa

SEQ ID NO: 151366 - DNA, 1131 bp, Enterobacter cloacae
atgaatggactaaaaactccgcattcacttgcgtggaacacgttgcacaacgaaccgctcgcaacccagttggcaatgtttcgccaggccagtgcacagatcaatgcgcaggatgttaaatccggttttcgcgcgttcgcgaccgatttgctggcgcgcggtttgatcgacatgtccgattacgtcgctatttttggtggtaaggcgctgtattatctgacgccgaatgcgactggatcattttgcgatatgcgcactggtgctgacgctacaacattggcgggcatttatagccgtgcgaaatatggcggagtgagcgagatacgctatctggcacggtgcgttatcgactatcttgccgcagaactggatgacacctcctcttcatggtcagggttgttttgcaaggccaaagaggagggagagagtgttgtgatgatgaccacgggctggcgtaatgtgccttccacggccaatgtgctctacgatatcgtggttgaggaaattaatctcacgttggcgcataaaggattgcccaccattatcaacgttaaactgcccaggattgcgccgccgtgtgaaaattatgccagcctcagccaggccgagcgcgatcgggtcaatcttgtgcaggatcatgtgattccagcggagaatttttaccgctggagcggcgtgcatgtcattttcggagatgacgtgctggtgactggggcaacggcggacaaagtgttgtatgaatcgctgtgtaacggcgcccggtcatttcgtgccatttacccagtggcgctagatccccgggtggcattaactgatgcgtcggtggaggatcggctgaacagcgtgagcgtaaagcagcatttggatgaaaacgtcgcgcaactgctctctgctccgggctatcagcccattctgcgtgcgttgcgtctgttatttggcgaagacaaccgggatagtttaccggctttcctgccaaatgtgccggtgctgacctggcttaatctgtataaatcagcgttaaataatgagtttttggctcagcctacatgcgcgccatcactggtgatgctcagaacatatctgatgcaaaatgggctgttgtgtgcgaaaggtaaggtgctggtgaaatga

SEQ ID NO: 151367 - DNA, 792 bp, Enterobacter cloacae
atgacgtccgacactacccattacgtcagttactgggaaaacgcaccgggtcagaccatgccagcttatgttgccctggcactggtttctatgcgcagagctctgggcgatcgttttcttctgcttacgccgcgaacggtaagcgagcacatcgatgctgacatcatgaataaagcttgggcttttgaaccgctgagctttacgctggcggacggcattgaagctattgtggcgaagagcgatttcattcgcatggcgtttgtgcatcgctggggcggggcatggttggatgcggatacgttgctgtttagagatccgagtgttgagttatttccgacagggctgagccataaattgcactggcatagcgagtgtattttcgcgtccctgccgggaaaccccatacttgcgcaagccttagctatagggcttgagagcgagaatcacgcttggggtaatcctgggagaatcaaaaatatcattgcccaggctgccgatgctgccatcccgattggcggggaggtcatcgatcccggataccgccctctttacaactttgctggttgcgaggtgatgcgtcgcaccgatattgccgtcggggcatttttgattaacgacgtggccattctcaaactttacaacacctatttccggcgtacagaagcccggagagaaaccgtggctgaattcctggcgggtggctcgctgctggcaaaactgtttttgcatattgaggcgaatgcggattactgggttgatgaaagtgacaaattgatagcttctgttgcctga

SEQ ID NO: 151368 - DNA, 1575 bp, Enterobacter cloacae
gtggccgggatcggccccctgagcaaaagactggtgagcatattgataagttttcagattttacgcaaagcggtttccaggttgatatttcgcctgctggcggacaaacctctgcccacgaaaacccccggcgaaaaactgcatattcttctgcttcgctgggacgcaaaattgggcgactccatcgtatcttctttcttttttcgcgaatcacgtaagctcaatgcacgattgactgtacttacggttaacgagttagctgaaatgcataccaacaccttcggtgtggatgaagtcatcgttacgaatccgcatccagggcttggtgaactacgcagattggtgaaccaactaagtaatgtcgatgtcgttgttcatctggttggacgactgcaacctgccgaaatcgtttttatgcggttactccgcccggcgagtctctattcccttgatgattcactgcgctgtgtgaatcgtaaaatgggttttgctgcaaacacgctcaatatcgtggagcagtacaaatatattctgcaggatctgggcgcgaaagtgatcgacacccagtacattgtgccgttgcctgccgagctcccgcctgcggcactttccccccaaatactttttaatccttatgccagccgaagagacaaggggctatccccttcccgtgcaaccgcagctctacaagctatcaccgacgagtttcccggctattccgtgggaattctttgcagcccttcaacgctgcacagcgcacagcatctggaaaacgcagttgcacgcgataatgtggcagtcttgcacgacgggctaacgcccgaaaaggttgcaggctatattcgccgcgcgcaggcagttgttagtgtggatactgccattgtgcatatggctgttggcctaaaagcgaagctggtggcgatctacccgttgattacaggtcaacacaacccatggctgccgcctcgctcaccttttacacaggtgatctacagcgagcaacagccagacacactccgtcgcacgggcaaaaaaaatatggatgctttttcgctaacgtcattaataaacgcattgcagactctcttaacactgccagcagaagcgaaaaaaagcatctcgcttaacgccagagtcatccccgggctaggggtagcaacgggtacgctggcgcgacaactgcccttaatctgtgaaaaatttcctgaagttgcaggctgttatgccggcacgatcaaccttgaattcagcgttcctgtcgcagtcgtgcgccctgatcaccgtaccgcgccgctggcctggactcccagtggacgcaccaccgagatattcgatctactgcgcattgaacttgaattcagccatttaactgaacgcatccccggatggctgtatattgcccacagctcgccacaccgccggacgccgaccattcacgaagcaatcgcgccgcgcattaacctcaatggcgccacgcactgtcgactccacttacccgctgaggctatcgtactgggcgaaagcggtactcaggcaacagaagctatcaatttgtcactttcatcaacccagtaa

SEQ ID NO: 151369 - DNA, 1179 bp, Enterobacter cloacae
atgagcgagatgagctatctggaaaaactgctagatggagctgaagttgagtggaagcgtttgggtgatgtggttcgcattaaaaacggtaaggatcacaagtcgcttggtgaaggcgaatttccggtttacggttccggtggaatcatgcgatatgcagacacctacgcctataacaagccttcagtcttaattccaagaaagggctcgcttggtaatctattcttcgtcgatgctccgttctggaccgttgacactattttttatacggaaattgatgaagcacaaattcatccaaagtatctttactacttcttgacgactgtaggtcttggcgaaatgaaccaagcaggtggcgtgccaagccagacacaatcagttttaaacaagctgaaaatccctatcccctgccctggcgccccggaaaaatcccttgctatccagtcaaaaatcgtccgaattctggataaattttcggcgcttaccactgaacttgccgctgagcttacggcacgtaaaaaacagtacaatcactatcgcgaccagttgctaagttttgatgaggatgaggttgagtggaaggctctgggagatataacaaaattaataaccaaaggaacgactcccaaaaaattcgtggatgatggtgttaattttataaaattagaaaactttgacaacaatagaatcaaaacagataagttcatgtttattcctgagagcgttcatttcaaggagcttaaaagatcaatacttaaagctaatgatattttatttgctattgctggggcaaccataggtaagtgtgcaattgtcgatgaaactttgctcccagcaaacaccaatcaagctcttgctattattcgcacgagcgagatggttaatgttagatttgttttttattacctacaaacaagatcaatgaaggaatatatagcaaggtttaataaaacctcagctcaacctaatctgaatttgaatcagatgtcgaattttaaaattccagttccatctattgaagagcaacttcgcatcgtttcaatactcgataaattcgatgcactgaccagctcaataaccgaaggtctaccccgagaaatcgagctgcgtcaaaaacagtacgaatattatcgggacatgctatttagcttcccgaagccgaaagtggcagaggcatga

SEQ ID NO: 151370 - DNA, 711 bp, Enterobacter cloacae
atgacacaggcagaacgtcgccatgaccggctggcggtcagactgtcactcatcatcggtcgcctagtggcgggcgaaactctgagcgtgacgcagcttgccgccgagttcggggtgtcggttcgcactctgcggcgggattttcgtgagcggctcatatacctagacctggagtaccgtcagggcctctgtcgactgcgtaccggaggtaacggtgcgcagggtgaactggatgtactgacctttgctcaccgcaccgggcttgctgatgtctttccggggtttgaccgcagactggtcagtgcgctgctggcgtcggatgatgcaccctgtctggtgtggcaactgccacatggggtgagtccttccggctcactggtgttttaccgactggtaaccgccattacctcccgccagcgggtgacgctgttggccgaagggcaacgctgtgagagcctggccccgtaccgtctgatttcgcagtcaggttgctggtatctggccggtgagtttcgggggcatatcatggtccatccgctgacagatattcacgccgtcacagtgctgaacaccccttttacacccagaaaaaccatcagccagttgaccagtcagcctgctttcatccacgcacttcctcactttagtttcattcgcgaggccctgttactgacctctcctgacagaagctcagcgggtagtgctgcttaa

SEQ ID NO: 151371 - DNA, 537 bp, Enterobacter cloacae
atgaactggcattacgagaaaaatggcatccgccacgacgatatcaccgaagaggaaatgacggagcgtgttaaacgcggcgaacttaccgcatccacactggtgtggcagccgggaatgacagactggcaacccttatccaccacctcgctgacggccgcgctggcgcattgcatcacaccaccggcactgccggggcacagcattccgggtggtgtcgtttggacactggcttttgccccgttcattggctacgcgcttgaactgtggacggcgggactgagcggtatggattttgaggaggcctatgacgccgtatcgggtggacagtactggtttattacattgctgctcaatatcgctctgggctacctggatgaaagacgtctgcgtaaggctggggtggatacggcagccttcggcaagctggcgtggctggtgccgttctatctctggcgacgggctaaatcattggggcagaaaccagcttatttctgggtctggctggtgatgctgttcctgacgctggtggcctga

SEQ ID NO: 151372 - DNA, 438 bp, Enterobacter cloacae
atgaaaccaatgttcagaacgctgctgatagcaggcagtctgctgacttgcgccacggtgcagggtgcgccttacaaccgggtattacctgctgcggtaaacaataaaggcggcaatattttctggtgtgatgcacaccgtcaggttaccgggaaatgtgaagctatgtttgctgatcgcagcggtggaatggtgaccgtacgttcagcaccgctcaaagactgcgagggtggattgtggggctggataagcatccggcgcgatgaagcgtcaaaaggtttcaccattacaccagaccagaaatttggtgtcaccgtaaaagacctgtgccgtcccgggacgattgccacctttatgcccaatcacaaaaagccagattacgacgacctggtggtgctgtaccagggtaaagagctgttccgctataaacgcttttaa

SEQ ID NO: 151373 - DNA, 399 bp, Enterobacter cloacae
atgttcaagatgattactgcagtatccgccgttgtgttgtcttttaccgctagtgcagcgcagttacccgaacaactgatggataaagacaatccgggcgagtcgtactggtgtcagggaaacgatatcaatagctctgtctgctcgctgagtggtgtcagtgacgaccataaatttgctttgattcaggactggccgggcactgcctgtgctgataataattttggtgttatcgacctggtacatgagaccggtattaatgtgccctacgatggcggtgagtgtcagggcgatgtgaaggccagtttcgtgcgtggcgcaaaggataacggtctgtatgtgaagattgtcaggggcagcaaaacgttgctgatgtacaaagttaaaaccggatactga

SEQ ID NO: 151374 - DNA, 246 bp, Enterobacter cloacae
atgacgcaataccgccaggagggggtaaataatctgactgtcagcgatctcctggcccgtcagtgggaagtggcaaaccgtcaggtgagtgttccggcggtactcctgtcccgcgtcctgcgtaactatgaatgcgagctggaaaaccggatcggtatggcctgggaagccgggcggcaggagcctgaatccgtcaggaatgagctgaaggacgttcacgcattacaggagacgctggccgcgtaa

SEQ ID NO: 151375 - DNA, 267 bp, Enterobacter cloacae
atgaaatcagatgttcaacttaatcttagagcaaaggaatcacagcgggcgctcattgatgctgctgcggaaattcttcacaaatcacgaacagacttcatcctggaaatggcctgtcaggccgctgagaacgtgatcctcgatcgccgggtctttaattttaacgatgaacaatatgccgaattcatcgacatgcttgatgcccctgttgcagatgatcctgccatagataaactgctggcaaggaaacctcagtgggacgtgtaa

SEQ ID NO: 151376 - DNA, 297 bp, Enterobacter cloacae
atgctgtatacggaattattttcggtctccgcaacgctgaggatacggaataaacgagtcgagacgctgctggtagaaatggcaaaaaccgttccatcccgcacccatgatggagtcgtcttcagggtcacgacgttgtttgcaacaccgtcaataacgtacttcacgaacttaccattgctacccatgatagacatggtatccccaccgccgataagcgaggagtcaacagcatcaacggtaattttattgcctgaatgcgacattattctgccgccgaggcgtgcgccggcatag

SEQ ID NO: 151377 - DNA, 558 bp, Enterobacter cloacae
atggctgagcccagtctacatgatttatttgcctatgacgaaacgtcacccacctgcctgatttggaagatatctccttcacggcgcacaaaatgtggtcaccaagccggcacgattaacaaggtgtccggtaaatatccgcgaaactattaccgagcaagagtgaatggcgggtatcaaagcgtgcatcgcatagtttggttcctgcatcacggggaagtccccgaagggctggcaatcgatcatgttgatggaaatacattaaacaacaagatcacgaatctccgattggtaacgccatccaaaaatgcccgaaattgccgaaggcaaaagaataatatttctggtcagactggagtaaggctggctatggataaagggagatttcccttctatgaggcctatgttcacattgatggcaagcaggtccgtcgccaattttatcaaaaaggcggaacacttgaagaggctaggtccagagcggttgactggcgaaaagagcagataaatcgacttaacgaacatggtgccggatacacagagcgccacggcaaataa

SEQ ID NO: 151378 - DNA, 348 bp, Enterobacter cloacae; identical to SEQ ID NO: 94621

SEQ ID NO: 151379 - DNA, 294 bp, Enterobacter cloacae; identical to SEQ ID NO: 94624

SEQ ID NO: 151380 - DNA, 255 bp, Enterobacter cloacae; identical to SEQ ID NO: 94625

SEQ ID NO: 151381 - DNA, 1221 bp, Enterobacter cloacae; identical to SEQ ID NO: 94626

SEQ ID NO: 151382 - DNA, 417 bp, Enterobacter cloacae; identical to SEQ ID NO: 94629

SEQ ID NO: 151383 - DNA, 315 bp, Enterobacter cloacae
atgcagcggcgtgctcagatcggtcttaacaagggagaggcccaccatgcgctcaaaaatgcgctccgtatcgggaggcagggggaaattcgcgatcgcacgacagaggggcagcactaccgaatcgctgggctcaatttattgactgcggtgatcatttactggaataccgtccatcttggtcatgccgtcacggagcggcggaacgaagggttggatgttccccctgaatttcttccccacatatccccattgggctgggcgcacattctactgactggcgaatatctttggcccaaggaaccgaaagcttag

SEQ ID NO: 151384 - DNA, 1239 bp, Enterobacter cloacae
atggttatcgaaactaaaaacaagaaaatatcaaaaatcgccttaaaaaaacttttcaacacaatattaaaaaaatcttcaattcgtcctccgatagaagtcagtaaaaataacgacctcattactgatttttctacaaaatgtgaaagatttaaagactgcttgaaagaatacatcgataacaataatgatgatatcttagccagtagagttaagagcagattaaaagttattgagtccgtgcaagaaggcatcataaattgtttagagtgctatctctccggagatatcaagtcagcctatgattcttttgaggaaatgctcgagccagattttgtatcaaggcatattaaaaatatctgcatacccttatcagagatatgtggtaatgaaaagcgtctatttagagttaggaaatctgaacgtcctttatcaacaagaaaagatatctttcacatacctttcaatcaacgccatctggttaatgcacaacgctactcagttgcaggtctaccgtgcctttatttaggcacctcattatatatctgttggcgcgaaatggacaaacccgattttgataagttgtatatatcatcatttactacaagttcagagagtgatgattcgctattgttagatttcagcgctgatttcctttatagaacaaagctattctttacaactaaaaaggactcttcatcggcaaaagagttttcctctgttaccatgttatcgtacctcgcgttatggccattaataattgcttgcaactatttaaaaaaatatagcaacgcatctttcattcaggaatacataataccaaacttacttatgcagtggataagcagggatattaacgattacaatatagtaggaattgcttatcgttcaacaaaactccctgcaaatgctgatagtgagagaggggtcaatgtcgttcttcctccaaaagttcgttacgaagacatgaaggttaacgaattctgcccagagctatccgccttatttcactgtaccccaccagtatcctggcaggttctaaaaactcttgaatatgtaccattgcgtcaatccttctctgatagagagagattgagtgatagcctcaggagtaaaaaggactgggatgtaatgggcaatcttgatgacgaaattttgagcatttataaattatcagacttttacaagcttgaagtgtgtatggatgaaattcaagtctatgacgatataaacgcataa

SEQ ID NO: 151385 - DNA, 936 bp, Enterobacter cloacae; identical to SEQ ID NO: 94613

SEQ ID NO: 151386 - DNA, 378 bp, Enterobacter cloacae
atgtcctatattgatatcacctatgatgcaagaatgagcaccaatatctacattatccccaattacagtcatgccgattacatcattggacgttttccttccaatcgtcgtgttctgacgaatatttgcatttttccctatcttacattcagaacggataactatacctacatagtgattgagtttcatgccttcaccgatttgcgcttcgatactaatgtcagcaccatatttgcaacgcagattagcatttatcttccttgcccatttctgatatcgtctggacgtggtctgattcatgtaattagcaagtcgccaccaaaagtaaaatctctttttatggctaaaaagcacacggtgaaagactttaaaccatga

SEQ ID NO: 151387 - DNA, 468 bp, Enterobacter cloacae; identical to SEQ ID NO: 94611

SEQ ID NO: 151388 - DNA, 180 bp, Enterobacter cloacae
atgttggccttcggtagatgcacggcaatagatacggacattcattatacattctcttttaaatatcaaattgatacccatatgatacagtgcgtgtttttattgtcaatagagtcaaatttaaccctattgatactttgtatcatggtctttatcaggtatacccgaatgagacgataa

SEQ ID NO: 151389 - DNA, 465 bp, Enterobacter cloacae
atggaagacaaaaataacctgtcgagcgaagtaaagaaccacgtaagcaagtgggggaagacaaacatttctgcaggatggacgattatcccaaatgccttactggaaaatcagtccaggttgggtcttagctgtattgatacgatggttctcataaacctcataatgcattggtgggaaaaagataaccccccaagaccttcgaaaaagagactggcgaacatgctgggcgtttcactaaaaaccgttcaaagaagttttattcatttggaacagtgtggtgccatcaagcggatacctcgatacaaagaagggaaagacaatgccagaacaacaaaccattacgatctgaacggactggtagacctgctggaaggtttttcgaaagagctcatcgaagaaagagaggcgaatcgaaaaagtgaagttaatagacctaagaagcgcggtaatccgaaaagttaa

SEQ ID NO: 151390 - DNA, 567 bp, Enterobacter cloacae
gtggcggtttttagacaatgcgaaattagagaaaaatatctcgcgatttacaaagagtcattcgatgaagttataacttatcttgagaaggcaggcgctttagagcccggcgttttaaggctcactacaatcgatgacaatgctattcgtgcatggaagagccaatggaaaggcaggtctcgtaagcacgctcatggtgcttgggattggcagaaccttgtatcaaagagagctcgttcttgtaaaagatttgatgtggctgtttggggagaggatgtgctttgtgggctttcagttggaaagctaacccgtggtaaaaagacagttagaatggattatctagaggcttgtccaaccgctcatccgttggagaaacgaatcacaatgattgtggttgctgtggctctgtcagtagctaaaaaagtaggggcacagcacgtagccatattcaacccgataaaagacaaagaagaaaaagtgttaaaacactaccagtcttacgggtttacacaaagaatgttgtatggacgctttttgaaaaacgtgctgtacaaagaagttgtttga

SEQ ID NO: 151391 - DNA, 201 bp, Enterobacter cloacae
atgattgatgatcgtacacgacaacttcgtgtagacggattccgtaaggccgaggcttctctccggcttgaaggcatggccccgtccggaaccccgctttatgagtccgtaaaggcacggattctttccggtgacattaccttcgacgagggccgtgctgaaatacgggctcattaccagaagcggtcgaactttaactga

SEQ ID NO: 151392 - DNA, 492 bp, Enterobacter cloacae; identical to SEQ ID NO: 130265

SEQ ID NO: 151393 - DNA, 1365 bp, Enterobacter cloacae
gtggtggttcgcgataaggagcatcagacgcaggacgtggcggacctgagccgcgacacggcgaatgcaaacggcagcatcgacgccatcttcgataaggagaaagagcagcgcagaatggaggaggcgcagcttatcggggaaatcggcagccaggtggcggatatcgcccgcacgcagggtgagataaatgcgctggaggaagcgcgtaaggtacatcctgagatgaccaccgaccagctgaaagacactcaggcctaccgtgacgcgcaggcagaatacggcacgggcagcgacatgcagcgcgccatccaggcggctacctctgccgctcagggtctggcgggcggtgacatgaccgccgcactggccggagccgccgcaccgtacgtggcggaggttatcggccaccgttccgggctggacgatacgatggaaaaagccgccgcccacgcggtggcgaatgcggtgctggccgcgatgcaggggaaagacgcgcttgcgggtgcggcgggtgccgccgccggggagctggcgggcggaattgcgctggagatgtacgggaaggatgttgctgcgctgagcgaaagtgaaaagcagaccgtcagcgccctggctactcttgccgcagggatagcaggcggcgttgcgggagacggcacggcaagtgccattgcgggggcgcagtccgggaagacggtggttgagaataacctgatggccgggagtgaggatgcacaggttgcgtggctacaacagcacggaactgatatgacgagctgtgcagatgccccctcttcagcaagctgccagaaagcaatgaatgaacgggatgccgtcggactggcactggcaagcggtggcgtggcgttattgcccggtggtgctcaggtaatgtgggggcttggtgctggcgctaatgccggggtcagctattgggtagatggcgcaattgacccggcgaatgtcgccatcgctggttgggtaaacatattcagtatggggaacggaattacaggtaccgtgggctggaatgcggcaggtggtgcgctgggtaactggattgacaataaagacccactttctagtgcacttatcaatggtgtcggtgcgggtattggttatggtattggtaaaggactttcatggggcgttaatgccggggcaaactggtggaaaggcggctgggatccgaagtttaatgctgacctgagacagtttactgaagtaaaaggggattatggtatttcaaaagaaattaaaccaagcgatattcctggtaatttcggtgacattggagcctctttctcctccgaatatggcggtaaaaaacttgaaccattcattgaggataagtttaaatga

SEQ ID NO: 151394 - DNA, 249 bp, Enterobacter cloacae; identical to SEQ ID NO: 141188

SEQ ID NO: 151395 - DNA, 945 bp, Enterobacter cloacae
atgaataacaacgcaataaatgcattactctcttgtaaaactcccaaagacattcaggcttgcattaatgcaggctccgatattaatacactggattcgtttggaagaaatatactgttttactgtaaaaacccaagaatgattgacactctggttaaagcaggaatagattttaaccatgctgacaactatggtcacaatgttttgtttaaccagcgaaatcctcacatactgaaaaaattgattgattccggcgtagatatacaccacaaaaatggtctcggccaaacctgtttatgctcgttagctgataatatatcctgttgcaaaaccctgatcaatgctggaattaatgtcaacaatgtggataaatgcggaagaacaatacttttttacgtaaaaaatcactctatctttgatttgatggtacaggccggttgcgatataaaccacagagataaccagggtcacggtatttttgaaatttgctattcattaggcgatttcaaagccaaaatgctcattcgtcatattagtatgaaggatagcagtccagtaattttcaactacctcaacagcgaaagtctgcagataatggatttgcttcagaagaaaaaccttaactttactatctctgataactgccaggtttatctaagtgccaatgaaaatgaaatgagctctttcttcagtgaactaaggaagaagacagatatcagcaacacacattttcgccatattgtactgcgaggttatgatttacgcgaggacattgaaaccattaaatggtttatccgcaatgacatcaaaatggataaaaaacaactggaacagcatattcgacatgatgagatttgtaaatatatagcagaacatgagaaaaagaaacttagcgaaattatgaaacaaacaatctctttaatgcccgtaaaacgtagattgtaa

SEQ ID NO: 151396 - DNA, 225 bp, Enterobacter cloacae
atgacttttcgtctgtttaaactcgaaataagatgtacatcagcgacagttgagtctatttcgaaaacatcacccggcaaaacagttgtattagccacactacctaaaagcgcccgcattttgaggtctatttcttttttcgtgtccgttaactttataatgatacgtaatgagagattttctaatattatttatatctctttcattaagaatgaaaacacgtga

SEQ ID NO: 151397 - DNA, 654 bp, Enterobacter cloacae; identical to SEQ ID NO: 103908

SEQ ID NO: 151398 - DNA, 1035 bp, Enterobacter cloacae
atggtagagtttgctcctattaggcctcatcgacggtatataaaaaactctgaagattttatccgtgcattcaagaaaagactcagtgacatgattagccaggaaagcaaatttatctgcatgatgaaatattcatttttattacgaataattgacgtttatgtgaattttcgactagatgaattatcattatctttagattttatggagaaagaacctacagatgcatttttaaatagatctattgattcaatgatacaacgactctgcaacattgcagtagaaaggaatggagatcccgatttccctacagattttaatgaacaactaaaggctgattacggtgatttacaacaaatagcagaatgtatagacaacatttcaccctcattgataaatagccactttggtagtagttcattatgtttcaagataaaatttaaccatgataatcatcatatagttaaaaaattatgtcacgcattcggttctgaacgcatcatgaggatgagttggattgggatcagttcgggtgctaaggcctatttgactttacttgcagttcttaatgataaactgaaagggacacgcaatgatactttgatttgtatcgacgagggtgatttgtatttacatccagcatggcagattgattttttgcataatttaaataagatgctgcctaagttctttaatgctaaattacaattagtcctaacatctcactccccatttttgctaactgacttacctcgtgataatgtcattattcttgaggataagcatgttgttaataaatttgagtttcctgtaaggacatttggttctaacctttatgaattgtataataatgccttcttcctagaaggtaaacgatttggttcttttgctgaagcgcacattaagaacatcacgaacaaaatcaaagatagtgagcttcaaggtgcagaactcgatagcgtcgaaaaatttatcgatatgattggtgataaactgcttagaaatgttttaaaaggattactaaaaaatgattaa

SEQ ID NO: 151399 - DNA, 222 bp, Enterobacter cloacae
atgaactacccgggccttgaacacctgcgcgcggacgtggccgcgctcagcaatgccatgtgtgacgtgcggatgctgctgaaccgtctcgaatctcagcaccggcacgacgcggcaacgctggctgaacgtatggccgcccagacccttcgccggatcaacaccctgcttcttgaagcctaccgcgaagccctggtgctggacgaaacctttcaggactga

SEQ ID NO: 151400 - DNA, 549 bp, Enterobacter cloacae
atgcaatataatatccctacgttgctcactctctttcgtgttgtactcattccgttcttcgtgctggcgttttatctgccggttgtgtgggcaccttttgcctgcgcattgatcttccttatcgcagcggtaacggactggtttgatggctatctggcgcgtcgctggaatcaaagcacccgcttcggcgcgtttctcgatcccgtagcggataaggtcatggttgctatcgcgatggtgctggtggctgaacactatcatacctggtgggtgacgctgcctgcggcaaccatgatcggccgtgaaatcatcatttctgcgctgcgtgagtggatggcggagttgggtaaacgcagcagcgtggcggtctcctggatcgggaaagtgaaaacgaccgcacagatggcggcgctggtctggatgctctggcgtccaaacgtctgggttgagtgggcgggaattggtctgctgtgggtagcggcagtgctgacgctgtggtcaatgctgcaatatttgaacgctgcgcgcggggatttgcttgatcagtga

SEQ ID NO: 151401 - DNA, 246 bp, Enterobacter cloacae
atggctgctgtgtgtggcaataaacacctgcgtctgccgttcagtggcaagctgattaaccagcctcttcatactgacatggctgagatgattttccggctcctcaagcaacagtacgtggagctctccctgctgctgatgccgctgcagcgcaaactccgttttgatgaagcactgccttccttttccacggtgacgaatggaaataccgtcctcggtaatgtccagattcgcctcaagccctga

SEQ ID NO: 151402 - DNA, 420 bp, Enterobacter cloacae
ttgcagcagcgcgagcgtctcccgcacggcatagccattcgggaaaggaccaaaatattcccccttcgcgtgttttgcaccacggtgcatcgccagacgcggatgagtatcgccactgagaaagataaacggataggatttatcgtcccgcaacagcacgttatagcgcggttgatagagctttatataattgtgctcaagcagcagggcttcggtttcggtatgcgtgacggtgacatcaatattatgaatgagagagaccagcgcttcagtcttacgggaggcaaggttgctgcgaaaatagctggaaaggcgttttttaaggtctttcgccttccccacatagataaccgtaccgccagcgtcatacatccgatagacgccaggctggctggttaccgttttcagaaatgcttttga

SEQ ID NO: 151403 - DNA, 333 bp, Enterobacter cloacae
atggtttttgtcccactcaacgtcgagcgattcaaataccgctttcgcctggccaagctggcctttaccaccgtcaatcaggatcacatccgggatcttgctctcttcaatcgctttaccgtaacgacgacgcagcacctgattcatggcggcatagtcgtcccccggcgtaatgccggtgatgttatagcgtcgatactcggcgcgcagcgggccattagcatcaaacacgacgcaggatgctaccgtctgctcacccatcgtatggctgatatcgaaacactccatacgtttcacttccggcaacttcaggagcgttgccagcgcggttaa

SEQ ID NO: 151404 - DNA, 258 bp, Enterobacter cloacae; identical to SEQ ID NO: 34591

SEQ ID NO: 151405 - DNA, 171 bp, Enterobacter cloacae
atgagttatgtatctgagcgcaaaagtgagctggtaaaggcacagcaacgcaaaatggatccatcctctcctgattcagctccaatcaatcagggtcttatggacttcatcctgcttgctatgaaagtagatgacggctttgttcaacgtggtcgtattcacggcgcatag

SEQ ID NO: 151406 - DNA, 552 bp, Enterobacter cloacae
atgcttctggaaaaacgtggcagtaaagtccttcagatctttaatcagcgtgttatcggacttcgcccagttcatggtgaagtcgaaactgttcttatcccgctttgtggtattggcaaagtagcgggtatcggtgccgttagaaatgacaaacagttgcagatatttaaacagggaattgtcaccgttaaagctttccttgctataacggtgtatctggttaaaggcttcacgaattgctacaccgcgttttttcagctcgatttgaaccagtggcaaaccattgaccaggatggtgacatcgtagcgattggcatgcgtgccggtttgctcgaactgtttgatcacctgcactttattgcgaagagtgttatttctatccagcaggtagatgttctgaatacggccatcgtcgaagacgaaatcatgaacatagtcatcatgaatcttacgggccttttcgacaacgccatcgctgggcttgtccatccaggtttccacaaaacgacgccattctgcttccagaaactccacattattaagggcttgtaa

SEQ ID NO: 151407 - DNA, 426 bp, Enterobacter cloacae
atgcagttcgcggccaaacacgctggcggtggtttctgcgcccaatgcgttttgtgggaaaatgggggtaccggtgaagccaaactgatagaagcgtttgaatttcttcttcaggttcttctgggcctcaccgaactggctgcggtgacactcatcaaaaataaagaccacctgtttgttgtaaacaggaaggtctacttcccctttcatcaggttattaagcttctgaatggtagtgacgatgattttgttatcgtctttatccagattgcgtttcagacccgcggtattatcagatccattgacgctgtccggggagaagcgctgatactctttcatggtctggaaatcgaggtctttacggtcgaccacaaagaagactttatcaatgaagtccagttcggtcgccccgctttccggagttga

SEQ ID NO: 151408 - DNA, 141 bp, Enterobacter cloacae
atgaaaagcgtctatttagagttaggaaatctgaacgtcctttatcaacaagaaaagatatctttcacatacctttcaatcaacgccatctggttaatgcacaacgctactcagttgcaggtctaccgtgcctttatttag

SEQ ID NO: 151409 - DNA, 1365 bp, Enterobacter cloacae
gtggtggttcgcgataaggagcatcagacgcaggacgtggcggacctgagccgcgacacggcgaatgcaaacggcagcatcgacgccatcttcgataaggagaaagagcagcgcagaatggaggaggcgcagcttatcggggaaatcggcagccaggtggcggatatcgcccgcacgcagggtgagataaatgcgctggaggaagcgcgtaaggtacatcctgagatgaccaccgaccagctgaaagacactcaggcctaccgtgacgcgcaggcagaatacggcacgggcagcgacatgcagcgcgccatccaggcggctacctctgccgctcagggtctggcgggcggtgacatgaccgccgcactggccggagccgccgcaccgtacgtggcggaggttatcggccaccgttccgggctggacgatacgatggaaaaagccgccgcccacgcggtggcgaatgcggtgctggcggcaatgcaggggaaagacgcgcttgcgggtgcggcgggtgccgccgccggggagctggcgggcggaattgcgctggagatgtacgggaaggatgttgctgcgctgagcgaaagtgaaaagcagaccgtcagcgccctggctactcttgccgcagggatagcaggcggcgttgcgggagacggcacggcaagtgccattgcgggggcgcagtccgggaagacggtggttgagaataacctgatggccgggagtgaggatgcacaggttgcgtggctacaacagcacggaactgatatgacgagctgtgcagatgccccctcttcagcaagctgccagaaagcaatgaatgaacgggatgccgtcggactggcactggcaagcggtggcgtggcgttattgcccggtggtgctcaggtaatgtgggggcttggtgctggcgctaatgccggggtcagctattgggtagatggcgcaattgacccggcgaatgtcgccatcgctggttgggtaaacatattcagtatggggaacggaattacaggtaccgtgggctggaatgcggcaggtggtgcgctgggtaactggattgacaataaagacccactttctagtgcacttatcaatggtgtcggtgcgggtattggttatggtattggtaaaggactttcatggggcgttaatgccggggcaaactggtggaaaggcggctgggatccgaagtttaatgctgacctgagacagtttactgaagtaaaaggggattatggtatttcaaaagaaattaaaccaagcgatattcctggtaatttcggtgacattggagcctctttctcctccgaatatggcggtaaaaaacttgaaccattcattgaggataagtttaaatga

SEQ ID NO: 151410 - DNA, 453 bp, Enterobacter cloacae
atgtcacgcgtctgggggatgggcacgtcagcatcgagcgatggtcagtttttcccgacagcgcggcatggcgaagccatgaacatggtcaatgccaaatatggttctgttcccggcctcaaagcgtatactcacgtaagcgaccagttcgcgccattcgcttgtcagtcgatcccggcgaccgtgagcgaggcaccgtatattctcgatggactactgatgaacgaggtcggtcgccatgttcgcgaacagtatgccgatacagcaggattcaccgaccatttgttcggagccagtagcctgctcggctacaatctcgttctgcgaatcagggatctgccatcgaagcggttgtacgtatttaatcccgatacgacccccagggagttacgcaagttggtaggtggaaaagcccgggaggatcttatcgttgcgaactggcctgatatttaa

SEQ ID NO: 151411 - DNA, 549 bp, Enterobacter cloacae; identical to SEQ ID NO: 151400

SEQ ID NO: 151412 - DNA, 150 bp, Enterobacter cloacae; identical to SEQ ID NO: 143600

SEQ ID NO: 151413 - DNA, 144 bp, Enterobacter cloacae
atggcattgatggctctggtactgcctgggcgccgcaagcaggatctggaattgtatgcgggtatgacccaactcgccgacagcaaatatttacaggagcatccggcaatctttttgtccggaacctgggtagtgctgctatga

SEQ ID NO: 151414 - DNA, 171 bp, Enterobacter cloacae
atggttgccttctttgatggtgagctgattaatgaccagaaattcattattagtgggatcgttaaagtcgatcaggcaggccagctctccttgtgtattaccatccttgctgacttcgatattgattccttcggtcaacaggcgatgaaaggccagattgtttgtcattag

SEQ ID NO: 151415 - DNA, 198 bp, Enterobacter cloacae; identical to SEQ ID NO: 94790

SEQ ID NO: 151416 - DNA, 1992 bp, Enterobacter cloacae
atgttcggaaaattgacactggatgcagtgccctaccatgaaccgattatcgtggttacggtggctgcaattatcattggtggcgcggccttactggccctgatcacttacttcggtaagtggagctacctgtggaacgagtggctgacttcggttgaccacaaaaaactcggtatcatgtactgcatcgtcggtatcgtcatgttaattcgtggctttgcggatgcgatcatgatgcgtagccagcaagcactcgcttctgcgggtgaagccggcttcctgccgccgcaccactacgatcagatctttaccgctcacggcgttatcatgatcttcttcgtagcgatgccgctggttatcggtctgatgaacgtggtcgttccgctgcaaatcggcgcgcgcgacgtggcgttcccgttcctgaacaacctgagcttctggttcacggttgtcggcgttatcctggttaacctgtcactgggtgtgggcgaattcgcgcagaccggctggctggcatacccgccgctatcaggaattgagtacagtccgggcgttggcgttgactactggatctgggcgcttcagctctccggtgtcggtaccaccctgaccggtatcaacttcttcgtgaccattatcaagatgcgtgcccctggcatgaccatgttcaagatgccggtatttacctgggcatctctgtgcgccaacatcctgattattgcctctttcccaattctgaccgtcaccatcgcgctgctgaccctggaccgctacctgggcacccatttcttcacgaatgatatgggtggcaacatgatgatgtacatcaacctgatttgggcctggggtcacccggaagtgtacatcctggttctgcctgtcttcggtgtgttctccgaaatcgcggcaaccttctcgcgtaaacgtctgtttggttacacctctctggtgtgggcaaccgtgtgtattaccgttctgtcgttcatcgtttggctgcaccacttcttcaccatgggtgcgggcgcgaacgtaaacgccttcttcggtatcactactatgattatcgccatcccgaccggggtgaagatcttcaactggctgttcaccatgtaccagggccgtatcgtgttccactcagcgatgctgtggaccatcggcttcatcgtgaccttctccgtaggtgggatgaccggtgtactgctggcggtaccaggtgctgacttcgttctgcacaacagtctgttcctgattgcgcacttccataacgttatcatcggtggcgtggtcttcggctgcttcgcgggcgtaacctactggtggccaaaagcgttcggcttcacgctgaacgagaaatggggtaaacgcgcgttctggttctggatcatcggcttcttcgtggcatttatgccgctgtacgtgctgggcttcatgggtatgacccgtcgtctgagccagcagatcgatccgcagttccacccaatgctgatggttgcagcgggcggtgcggtgctgattgcctgcggtatcgcgtctcagctgattcagttctacgtgtctattcgcgaccgcgatcagaaccgtgacctgaccggtgacccatggggtggccgtacgctggagtgggcgacctcttctccaccgcctttctacaactttgccatcgtgccgcaggttcatgaacgcgacgcattctgggaaatgaaagaaaaaggtgaagcgtacaagcaacctgctcattacgaagagatccatatgccgaaaaacagcggtgcgggcattgtcattgccgccttcgctacggtatttggtttcgcaatgatctggcacatctggtggatggcgattgttggcttcgctggcatcgtaatcagctggattgtgaagagctttgacgaggacgtggactactacgtaccagtccgtgaagttgaaaagctggaaaatcagcatttcgacgagatttctaaagcggggctgaaaaatggcaactga

SEQ ID NO: 151417 - DNA, 318 bp, Enterobacter cloacae
atgcgtttcgccagtcgcttctgcctgagtgattctttcctgcagttcatcgaaatgttgcaggttatctggttgccagccatccagggcttcaaccgaaaatgcggagaagtcgaccccatcagggagccagttttcactttgcgccttggtcagccatggcgaggatattttttcaaattcaccaatgccgataacgcgatcgccatatttaccgagatcaaggacatcgttaaattctttaccttcaacttcctgttgccagcgcgacaacagcgattggcaatcatgccattgctgttcagtgaattgacttag

SEQ ID NO: 151418 - DNA, 270 bp, Enterobacter cloacae
atgttcaatcgaaatattgtgctcccgattaatctgagaaatgaatgcgctaagatgctcttgcgatgcatgaagggtagtggcaataaggttatcaaaatcgttctgagtaaatcgtttgtgtcccttcaacgtcgagtgctgaagcagagtgtgtgcggtcacttccatgacggcccgccggtaatgatcggacagcaggacgtcaagatcggtctgacgaatatcaaactcaaaataaaagctgacaaatccagattcaacaggtaa

SEQ ID NO: 151419 - DNA, 216 bp, Enterobacter cloacae
ttgcaccttcagcttcggttcggcatcttcttgcagatcgttatcccaataaaacaagtcctcggtgaaggcattgtaatagaggatttttttgcgcgacaactcggattgttcagcttcgccatcaccttctccaccattgactttaggcgcaatcagttgcttgaaatcccgagaaagacgcgtctttcccgtgccattgaaagcgtagattaa

SEQ ID NO: 151420 - DNA, 1365 bp, Enterobacter cloacae
gtggtggttcgcgataaggagcatcagacgcaggacgtggcggacctgagccgcgacacggcgaatgcaaacggcagcatcgacgccatcttcgataaggagaaagagcagcgcaggatggaggaggcgcagcttatcggggaaatcggcagccaggtggcggatatcgcccgcacgcagggtgagataaatgcgctggaggaagcgcgtaaggtacatcctgagatgaccaccgaccagctgaaagacactcaggcctaccgtgacgcgcaggcagaatacggcacgggcagcgacatgcagcgcgccatccaggcggctacctctgccgctcagggtctggcgggcggtgacatgaccgccgcactggccggagccgccgcaccgtacgtggcggaggttatcggccaccgttccgggctggacgacgggatggaaaaagccgccgcccacgcggtggcgaatgcggtgctggccgcgatgcaggggaaagacgcgcttgcgggtgcggcgggtgccgccgccggggagctggcgggcggaattgcgctggagatgtacgggaaggatgttgctgcgctgagcgaaagtgaaaagcagaccgtcagcgccctggctactcttgccgcagggatagcaggcggcgttgcgggagacggcacggcaagtgccattgcgggggcgcagtccgggaagacggtggttgagaataacctgatggccgggagtgaggatgcacaggttgcgtggctacaacagcacggaactgatatgacgagctgtgcagatgccccctcttcagcaagctgccagaaagcaatgaatgaacgggatgccgtcggactggcactggcaagcggtggcgtggcgttattgcccggtggtgctcaggtaatgtgggggcttggtgctggcgctaatgccggggtcagctattgggtagatggcgcaattgacccggcgaatgtcgccatcgctggttgggtaaacatattcagtatggggaacggaattacaggtaccgtgggctggaatgcggcaggtggtgcgctgggtaactggattgacaataaagacccactttctagtgcacttatcaatggtgtcggtgcgggtattggttatggtattggtaaaggactttcatggggcgttaatgccggggcaaactggtggaaaggcggctgggatccgaagtttaatgctgacctgagacagtttactgaagtaaaaggggattatggtatttcaaaagaaattaaaccaagcgatattcctggtaatttcggtgacattggagcctctttctcctccgaatatggcggtaaaaaacttgaaccattcattgaggataagtttaaatga

SEQ ID NO: 151421 - DNA, 228 bp, Enterobacter cloacae
gtgctcaaccgcaaaatccagggcgagcagagactgcagatagtggtaatcagaagtggagaggttgacgcctttgaacacctcaagattgtggcggctgaactgcacgccataatcgccatccagccatcgccgcaggcggaacaaatactcgcccataatgaggtgaaggttagcggattcatcatccggactgactccttgctcccacaggcttacgtggtgtag

SEQ ID NO: 151422 - DNA, 216 bp, Enterobacter cloacae
atgacagagctggaaaagcagttgctgagggcattagagcagctacagcaggactactcgcaaaggctggacgaatgggagagcgccttcgcggaatggcggagcatgtgtgggcttatgcaacgggagaacgcggtgctgaacgagcgcgtgtcggacttgagcacgcaggtgctgagtttaagcgagcagctgcgccgcttgtccgggaactga

SEQ ID NO: 151423 - DNA, 1224 bp, Enterobacter cloacae
atgaaatatgattttgatgagtacgtaagcagagagaaaacagacagtctcaccgtggacggctggcgggaatacctgttttcgggacagtccgaatttgcaatgcggtatccggcagaagggctaatcaacctctgggttgctgacatggcttttgccacaccagagccgattcttcaggccatcagagaccgtctggatagaaaaatactcggctacactaaaatctacgacgaagaatactatgagatctttggcagctggtgtgagcgacaatatggtcaccgtttcaaaacggaagacattgtgctgtctccgggcattattcccgcgctgaaccgtctcgtcccgcttctgaccgacatggatgacagtattcttattatgacgccttcatatggcccgtttaaaaaggcgggtgaatacagtcagcgtcgcgtggtgtactcggcgttaaaaaaatcagcaggcggctgggaacctgactgggaagactttgcacgcaaagccagtcaggccgatttacgtgtgaaaattcttttcctgtgtaatccgcataacccgaccggacgagtctggcggcctgatgaacttaagcggattattgaaatttgcctggccaatgacatctgggtgatatctgacgaaattcactgcgacctgtcccgaagcggtatcggtcatacaccggccgcctctcttttccctgattctacacgcattattacctgcatgtcctcgagtaaaacattcaatctggccgggaatttgttggcaaatatcattattccggatcccggtgtcagaagcgagtggcgtctcagacacgacgagttcatctctccactgagcctggcagcaaacaaagcggcgtggagtgaatgtgatgactggcttgtccatctgagggaatatattgacggcaatttccagtacctgcacgactatctcaaaagctatttacccgaaaccaggttctcgatccccgaagggacatatctggcctggatagatattagccgctacctgcccgacaccgcaggtgaggatttatcgctgtattttgcccgggagtcaggggtccttcttgaagggggcttgctgtttgtcgacaatggggacggatatatccggttaaatctggcctgcccacggagtatgctgacagcagggatgaaaagaatttcacaggtactgcggataccggctcctcatcgtgtataa

SEQ ID NO: 151424 - DNA, 303 bp, Enterobacter cloacae
atgaataacgtggtttgctttctgtacgttaaccccaaaaccaaccgcgacggtggagagaatgatcacgccaaagccgggttgggcctggaaatcatcaatcagtcgctggcggttattctgactatgacttttagtgctggtgtcgccgttgatgatcactggacggaaaccaaatcgctgttgaatagcgtgttgtatctcgcgctgaagatcgcgcagctcagtaaagatgattactttgtctttgctggtgtgcttaatttcatccaatgttttcaacatccaattaagcttgggtga

SEQ ID NO: 151425 - DNA, 498 bp, Enterobacter cloacae
ttgcctctttatctcagccagttactactgaaattacaacagcattatcactatcttgttgagcagattaaagatctggaatctcagttgaaacgaaagttggacgaagatgaggttggacagcgcttgctgagtattccctgcgttggaacgctgactgccagtactatttcaactgagattggcgacgggaagcagtacgccagcagccgtgactttgcggcggcaacagggctggtaccccgacagtacagcacgggaggtcggacgacattgttagggattagcaagcggggcaacaaaaagatccgaactttgttggttcagtgtgccagggtattcatacaaaaactggaacaccagtctggcaagttggccgactgggtcagggagttgttgtgtcggaaaagcaactttgtcgtcacctgtgctctggcaaacaagctggccagaatagcctgggcactgacggcgcgacagcaaacttacgaagcataa

SEQ ID NO: 151426 - DNA, 378 bp, Enterobacter cloacae
atgagcaggaatagcctgtttcgggtacttcaccgctttgatggtgtcgccatacaatttcattactggaatgccagatgtatagaagaaattgtccagttcacgctcccagttatccagaagagagacaggggcaacgatgaggctgggtggctcgtcagggaatttttcaatgaaccaaaccaaaaagctcaggatctgcagcgttttccccagccccatatcatccgcgagcaggcaacctgtagtttcctgaggcgaacgaaggaaaagctgttggagccaggccacgccttcacgctgatggtctttgagccggatgtgttctttaaggctcagtggaatttcaggctcggcatgacgcgcattgaggagtga

SEQ ID NO: 151427 - DNA, 171 bp, Enterobacter cloacae
atgccgctttttaaagtcaaaggctcaaagaccaaaagctttggaacgatacaccattcggctactcggataatttgtaccagctcagagcccaagtgctggccgctgatgctcacaacgctttcccacgtaagattgctagcgcaactttccagctacaccagacattaa

SEQ ID NO: 151428 - DNA, 993 bp, Enterobacter cloacae
atgtatctaaatcaatatgctgagcagcttattagctcttttattagtgtgattccaataatcttgattatattgcttgttttggtttttttgcgtgggccactaataaaatttatttcgcgaaatttattggattcagggaaggatcgttatagttccaatacgaaaaacgaaagttatgaaatcaataatcatgtcattaatcagcaagtgtccgaagaagatttaagggagtctattcgcgaggtgttgataagtgaggctgggcaaggatattttgagaagtataaagaaaatattagtaagttaattgatgaaagacaggatgaacttacaagcgaaacattgtcaaggatatattctgataaaaaaatagaagatgttattactgagtctataaataactctgttgataaagtaaccaataatttgattggtgatagtgagcagtttcgcgctcttgaaaaagaaacgcttgaaaaattgagtttgataaaaacagcctcattccttgagcatttgcaaaaagaatacgatgcaaccagaattacaaaagcattaatgagtaatatatttatagttgttaatctcatttattttttaggtttactggtgtttttaataacaggtaggggtgggatggcgacgtcaggtgtctatgtggctctgtcatgctcctatattggattgggggcgtttgtggtctacatgataaagttttgcaatgccaggagtctgacactgctatctcttcgcgaggattttctaaagcgggatgagattacttctatggcaggcaaggtaattgaaattggtgcaaatgaacatcatgttgctttaatgcagttaatgacctcgagcattgcaataaaagaacagaaaataaaccatccttatgaaatgttattatatggtatcaaggattcaaatataatgtttaaaggtggtaagttcgagattaagaaagaagttgcagagaaaagcaagccatag

SEQ ID NO: 151429 - DNA, 690 bp, Enterobacter cloacae
atgtactataacaatgaagtcaccagctatttacaatcaaacaatattctagcattaaagctggaccatgcgcttacaggtgtcagaacaatggtttccaatcagattgaaatcatcggcgctggtgctcaacgcgccatttattatacatcatgctttactgataattatcaggatgtttgtagaaaacaaaaaacagaagatatccgattcagaaacagtgtaatttatcttctacgtcatggtaatgttgcgtatgacatgctaaaaatatattttaacgagataataaaatataaaacaacagatcaactcgagcacattaaacaaatattaatggcgttaaatgtgcatatcgctgccagctctctcacaaatacagggtttgcgctagctgttgcttctgctgttgacatcggcatgaatcttagtctcgaaatgagtgctcttgcaggtcggtggacatcaggagggattgcggtgattggcatgtatggtgccgtacaaaaagcggctgaaagtgcgcaacggctgaagtttctgtctcccccctattacgcagcgttgtacgcacgagagctagaaatgatgtatttcctgattgaaccattatttgaacgagcaaatgcattccagcaatcaacatcagaccaggacattgctgatatcattaccaggatgatccgataa

SEQ ID NO: 151430 - DNA, 177 bp, Enterobacter cloacae
atgtacaaccataaccgggataaaagtcatttcgaaagtaaagcactagagatcgagaatattgcgcagcgcattgccaccaagcatttgctatatggtacctctgccatgttttttgaagttcaacaacttgttagccgtataagaagggagattgaatcacattgtctaacctag

SEQ ID NO: 151431 - DNA, 675 bp, Enterobacter cloacae
atgtctacccatgacctgacactgattagccacccattgtgtccctttgtgcagcgttcagcgatcgttcttctcgaaaaaaatgtgccatttgaccgtgtaaatgtagatctgtcggcgaagcctgactggtttcttgctctgtcacccaccggcaaggtaccgctacttaaagtgcatcatgcagagggcgaagatgccattatttttgagagcatggtgatctgcgagtatcttaatgaaacgcaagatggtgattcgctgtatgctgacgatgcattagaaagggctagacagcgagcatggatcgagttctctacattaatgcttggaaatgcctggcaatttttaaatgcgactgatcaggccatggcagacagcaaacgcgctgtgctccgtgagcaacttgaatatattgaatctgaattgaattcagggccttatttctcgggttccaaattcagtatggttgatgcgatctacgctcctgttttccgttacttctccatcattgatgcatcagtatctgaggcgatttttgagggacttccgcggatttccgcatggaaaactgcacttgcgaaaagggaaagcgtaaatgccgctgtatcaccagattatgcagaacttttccaaaatcatcttcgtcagcattctgcaattctcgctgcctga

SEQ ID NO: 151432 - DNA, 747 bp, Enterobacter cloacae
atgtccagattacaaggtaaacgcgcactcatcacgggtggaacaagtggtattggtcttgcaaccgcgaagctgtttgtcgcagaaggtgcacgcgtaatggttactggtattaaccctgattctgtcgcaaaggcgaaactcgagctgggtaaagatgtggtcgtcgtgagcgcggattctgcagatgtgaatgcacagaaagcgctggctcagacggttcaggaacattttggtgagctggatattgctttcctgaatgcgggtatatcaatgtatatgccaattgaggcatggacagaagaaatgttcgaccgcatttatgatatcaacgttaaaggtccttatttcctgatgcaggcgctgttgccagtgttcgcaagctctgcatcagtggtctttaatacatctataaatgcgcacacgggcccggtgaactcttcagtttatggctccaccaaagccgcattactcaacatgtcgaaaacactgtctaacgagttactttctcgcgggatccgtatcaacgcggtgagcccaggcccggttgacacgccgctttacgataaggcggggatccccgtggaatatcatgatcaagtgatgaaagatatcgttgcaaccatccctgccggtcgttttggtaagcctcaggaagtcgcgcaagcggtgctttactttgcctccgatgcgtctgcctggaccgtgggttcagaaatcatcatcgacggcggcgtttcaatctaa

SEQ ID NO: 151433 - DNA, 903 bp, Enterobacter cloacae
atggacagattacttttgatgacatgctttgtccgcactgcggagacaggcagcttttctgcagcaggcagggatttaggcttagggcaaccgaacgtgagtcgtcatgttgcaaccctcgaagagcatttgcagaccagattactccaccgatcaacccgcaagctttccctgactcctgaaggagaacgttattatctggaagcaaggcgtattctggaagcggtcgaagagtcagagtcttctttcagagaaaatgtgacgcccacagggttactgcgcgttgcttgtcccactgcactggctcacacatttttgattccgcgcatacccgattttttagaacgctaccctgagctaacactcgatctacagattaatgaccgctatatcaatctcgttgatgaaggcgctgagctggcaatccgcattggtcaccttgaggacagtgcaatgcgtgcccgcagacttggcatgtatgagcgagtctgtgttgccagtcacaagtacctggctgaacatgggattcctgacaccccggaggatttaaaaaaacatgattgtttgatctataccctgttatcaacgggcgctacctggagatttcgggatatggatgtgcctgtttctggccggctcagggtcaattcacctgaagcagtgcagaaatttgtcaatgctggggttgggatcgcacagggcccagaatggttgttcgaggagggactggcaaatggcaacttacaattattactggcggattacactgcatctcccgttcccattcaggctgtttatgttgcaaatcgacttttaccaaaacgcgcgattgtgttcatggattttgttgctgagatttttgaaaaaaatcccggcttcaaagtttacaacccattgaaatga

SEQ ID NO: 151434 - DNA, 261 bp, Enterobacter cloacae
gtgttttcattgtcattcaagttaacagggcctgaatgcaaaatcagcaattttttcccttataaattgaatgtccactccagtgagtttggccgcttcgtgccaagagcggaagttatttacaccttgctatgcaatttacggccagccggtcagttcgtcatctcagcttcatttcaatgggttgtaaactttgaagccgggatttttttcaaaaatctcagcaacaaaatccatgaacacaatcgcgcgttttggtaa

SEQ ID NO: 151435 - DNA, 1272 bp, Enterobacter cloacae
atgagatattggttgcaagaattaaataaaattcatactcatacgatttctttaggtatgatttcaaatgtaacatttcccaccaagaatctttattacgacttaactaagggatttatatttaccatgaatgaaattgaattggattatggcgcaatcactcttgataactccactctaaaaggtgaaggttataagttttatgaaggaatgcttgcccaaatgaggcaatttaaagatagtcccgtcaaggttattcaaacagatattgttcacaatgaagcaataaatcatattagccaagagctatccagagcaagatcttcaattgaacaagcgttgagatcagcgaataagcaacttaagattaaaaatgatgagattgacaaagccagagagatattatctgtagaaggtagcgagaaggaaattgcagagcagcagctagagaactattatgcatttattggagctgataaagtagattcatcagaatatgcagatttatccgtcctgatggagatgtatttttccactgaaccccccttcgaaacgggcaaggacaaaaagaatgagtttcctgatgctattgcattattatctattgaagggtgggctgaagctaacgatctaaatattattgccgtaagtcaagataatggatggaaggagttttccgaaaattcgaatcgaattacagtagtatcatctctagcagaagcattagagaaattccagcctcataacaaagtagcgagtataattgcgcatatcagagaagactcgttattagatgcagaaaatcatgttctaaacgaaattgaaaacgcaattattaatagtctggatggtgagtacatttcaatcgaagcggattcattcatgtattatgagtgggacgatgttaatgtttcgtatgtctctcatactttagatgatgataaagaaggattggttaaaatccgcgtagtaagaatagatgatgaatcaatagttctaaaagttggggcaaccgtggaggttgaagtagaggctagttttagtttttccatcaaagattcaatagatagagattacgtaaatatgggggggaatgtgtgtactaccgcagagacttaccatacagatattttattaaccctcacaggagattttaatcaagggtttgatgatattgaagtttctgaaattgaagtccttgaaacgatcaacgaggcgagttttggtgagattgaacctgactggagaaatgattatgatgaaaacgattaa

SEQ ID NO: 151436 - DNA, 798 bp, Enterobacter cloacae
atgcaacccttcagtgatttaattaatgacgcttatgattttcagcaatcgcaagaccagattaatcagcaatttgataaaatgattgatagggttaacgaattgcgccgccgtcagggttctagcgccaataacaaagcgtttgattctgaaattagtaaaatcatgtctcaacgtgattctgtattaaaagctaatcaggatggttttgaagattatgaaaatcatcttcattcagccgttgcagggatgaaagaggcatggaaaaactacgatgataaagttaataatgtttcatcgcaacaggcgcaagtgtggacaaaatcccttgatttaatgactgacgagttaactaatttcctgacaactggaacggctgattttgaaaagttctttaaaaatatcgccgtaatggaagaaaaatacatggttcaggattggttagtcaggcccatgaatgattatattggcgggttatttggttttggttctggcggtgcttcagcaactaaagcggtggctaattcctttgcggttcctgatgtgcctaaattgagtgctacacgtggcggcgggttaggggcttcaagttgggcggctaccgcgccagtgcaggttacgattaacaataacggcggcaatgatgtgcagggaaatgcacaaggcgatactaaacaggcgcaagcaattgcacggcaagtattaaattcactccagacctatattaaacaacaaaacgttaattccaaccgttcgggcggtattaataaatcaatgggtaattggtctacacgctaa

SEQ ID NO: 151437 - DNA, 144 bp, Enterobacter cloacae
gtgggtgtttatggaattatggattcagtattaccaccagcattaaaaatgctgtacctggaaaaagataaaaatggacgcttcaaggccttcgaaaccaccactagccagattccgcacctcgccaacttctaccagtgctga

SEQ ID NO: 151438 - DNA, 213 bp, Enterobacter cloacae
atgactaaagcagaaaccgaacgctatttacgaggcgtttattttgaatggattcgtgaaaacagagataccagcgaaaaagaattatcttttcatggttacatatgccacctcccaaatttttcaacatttagatttggtgcggctcgtgactatcagcaaacggcgatgtgggttagagaatggaatgaacaattaggtattagctcttga

SEQ ID NO: 151439 - DNA, 465 bp, Enterobacter cloacae
atgaatgatttatttttaatgatttttgctcctgctattgtaggtggtgttgctggtttttttattgctaagttaagtaaagtcaataaagagtttggtgctattaaacaagaaatggcaatgtttaggcgcgatatggatgaaacacgcaaagggattgctcgtgaatgtgctgatgaattgcgcacaaaattaaattcattagatagttatgaattatcgcgcattgttgataagttagatgaaatttacaatttaatgccaacggaaaagcaaactgaagatttagcaaatgcaatctttaaagaggttgacgggattaaatcaattacaagagatgcgcaaggggagattaatgaaaatcatgagatattggtgcaaattttagattcactataccatcacattaaagaattaaaatcagtgcgagttattgaatttaggccggaaagattaagtaaataa

SEQ ID NO: 151440 - DNA, 1206 bp, Enterobacter cloacae
atggacactaaaatagcgcacttaatgcactcagatgcaaaggggtttatgtggcgtaagcgttacgaaaagcgaacgatggaaatcattttacggacacgtgatgaatctgttgccataaaaagagcggcatctataacaattcgatatatagaattaaaatcactcgatgcaccattttcatcaatgcgggaaatgttaaaaaagtttcgtgatggtatcgttgccgctcatgagatagagcgcttaaggttgattgcgaccgttccacaggaagcgccacacgcccttgtagctacctcgccaatggcatcacatgcacaggatgtgaaaacctctcagaagagcgttcaggggcattctctaaaggatgctcaaaaagcgtacttttccgcaaatactgaatggaaagaaaaaacaatcaaggcatattccggttgcattgaacgatttattgcatggtgcgcatctcaaaatattcatactttggaggaaataaataaagagcatgttatttcttttaaatcatgcatggatgaagagcaattagcttcaatgactaaacaaaaaatcattaccgcattaggtagtatgttttcgttcatagtgaatgttaaagagtggattaataagaacccatttagaggggtgaattataaaaaggtaagtgtagagaagccaaaagaagaagtaacattagcacaatttaaaatgatgattgagcaacccaaagtggtcaaagatgcccaaaattattgggctaatgttcttatgttttatacaggtatgcgcgttagtgaattgcaacagattaccaaaaatgattatattgagatagaagggattaaatgtattagcataaatacatacgaagaagggaaaagcacaaaaacagaatccagtaaacgtaacattccaatctgtgatgctttgttagcgctgaatgtttgggaagaaaagccagtgatgaaatatggattaaacagtatcatggataaaatcagcaaggcatataaagcaattggccttaagcgttcaagccattgctatagacacagtatgtctaatcgcttgcgtgataccgatacagacgatagtacacgcgcatttattttaggccatgcagcacacggaatcacagatagagtttatataacacgcttgccgttacagaaaatgttaaaggcgttgaatgacgctaattaa

SEQ ID NO: 151441 - DNA, 396 bp, Enterobacter cloacae
atgagcgtaaaaaccgtgaccttttccgcagggcgtccacttccggctattggacagggtacctggtatatgggagaaaaagccagccagcgtaaatccgaagtgaatgcactgcgggcgggcattgatctggggttaacgttaattgataccgctgaaatgtatgccgaaggcggagcggaagaggtggtcggggaggccattaagggccagcgcgacaacgtttttctggtatcaaaagtctacccgtggaacgctggcggtcagaaaggccaggcggcgtgtgatgccagtctgcgacgtctcgggacagaccatatcgatctctaccttctgcactggcgcggtaattatggcctggatgaaaccattacgctgatggaaagactccagtag

SEQ ID NO: 151442 - DNA, 216 bp, Enterobacter cloacae
atgctcacgaatattattgatgagaaaacccacaactttgcgcatagcgccccgcaaaccgttacaagaagaggggctccggaacgtccgaagcccgtggtggattatccgttaaaacgtgaaagagagaagggcgtcagatcaaactgcggtgtaataccctgggcaaactgcgcggcaatttcacccagcaccgacgcgaacttaaagccgtga

SEQ ID NO: 151443 - DNA, 204 bp, Enterobacter cloacae
atgcgcgaacttcgcgacgactcacttgttgacttaaagttcatgatggaagattctggtatgggcaaaacgttcctgtactcagaaatcaaaaacggacgattgccctctcctcacaaaatcggtagctcatcacgttgggtgtacgccgattatcagaactggaaacgcagtctcctttccccacttcagaaagcctcatga

SEQ ID NO: 151444 - DNA, 147 bp, Enterobacter cloacae
atgattattgcactctctgcaacttacctttgcaggaagagtttaatcgatggcgacatttatgcgatgtgtatttttatgagcattgcagagtttatcgttgagctactgctgggtgcgttactaactttcatattatcgagataa

SEQ ID NO: 151445 - DNA, 165 bp, Enterobacter cloacae
atgactcgtgaagaagcgatagcgaaactcaggtcactacatacaagctatgaccctgagagtgatcacgctgaggcagataaggtgctttgcgaacttcttatatcgcttgggtatgaagatgtggttatagagttcgacaatgtagataagtggtatgcatag

SEQ ID NO: 151446 - DNA, 465 bp, Enterobacter cloacae
atggggcccaacaaggttttagtggatatgcaggcgagtaaagatttggaatccgcaaggaacgcagcaattgatgcagccagcaagccagaatgggatggcgagggattacctccggttaatttgctttgtgagtggagggatgacacctgtacagagtgtaaatgggtaaaaggttatttgcgcgcacaaattaatactgaaacaggaattgtgttggttattgaaccggctggaggttatgcgctggagtggcgaggaccttgcgtaaagttccgccctattcgctcagaagcagataagaaacgcgctgaaggtgttatcgcgctttctcgtatcgaccctcaagcgatgccatttgagtacggagacaaacactcagacggctctttggttggtcctttctggtatgagctttatgacgctatagcagcaggaaagattccgcacatccgcatcgactag

SEQ ID NO: 151447 - DNA, 219 bp, Enterobacter cloacae
gtgagtaaatccgaattgcttcagaagatacaggcgctcgctagtgaatgccacgcgctggcatgtgagcttgatattggcgacgaaagaacagagatgttcgaaatctacggagtgctgcgcaacctcggtcgacgcggctacgccagccaagtaggccgccgaatgaatcctctactcgcgtcctgcgatgaagatgatgacgaggatgacgattaa

SEQ ID NO: 151448 - DNA, 294 bp, Enterobacter cloacae
atgagcaacatcgacaaacgcgcattacgggaagcggcagggaagttcagagcaacatttgcggctcatcgccaaaacccaaaaaattatgaagtgctggatgcgtgggatagggccacaaacgaatttttggcattagttaacaatgacgaactcgacattattgcatcgctgctggatgagctggaagccgcagagaagcggattgcagatttaaaggaagcgttccgaatcgctttgtctgctgctggcatcgacgcacccgccgcagccggtaaaggagaggcatcatga

SEQ ID NO: 151449 - DNA, 234 bp, Enterobacter cloacae
atgagcattcgatctgagcatggcttcggcccctcaaccgtagaagttgactggcttgataagtgtccaaactgccatcatcaaaaggcgcgagtcaccggatggtccgtgacgcctgaagccctatgggctggcgataaggttgtgtgcgccaaatgcggacataagggagaaattgacgccgatggtgacaacgcgtgggcggaatgggatgcagtggagaccgcccaatga

SEQ ID NO: 151450 - DNA, 174 bp, Enterobacter cloacae
atgataggcatgacgtacgatccgtttatccaaccacaagagcttatcgccggacaccgcttcaaacccatcaacgatatcccacgcgaagaaatgctgaagcgtcattcattccctagcgtgaacgagaacaaattcctgacagcgtggttaaaccagagggcgaagaaatga

SEQ ID NO: 151451 - DNA, 288 bp, Enterobacter cloacae
atgaaactaaatatcgtcgtcggtaaatacgtaatcaccggcactaagtttgacctagttctcagcgaaaagaaaaaagtcacagacgagaatagcaagaactttggaaacgaaattaccacccgcctcggctacttcagcaccttcgacaagcttgtgagagagctttgccataaagagattctggaatccgaagctcagtcactggcagagctgaaaactcacatcgacgacctgtctatcgaactggcagaaggcgttaacgactttctggagcgtgcacaatga

SEQ ID NO: 151452 - DNA, 150 bp, Enterobacter cloacae
atggaagagcaaagcgaatacatcacttacgccgagttagagcttgttaaggatttatgtgaagcgcacccgtggggtgcagagtttggcgggaaatgtctcggtgggattgagttcagattgaaacctgaaatgaggaaggcagcatga

SEQ ID NO: 151453 - DNA, 372 bp, Enterobacter cloacae
atgagcatcaacgtaatttgtgcatcagggaatataggcaaagatgccgagcagagatggactcctaaccagaagtgcatcgcatcgttctctcttcctgttaggcagggttatggagatagagaaaaaacctcctgggttaaatgcatgctgtttggcgcaaaagcagagaagcttccgcaatacctgaccaagggaacaaaggttacggtgactggtgagttcgtcatggaagaatggacagaccagaacggaggtaagcgctcgcagcctgtaatcatcgtaatggatgttgatttcggttcttccggaaacaagcaggccgcacaacaacagcctgaacaagattacgactcaaccatccctttctga

SEQ ID NO: 151454 - DNA, 657 bp, Enterobacter cloacae
atgacgggcaagaaggtttacgcagctatcagcgctgtagccaaggaaatggcatctacaggcattagcaaggacagggttaacaaagttcaggggttcaatttccgaggcattgatcaggtgtacaacgcactggcaccggcgctggttactcacgggttagttatcctccctcgccttactgaacgcacatgcactgagcgtatcaacaaaaacggtaccgccctgttctatgtcgtcgttaaagccgagtttgattttgtcagcacggaagacggaagtatccacaccgtcactacctacggtgaagcaatggatagcggagacaaggcaacaaacaaggccatgtctatcgcatacaagtacgcagcgtttcaggcgttctgtatccctacagaagaaactgcaatcgatgcagatgcagaagttcatcaggttgctcctcagcaagtaaaagctcagccgaagccgcatgacgcacgctctccagataagtttctagccgacttctcagcctatgcattgaaggcaacgcttcccgagcttgaggaggcatggaaggcagccgataaacgcttgtcaggaacagagcagcacgataaagccgagtcggtttatttagatcgcaaatcagaaattgaaggggtagtcgcataa

SEQ ID NO: 151455 - DNA, 144 bp, Enterobacter cloacae
atgcagcatgaatttagtgacgaagaatttatcgcgcttgtctcacctgagattgaggaagaggtagagcaacaaatcaacttagcagctgaacggcagaatcagccgatcacatggcaggaatttgcggggtattactcatga

SEQ ID NO: 151456 - DNA, 189 bp, Enterobacter cloacae
atgactattgtgcctgttaacggaaccatccttgttcagcaaggtaatcgtgagttcaacaagctctacgaagcatccttccctgatacgaaggaaggtaacagcgccgcatacgcatgggcatcatcaatcgcgatgggctgggaagattgtcaggacgaagactggaacagaaatcatgcagcatga

SEQ ID NO: 151457 - DNA, 159 bp, Enterobacter cloacae
atgattctagcaatcgcgggaggcgctcgcatgggtgccttccaactacacgaatcacttttagatcgcattacccgcaaattacgcgccggctggaaacggctggcagacatccttaatcagcctggagtgccgagccatgactattgtgcctgttaa

SEQ ID NO: 151458 - DNA, 969 bp, Enterobacter cloacae
atgagtgaaacaacggatttagttgttattgagaaagcgaatgcaatgacggtcttcaaatctgccgaccagattgaagatattctccagaaagttgagcgtgaagttatgtcctttgtgcctgatgttactacggcaaagggcagaaaggagatcgcttctctggcatataaagttgcacagacaaaaacctatcttgatggtcttggcaaagaccttgttgctgagctgaaagagattccaaaactcattgatgcaaaccgcaagacagttcgcgatcgcctggatgagctgaaagaaaaagctcgtcagccattgactgattatgaagtcgagcaagagcgcattaagcaggaagaagaagctaagcgggcggcagaagagctagctaagaagattgaatccgatcatgaaatggcattgctgatgaatgacgctttcgaccgtgagttagcagaaaagaaagctgaacaggaacgccagcgcattgcccgtgaagaggaaataaaacgccaggcggaagagcgtgctaaacgtgaagcggaagaaaaagcagcagcagaaatagcggcagccaagaaacgcgaagaagaagccattgctgcaaaagctcaggcagagcttctggctaagcaggaaaaagaaaaagctgaacgcgaagccaaagaagcgcttgagcgagcagaacgcgagaagcaggaagctatcgaggcagagagaaagaaagcccaggatgaagccgaccgtattcgtcgtgaggcagaagaaaaagaagccgcacgtctggcagaggaaaaacgaattaaggatgaagaagagcgccgcgcacaggataaagcgcatcgcaaagatgtgaataacaaaattctcgctgaccttatcaaggccggtgcaagtgaggatgttgccaagagcatcatcaccgcaatcgtaaaaggcgaagtcttcgccactcgcatcgcttactaa

SEQ ID NO: 151459 - DNA, 225 bp, Enterobacter cloacae
atggagtggattaagtgtagtgagcggatgccaaatgacgaggaagatgttttatgtttcggtcagtatggcgataacgatattgatgaagagtgttaccagttcatggggtggctttcaagtaaaggaattaaaggtatttggcgcgttagtgatggcgatagtcaaaacagaagagccaaagtcacccactggatgccattacctgaaccaccaagcgaatag

SEQ ID NO: 151460 - DNA, 168 bp, Enterobacter cloacae
atgaacgaagaattaatagcagcccttcgcaggcttgaagttagcgtaaataacattcgttactgctgggaaaagcgtcctgaaaatatgtggaaagcaatgcaacaagcagagagcgattgtgaaagtgctcgcgcagccatcagcaaggctctgggggaggagtga

SEQ ID NO: 151461 - DNA, 126 bp, Enterobacter cloacae
atggaattcacagcatacctggcaggaatgtcattaacagaatggaatctgtactttacaaaatcacagcagaaagaggtcatgaatatcattttctgcaaagcggaatattaccgcacatgttga

SEQ ID NO: 151462 - DNA, 285 bp, Enterobacter cloacae
atgaacagaaatcaacgccgtatggctgcttacaacgccatgaaagcagctcagaagttagaagctaaagcctactgtaaaaagattgaccgtgcattttcacggctgtcggagggctgtagtgagcgtgtttcaaaagccatttcgcttgccggaacgcgtcagaaggaagttgaagtaactgcggttaaacagaatcgcacctactaccgggacgctaacccgctcggtaacaaaatacatgctgttcagcgcatgaagctgagcagtaagccacttatttga

SEQ ID NO: 151463 - DNA, 210 bp, Enterobacter cloacae
atgaacaagctacgagacattcgtgaaaagcttgggctcacacagggagagctggcaacggagcttggactcactaagggtgcaattggtcattacgaaaatggccgtcgcgatctaagtgccactcaatgtcgtcagattatctttgtgttgaacaagcacggtgcagaagtaggttttgacgacctgttcccaccaaaagtcgcttaa

SEQ ID NO: 151464 - DNA, 279 bp, Enterobacter cloacae
atggaacacgcaaacaaacgcaacgaggcaatgcgcattgaaagtgccttgctaaacaagatcgccatgattggcacagagaaaacagcagcagctgtaggtgttgataaagcacagattagccggtggaagcgagactggatcccgaagttctcaatgcttctggcggtgcttgaatggggagttgttgatgatgagatggcgagacttgctcagcaggtagcatcaattctcacaaaagaaaaacgtccagctgttggtagcagtctggacgcttaa

SEQ ID NO: 151465 - DNA, 702 bp, Enterobacter cloacae
atggcatcgagcaataattctgtaaatggctcaagtatcaatgagccgttaaccataatcacagaagcattaaaaacacctgatatacctcctgacttcaggatggaagggtgggtatacattcttagcaacgaatatatgccagatgtgtacaaggttggaatgacaaccctttccccggaagagagggctgctcagatatcccaaggaacggggataccattcccttttaaagtctactcggcttactactcggatgatcctagaagccatgaggctgaaatacatgaatatctaagctgctaccgaataagcagcaacagagagtttttccattgtccgatcgagacgattgaagatgctttctctggcgcaggcctaatcgagcgacaaaccccactagaagtaattgctgatgactatgacgtcatttgtcttgaaaaatcaggccaactgtatttgtcagacctttttgacgaactaaatatcagggtctttggatgtaaacaggccgcagtaaaacgattggtagagctagcgtcagataacatcaagaaactcaaccgaaaaggttgctctcttctcctgcaagacgccaaggccactccgattatctcttacacatctcaaatgatgaaggaacatgagcgcctgttgaatgaggctggcgcttatgggccacgaaaaccatggagtatctaa

SEQ ID NO: 151466 - DNA, 885 bp, Enterobacter cloacae
atggctcgttcacgaaacattaaaccaggcttcttcactaacgatgaactggccgaatgctcacctcacgcccggctcttgtttgccggactatggactatcgccgataaggaaggtcgtttagacgaccggccaaagaaggtgaaagcccttgtgcttcctttcgacaatgtcgattgcgatgagcttctccagcagcttcatgatcgcaaattcatccagcgctatcaggttcaggatggagcatttatccagataactaactggaaaaaacaccagaaccctcactgcaaggaagcacctagtgagatacctgaatactgcgaagcagatacaaaacaggaagaagaacaagtaaaggaagatgaaagcaccgtgcaagtacagtgcaatggcggtgcaaatgaacctcaagttattgataaacatgaagcacagttagagcacagtgcaagtacggtgcaagaaccagtggagaacaatttaaatcctgctgattcctttaacctgattcctgattccctcatcctgattcctgattccgtagttaacacccaagccgctgacgcgacttgttccgaagatgggaatgttcaccagatggccagtcgttacgccttcgagggaaatgttgttcgacttaaccagaaggacttcgattcctggaaagcgcttttcacaaatatcgacctggtggcagagctgactcgtctggatctggaatttacgcatgagaagccgaagaactggtttagcactgccagtgccaagctgaactaccagaacaaaaacgccatccgccaacctgttaagcgagctgttaacgagagcttcgccaccaaagactacggacaaactgatatcccatcatgggctcaggagtga

SEQ ID NO: 151467 - DNA, 846 bp, Enterobacter cloacae
atgacactggacgaaaaaatcgctcagctggagaagaaacttgcagagctgagtgcgccaccgatcgctatcgaacacaccgaagtggaaattggcactggaacatgtgaaaaacatggcgagttttctcagcgcacccgatattcaacggggccgataaagctgccttcacgaccgtcagactgcccggagtgtctgagggatgagcttatcggactgcaggccgagaagattaaaatcgacgatgcatcacgtaagcgaaacatcgaaatcctgctaagcaacctggcaataccggatcgcttcgcaaactgcaccctgcaaaactacgagccgattaacgatgatgcaaagaaagcgctgagagtttgccaggcatacgccaacaaatggcctgagcgcctgcagaaaggcggcggactggttatgtgtggcaagcctggcacgggtaagaatcacctcgctttggctatcgcacgacacgccatcactgagcaccaaagctcagcagtgttcacaaccgcgctgaaaatcgcacgagagtacaaatcaacctggtctaaaacatcatcacgcaccgaggatgaggtgatccgctatttcaccaagcctgacctgctgattatcgatgaggttggtgtgcagttcggcagtgacgccgagaagctcatcatgttcgaaatcatcaacacccgatatgaacgcatgaagcccaccatcctgattagcaaccagagcaaagaggaacttgctgcatttatcggtgagcgcgttattgaccgcatgaacgacggcggaggatgcacgctggcgtttacatgggatagctacaggagcaaggcatga

SEQ ID NO: 151468 - DNA, 690 bp, Enterobacter cloacae
atgactgacaaccttaacgccatcaagtcattcatccacagcaggccagtaagcatcaggagagatatttatcgttcactggatatccctcaacgcacactaacctggaacctgaagcgacttactgaaacaggtcaggtggcgaagtatggagaagggtattacttcagggatagtaacgcactgcaggaatggcttatcgataatgaacatcctgacctagaaaggctagagcccatgaacacgcgagacaaaatactcaaccaccttgaaacaaacattcccacctcagcaccacaattcgcaaaacttctcaaatgccagaaatcacatatcaacctgctactgcgtgaccttatcgcagacaagcagattgagattgagcgcatcagcaatagcgttaagtactaccggcttgcaacgcttcatcatgagcgtacagaagccgtactgcgctatctggacgagcacgaaaccggaatggccgttgagatatcaaacgcaacaggaatcgacaagcgcctcgtgacgaagatgctcaagcaccttcatgaaaacggcgagctacaccgtgactggtgccacaagaacgcatgggtatacagcaagaaacctgtatttagctttggcgcagcaaacccactgactgcatttattaacaaggcattaagagaggttcgtacatcatga

SEQ ID NO: 151469 - DNA, 297 bp, Enterobacter cloacae
atgacgagttacctgatttattccggacttttgtttaacgcattgatatcgcttgccgcgataacagtcgtgtttgtttggtttgtatggccggctgtagaggctgcaagcataacaagatgccagcgtaaggtttcgaagatgtatggcgggaagccaagcgccaaagacatctggaagacgttcaaatattggtactcagaccttctgttcggtcgtagttgggagcgaatcagcaaccgacaattcgaatgggaaggtgtaggtaactggactgtttatagcggacaagattga

SEQ ID NO: 151470 - DNA, 195 bp, Enterobacter cloacae
atgaataagaagaaagcagacaagttatttcaggaagcaatgatggcagtgcatgcagcaggtgaagaccgcgtcaactattgcctcagctttgtacgcggttatctggatagcgttggcaaaactgagatgcttcacgagtgggatgatggaaccatgcgcgtgaagatgacaattggcgagcaggttcattga

SEQ ID NO: 151471 - DNA, 297 bp, Enterobacter cloacae
atggacgaatcaagaaaggctttcgaattatgggttgcaagtacgacaaattcagatttacacagaggaataatgctagacaggcgtgatagtggcagctatagccaccttgcaaccgaaaataaatgggaggcatggcaggcatctcgcgcagctatcgagattgagttgcccaaaaaaatagagcatcagccattcgatacggattttgaaaatggattttgcggcggacataacaatgccattgattcagcaacaatccgaatccgcgccgctggaatcaaagtgaaggagtga

SEQ ID NO: 151472 - DNA, 258 bp, Enterobacter cloacae
atgaggcacgaactgaaaattcttcctgagcatttcattcccgtgctcgacggcgtgaagctggcagagcttcgcaagaacgaccgcaactatcaggccggtgacgttctggtgctgtacgaatggaatggtgaatacacgggcgacgcatgtgagcgtgaagttatccacgttgcagatgtcggttcatatctacctggctacgtccttctgagcatgagagacgccaatgaaacaaacaatcttccttcgaagtaa

SEQ ID NO: 151473 - DNA, 300 bp, Enterobacter cloacae
atggactattcacagttatcagattttgaaatcaattttaaggtcgcctatcacattggacttaaaaccgttgagcgagaggaagagggggagttcaagccatgcaacaaccctgcagacgcatggccgattattttgaaaagctgcatcagtttagtttgggattgtgcggaggatgccagttctgattggtggaatgcatttgaccagttcgatgattgccgcgttcagtatcagtccagcccactccgcgccgcaatgattgtcttcctcatgatgcaggacgcaaaacatgcttag

SEQ ID NO: 151474 - DNA, 186 bp, Enterobacter cloacae
atgcttagccccaaccaagcccaagcctacgagcagcagagcatacgtcgaacgttgtgcgcaggctgcacgaaagagcttacgccagaggaaacctacgcatgttctgaatgcgtggatgaatggctaatttatcgtgatccgaacggagatataaccaatgaggacagcacgtcgcagatgtaa

SEQ ID NO: 151475 - DNA, 609 bp, Enterobacter cloacae
atgaggacagcacgtcgcagatgtaaaaacgaagagtgcagagaatggtttcaccctcaacactcaaacatatggtggtgctcaccggaatgcggaacgaagatagcactggagcgacgaagcaaggagagagaaaaatcagagaaagcagcagacaagaaacgacgacgagaatatcagcaacagaaagacaagttaaagattcgaaagctcgccttaaaaccccgcagttactggattaaacaagcccaacaagcagtaaacgccttcatcagagaaagagaccgcgaccttccctgcgtttcgtgtggaacgatgagcgccgctcaatgggacgcaggccattatcgaacaacggcctccgcaccacagctaaggttcgacccacgtcagatatggaagcaatgtcaggtatgcaaccagcataagagcgggaacattgtgccgtatcgggtggaactggtcaggcgaatagggattgaagaggttgaagatatcgaatcaaaccataagcgccatcgctggactaccgaagagtgtaaagcgattaaggctgagtatcagcagaagcttaaagacctgcgtgacagcagaagtgaggcagcatga

SEQ ID NO: 151476 - DNA, 219 bp, Enterobacter cloacae
atgagtgatatgcagcatgtgataagaatcatcgctcatgtggttcaggcactagctatgttgatatttctctttctaatgtggagatggagcagaccgcaaaagaaaacagaaataccaaaggagcaagctgaagccgctgaaagatgtgtgatgctgagaaatcagttagagaaaatccatcttgaagccacgctaaacagaagattttacaagtag

SEQ ID NO: 151477 - DNA, 315 bp, Enterobacter cloacae
atgaaacgtatgccagataaagaaagcatggcgggactctcatggctggtcttgcttgggctggcttgctggggcggtcttgtgcgctacctcatcgacgtgaaaaacaataaagcaacctggagttgggttaacgctctggcacagatagcagtatccggctttaccggagtgataggtggactgataagcctggaaggtgggttgagtttctatctgattcttgctgcatctggagtgagtggggcaatgggttctgttgcactgacttatttctgggaacggcttacaggaattaaagatgcaaataattaa

SEQ ID NO: 151478 - DNA, 477 bp, Enterobacter cloacae
atgcaaataattaattcacagcgcaaggcattcctcgacatgctcgcatggtctgaaggaacagataagccagggcagaaaacaaataatcatggttatgatgtaattgttggtggctcactattcaccgattattcagatcaccctcgcaagctagtaacactgaaccctaaattgaaatctacggcagccggtcgttatcagcttctggctcgttggtgggatgcatacagaaaccagctaagcctgaaagatttctctccagccagccaggatgcagtggcgttgcagcagattaaagagcgtggcgcactacccatgattgatagtggagatatacgccaggctatcgaccgatgcagcaacatatgggcatctctaccaggggcaggttacggtcagtttgaacacaagatagatagccttattgccaagttcaaggaagcaggcgggacggtaaacgagccaaaatcatga

SEQ ID NO: 151479 - DNA, 462 bp, Enterobacter cloacae
atgagcagactgacagcaattatcattgcagtaatcgccttcatcatcgtctctctgggctgggctgttaatcactaccgtgataacgcaatagactacaagaaacaacgagacacagcggttaacgaagctgcacttgctaaggcaaccattaccgacatgcagacgcgacagcgtgacgtatctgctctcgattctaaatactcaggagaactggcagatgctaaaagcaagctggatgatttgcagcgctgtgttgctgatggcaagtgtgggctgcgcatcaaagtcgtctcctcaaaaggtaacgcctcctcctccaccggcatggatgatgcagactccgccagacttactgactccgctcaacgggattattggagtctcagagaacgaatcgaaaccagcaacaaaatgattcttggactccaggaatacatcaacacccagtgcctaaggtga

SEQ ID NO: 151480 - DNA, 204 bp, Enterobacter cloacae
atgcgaaaacgagagcgtgaaataacactgctctacggaatgtcactcatacgcgatgacgttcttaatcatccgctaccgaagcaatcagccaaagacagattaataaccttcgtgcattacgcgtttgcattcacatctgtcataacgctggcagcctcatccatcatcctgatactcaccgtttcaccattcatgggataa

SEQ ID NO: 151481 - DNA, 207 bp, Enterobacter cloacae
atgcaatacaaaactaacgtcatgtttgggagtgccataatcaggcctgaaatgtttggtgaagtaaaaatactaaggcctacatttaggcagcgcattagatatcgaatcagttatctctgcgagttttacattccagtggcatgcgtgtttgccatgtggatagctcttgtctacttcggtgcttggtatatcaacaataactaa

SEQ ID NO: 151482 - DNA, 243 bp, Enterobacter cloacae
atggcagatattacccaaatgacagatgcacagcatctcaagcttcaggtataccgcctggtgatgaatgactcagcggcgacagaaaaggccattgagtttatcgccggtaacgagctgaactttgagctgttcaaggatgcatatgccaagacagccaatgagccaactgcgctagctaaaactgaaaaggcgattcgtgaagccaaagaagtcctcgatctgttcattactggagcctga

SEQ ID NO: 151483 - DNA, 498 bp, Enterobacter cloacae
atgaccacagtagcatgggatggagtcacgttagcttccgacacccaggcttcaagtggtgatgtcgtctgctctcatgatgagaaaaagatatacaggcctttaggcgatgagtggtcagtgtatggcgagaagattattgccataggttgctctggtgattgcggagcggaaatggaggtacaggacctgctgaagaatggtctgacatatgcatctgagtttctgccaacatttgccttctcttgtcttgcgattgtgggtgttaatcgctcatacctgattacgaaagggtctggtgacaccagggcaaacatttcacctcaggtaacgccatacgccatcggttctggtggattaatagcaagggttgccatgcactgcggtaaggatgctaccgatgctgtgaaagtggccatagatatggactgttattccggtgggcgcattgaaacattcacaactaatcagccagcattcattgtcatggagaaataa

SEQ ID NO: 151484 - DNA, 144 bp, Enterobacter cloacae
atgccgcttaaaaaaggcagaagcaaaaagattatcggcgagaacagcgctaccgagatgaaagccggcaaacccaaagaccaggctatcgctattgccatgaacaaggctggcaaaaagaaacccaagaaaggagctaaatga

SEQ ID NO: 151485 - DNA, 609 bp, Enterobacter cloacae
atgatcacccaaccatggcctacatactcagatgccagtggtgcatttgttcgtggcttaccaattaagaccctgacacaggctgtggatggttcagcattagcagaatttgacggaccatacccggaccagtatctatctgcgctcttcatgtccaccttcaaacctgttgttggtggttacgtattccagagtcagtacggcgaactgctgtacatgagcaaaacaacgttcgaagctcagtacactgcaacaagcagtccaatcgcctggggttcagtaactggcaaaccagcaacgtttgcgccaaccatcggaaccactgctactacagcgatggccggcaacaaggtgccaacgacaacagagcgcggtggtgtactccagcaggcagcaatcacagctatcactgattcatccggtggcacttcaggcggtaacactgtaccagcggtgccagcagctacagcggcaactactgacacctctgcggcatcactgacatctaccaacgcatccatcaccgcactgaagaatgacattgcaacattgtctgccaagtacaacgcattgctggcagcagtgaaggcatcgggtgtaacagcttaa

SEQ ID NO: 151486 - DNA, 456 bp, Enterobacter cloacae
atggcgactgaatctagggtcggtcgccccacggcctacaaggaagagtatgccgagcaagccagaaaactttgcttgttggggcataccgatgctgaaatggcgaacttctttgaggtgagcgagcaaaccattaatgcatggaaacatgcacacccagaatttcttgagtccataaaaaagggcaaagaggtagcagacggcaatgtagcggatcgtctgtaccagcgagctatgggatatgtagctccggacatcgacatcagggttattgaaaatcagattgtcgagacgccacttgaaaagcattacccgccagatactacagccgcaatattttggctcaagaatcgccagaaagataaatggcgtgacaagcaggaagtagagcataccggagaggtcagcctgattcagcgcattcaggaggccaggaaacgcgcaagaggtgagtaa

SEQ ID NO: 151487 - DNA, 1461 bp, Enterobacter cloacae
atgtcatcagaatatgaggcaatgcttgccgacgacatggggcgtttcttttacgatcctcttggattcgtaatgtatgccttcgagtggggagtaggtgagcttgatggctttgatggaccagatgactggcagaaagagtttctaaccgattgggcagaagctatccgcaccaataactttgatggcgttaaacctgttgaagcttaccgatgttcaaccagttctggtcatggtatcggcaagagcgcattaacagcctgggttatcctctacatcctcagcaccaggccattctgcaaaggagtggtaacggcgaacacctcagagcaacttcgtacaaaaacatggggcgaacttggtaaatggaaaaaacgctgcatcactggccactggtttgagtacaacaacggcaaaggcaacatgaatatctaccacgtagatcacatggagtcatggcgttgtgatgggcagacatgccgtgaagagaatagcgaatcctttgctggtctacatgctgctaactccagcccgttctatatcttcgatgaagcatcagcggtcccagataagatatgggaggttgctgagggtgggctgactgatggcgagccattctggtttgctttcggaaaccctacacgtaacaccggtagattcagagagtgcttccgtaagttcaaacaccgttggcgtaagcggcagatagacagtcgcaatgccaagatgaccaataaagaacttattgaggaatggcggaacgactacggagaagacagtgatttcttcaaggttcgcgtaaggggattattcccatccgcttcagacctccagttcataccccaaagctatgccgatgcaggcatgtcgagacatctggagtttagccagtatggttatgcgccgaagattatcggtgtagaccctgcatattctggtagcgatgaggcatgtatttacctgcgccaggggctttattcaaaactcctaggttcatacccaaaaacagatgatgacgttaagttcgcacaggtggttgcagccatagaagatgagcacaaagcagatgctgtattcatcgacttcgggtacggcaccggcattcattctgtaggtaaatcatggggcagaaagtggcagttagttagctttgctggagaatcaaaagaccctgcaatgctcaataagcgcggtgagatgtggaactcaatgaagtcctggcttaatgagggaggaagcattgatgatcagcaaacagctgatgagattgttgctcctgagtacaaagttaagctagatggcaagatcgtcctggagtccaaagaggacatgaagcgacgaggtgttccatcaccaaaccgcgctgacgcgctcgcacttaccttcgccttcccggtagtcaaaaacaaaccaaccaaagcagcaccggccccaattaaaccagtcgcacggagaagataa

SEQ ID NO: 151488 - DNA, 2172 bp, Enterobacter cloacae
atggccgacaatgaacgactcaattccatcctgtgtaagttcgacgcagactggatggcgagcgacgaagccagaaccgaagcgacaaacgacctgtactttagccgggtgtcgcagtgggatgactggttatcagattacacaaccctgcaataccgaggtcagttcgatgtagtgcgccctgtcgtgcgtaagctcgttgctgagatgcgccgtaaccctatcgacgtactattcaggccaaaggatggtgcagaccctaacagtgctgatgtactgatggggatgtaccgcacggacatgcgtcacaacactgcgaagatatctgtgaacattgctgttcgtgaacagattgaagcaggcgttggggcgtggcgtttaatcaccgaatacgaagaccaggaccctaccagcaataatcaggttatccgtcgcgttccgattcatgaggcatgcacccacgtagtctgggatagcaacagcaagcagatggacaagagtgatgcgatgcattgcacagtcatcaatgctatgagccgtgacggatggaaagcgtttgctgagaagcacggattcgatgaaggcgaaattccgtcattccagaatccagacatgaactggttgttcccgtggctgaccagtgatgttgtttatgttggtgagtattacgaggtagaagagaagaaagaaaccgtatttatctatcaggacccactgacaggggagccggtaagttacttccagcgcgatattaaagacgttattgatgagcttgccgataaaggcatggtcaaggtagctgagaaaaaggttaagcgtcgtcgcgtatacaaatcaatcatcacctgcacaacaatcctgaaaaaccgtgaacctatcgctggtgagcatatcccaatcgtgcctgtatacggcgagtggtcgtttgctggcgacaaagaggtttatgaaggtgtcgttcgcctgactaaagatggtcagcgcctgcgcaacatgattatgtctttcaatgccgatatcgttgctcgaactccgaagaagaaacctatcttctggcctgagcagattgaaggctacgagtacatgtacggtggcaatgatgactacccgtactatttactcaaccgtaccgatgagaacaacggcgaccttcctgtgcagcctatttcgtacatggaaaacccggaggttcctcaggctaacgcatacatgcttgaagcggcgactaactcagttagccaggtcgcaacaatgggcgttgatgcggaagctgcaaatggacaggtggctttcgataccgtcaatcagctgaatatgcgggcagaccttgagacatacgtatttcaggacaacctcgcaaccgctatgcgtcgtgatggtgagatttaccagtcgatggtgaatgacatctatgacgttcctcgtcaggtgatgatgactcttgaggatggcactgagaagcaggtccagttgcttactcaggctgtcgattaccagactggtacggttgtgacccttaacgatattcgtggtcgctatgagtgttacacggacacgggaccatcattccagagcatgaaggagcagaaccgcgcagagatacaggaattgctcgccaaggttcctcctggcactcctgagtggcagatgttgctgcttcaatacttcacattactcgacggaaaaggcgttgagatgatgcgagagtacgcgaataagcaacttgtcatgatgggactgaagaaacctgagacacctgaagagattcagatggttgaacaggctcagcagcagcctaaagagccatcacctgaacagacgcaggctcagggtgttctgttgcaaggtcaggcagagcttctcaaagctcagaaccagcaaatgcagattcaggttgatgcagcgaaagctgaaggccagaaccagctcaacgcggctaaggtcgcagagatattcaacaacatggacctggataagcagtccgctttccgggaattcctcaaactcatgcaaagttaccagcagcaaaacagtgacgatgcacgagccaacgcagaactacttctgaaaggcgacagtcagcaacactcgcagcggatggacttcgccaacatcctgcaatcgcagagacaaaatcaaccttccggcagagcagccgagattcctcaataa

SEQ ID NO: 151489 - DNA, 915 bp, Enterobacter cloacae
atgtacccagaaaccaccgaaattcaggaaactgaaggcttaaacacgtccggcaatcaagcagcggcatctgctgatggctctgttgtcgataatgccaatgacaacgcagggcatgatgaaggctttgagatcgtcctgaaagacgatgaggcaaaaccgaaacaagacccggcaacaaacgcacacttcgcagctaaacgtcttgagcgtaagcgtcaacgtgagcttgagcaaaagatggagcaggtgaagcgtggtgagttgccggagcacatccgggttaatcctgagttaccgaagcagccagatccaaacgattacctgtcagatgacgctctcgttaaatacaactacgacagcgcactggctacggctgcattcaatcgtgaccttgcagagtggaatcagaagtcactcgatgctcgcagcaatgcggtagcagagcagggtcgcaagactcaggagtatacccagcagtcagcgcaatatgtcgaggcggctcgtaaacattacgacgcagcggagaagctcaacatccctgattatcaggagaaagaggaggcatttgcacaacttgttccaccgcaaattgtttccgacctgatggtgttgttcccggagaaatccgccgcactgatgtatcacctgggctccaacccagagaaaacgcgtcaaatcctccagatgaaccagcagcaagcgctgattgaaatcactcgactctcagaacgtttaactctcaaacctcgcggtaagcaggtctcaagtgctccccctgtagatgagccaatctccggtgaagttgtggctgcaaacgtagctgcactcaagaagaagatggatgaggcatcaagcaagggtgatgtagagacctaccgcaagattaagaaacaattacaaggaatccgataa

SEQ ID NO: 151490 - DNA, 1293 bp, Enterobacter cloacae
atggcaggtcttaacgaaggtcaaatggtggtgctggctgttgatgaggtaattgaaaccatcaagagccttaccccaatggctcaaaaagccagtaaatacactccacctgcggcagaaatgcagcgttcaagcaatacaatctggatgcctgttgagcaggaatctccgactcaggaaggatgggaccttacaggtcaatctacgggaattctggagctaaacgttccggtaagtcttggtgagcctgataacgacttcttccagttacgcgctgatgacttgcgagatgaaacctcatatcgtcgtcgtatcaacgcggccgcaaagaaactggcaagcaattgtgaagtaaaaatcgccaaccttgcagctgaaatgggatctcttgttgtaacaagttcagaccctatcggcacgacttctggtggtggttgggactttgttgcagatgcagaggaaattctgttttcccgagaactaaaccgcgactcaggactgtcttatttctttaacccatctgactataaggatgctggtcacgacctgattaaccgagacatgttcggtcgcattcctgaagatgcatatcgagatggtaccatccagcgtcaggttgctggctttgatgacgttctgcgctctcctaagctgcctaccctgacggcctccactgccaccggactgactgttagcggcgcacagaaattccagcctgtggcgtgggatttggatgcagacggtaacaagcgcaacgtggataaccgcctggcaacagtaaccctttccgccactaccggcctgaagcgtggcgacaaaatcagcttcaccggcgtgaagttcctgtcgcagatggctaagaacgtgctgacacatgacgccactttctcagtggttcgcgttatcgatggcactcacattgaaatcactccaaaacctattgcactggatgacaccgcgctgtcaccagagcagcgtgcttatgccaacgtgaatacctcactggctaacagcatggcagtaaacgtgcttaacactaccaccagacgtaccaacgtgttctgggcagacgactcaatccgtatcgttagtcagccaattccggctaaccacgaactgtttgcaggtatgaaaacgaaatcgtttgaaattccagaggttgggttgcatggcatcttcgcaactcagggtgatatcagcactctgtctggcctgtgccgtatcgctgtgtggtatggcgttaacgccacccgcccagagtcaatcggtgtgggtctggctgaccaggcgtaa

SEQ ID NO: 151491 - DNA, 267 bp, Enterobacter cloacae
atgtctaacatggtttatcgccacggtgacagcaagaaatggaaaggcgtcgggtacgactttgaaatcgtaaacgatgacgatcttcaggaatatttagatgcaggctggtttgcacatccggatgacctcctaaagaatcctgcagagccagagccagagccagagccagagccagagccagagccagagccagagccagaggtaaaagaacgcaaaaagccaggtcgaaaacctaaggcggcaacagatgaatctcacgactaa

SEQ ID NO: 151492 - DNA, 504 bp, Enterobacter cloacae
atgaatctcacgactaaaggcgatctcgttctcgctgcattacgtaagttgggcgtcgcctcaaataccacgctaaccgatgtcgaacctcagtccatggaagacggggttaatgacctcgaaatgatgatggctgaatggtttgaaggtagcgatgacacgcctggaatcgatgcaggctacatattcgctgctgatgatgttgcaccagacccaggcgactcccatgggctcaccacaggaaagctcagtgctgtgtttcacaatcttgcgatcaggattgcaccagattatgcagtagagccaactgcaaagatcatcaccactgcgagatatggcaaagaacgactgattaaacagtcagccatgtcacgtgcaagcagcgctaaatgtaagtccggttatccaaaccgaatgcctgttggcagtggaaacagacttgccacctataacggctggaatttttaccggcgcaaggaaccatgtgataacgggagcgaataa

SEQ ID NO: 151493 - DNA, 1422 bp, Enterobacter cloacae
atgccagttcagcagcttccattgatgaagggagtcggcaaagacttcaccaatgccgattatgttgatttcctgccggtgaacatgctggcaacgccgaaagaggtgctcaactctaacggctacatgcgctcattccctggcattaagaagcttcaggatgtagccggggtaagccgtggtgcgatgtataacacgcatgagaacgctgtatatcgagtgtgtggcacagagctgtataagtctggtgtatcaattggcgatgtaacaggcagcgcaagagtaagcatggcctgcagctataacagtcaggccattggtgccaacggcaccatgaagctgtttcgttatgacggaacgataaagactcttgctaactgggatgcttcaactggatacgttcagtatgagcttggaagtctgcgtgacatgtgccgaaacagatcacgctacatctggagcaaagacggtactgattcattcttcattaccgaccttgaagatgaatccaagccagaccgttacgcagctgaataccgggcagaaagtcagcctgacgggattattggcatcgacaattggcgtgactttgttgtgtgcttcggtacgtcgacgattgagtatttcaacctgaccggaaactcatctgcagtcggcgttgcagtctatcagtcacagccatccatgatggtgcagaagggtattgctggaacctactgcaaaacgaaatacgccgatacacacgcaatcattagtcacccggcaacaggagcaccatcggtatacctgattaactctggcgctgtgcagcagatcgccacctcaacggtagagaagattctccagagctacagtgctgatgaacttgcttccgcatacatggagacgactcgcttcgaagctcatgagctattgcttatccacctcccaaggcatgttctggtctatgacggttcggtgaatcagggcggcgctcagtgggcaatcctgaagaccggattatccgatgatgtgtacaggtccgttgacctggtatatgagggtaatgcgataacatgcggagataagttttaccaccgcctcggcgttctggacaagtcagtttcgagtcagtttgatgagcagcaggagcatttgctctacacgccactgtttaaagccgataacgctcgtgtattcgacttcgagcttgaatccagcactggtgtatcacagttcgcggagcgcatgtttatctcagcaactaccgacgggattaactacggtcgagagcagatgattccgtggaactccccattccgctatgaccagcgagctatctggaagcgccttggtcgcatccgtaagaacatcggcttcaagatacgcattatcacctcatcacccgttacgcttagtgggtgccaggtaaggatagagtga

SEQ ID NO: 151494 - DNA, 750 bp, Enterobacter cloacae
atggcagatgaaccggtaaaggttaacgtgcagtcccgccgcgttgactcttcaatccttccaaatacgttcagccagccgtaccgcctctacatcattcagcaaaacaccgacatgctcagcatcgcgaacgctgctaacaatgccggtgagcttgcatatgaggctacggtaaagaacgaagagcaggacgttatcctggctgaccacgagagcaggatttcagcgttacgtgttgaagtagacgatcacgaaatacgcatcactggaaacaccaactcaatatcagcacttgatttaagggttaccaccgctgaaggggatattgtttccctgcaggctgatgtgtccgcacttcaatcaagcgtctcagccatccagactgactacgtatcgaaatcggccacagcaaaccaagcggttcagtcatctggcggctctctgcttgttggcaacgtaacatcaccaacagcagacaaattgcaggtgcttggcagtgaaaacgtctcagtatcgtacaaagttggagggcttcaggtagttggggcccgtaacactggctggactgcatctactggagccgcatctaaagctggtatcaacggcagcaccacatacaccgtaagcgccacgtacacgcagtcagaggttcaggctatagctacaggtctgcagcaggtcaggcagcttgctgtggccttacagacagcattaggagcaacatccggtcacgggttgataaacgcataa

SEQ ID NO: 151495 - DNA, 480 bp, Enterobacter cloacae
atgcacataaagctcatcgataatccggtgaagcttgcagaattcctcaacaatccagaaaacacaggaaacatcgtagacagtggagataaatacttcatcaagcctgatgcggtatatctcggcatctacgaaggcgttcttttggctggcgttcatgaagtgcgtaacttctggcacagcgtagttgaatgccacgctatatattcccctggttttcgcggtgagtatgccctcaatggtcaccggttattctgcaaatggcttctcgataactccccattcctcaacagcgtcacgatggttcccgacaccacaaaatatggccgcgcattgattcgtctgcttggcgcaacacgtattggtcatctcgacgatgcctatatgagcaacggaaaacctgtcggaatcactctttatcaattacctcgctcgaaatatgaggagctattaaatgctaattcatcaaattgcccataa

SEQ ID NO: 151496 - DNA, 651 bp, Enterobacter cloacae
atgctaattcatcaaattgcccataagcacctcagcaaagcggtgtatcagaagggtggagacagcggtgccggagcgcaggccgaggcaaccaagaagggcgtcgagttgcagcgagaaatgtggcagacgaacatgcagaaccttgcgccgtttactccgcttgctcagcagtacgtctctcaattgcaaaacctttcctcacttcagggtcagggggctgcattaaaccagtattacaactcacagcaatataaagacctggcgaatcaggctcgttaccagagccttaatgctgccgaagctactggcgggttaggttctacggcaaccggcaatcagttagcaaccattgcacctacactcggacaaaactggctatcaggtcagatgaataactatcagaacctggcgaatattggtctcggtgcactgactggtcaggctacggcagggcagaactacgccaataacgttggacagttatatcagcaacaggctaatgctgcagcggcaaattctaacaggccttctggggttcagtcagcgctaggaggagccgctgcaggcgcggctgctggtacagctattatgcctggctggggaacagcaatcggcgcaggtgtcggcgcattagcatctttattttga

SEQ ID NO: 151497 - DNA, 1371 bp, Enterobacter cloacae
ttgcttgccggtcttggtgcgtctaacgttaatgcacctcaggccagcgatgctaatactgcactggcatacatccgccagaacaacgaagacgagcggtcaggccgaaacaatataggcctgcaggcattgcagggtatcggctctgtgatggatatctacaaacagcaagaccagcagcagaggcagcaggagttccagcaggcctacggtaaggcctatgcatcaggtgatcgcaatgccatgcgtcaactggctgcacaatatcctgaccaggttgatgccgtgcgtaatggaatgaagtttgtcgacgaagaccagcgctctactgtaggcaaccttgcggctgcggcacgtctagcagcaacctcacctgaagcgatgggcgcatggctgcagaacaatgcagcagacttgcagcgtgttggtctggaccccaaagaggtagcgcagacctaccagcagaatccacagcagtttggtgagtttgttgaccacctcggaatggctgcgcttggtcccgttgattacttcaatgcgcaggataagattgtcggtcaggctctcaaccgtgacaagcttaacgagacaatccgcagtaatcaggctggagaatcacttacggccagggggcagaacattacagctcgcggtcaggatatctcagcagcaaccgctcgccgtggtcaggacatggctatggatagagccaatgccaaaaccgttggcgggactggcaatcgtcaggttcagcttgcagatggtcgcaccgttaatgtaggtggtaaattgcacggtgctggtgctaatgcgttttatgaaggcattgatgataacggcaacatggttcgcgttccggccagtgctattgctgcacctccgacatctgcagcctctgcgcagaactccgcaatgtccaaggacatgaatgcaattctagaggcgccggccgataagctcaacttcatgactggcatgacaggtggaaatggcactccttcatgggatgcggaagcgcgtagcagatggagtggtggcgagcagcgtcagttattcaacgctaccaagcgcattcagggcaagatgcagaaccagggtattgctgcagctagggatatgggcgcatcaggtatcaacacggttgccgaagctaagatgtactttcagggcatgcctcaggtcgattattcaagcccggaagcaatgcagcagtctctccgcgacattcagcaatacacgaacgactataaccagcaatacagcgttaatgtaggtaatgctggcgcaaaatcacagccgtctcgaccggcacagcaatctcaacagcaaccacagcaaagcgcaggcttctcttcactatggggtgactaa

SEQ ID NO: 151498 - DNA, 1959 bp, Enterobacter cloacae
atgtcagatattacggccaatgtggttattggaatgcctagccagctatttactctggcgcgttcattcaaagcagcagcatacggtagcatctatattggtcagattgacactgaccctaccatcccatcaaaccaaattcaggtatatctggaaagcgaggatggcacccacgctccggtaccacagccaatctcaattaatgcgggtggattccctgtatatagtgggcaagtatctaagtttgtaactgtgcagggccattctatggctgtgtacgatgcctatggtgtacagcagttctactaccctaacgttctcaaatacgaccctgaccaactaagggttgaacttgaaacgaaaggcatcaacatcatcaagaatggtgtaaaaagcgtaccattcttcgccgatttgaagaacggaagtcatgggatagtagatgcgatcatgacagtcgagcatcactccggtgggcttggtggtgccagctatcgtcgcagtggaactactggaattccgtcatctggcaatgaaaccctggtttatgatgccgatggcgttggctggaagatggtcaagcaaccgattcacagtgtaaggacattcggagctttaggtaatggagtggatgatcttgcagctttgactatgggctccaatttcatcggtcagaatggtggtggagtattatattttgatgggctcagtggtttaaacgacttcaaactaagtaataactggaatattacctatggaaacatcatagttgatggtgttagcgatgcccatattcatacggaatctacgacaactgatggtcactgtcttgcatttattggtccgctaaactctgagtcaggaagattaaaaaatgtagcagtaagaaacgttaaggtttcagcaaatggttccggcacgcttgataatgcagttggatttgcaggttgtgaaaacattctggcagaaagactaagcattcctcatgctgatagaaaggcagtaaccgcacaggtaaatgttgttaacatcatattcagggatatcgacgttggaactacaggttacgatgcgataactatagaaggcgatacagtaaataatacaatcattaccaaaaacgctgttattgaaaatgtaacagttgcctcagcaggaagggacgggcttcacattgctggttctagtgtcaccaacctagtagacagggtgattattaaaaacttccgctgtgatgctgcaactgcaaatggtgtaaacatcggtctgtctcaaaacgtattcattgatgactctactcgcataaacaacagtggggtgtatggatataacatcagcaatactaccgatgtgaaaggacgtataaatacgctcaacagccaaaacgcggggctagtaatgagtggctgtagcagagtcaacgtcaaggcaagcattacaaacgccggtcttgctggagtagcatcaacaaacccatgggatgcaatttacattggtaatgcgtctgatccacatgtattcgagactacagaggtatatggctctactcacagatataccataaatgcagtgggaactgcgatacagcacatctttaagttccctagactaggcctgatgcctgtaggggtatccggattaatcggaacaaacactgtaatggttgacatagcagattctggagagcaagccattacttctgcatcagcaatagtagttggttcagataacatctaccttaatccatcatcagctactaactatacaaccctagccggtggggtagttggtaaaacggtaaatgtaaggctaaatgggtctgccacactggttcacgggtcaaccagtggcaccttcaggctgaagggagcaattaacgttactccagccgccggaagtatgatgtccttctcctacacaactgaaggtttttggcgtgaaatcgcaaggaacttctaa

SEQ ID NO: 151499 - DNA, 1899 bp, Enterobacter cloacae
atgaatatacgatatagagccgatgttgacggcctgagagcgctggcagtgatgctagtgtttctctaccacctaaaaatagaagcgttcagcggtggtttcgttggcgttgatgtgttttttgttatctcgggtttcctgattacaggaattgtgatccgcagcattgacgacaaatcgttttctcttctcgatttcttcaatcgcaggataaagcgcatcgtcccgaacgtgtttgtcgtatcaacatgcgctgtcatcgctggctggttcctgttgatgcccgctgattatgcatcgctaatcggaagttacctgtacacatccatatacgcagctaacttctacttttgggacgttaccggcgcatacttcgcatcctcttcagaagaaatgcctcttctgcatatgtggtcgctggcggtagaagagcagttttatttcatctggcctattcttctgattgttctggctagaatccttaatggccggcatcttggaataatagccattgtcatggcagtcgtttcattcgctctttcgcaacatatagctgttaatgacatgggttttgcgtattacatgctgcacacgcgctctggagggttgctgcttggagcggctctggcgctaatgcacagagagtatgagtgggcacgcaatttcaactcatggatagcggttgtggcaggaacggctctgattatctggtcatccctaaccataacacccgcatctgtcttccctggtatcaattcagcaataccgtcattcggtgcattcctgattatcgccggtggcagcggatttaagcagaacatagcgtcaaagttattctgtcttaaaccggtagtctggcttgggctgatctccttctctgtctacctgtggcactggcctttcatcgcttacagtaactacctgggaattctggactcgtggaaagttaaggctgctatttttgcagcaaccattattctgtcctacatcagccttaaatttatcgaaaacccgacccgtaaatcatctctcacattcaggcagtctttcctcagtatcaatatcgctttcgtggcggttgcgctgatcgcctattacgcttgctcatataccaacggctttgatggcagaaagatgtctgctgaaaatgtagatgtgtcatatccgggtattgataatggttggtgtcatgtaagtgctgagggtcgtagggggatagcatttaccaaagaactggctaactgctatataggtgacaggtcttcaaacaagctggcgctctatgtgggtgattctaacgctggtcattacagcccatttgttgacgatatgggaaggcgtgcaggggttaaaattaagcaactcagcacctcttcatgctggccgacaatggatgaatcaccgtttggcgagaaccctgaggtttgccagaagttcagacagatagcgaaagaagaaattgcttcagggaaatacaaatatattattgtcggcaataactgggagcgtgcagctccttactattcctacaagacattcgattataaatccctatttgacttctattcctctcatgcaaagaaagtaatcttgcttgcacaaatgcctgaatggaaaaagaaccctgcagcgtgctatcaaaggaaacaatgtggtgctagtgatgcatttccgatgataccagacttccctgttgctgctggcatcctgaaaaaagaggcagggcagtacgccaacattgtcataattgacccttcatatcttatgaagaaagatggtgagtatactccgtttgccatgggatcacttatgtaccatgatgccgggcacatgagcatcaaggccatgaactggctttcttaccgatattttaaagacaatccaaatcctctgaagtaa

SEQ ID NO: 151500 - DNA, 390 bp, Enterobacter cloacae
atgggattcccgtcgccagcagcagactacgttgaagaacgcatatcacttgaccagcactttatcgctcatccttctgccacgtacatgatggtatctggtacgacatatcttcgggccgggatactgaaaggtgcgatgcttatcgtggactcatccttgacgccgaaagacggctcacttcttgtttgtgctattgatggggaatttaaaatcagacgttacaggactcaccctcagccttatctggagaacccggaaacaggaaggagagaagctctgccatcgaaggatgaaaccagtgattcttcacggccagtgtttggggtgatcacctacagcatcaacgatatgaggacgggtgagtttgatgactgtccggttatgtga

SEQ ID NO: 151501 - DNA, 225 bp, Enterobacter cloacae
atgccacttactgataccaaagtaaaaaatgctaaacccgctgaaaagcccgttaagctcactgatgggttcggcctctaccttctggtacatcctaacggttcaacgtactggcagttgggttatcgctttgaagcgaaacaaaaggtgttttccataggtgtctaccctgccgtttctctggcaggcgcaaggcaacgccgcgacgaagccaaaaacttttag

SEQ ID NO: 151502 - DNA, 438 bp, Enterobacter cloacae
atgtctgaaaatctccctctctgtgtttttaccgaaggccacatcacccttcctgatcactatcaggatcgtaccgttaatctcttcacccttcccggtgagaataagcctgcttttaacatctcccgcgacaacctgaatgagggtgaaagcctgccggactatattgaccggcagttaacgctgatgcagaagcatctgaaaggctggaatcaaacggaacgggtgccagctgagctcggcaataaccttttacagggtgaatgtgtgcatgccagctatctgcgtgacggtaaacgggtcttccagcaacaggcggtatttaacacgtctgcaaaccatattctggtgttcactgtgtcctgcaccgcgatactgacggacggagacagtcaacagttccatgcgctgcttgccagcttttcttttaacacctga

SEQ ID NO: 151503 - DNA, 867 bp, Enterobacter cloacae
gtgggggcggcatccggcgaactgattgcgacagcgattgccagacagctctatccggacacagatccgtcgacgctgacggaagagcagaagcagaccgtgagtacgctggcatctgtttcagcgggcatagctggcgggcttgccgagggaaatacggctggtgcggcggccggggccagtgcagggaagaatagtgttgagaataatttattcggcggtagtgaagaggctcaggcagcgtggatacgccagcacggcgtcgatatggcgacctgttccgataatccgagtggggccgcatgtcagaaagcaatgaatgaacgtgatgccgtaggggtggcgcttgcaacaggcagtgtagctctcttacccggtagcgctcaggtcttatggggattaggcgcaggtgctaatgctggtatcaactatctagctgatggaactatagacccaacaacagctattattggtggctgggttaatgtgatcagtgccggaaatggtattggaggaacagttggctggaatgcggccggaggtgcattaggaaactggcttgaaggtaaagatccaatatctggtgcgttagtaaatggtgcaggttccgttgtgggttatggcactggcaatggccttaaatggggagttaacgctggtgctaactggtggaaaggtggttgggatcccaagtttaacactgacctaagacagtttactgaaataaaaggggattatggtctttcaaaagaaatgaaaccaagcaatgtgccaagctcaattggtgacattggtggtagtatttcttcagaagttggaggtaaatatacagagtataaaatgaagcaagtaggagatggtagatga

SEQ ID NO: 151504 - DNA, 234 bp, Enterobacter cloacae
atgaaaatactaaaatatactcttcctctggttttttttatagtatttagtatggtttcaatttttctgacagggatcgttttatatgcatgcggagaggtttttttcttagtttataaaggaataccaatatctttttcaccgagtattattttgtttttaggtaaaataagtatatacattggtagttttgctggagtaatgttattgatcgctaacgtgctaaaaaaatga

SEQ ID NO: 151505 - DNA, 258 bp, Enterobacter cloacae
atgaagattgtttttatccctgcgttgatcatagtcctgattgataaagaacagggcatgggacgtgaattgacccgcgatgaggttgagtccatccgcgatgacgctacagccatccgcctgccggccgaagcagccgaggatataatcagagagcgtggctaccgcgatattgatccagagaatgtctggcgcgagtggcaggcgtataaagctgacagaatgtcgatgggaacacgctgctttagtggcacatga

SEQ ID NO: 151506 - DNA, 1794 bp, Enterobacter cloacae
atgagactacacacccttaaaatcaatggatttaaaagaattcataattcacaagtaaattttggtgacactacatttcttattggctctaacaatgccgggaaaagctcagttttaaaagccatagaatggctgctatcggataaaaaaaggatggcaactgactgttattgttcagagattgatacagaaactggagaaaataaagtaacatgtaaagatgtgatactcgaagcggaatttagaaatattccggatgaagcaaaaaactggagaggatttaaaggaagagtgtttacatatgatcctcttgatactggagaaacaggcaatagtattttttatagaaagagctattctcttggtgaggatgttgttatagagcttaaatcattaaaaagagatttgaaaaaagaatttgaaaatttaaaaaaaccttctgattacattgatgctggtataaagcctgaaataataaatgaattatttcctgcattagataaaaatataagcaccggtgacaagtcaaagcttgaactcattgatgatatttgggatataacaaaggaagaagtttgggataaaaaccccggggggataggcggggtagtcctgtcaaaactaccgagttttttgttaattcctgcagaatcgggagttactgagattgaagacaaaactggcgtactccaaaaaacacttaacgaactattcaaggatgtacgaggaagctctgctaattataaacgagcacaggaatgtctaaatgaacttgcaaaagaattaaatccctctgatgaagaatcagagtttggtataatgatgggggaattgaataaagttctatgttgtgtattccctgaatcaaagatctacgcctcagccgacctttctaaccctgacacggcattatcccccagtttttccattgagatgtcaagtaacatacgaaccgcggtatccaatcaaggaacaggcatggtaagggctgccgtgtttggtcttctaagattcaggcaagcatggttaaagaaaagaggtgaagatgagagaagccttatcattggtttcgaggaaccagaaatttatctccatccaagtgctgcaaaccagatgagagatataatatatgagttatcagggctatcatcacaaattatcgccacaacgcactcaccatatttaattgatctatccagaaaaccgaggcaaatcctaaatagatttcattatgattctaatcatacttctatcaatccattctccgtcacggaaaaatataagcaactatcagaagatgataagagctatgtgaagatgataatgaaattagatgatcatatgtctcgcatttttttcactaaaaaagttatagttgtagagggggatacggaggaaatcatttttaaagaagctctccgtcgagttccggcaagtgcacgaaataaaatattaaccaatactgaattagttaaagcacgtggtaaagcggctataataggattgataaaatatcttactgcgttagatgttgactttattgtcattcatgaccgagataaaggagttaagggcgcagagttatttaacccacatatacttgaagcagcaggtaaccctgaaaaagtaattgttgtcgaggaatgtatagaagacattcttgggtatccagttcctacatccgaaaaaccatttaacgcctataaggaaacgttaaaatggggaagtgagtttgacgaaatccccgttaaattgaaggcgatcatgcaaaaagtatatcactcttggctataa

SEQ ID NO: 151507 - DNA, 147 bp, Enterobacter cloacae
atgtgccgaattaatgttctgtccttgctgattaaaatcaataaacagactactaaagaagatattaacggtatttttgctatcgcccggcatttatctcatgcgcatattgaccggtatagatatcactatatgtcaattaaatga

SEQ ID NO: 151508 - DNA, 1164 bp, Enterobacter cloacae
gtgtctgcttatcgttgtctaacaatattatatgagcggtataaaaatgatatcttccaaggaaatggtgatcataaatgccaattagtgaatttataccatgccagattgttagatgaagaaggaagggagtatcaaggcctgcatgcagtaaattgctttaatgaatccttgaaaaaatataaagcatcaaaaattacacttcgtgggatctttgatgtagatgaagctattacagcattaaaagctatgattagaaaagaaggtaaacatgcctatgagtctatggcaataataaaaacagaaccattagacatttccgttgaagtgaatcgagctatagaacttgtttcagaacaaaaggacataattcattctctttacaatttttgttttattgcccatccagtcaataaaaaaagaatgattaaagatgcggttgacagtattaggaatcacccatttcaaagtatatttccttccatagtaactgatagagatggcagagttcttgctaaaacaaacggtgttgaaattgatgaattgaaagatgaggattatagcttagagaatattataattccattatcacaaggtttttcaatatatatatcgctacaaatacaggcaagaattgctcctgcacttaaacaaatttgtgaagagtattatattgattataaagttattaaagatctttgtgaacattgtggatttatacccgatagtaaaatagcccttttctcgcaagccctgcattttggctttgagtacaatttttctgcatcagtgcacctattggcccctcttttagaagatataattagaaagatactttatgatcaaggtgaatactctgcaattatagataagaatgcaaaaagcactgaagtatctatatcaactcttttagataaaccaaaagctaaggaagtttttgacgagaatttcctttttgagttaaaaatgctgttaactaacaacattggctctaatctgaggaatgcagtagcacacggattattagatgacgatactgccagcgggggggatgttgtttatctctggtggagaatattaagatgggtaatgctatctgtcgtgattggtcataatgaatatcaggaactaaaaaatgctcctgtcattgaggaatctgaatga

SEQ ID NO: 151509 - DNA, 1062 bp, Enterobacter cloacae
atgagcatcgtaagaaatgttaaagttgaaagcagagatattaagtggatatctgataacttcaagtctggcgagttaattattgataactcttttcagcgtagatatgtttgggtaaaaaaagacaaaatctcattaatagaatctatattaatggggtacccaattcctgaagtttatttatggcaaaacaaaaccgatcctgaaacaggcatgcgagttcattctatagttgatggccagcagagacttggtgccgtttttgattatgtctctgaacagtttgctttggataaaaaacatttagaataccaagacgccaacttctccggaaaaaagttctctgaattagacgatgaacaaaaagctatgatttgggggtatgatttctcaattcgatttataaataacagcattacgattgaggatataaaaaatttattcctacgacttaatagaacaaatactactctaaacccacaagaattgagaaatgcagaattcaatggcgagtttattaaacttgcagatgaaatatccaagcatcagttctggaaaaattacaacatattcaacaatacagatctgagaagaatgctagacattcagttcatcagtacaatattaatattcatacgaatgggaattgcagaggaaacatctcaatcagccattaataaaatatacgaccagtacaatgatgaatacccagaatccgaaagtgataaagagttattcatagaacttctgaatgttttaaatattatccttaaagaaaaagagaacttacaatatatagccaaaagaaaaactcacttctatacactattcaccctatcattttatatttttcgcgtcggtcttgataagaccaatgattatcaatctgtatcatcaaagttagaagaatggtttacccattataaaaatgaaacaaatttcgagaatgatgcagtaagatcactactcgacgaataccgactactatctcaagaaggtgtacagaagaaagccaatcgacaacgaaggttggatatattaaaagaatatttatcactatag

SEQ ID NO: 151510 - DNA, 603 bp, Enterobacter cloacae
atggaagatgttcaacacttcaaagatgccttactttcaaacgaacctatttacatatatcgaaaatacttactaggacatgacgtttggtattttagaaataaattaaaaaaagaaaaccatgctgaattctatgacgacttaaaaatatgcatgtctgaaaaactagaaatacacattaataatattgcgatagttggaagcgcgaaattaggctttagcataacccccactttggaaaaagcttttaaagactttaatgatgaaagtgacttagatctcgtagttgtttctagtgatttattcaggaagtgctggatggcctatctggatgtagcaaagacatcaagaatcccctattacaacaaagtcactggcaatatattcaggaaattcatatcactgaaaaacattgaatttaataacgagttctttagacagtggaaagggaaaatggaaccatgtcaaaaagacctgcaaattatttaccaagtccctaacgaaattaattatagaatatatgaatcttgggaagacgttgaacgctatcacgtccaaggacttgaaaaacttaaagatattatcagcaaggaacaacaatga

SEQ ID NO: 151511 - DNA, 615 bp, Enterobacter cloacae
atgaggattaaattatttaaaaaccttcaattaattaatctttgggtacaaatgctcacgcaaattacgacaatggttgcagcaattaccgttgggttatgggggtattactcaaccatatacgtaaaaaaagaaaaagaaattacagagtataccttgaaggactttgagcaaaagacaactcaaacaccacatattcaggcaaaggtagaaccaattgttcatatgtccaataacggttcaaaattattacagatcaaggtgatattatcaaatgttgggaacaaagaaagtagagtaacatttgatgatgattccctaaatttaatccctgttgagttttccaaaggtaagccaatgtttcaagagccaattaatctactatcaggtcgttatgcaggtaatctcaaacgaatgcctcttaacttcgtcgatataggcgctggtgaaagttatgagcttacgtttatccatagtattgatagtgctggtacttacctgatccactttcttgctcttaatggaataattccatcggataaagaagtttctgatacaaatggtattccatttaagtattccatcggggtagatgagtatttgcttataaagtga

SEQ ID NO: 151512 - DNA, 1083 bp, Enterobacter cloacae
atgagggctgtttcacttttttgcggcgctggtggcatggacgtaggagtcatcaatgcaggtttcgacatcatagcttcaaacgagttagataaacacgcatgcactacctatagggaaaatcatcaaaacaccgagctatttgagggtgatattgaagagcattttgatgctattactcaatatcaaggggtcgatcttgtcattggcggcccaccatgccaaggtttttctgttgctggtaaaatggatttagacgatccaagatctaaactagtattttccttttgtaaagttgtcgaaaaaataagaccaaaagcattcattatggagaatgttaagtcgttaggtaaccttgaaaaatttaagccaatcagggaggagattttcaaacgaatgtccgaagcgggatattgtgtatcaatggttattttaaatgcaaaagattttggtgtgccacaatcaagagaacgagtgtttataatcggaataataaataatcaaaagcaaataacacttcttgattttgagaaacataaagaaaaggctatttctttaaggcaagctatattacatctcggccccgctggtagtgcaaataatctaagagttacaaaagccaagataactcttgcagaaaaaccggtcttgagaaagtcgccgtatgcgggcatgttatttaacgggcaaggtcgcccgcttaatcctgacgcttggtcaagcactcttcctgccagtatgggaggaaatagaacaccaataatcgatgaagagcatttatataacaatgcaactagctgggtagaagattatcataaagctttacttgatggtaaaattaagagtcaatatggtgacgcacctaaaagattaagaagattaacaattgatgaagcaattatacttcaaaccttccctactaattataaatttagagggccgcaatcaaaaatattcagccaaattggtaacgcagttccatgtaagctcgcagaagttgttgcaaaagtagttaaggaacatctcattgaatcaaaaaacaaaaatttagaaagcaaccagttatcatttgagtcgatgtaa

SEQ ID NO: 151513 - DNA, 258 bp, Enterobacter cloacae
atgaaaactagaaaatctatccataatcctgattacagcgaactgatagaccgcctaacggaagaacggaagcggttaggcctgtctcaacttgaagtttcagcttttatggggctttcgcaggctgacatttccaaaatcgagcacaaagagcgtcgtttagatgtcttggaattaaagcgattattacaagttttccgagtgaaagataataaaaaactatcagatataattatgaagttcttctcgttggattga

SEQ ID NO: 151514 - DNA, 723 bp, Enterobacter cloacae
atggcgagaactaagggtgctgtagcaaaaggggttgataatacagctgtacgcattttcttacgagggtatggctccttgggggagttgccacgcattgtggaagattgtatctgcggtgcattggggcaggaagaagagacaagaaggttcaaaggagagcgaattcttgcaatcttagaacaactggatcatatcgatacgccaacagtacatcggcagatgtgggattataatatttctcaaggtaaaaatactgagccatccaaacggaacacggaacgcatgacaagggttctaagatgtgcttccagggcactgtatcatcatttgaaattgtgtaacggattgtcgcgtgaagacgaggtggtccagatttccgctcccgatctcacggtagatgagatcgaacatgcccgtcgtttggctctagcaggtaaaattgaagcgttcacacaatttgtgaactcttgccggagcgtgatcaaaaactatgagccgccagtgttcaagtatacaggggaaaatgtggtcgctttatcttcttgtacggaggtatctttaaggactgcggttagtcgtccgtattatggttatgttaaaaaagccgtaaaagatgaacagccagaagacctatttacagtcaaaggcagtaatacgaacctccaaccactgattgatgaggttgggcgatcctacattgtagtggaaaatgtagcttag

SEQ ID NO: 151515 - DNA, 267 bp, Enterobacter cloacae
atgaatgccaggacacttgcaggtaatattgaacgttttttcgaaaaccattgtattgagagcttctccgtccgtgacttcagaagaacatttaagacccttgctggacaattgaagatcagcaaagatattcgtgacagaatccagaatcatgcaatgaatgatgtttcgagcatgcattatgacagatatgattacaatgatgaaaagctggaagcccttttgaaatgggaaaataagctgaaagaaataatgaacaacaattaa

SEQ ID NO: 151516 - DNA, 222 bp, Enterobacter cloacae
atgcaaatcaactttactaacaaggcaattgaaaatcttgctccaaaagataagtcctacatagcgtatcatgccagcagtgaacgaggcactggacgcgtgggaattctcgtttatccatctggacgcaaaacttttatgtatcgtcacttcgtaggaaaaagtgcaaaattcgagaagttgggtatctatcctgatatgactatcagtagcgctctgtag

SEQ ID NO: 151517 - DNA, 1089 bp, Enterobacter cloacae
atgtcgcatctgatgctttcccgtcacgggatctggtactaccgtagggtctacctgacacctcggaaacgccgtgaaattcgtatttctcttcgcacacgttccaagcgtgaagctttgctccgtgtggagaaatatctcgcctcacgacctttccactgcgttccgcagtccatcccggcacacactgcaaccccgtctgcttccttccaacaaccacaacagaaaaagcctttcaagagcctgaagagtgagcttgataattacaccagcgctaaaacaggagaggttggtgaacgggaaatattgacgatcaacagatgcgtaaatgcatatctgaattctacaaaagagcctttcagcaaaagaagcgcggcggcgtttgttgatggccttgaaggttcagcatccaccagaaaccgttacatcaaaaagaactcggcgtttttcaaatggcttgcaactcgcacggatgatgagattcgaaacccatttgaggggatgggtgttaaggaaacaaccgcaccaatggatcgccgtccagcatacacgctcaacgatctgaaacgattgtacattgctttacatggcgtgaaggattggaagcggtggatcatcttaatcggtcgttattctggtatgaggcagaatgagatttgccagctttaccacaatgacgtgatgaaagttgacggggtttggtgtttccgcgttgataacttgaatccaaatcagacgataaaaacggacagctcgcggcggttcgttccgatacattcgcagcttcttacgcttggcctgcttgatttcatcactgacagaaaagggcatttgttccctgagcttaccttgcatctcggcagttatggacactatttcagccgttggtttacgaggttcagaggcaagcatagcctgcctgaatatcattcactgcgccactatgccgccacaacatttaaacagaatggcttccctgaacagttcgcttcgcaggtgctcggacactcgaacgcaacgatcacgtacaaccgatacgggaaggggattgctgttaggacgctcgtcgagttaattgaggtactctaa

SEQ ID NO: 151518 - DNA, 954 bp, Enterobacter cloacae
atgccaagtcgtagaatcgcttacgcatactacgatcctgattggattaaaggcgagcatacgcttctcgccctcaaaaggaatactgtcgagccgcttgcttattcactgtctatgaaaggatatattttttgtccttcttgctatgaacatataactcgagtgcctgccgatcctgacaagggcatgactacgaatgaagttccggcctattacaaacaccttaaagatgataatgcgcctttctgtagtttgagatgtggccccattcagtacaaaaaatattcatctcaagaagatgcaaaaaaagccgttgaagatgaagagcttatagtcataagcggttttctcgagtctcgtcctgataacaatccaaggatcgattctgagggcagtgaggtacctgtcgattctcattttgagagaaaaaatggcaaagaggtttcattgcctatttcccgccatcatggtgagtctttcaaggttccgagccaagtaactagtgtccagtctttatgcgttaatttcgatcataattattatcgtgagatttaccttgttggcgcagatggtaaagcaaagcgctacagattttgtgactcactaaaagaaatcaatgacataactgagggttcttctgatccagcattcttttttggtacgttttggaaaattgagaagtttacaggccatagtaatgtctggttaaagatcaaccaaggaacatcatttagggatttcagagtacgtatcactaatgatacagctgaagggagaggattttttaatgataaaaatcgtgggaggataactgttttttatagtcgagtagatgaggtcggcatggggtatatgacaccccagttagggtggggggaggtggcacttttgcctgcaaaatatgatgattttttaatcagtgattatgcgtcatctcgtaaggacaatcattaa

SEQ ID NO: 151519 - DNA, 564 bp, Enterobacter cloacae
atgtcagaccgtaacaatgatttttctctgttagtaaaattgctgaacgggtttttgaagaaagatgagataaaaaaaaggctacattcttttgttgaaaaagaaactaatgattgggaaaaatggctgcaaatagaatttgctcattatctcacttcaaaaaagaagtatgagctacatcgtgaagtcacaatatacctcgatccagtagattaccctgatagcagacttgctaaagtagatttgattctgcgtgaaaaatcctcaccctctgatgattatatttttatagagttcaaatgtactaaacgtgttgcaccattagttaggggcttagcagccgaccaaaagaaaattaatgctattaaacattgtgactacaaaatgcgtaattatctcggtgtcgggtttcatcttttttgtgaaccagatgatatcgattttatggaaaagtacgttagtgaagaactcaatggctcttacgctgtttttaaattatgtgagtgtccagtaagatataattgccaatgtgaattaaatgaaattggcgttgttcttttttga

SEQ ID NO: 151520 - DNA, 546 bp, Enterobacter cloacae
atggatatctcattaagatcattagcgagacagtacggatacgatgaatctacagttcgaacttgggtagaaaagggaatgccgacaggcactgattctaacgcaagaagttggattgtagataatgtactaaagccgttgcgtgatactaatacaaaagaacaaattgaacaagaacgtttgaagaaactttcagcagaaaggcagttagcagaattagagttagcagaaaggaatgggctggtggtcagtactgaatatgtagaacaagtactaacagaatatctattccagatcaaaacagcagtacgtgctataccatcaaaaacttatcttgaattgtttgcacaatcagatgcaaaggatttacgcgatgtattaagaacgcatattgataaaacattataccaattaggctcaatggaatttgagctacccgatgacatggaagtattagaggatggaaacaaacaaaaagaaattaacgaggattctgaagaaagtactaccaacgatacaaccgccgaagattcagaaaaccagtga

SEQ ID NO: 151521 - DNA, 126 bp, Enterobacter cloacae
atgataatgattaaagaaagcacttcaggtcttgattccaatgtttatatagttagcatatttttgtttgtattagtaatcatcggctcctggaagtcaaataagaaaaaaaataaagccccataa

SEQ ID NO: 151522 - DNA, 708 bp, Enterobacter cloacae
gtgttaaaaacaaatatagcaacatttatcaatggcattagattatcacatgttatgtgtattgcctttggattgttaattccaatttataccgatgtgctattttttcacggttatgacagttcaacaacatcagccattatggatactgtaatggctatagcggcaatatataccattttcaaggttaaagattggttcactgataagataaatgaaaaagggtttgaacaagctaatcaatatattacgtttttccatgaggcaaaacttaaagctgaactattacattttaacatttccgatttatataattatttaggaaccaccaaccttaatataaataatcctgagtatcaaaaaaaacacaataaagttatagagcttcattcagattatagagaccacataacaaaacttaaatcgcagttagatatccttcgcgtttggaacatggaagttcacccaaataaaaagagcaagttagaagaaagcgtccttaatttaactgcatttataattacaagtgacaaaatgataaagatttgcaatgatgtaaatggtatggcacgtaaaaaacaatgggactttgaaagtttaattttcaaaaccaacttcgccttaacccaaatattgccatcagaatggcttactaaatggaaaaatctttttgtggtatctaatgaaaaaactataggcaacaattaa

SEQ ID NO: 151523 - DNA, 174 bp, Enterobacter cloacae
atgtcgcatattgaaaccgcaaacggcgcactgatagttataggcacgcaatacctgctgtcgaaacaagggatcacgctgtttacgaatttgcaggagattgaaccccaactcgtcggcgagttcttcctggatgctttcggtaaagtgtgcttcgaggatttgctgagctaa

SEQ ID NO: 151524 - DNA, 1062 bp, Enterobacter cloacae
atggatagtcttaaatttcaaaggttttctgattttaaccatgacgatcctttctttgatagcttaaaggaagactataaagaattccccgaatggatgaacaagaaagcaaggaatggtgattttgcttatgttctctatgatgagaattttaacattgaaggattcatgtacctgaaggaagatgatgatgctggagatatatctccagctctacctaaaggtaaacacctgaaaatcggaacatttaaatttgaatcaaaaggcaccttaagaggacaacgctttttaaagaaagcattcgaccacgcctttaactctaactccgatgatatatatgtaactgtttttgaaaaacacaagcaccttgtaaaattgtttcaaacttacggtttttatattcatggggaaaaagaaactcaaaacggcaaagagtttgtttatgcccgtaacttaaatgatatttacggcgatgtattgcttgactaccctttggttttaccaaggaacaaaaagaaatttatccttgcaatcaaacctgagtatcatacaagactctttcctgactccaaactgattaatgaatctcccgacgtggttcgcgacgtctctcatacaaacagcattcacaaaatatacatatgtgctatgcattcggttcagaacatgaatcgaggagatattatcgttatttatcgcatgaccgatgtacagggttcagcgcgttacagatcagtggccagttctatatgtgtagtagaatctgtacgactaatcaccagctttactgatgaaaattcttttgtagatcaatgccgtaaatttagcgtgttctcagagtctgaattacgggatttttatcgctctaagaaaattccttatattgttagatttacatataatattgcattgcaaaaacgtcctaatcgtgcaatgctgcttgatcaagtcggtttgactggagaccgcaatggcagatggggcaattttgaactcactgaccggcaatttaatgaaattctagaattgggctgcattaatgaaagttttattgtcgattaa

SEQ ID NO: 151525 - DNA, 141 bp, Enterobacter cloacae
atggaaaccgtaattcaagcactggaaaaaatggggcgggcgacgtaccgcgaatttgttgtgcctaaggcttattaccgttctctgccggatgccgcctatgagttcgccgctcaaattcgcaaaggagtgcagtcttga

SEQ ID NO: 151526 - DNA, 1191 bp, Enterobacter cloacae
gtggttttcctgctaactgttttttgcataatcacattttcctctttagtatgtgaaaccatgaaacgtgcatataaataccggttttacccgacaccagagcaggctgagctattagctcagacgttcggttgtgtacgttttgtctacaacttcatcctccgctggcgtaccgatgcatactacgagcgaaaggaaaagatcggctatctacaggccaatgctcgccttacggcgctcaaaaaagagtctgagcacgcctggcttaacgaggtatcctgtgtacctcttcagcagtctctgcgccaccaacaagctgcctttgctaacttcttcgccggacgtgccgcatatccggccttcaaaagcaaacggtacagacaagccgctgagttcactgcgagcgcgtttaaataccgtgacggcaagttgtacatggcaaagagcaagtatccattggacattcgctggagccgtaagttaccttcagcaccgtcaaccgttatcatttccagagattccgctggcaggtacttcgtttcctgtctgtgtgaatttgagccggtattaatgcctgttaccgctaaaactgtcggcattgatgttggcttaaaagatttattcgtcactgacagcggattcaaaaccggcaatccccgccacacggataaacatgcgaagcgactggcgttgcaacagcgcaggttgagcaggaagaaaaaaggctcaaagaaccgcgccaaagcacgcttacaggtcgcccgactccacgcaaaaatcgccgattgccggatggataacctgcataagttgtcccgcaaactgattaacgaaaaccaagttgtttgcgtcgaatccctaaaagtgaaaaacatgattcgcaacccgaagctgtctaaagctatagctgacgcaggctggagcgaatttgttcgccagctacagtacaaagcggaatgggcaggacgtagcgttgtcgctatcgaccagtatttcccttctaccagacgttgtagctgttgcggcttcaccatgaaaaaaatgccccttgatgctcgtaaatggacttgctctgagtgcggagtagcccatgatcgtgacattaacgcggcgcgtaatattaaagctgccgggctggcagtattagcccacggagagcctgtaaatcctgaatcgcagcacgcggcttag

SEQ ID NO: 151527 - DNA, 273 bp, Enterobacter cloacae
gtgaaagttgaatatctattcattggtcgtggtctcgatggggagatcaagacggacgattatcccaaacaaaagttgcttgtaggagaagttaccgttcaggctgctggccatggaagccaaggcactcccctcaaaacgtttgaggttgacctttttccgcataacgggcacgtctatgcggtagccattggtcggagcacaactgggcaggagataatccagttcattgaaagctcaggtgtgaaaccaatcccagatgagctgctgtaa

SEQ ID NO: 151528 - DNA, 198 bp, Enterobacter cloacae
gtgaaaccgctgcttgccgtgaacgggtacgacgagcagcgtgcgcaactggcgcttgagttcctgcgcatatactgcggcccggacagcactgcgctggagaccatcgaaggcgtggtgtaccgcagcggagatattggcatgcgcatgctgcagccacatgagctatacctggcgcagggcttccctgagtggtaa

SEQ ID NO: 151529 - DNA, 1131 bp, Enterobacter cloacae
atgcataatgcggatgttgaaaacgatactactgaactcgaggatcaagaaggactcgagttaacatcacatccgcatcagatgggtactgacactgaagttaggattgctaaagaacaatcgagtgtctttgagttgctccggcgtgagagtcgaggacagcttgtattggcaccggattttcagcgtaaagatgtctgggaccgtaagcgtcaatctgagttgatagaatctatcttaatgggtattccgattccgctgatttatctttttgaagatgaaaatggcacacgtcaaattattgatggtaaacagcgtatttctgccttgaaacgttatatcaataatgaatttgcattgactgaactttctatgttacctaatttaagagggaaatatttctcggcgatacctcctttactgcaagcgaaattagaggactgccaattacactcctatgttattcaacctccgacgccagaatatgtgaagtttaatatttttgaacgtgttaaccggagcggtatgaatcttaacaaacaggaaatgcgtcatgctttatatcagggacaggcgacacgtttgatagaacggttggcagaaagtactgcatttaaactttctactggcgatggtgtaaaagatgacagaatgcgagatcgctatttagtattgcgcttcgtagctttttatttattgattggcggaatgttacctgaaattgagttccgttcggacatagatgctttccttgcttcggtgatgaagtttgtaaatacaaaagccgacgagcaactaattgataaagctgaaaaagcctgtatgcgcggaatgatgaacgttttttattcagtaggaactgaagcttttcgattcacgtccaaaacgggtgcaaaacgacgaccgataaatatgggactatttgaagttttggtcatggtgtttagccaaattaagctagagcttttgccgaaagatactgatttaaaagcattcgtagaacagtataaaaagaattttgatgatataggcattttttccggtgctatagataccactgagtacgtaaatatgcgatttgaatttgctcgagaaatgataggaaggataaaagatgcttacacacattag

SEQ ID NO: 151530 - DNA, 1050 bp, Enterobacter cloacae
atgcttacacacattagtataaaaggttttaaaagtttggactcgactaatcttgggcttgctcctttaaccatattaaccgggactaactcttccgggaaatcgagtgtgttacaggctctgatgttattaattaagcatagtgcttcagtaaatcaatatagtatggaggatgtcacacgtttcttagctgattttgcagttataagaaataaaaaaataaatgcgaaagctataagcatagatgtgcatgactctgaaaagaactctcacacattatcgcttaatgcagaaggtatagatattattagtcggcttggctatcaatatgagcctagagttattggcaatgaaccggaattgctttatttgaacgctaaccgtttaggcgcccaagaattagttccagtttcagaacgtcgtgtaggaggggctggtgagtacctcttttcaacgtttgataaaatgaagcatttgccagtgccagactatcttgtgaaagctagcgaatcgactactttggcctatcaattatcctattggttgaaattaattacaggaacgacatctgaattagtcactgaaaaagttggtgaccaagttaaagtcgcttttaccattaaagagcttgagggaaatgtttcgccattgaatttgggcgcggggatgagttatatcgcaaaagtattactcctatgccttatggctaaaaagggggatctaattcttctggaaaatcctgaaattcagttgcaccccaaagcacaagcgcacttagctgtatttctagctttcattgcaagtaaaggaattcaggtcatagtagaaactcattgtgaacacttaattaacaagcttgcttttctggtatacgaagacgaaattcaggaagaagaagttgttttacattacaaaccagaagttgatgaagattttatttcgttaaaaattaatgaaaacggaaaattcactgacctaaatggtaaagttaccgggtttcctttaggtttttttgacgcgactttagatgatttgatgcagatgaggtaa

SEQ ID NO: 151531 - DNA, 750 bp, Enterobacter cloacae
atggcttatcagatggtgctggatactccattattggttgcatacgaaaatatggatgacaaaaataaagttaaaaggctacataaaaaacttgtcttgccctatttaactaataaaaaacaatgggttgcagccaagaacttaggtatgaatatacctgatgcagagtatagacaatatttgtcagagcttgcaaatagacctgaaagcgatgatgatctagtcactttggcatcaaagtcgttattgaaaattattttaaccgaagataaaagtctgcaactcccttatgtgcattacagaaaagggatggtaaataatcaagtgacagtaaccttgagtccttcagataatcgagttcatttgaaaagttatcttaaattgctttgtgaaaatgcaaggaaagttaccatttgcgataattatttcgccaagaactgggagaatacatgtagtttatttcactcagtgctaccaaaaaaacctcttatcattgagttttgcgaaattgcagcggatataactgcgcctagcaatggtagcaaaataaacaatgaatttgcacgtagtgttcatccagaatggaatgtccaaactaatacgaatcaaaaatatattaattgtcatgaccgatatttactcattgaaagtcctgaagggaaaatagaagtgatgctttcgagtggttttgatcatatatggaaagaaaatccaaaagagattacttgcgtttttcgtgatgcctcatag

SEQ ID NO: 151532 - DNA, 393 bp, Enterobacter cloacae
atgaagatccgctacaaggtaatcatcttcgcgttcgtgttgagcatactaggcggaatcatctgggctgccagccactaccacgataagtaccaggcggaaaagaaacgcgctgatgctgcggaacagaacgccagcgccactgaagcgattacctctaacgtcattcaggctgtgaacatcatcaacgccatttcagaggccaatcaggatgcaaagaatcagatcgcattggaatcacagagagcccagacagatatcaaagtggctattgcggatgacaattgtgctcgtcagcctgtgcctgttgcagctgctgacaggctgcggcaatacgcgaacagtttacgtaccggttccggtggtgccgcttccggcaagtctgacttctga

SEQ ID NO: 151533 - DNA, 210 bp, Enterobacter cloacae
atgtcaaatcaggctcgtcatttagctgagcaggcggttgtggcaatctttggtgctttaaaagatgctggtgccgatttagaaaagatcgctggcaatgccagagcaaacattctcgatagtagtagcaattatcaggtacacggcgaccacgccattatcactgaagcttgtgaagtcatcagtgacgcggaaaaaaatcttaagtaa

SEQ ID NO: 151534 - DNA, 639 bp, Enterobacter cloacae
atggcaatgatgtccattgatattgattgccctcactgcctaaaagaaagggcagtgatgaggtttattaatcaagcatatttaaagcaaagatgttactcgctggtatttcagtgcaactcctgcttcaagcttttagtggctgaggtagaaacagatattcaaaacacacctaatgactatgctgagtcacaattttaccctgtgataattaacaacaatcctagatttaaagttcttagcacttaccctttcaagaaaatcatttcggcgccagaagccactccagacagagcagccaaattttttatagaagctaaggatgatttcgctcgcggccgatacgaaactagcgcaatgaattgcagaaaagtgattgatatagctacaaaaacccttcacttaaaagaggaagataagcttgttagacgcatatcagcgcttagggatactggtttaataacgcaagaaatggctgactgggctcatatagtacgtatagatactaatggtgctgttcattctgacgaagagtttactgctgacgaggtagatcagttgcttaaatttacagaggtgtttttgacgtactcctttacgttacccgcaatggtaaaagctaagcgagaacctgaatag

SEQ ID NO: 151535 - DNA, 297 bp, Enterobacter cloacae
atgatttacggcgtgaagacctattatgtcaacagcaatacagacgctcgtcttattcgttacgatgttattaaactcaacgatgatatctaccaagtgaaggttttcgacgaccaacagcgagggatctccgatccaagtttggtggtgcagattgatgattttcagattacccgagaggaatacaataaaaagtatccatcagggtttcaaaccggcgtggctattaacacgccccctggatttgaaaacacaattaccgattctcttcaaatacaccgagactcaatcaagtaa

SEQ ID NO: 151536 - DNA, 261 bp, Enterobacter cloacae
atggctgacctaaagctcgttaatctgaatgccagaaaaaatgcagatcttgaacatcaccgcacggaagttgtaaggctacttggagaagcgctgcaggcagccaaagagggcagctatcggagcatggctgtattgctcatcaaagatgacggtgcggttcttgacgcctggcatagcggcggtctgccctatgtcatggtgggggctattgaatcactgaagtgcgatttcattaatctgcaaattgagaggcgctaa

SEQ ID NO: 151537 - DNA, 351 bp, Enterobacter cloacae
gtggctatcaactatcagcgcatgcaggccagaacaatccgcatgctcaggcagaacggcgtggcgtataacgtcacccggaaaggttcgataacggttgtcggcggcgttgagtacaaatctgaagcggtcctgttctctgctgtgggtgtgaaaaccgaatatgacccgggcgaaattgatgggacggtaatcataaatggtgacgttcagatagtttttaccgcagagcaggaaatcaaaatcggcgatgtggttgatattgacggcacagcccatcgtgttgtcaaacccaacccggtaaagcctgctgcgctggtgctctgctacaaagcacagctgagggcttag

SEQ ID NO: 151538 - DNA, 651 bp, Enterobacter cloacae
atgtttaataattacataataattatattacttgggttttttcatgtgtttaggataagtgcgttttttttcaatgtcgtaaaagtgatggttttgatatcgttaattaccggtgtgtatgttttttgtaagaacgttttcggtgaggctcacaatttatgggctggtttaggggggttggttacctctttttcagtagcttattttctttttagattttgggtctggggagacttatgttttgataatggttcgatccttgcagcaattggaacagctttggggttgataggtgtttttgcaggggctaaatttgctgagccggaagtgatgaagttgcgtatggacttgcaggaagcatatcttgatgcatccttaaattgcattggtgataaaaatattattaataaggcactaatgtcatgtgcaactgcttacccaaaagagtttttatctttaagtaatgagttggcaaaggcgaggtatcttactcctacgctatctttggctgatagcgtataccattcttcagatgacgtgaaaactgatggttgtatggcctattattcaacggtgtcaaagcaatgccaagatagcttcattattttcaatatcaagcatcctgaattcgctcgcggacacaaaaaataa

SEQ ID NO: 151539 - DNA, 333 bp, Enterobacter cloacae
atgggacctattaccacagcaatagtttcaagggctatctatgatttattgctggctggaatatctttcacaaaagataatattaaaaagaaactaactgaatttattacaagtgatgaaaatgctgaacttttagcagaaaaaatagaaagattggatgttaatgatgatatgagtgaaaaagctattgagaaacatttaaaagccagcccggaagtgatgaatgtacttgaaaatatccctaacgcatcaatagtctcagtaaaacaaacacactatgggacaggcgataatgttggaagagataaaatcattaatgggaataatgagtaa

SEQ ID NO: 151540 - DNA, 1494 bp, Enterobacter cloacae
ttgtttttaatccttctttgggctacaaatggtggtgttactttgaaaacaactctcaatcaggcttttattatcaataagttaagcattgatgtgaagcctgcccttaaccatgctggaaaagtcgttttcgaagctaaccctgaccaaaaaccttacatagtttttgatgatcaccgagattcacctgttggcttcggtgtgaaggtcagtttgacgaaaaaaacctatgtaatccagcgaagagtagcctcgtcagatcgtaatgtcagtgagggtaagaagccaagctctgtcttgaaagtaaaggttggaaatgtgtccgattttccaagtattgatcaagcccgtgaggttgctcgacagttggttcagacaatgatcgcaacaaagagaaaccctaacaaaattaagcgagaaacggatgcttctgaactcactatcagtgaagtgtttgctcaatatcgacagcatctgttaggaagatcaaaaccagctaaacccaacactcttaatgtcctgaacaaagcagagaagaggctttccgagtggtctggtctgagagttaaagatctttctggtaatgagatccttcgtaagtttgatgaaattgcaagcagagccaggacagcagcggaacagacattccgatgggcaaatgttgctgtcagacatgctatcgatatcgaatcgagtaatgcccagacacaacaacggcaaccatcgctgtcatacaatccattttcaatactgaaagtgcagaagaagttcaggactcgttctgagcttgaagacagctacaaagcgaaaggtgtcagaaatccgctttcgccaaaagatactcttggacgatttttaacagcattgtacaacaagaggagtttcaaccggcttgggtgcgattatctgctactgactgttctgttaggtgccagaaaggaagaaacagcatctttatgttggagggaagctctcaccaatgaagaagcaaaaacgacaagctttgttgacctgagtaacagaaccatccgtttttacgatactaaaaacagaaatgatcacgagcttccgatttgtgatgctgtcaaaattattctggaagacagaagggacattgttcaggaagcagaaactcttcctgagagactgaaatgggtttttcctgcccgctctacacgaaacaaagtgggtcattattcagacagcaaaagtttgagagagtatctttgtgcagaagcaggtattgtcaaacttggtatgcacgatcttcgcaggacttttggccgtgttgctgaggaacttgttacatatgccgttgtaaagaggctactcaatcaccgaaacacaactgatccgactgagagatatgccgttcctgacgaagatcgagtcgttgatgcattacaaaagattgagttgcatatcttgaaaagtagccctaagttgtataatgatattcttgcatcagctaaatacccaccactaaacgagtaa

SEQ ID NO: 151541 - DNA, 171 bp, Enterobacter cloacae
atgaaaaacaaaaaaatggatgtaaaaactaattgtgtgaccgtgcgattaactgacgctcagttaaccgcattgcaggaactatctaagagtagagtctgcgagcgtgaaacactcgcaagtgcttttcagtacttactaaaccaacacatcattctaaaaaagggctaa

SEQ ID NO: 151542 - DNA, 1821 bp, Enterobacter cloacae
atgaaaaaaatctttgtttatcacatggttagctccgatcagcagctcgacggatcaggcatcgcacggcaggcagaacttcttgaagcataccttaaacgtactaacatccttgctgagatggatgatccagagcctgttatcatcaccgagtcgggcggggtgagtgccttcaaaggacacaacatgctaatcacttctggcttaggtgcatggatgcaagaagtacgtgcatctatgtgggatggttctcacctcgtgtacgagaacggagatagattttccaggcagaatccttttacggtgattggatacatcaacgatttaatcaatcacaatataacgattcacgatgcaactatgaatattatcattagtcgtgaaaatagtgcgatgttgcctatggttttgatgaatgctcaacgggcatatgatgaatctaagtataaaagtgatcgtattcgtaaaggctgggcgaagaaacgcgaacaagcatttaacaaaggtactattgtaactaataaacgtcctcaatggatcgaagtagaaaaagataagtatgtacttaatgagaaagcagcagtagttaaagagattttttctctttatcaaactggcatggggtgtccaactattgctaaacaacttcaaagaaaagaaggtgagcaatataaatttaatcgcccgtggactggtgaacttgttcataagattcttactaatcgccgtgtaactggtaagattttcatttcagaattgatccgtaaccatgatgatattgaaaatccagtaactcagaaaaaatatgatatggacgtgtacccagtagtgattaatgaagaagaatttgaattagtacaagaattgctaaaatcacgtcgtccaaatgctggacgaattaccgtgaagaaagatgggcaagaagaagtactgattaaaagtaatttgtttagcggtatcgcacgttgtaccgaatgcggcgggccaatgtatcataatgtggttcgtgctaaacgtacaccaaagaaaggcgatccaaaaattgaggaatatagatacatccgttgcctcaatgaacgtgatggactttgtgaaaacaaagctatggcctatgaaacggtagaacgatttgtagtagaacatatgttaggaatggatctaagtactgtaataaaagaacaggaatttaatcctgaaatagaagtattgcgaatccagattgatcaagttaaggatcaaatcactaactatgaaaatggtattgaacgccgtaaaactgctggtaagcctatatcttttgatatgcgtgaagaactcgatgatgctaaaacagagttagagagattgttagcacgacaggcttcattagctacagtacaagtagatctgccagtactacaggatgttaacgttactgaattgtatgatgtgaataacgtcgatatacgcacacgttatgagaatgaactgaacaaaattgtatctaatattcgtctaaagcgtaatggtacatcttacactattgatatcaactataagcagaacgagctaaagagacatgtactttttgttgagaataagaagaaagaacaatcgttaatcagtgaggtcatcattgaagatatagatggtgctaagttctattatacgccttcattcatgatcaggcttaaagatggtgaaatccgttttcagcagactaacgaagatctctcaatcgttgattactcgctattgctgaactatgtagatgctgtagatcggaatgatgccgtaggtgtttggatgcgtaatcaattcaattttctgacttctaactaa

SEQ ID NO: 151543 - DNA, 1038 bp, Enterobacter cloacae; identical to SEQ ID NO: 123663

SEQ ID NO: 151544 - DNA, 744 bp, Enterobacter cloacae
atggcattatgtcttgcggaaacgcttcttgagaaaggtgatgctgatactatatgcttcaggaataagcttctggaatggtatcagcatggttataacagttcaaatggcatctgttttgatataggtaatacaactcgctttgctttagaacaatatttaactgttggtcctgggtggagcggtaatacttcgccagaaactgcaggtaatgcttctattatcaggcaagcccctgtctcaattttttttagaaagtcattaagcaaagcgttttatgaagctaaaaaacagagcatcgccacgcacggtgccgcggaagcaataaatagcacacagtatttaagttatttacttgtacatatgattaatggcagcaataaagattttgtttttgctccacacgtcatgccgcttcagccacgtgtaatgattatcaacgcgggtgaatataagcaaaaaactcgctatcagattcgttcaagtggttatgtcatcgatacgcttgaggccgcgatgtggtccgtatggaatacggataatttcagagatgctattctgttggccgccaatcttgccgatgatgctgacagcgttgcggcgacggcggggcaaatcgcgggtgcgctgtatggttattccggtatcccacaggagtggaaagacaaattggtacaacacgaacgtatcgccagaatggcaggtgaattattcgacagggctcctgaagatactttcttataa

SEQ ID NO: 151545 - DNA, 276 bp, Enterobacter cloacae
atggatggtttccccctcgccgctcgcgtagcggttctcctcgaaatggtaacccgccgccgtgaccagatagtcaccgttatcactgaagaacggggcgttagtcagggtgaaggtgtgtcccggtacaatacccgcggccgtggccgtcgcctgaatctgctggtgctccacctgccagcgctcctgacggatacgggcgtagaactccgcatgcccggtctcaacaaaccgtcccggccagtcgtacacgtcgatactgcccggttttggtga

SEQ ID NO: 151546 - DNA, 201 bp, Enterobacter cloacae
atgcacttgaaccggcttcacaccataaaactgatcccagggttattggtggcaatatggccggtaacaatatcgttgaccttatccgcgagtttgggcaaacaaaaattttacgaccggatatcaaaaaaccagtatggcacaattctcttcgcttaccgcatggagaaaaattgtcagaagcacaatgggcaaccgtag

SEQ ID NO: 151547 - DNA, 171 bp, Enterobacter cloacae
atgctcgatgctgttaatcacatcgtcacctgccacggtatcgacacgcaggcccggcaggctggcgtcaatggtgatatcgcgttcgccggaaccggtattgccgtgcccgttggtgacggtggccgtcacgctcagtccgccgttacccagcgccgtcagcacctctga

SEQ ID NO: 151548 - DNA, 258 bp, Enterobacter cloacae
atgttgttgaagtatcctcaactgtaccatttcagccatacacatactggcttgcttgaacccttcatgttgtattttaggagagatccaatctttcgcattgtacgcagcatagacagccgcaccagccatcgccatattacatgcagcacttacccaatcagttacgctcccccattcgaatcctttgacatccaggaaaagaaccttgataagtaccaaaactgcaacaatgaacagcactacaatgatgcctaa

SEQ ID NO: 151549 - DNA, 1104 bp, Enterobacter cloacae
atgaaaatcctgattactggatctgatggctttatcggccgtaacttgtgcttacgccttcaggacgcagggtacagtgaccttattaagattgaccgcggttcaagtgcggctgaacttgaaaatggcctgcaagaagctgaatttatctatcacctcgcgggtatcaatcgacctaaaactgtcgaagagtttgccgaggggaatagcaatctgactcaacagatagttgattctcttttagccaagcataaaagcatacctattatgatcagctcttccattcaggctgaactggataatgcttatggtcaaagtaaagctgcggctgaaaaacaaattgaacgatatgcagctgaaagcggtgcagcatactttatttatcgttacccaaatgtttttggtaaatggtgtaagcctaattacaattcgttcgtggcgaccttctgccataatattgccaataacatcgatattacgatcaatgattcctccgcgactgttaatcttgtttatattgatgatgtttgtactaatgcgataaagctcttgtcagaaaatattgaaagcgggtacaaaattgttgagccagtatattcaacgacagtaggtgaggtggcgaatttactttatcgcttcaaagagagccgttccactcttgtcaccgaggctgtaggaacagggtttactcgcgcactttattcgacttggttaagttatctacctgccgatatgtttgcgtactcagttccctcctacggggacgcccgaggggtcttttgcgagatgttaaaaaccccttcagcggggcagttttcatttttcaccgctcatcccggaattacacgtggtggtcattatcatcacaccaaaaatgaaaagtttctagtcattcgcggccaggcatgcttcaagtttgaacatgtgattaccggtgagcggtatgaactcaatgtatcatctgatgagttcaaaattgttgaaactgtccctggctggacgcatgacgttacaaatattgggaatgatgaattgatagtcatgctctgggcaaacgaaattttcaatcgtgatgagcctgatactattgcgagacctctgtaa

SEQ ID NO: 151550 - DNA, 903 bp, Enterobacter cloacae
atgcgtaaaaaatacgggagtaataaactaaaattttatattggagatgttcgagactatcgaagtattctcaatgcttcgcgtggagctgacttcatctatcacgccgcggccctcaaacaagtcccatcctgtgaattccatccgatggaggctgttaagactaacgtcctcggcactgaaaatgttcttgaagctgcgattgcaaacgaagtaaaacgggttgtttgcttaagcaccgataaagcggtttatcctataaatgctatgggtatttcgaaggctatgatggagaaagtcatggttgcaaaatctcgtaacgttaatagtgaaaaaacagttatatgtggtactcgctacggtaatgtgatggcttcccgcggttctgttattcctttattcgttgatttgattaaagcaggtaaagcgctgacgattactgacccaaatatgacccgttttatgatgacgcttgaagatgctgtcgatctggttctatatgcctttgagcatggtaatagtggcgatatttttgttcagaaagcgccagcagccacgatcgaaacattagccattgccctgaaagagttactcaacgttgaacaacaccctgtcaatgttattggtacgcgtcatggtgaaaagctttatgaagcgctgctaagccgtgaagaaatgattgcggctattgatatgggtgattactaccgtgttccacctgacctgcgcgatcttaactatggaaaatatgtagaacaaggtgatagccgtatctctgctgtagaggattataactcgcacaatacgcagagactggatgttgaagggatgaaaacacttcttcttaaattaccttttattcgcgccctgcgcgcgggtgaacaatacgatctggacgcctga

SEQ ID NO: 151551 - DNA, 438 bp, Enterobacter cloacae
gtggcgaagattcccttcacaaacagagagttagttagggcttggcgcaattctctggatgtctccaaatctgaacaaagaacaaatcctcacaggttgttattattttatgcaattgaatgtggtttaaaagctgcgtatttgaagcaaattaataaaaccgttattgactctgatattgcacagcagttttcgcatgatattaacaaattatgtgaaaagttatcaataaatagttcgtttatgcttcctcagtctttacgtatgaaagattgtaaagtcgatagtaaagatgttactcgcacatttagccccggagaaattaatcagatatggcgatatggcgggactttagatggcgttgaaaatgacatctttcttgaaggcaaattggaaaaattgaacgaaattattgaaaaggaactcacaaatggctga

SEQ ID NO: 151552 - DNA, 468 bp, Enterobacter cloacae
  misc_feature (411)..(420): n is a, c, g, or t
atggctgaatttatcacttggctggatattgaacgacaagttaaaagagaatttaagtttaaaaatgcattgaaaaatattaaagctatctattgttattcatcagggatggaagtcgagtatatcaatgataaagaattagctatttctgatttaaagaaaatttttaatgactcgctcacccataaagatgatgttttatttttatctctggaaataggtggcccggaatatttcattgaattaattcctactgttgggttgaagaaagataataatgttgtatacccattgtggcgtgagcatgtatatgttgatcaggtagtagaattcaaacaacctgaacaatgggtagatggacctaaattttgtgcatttcattcgtttaagggaggggtcgggcgtactacnnnnnnnnnngtttatgggaggggacgggcgtactacttctttaatgacttatgctag

SEQ ID NO: 151553 - DNA, 1017 bp, Enterobacter cloacae
atgaatggtgaaaatataaggcatgattggatagactacctaagattcattgcaatattctatatttatttaggacattttggacctgctgctggtaagctttacccttttgtgtttacatttcatgtccctttattcttttttatatcaggactgcttgtcaagcgagctagaacaaacaatgatttaatttcggcaatagtcaaatcctttaaaaggataatgattccttacgctgttttttctgttattggtgtaatattccttgctattaaagaccagcgctcgcctcaaaacattttgcagatgattgaaatgagtatatatggagtaagaaacaacacgccgctggcgacactatggtttttcccgtgtttattcatggtttattgttattacaatgtattgtacagatttattaatagtagggtgctattgtttgttttagggttagttatctatactttaacgcctgtttggttcgggaaagccataccgtctttattttggaatattgatagtgcatggtacttctttgttttttttgcagccggagcactcctttcgccacatcttaattcggaaattaagttttttggtaataacaaaaaaaagttatgcttgtatatattcgcacttatgtcagttatatactatgcagtttgctatcagtacgggacattcagcttttacaagggcgtaaagagccttgagatgaagtattttatatacttttttgcagctgttcttctttttattcctagtgttctatttgctaaatatcttgattataaatcaaaacacttcgatattaaaccattgctagttttaggtaggaatacactagtattgtgtggcacagagcagattttaaaattttcaatcatagcctctgccggagtatttggaattaaattagcccctcataacccacttgaagctatcttgcttacttgtttttgtttttttatttcatacttcacgattttgaaattatataaattctttaaagggtag

SEQ ID NO: 151554 - DNA, 2142 bp, Enterobacter cloacae
atgagcacacaacctaccaacctgccagttccaagcgaatcaccacgcgaccttaagtttaacgcggggaaaattgacgagttcgttacttcgctggtaaacacttatgttgaccggttcggtaaagagcattacaccatcgaaggcctgcggtggctggcgcagcaggcaattgcccagtatggctggatcctcattgactccttccaggacggcgctgatatcaccctgccaaaccaggctctgcgtgacgaagatactggtgaatactatcgctgggacggggcattacctaagcatgtagatgccggttctacgccagcttcttctggtggcgttggtatcggagcttggctgagtgttggcgattcaacattgcgttcaatgcttgcttcatcggctggggcttcaaatataggcacatctagtggagagagtgttcaggatgtattagacgaaaactctaaacatagcgacgtattgcatttaacaaattctttgagtaccaggcggtacgggtcataccgtggaatcaaaagaaccttgagcaacatagcagcatggtctgctagtgacgttgcaaacgataaaataagtccgacagataccgtttactacaggctccctcagatacttaaattaccttccggtgttctggctatcttcacgaatgaactacacggaaactcggctgacattggcacaacggcagatcagcaatgtaatcttgtttgcaagacaagcagtgacaatggaacaacgtggtctgcaaaaattgtaatcgctgattttggacctacattccagaacggagagatgtgtgttatttataaccatgtatctgacaggatttatctatttttcacatcatgtaaaggacagacaggctgggggtattcacagccaggcacaatagacccagatcagtcggtgcaaatttacatgacgcattgcgatggtgagtcattcgcatggaatacacccgtaaatatcactgcaatgctaaaagaaaatgatgagagttttgcatggacctcaccctgtcggggggttgtttttccttctggagaaatgggggttgtgacttcatctattaaagcaggtagtaatgacgtcaccactttcctgtgtagatttaatggctatgaactcacttcaaaaaaagtgatgctaacccatcctgataccggtggtgaagttggcatacatctgttacaaaacggtaaattgttagctttatccagaggtctaaaaacctcggataataagggtgttcaattactattttgcagcgatgaatcatacgattcatggaccaagctatcctctgtagttacatctgatgtaaaaggtgatttggtttgccttaatgatggattgtcaggaagtcctttatgggcactaacagttgcaaacggagcaaatgatgatggcctaggtcgctttaagtatagggtttggtttagtagagacttggtaacctggacaaaatcccctgtatcttcaataaatgacgttgtagttggatacatttcaacatgttcagcaggtgataaagatggttttatatctgcgacagaggtaagccagtaccagggaatatggtttactcaggtgagtcaaaattatataagatcaagaacgtactcaattaattctattgggctaatggaggttaataactcagatgttgtaaatatgctttcctctggagcagttaaaaactatcagcattatataaacaaaagcaacaatacattatgtataaattataatggcaatgaaaaagtaataaggcattttggcgtaaactcgaacacaacgtttgtgataagtacaaacaccggaaccgttaatgttgatggtattgatatcatatcggtatcaagcggacaatattctttggatggattgactggcggggtgatcgggcagaccatatcaataatgtctctttcaacaacctcatgggtgaagcttaacaggcagtcaagttctgttgcatctactgatagattctacttcgcagctactggctccaatactgctatacaaattgcgtacaatctcattgcgcttgttagggttactaaaacagttaatggatgggttacagacgccgtcgccaatgtagctacgtaa

SEQ ID NO: 151555 - DNA, 471 bp, Enterobacter cloacae
atgaactggaatgaattatttaattacgaaaatggcaatttgttctggaagatacaaaggcagggacgagcaaagaaaggaagcaaggctggatatcttcatcaccgaggatatttaatagtaaaagcatatggagttttacgacctgttcacagaattatttgggagatgcataacggcccaatccctcagaatatggaaatcgaccacattaacagaattaaattagataacagactagagaatttaaggcttgctaccagaagacaaaatgcatgcaacattagcaccaatacctccggggtacctggtgtttactggtgcaaacaacaatgcaaatggagagcaaggatatttgttaatggcaggaatgttcatcttggtctcttccaaaacattaatgacgcagcggcagcaagaataaaggctgaggcagaattagataacattcatggagaatcgattttatga

SEQ ID NO: 151556 - DNA, 294 bp, Enterobacter cloacae
atggctaaatacgaagttgtgcgcccatggttcggcgtgaaggttggcgacgtggtggagttgaaagatcttcacccggcgctgaagtctaacgtccggctgatgaaaggcgaggctggtggtgggctgaatcctgcgacacctgatgccggtaccggtgagaaatctcgcaaagagattattcaggaccgcctgacccagctgggtattgagtttaaaggcaccctgggcgcggaaaagctcagtgagctgttgccggatggcgaactcgaaaagcttttccctgctgaataa

SEQ ID NO: 151557 - DNA, 207 bp, Enterobacter cloacae
atgaatcagcacaatacccgccttattcgtttaccagaggttctcaatcgaaccggttatggtaaagcctggatctatcacctaatcagcaaaggatgtttcccatcaccagtaaaaattggatctcgtgcagttgctttcattgaaagtgaagtggaagagtggattcaattaactatcgaaaattcaagaaagcatgttgcctga

SEQ ID NO: 151558 - DNA, 876 bp, Enterobacter cloacae
atgacatcgattatatgttggttgaatactgatgaaaatgagttttttcctgggctttgggctgtttcagattcacttgtgtgtagtggtgcagaaccacttactgacgcattacctaaattatctcctttacctgtcaacttgtacgatattagcgacagtatcctcaagcaaaaccccaataatttgttgaatatcggatacggctttgctggaagtactttaattgggacagccgtaaaagatattttaacaatgtgcttagataatctttcagaaatatcacatattcgcaatggtgaagaagtagaactatcaatagataaacgaatgcccagtattgaagatatagcattccttactggaagaattgctaaaaaatatataatgagtatgggttattatcatcccaaaaatgcaaagtgtgaaattgtaatttttggttattgtaaaaaaaacaaagcatacaaaatattcgtcattagaaataatcctgatcacccagataatattatagttgatgagaaaaacttagaggagtctccttatgttattttaggggataaaaagaatgaggttttaggtatgataaaaacaaaaaatgaattgtgtctatcaactcgataccagacaggaagaggtccgataatcgcactccagcaaataatcaaaaatgaactgtcaacaacaattggggggcacttacaaatatgtatcgcatcgcgtttgaaatctttaactatgtacacctcagttttatcagaagaaggttactttccatttctcggtttttctcacgaagagatcggacttcttggcgggtttgccataaacaaagggattggtttgaaaatatttgacgatttattggattaa

SEQ ID NO: 151559 - DNA, 219 bp, Enterobacter cloacae
atggcagccgcctctccgtttgcgtatgcgtggctgaataagtcgctgggtataacaggcggaatgtgggtttccgcaggactgacgctggtcattgcggggttcgcagtggcgctcgtgcgcagcccaggcaaacaaactgtatcgcactgtatcccgagcgctacgctgacaaaccggtacaaaacgcccgcagaagcaaacatccccgatacataa

SEQ ID NO: 151560 - DNA, 681 bp, Enterobacter cloacae
atgcagcgtattttaatcgttgaagacgaacaaaaaacaggtcgttacctgcagcagggactggttgaggaaggctatcaggccgatctctttaataatggccgcgatggtctcggggccgcgtcgaagggacagtatgatttgataatactggacgtgatgctgcctttcctcgacgggtggcaaatcatcagcgcactgagggagtccgggcacgaagaaccggtcctgtttttaaccgcaaaagacaacgtgcgggacaaagtgaaaggactggagcttggcgcagatgactacctgattaagccctttgattttacggagctggttgcacgtgtaagaaccctactgcgccgggcacgctcgcaggccgcaacagtctgcaccatcgccgatatgaccgttgatatggtgcgccgaaccgtgatccgttcggggaagaagatccatctcaccggtaaagaatacgttctgcttgagttgctgctgcaacgcaccggagaagtgttacccaggagtcttatctcgtccctggtctggaacatgaattttgacagtgatacgaatgtgattgatgtcgccgtgagacgtctgagaagtaaaattgatgatgactttgagccaaaactgatccataccgttcgcggtgccggatatgtcctggagatcagagaagagtga

SEQ ID NO: 151561 - DNA, 351 bp, Enterobacter cloacae; identical to SEQ ID NO: 146789

SEQ ID NO: 151562 - DNA, 510 bp, Enterobacter cloacae
atgagcagtcaacttattgaaaaaatcaaagatgaatgtttgcgtatcgaagaggatgctctttattcttccaaatctcattataatgcatcttccccttgggaaagatgtaatttattaataggggtacctatagcaatattatctgctatagctggtcttagtgctttgaaggacatgactaatattactatattaatatcctttgtacttacatgcttaacagcaattaatactgctttgaatccaagtaagcgtgctggtcatcataaatcagcggctggagaatataataaccttaaaaatgatgttcgtctttttcgtgagattgagctaattgaagtaactttgtctgaaaatgatttaaaggaaaaaataaaggttttttctgatcgaaggaatcaactaaacattagctctcctacgatcccacgatgggcatacgaaaaaacgcaatcagatgtcaataatggtttttctcaatacgctatcgacaaggaaaagaaatga

SEQ ID NO: 151563 - DNA, 357 bp, Enterobacter cloacae
atgaaaaaggcttctatcgcagtactgttattttgttgctctggtgtgtcagttgcggctgtaccagctgggaaaatagaaaaaccatttacttttaataatgaagttgtttgcttaaaggaaattcaggaacaaatgacgccttatctcaagtcatttgaagaagaaggtggggttaagtacaaatacgttgttaaatctggtttatcgtacaagggcactgtagggctacggttacagatcaaccgtgtggattcggggttggatgtgcatgtagccgatcttgattactactggctacaggagcggggtagtatgtgccagccagcgtatatgatacttgatcgttctcaatga

SEQ ID NO: 151564 - DNA, 771 bp, Enterobacter cloacae
gtgagactggtacagctggtaatctatggattttggggcgtttttctttgtctggctgggattgaaaaatttggtgacttcttctccgctggtactggcctctggtcggtcgttatgctttccgtcgctggattgtgccagctactggcaagtgctgccgcgatcagctgggctgttttgggcttcggtactctccgggctaagtacttaccctataaactcattaataattatacggttcctgtactgatcattgtgcttgctattgtggcaagtgctgcccgatcttcaagcgatgaagccagagcacaaaaacttggatttaaagacggtaaagagttttctgttgcccgtgaaaataatatttcgaatgttactgattacgccaaatttgccgaagaacaacgcgtcaaagcagcagaaaaggcggctcaggatgctgtacttgccgcagaaaaagaaagacaggcaaaagaggaagaagcgaaatgtctcgatgatgctcattgctacgcttcgaaacataaagctggcgattatatttgtaaggtagctgtagaaaattctgctcagtaccaatttaaatggactgatggaattaccgaaccaaaattctcttcgtatagctggtacgacaaaaacaggaaattagtcactctttacgggcatagagcacaggctcaaaacgggtttggtgcgtttaaaaatatagagtactcctgtacgttcaatgctgatactggtgaagtattaggtactaaccttcaataa

SEQ ID NO: 151565 - DNA, 642 bp, Enterobacter cloacae
atgcgtaaaccatcccgccgtaagtgcaaagtatgcggtgaatacttcgtgccgaaattccatgacatccggatccgctggtgctgtccggagcacggcgcaatcctcgcaatggaagaacgcgagaaggagaaggtgaaagccgccgctaagcgcattaaggagcagaaagaggcagagaaggctgggcgcaaacgacgtaaggagaggctggcagagctacggcctgccggttactacaaggcgcaggctcagcaggcattcaatgcctacatccgcgcgcgcgacgccgatttgccatgcatcagctgcggagagaccaatcccccggatctgcacggcggccagtgggactgcggccacttcaaaacggtcggcgctaaccctgaattgcgctttgaagagcgcaacgcccataagcagtgcaagtcgtgtaatgccggagccggaaagtacaccgccaaagaggcgacggtcgcgcagcaatacgaagctggcctggtcgctcgttacggtcaggaatacgtcgactggctcaaaggtccccacgacatgaccaactaccgccgggaagacttcatccggatccgcgatgagtaccgcgccaagctcaaagcactcaaacagcaggaggcagcatga

SEQ ID NO: 151566 - DNA, 126 bp, Enterobacter cloacae
atgtcagaaaaaagcatttggatttgcaaagtagcaatagcatatgcgcctgtggtcaatacgttaatatgtattatcttttccgctttatgttatctgctgctcggctttcctctacccttctaa

SEQ ID NO: 151567 - DNA, 207 bp, Enterobacter cloacae
atgacaacgataatagggcctatcactttaactcttgatatgagagagcaggttgcgcgctctcgcgaagtgcttgaagaattgcagcgtcgagtgagtgagcttagccctagaatttcagaggaggacgcgctgcgcattctactcctcgatatgacctttgattacctgaagtctaagagcaaggcagaacaaacaacggagtaa

SEQ ID NO: 151568 - DNA, 639 bp, Enterobacter cloacae
atggctaacgatgacgagcgcaggccttatccgccagttaacttcatcgcctccgacaactggcagccatacaccaggctcattcccgccaatgaagttcatgagtgggtaagtcgccaaatcctcaacgataccggcagcatccataaccctgaccacgaacaccttgctgaggctgacctctgcttcatgtgggcgtctgactcattcgcgaagaaagggcgacatgtcctcgggcaggccgagcaggtaatgctccgcgccggaggctggcagaaagccagaatggaacagcagatgtatgaatggttcgggcgcaccccgaagttcatcatcacgctggcagccgactactgctcacaatgcagtgacctggagttctgcgcactggtagagcatgagctttaccacatcggccaggccaccgatgatttcggcgcgcctaagttcaacaaagagaccgggcagccagtgctcacactgcgcggccacgacgtcgaagaatttactggtgtcgtacgtcgatacggtgccagcaaagaagtacaggagctcgttgatgcggccaatgcgccagcagaagtggctcacatcgatatagccaggtcatgcgggacgtgcatgttgaagctggcgtaa

SEQ ID NO: 151569 - DNA, 360 bp, Enterobacter cloacae
atggccataaggcacatcaactttggggtgtttatgaaagacggaatttataagctcattttcaataccaatgtgaaccgtaacggcatgctaaacggaattctgactgttagggatggccgtatcaacggtggcgattatgtttgctattacaagggcaagttaagcggtaatacagcggaagttcagtcggtgcctcacaataagtacgatactaacgcatttaatggacactctccggttgatcttgagttgcgcatcgaagagcatggtccggcttacttgtttaaaggcaatgtcgtgggtgacaaatccaatgaaatccatggcgagctgcacttcctgtctgagcttgcttaa

SEQ ID NO: 151570 - DNA, 654 bp, Enterobacter cloacae
atgagtatctccactacgaaacaccataacattggtctgtctgagcgccagcaacaagaaatcattactaataaattcgaactgtttggtgaaactttcgagtttgcggaaattttctctgcgactgtcatcagttccaacccaacaaatgctcagatcttggtaaaaacaaatgatggcgatgaaaagcagatttcagcctatggtatcgcggtcaggaactcacacaggattcgtctatacgagcttcgaaagtatagcaacgataactcctgtgtcgtatatgccgatgcgctcattattaattcaaacacgggtgaatataaagtaaacttaaacaggaaaaccgtcattattccagcttttctgacaatgctatttcataatgcttcgacagcttctttcttcagagtaatgccagttccgaagtggttttatattctcttcactttgctttgtttggcttctttcattgcattttgctcattgcttgtgggattcaaagatggatatgtgtgggatgagcacaagtatatgtggctcacatatttcttttcaaggatcggaagcttcgtttgtattaattggattaaaagaagaagcgagagatttgatcatgaactcagaagtcttatcgatttagtaaaaagataa

SEQ ID NO: 151571 - DNA, 1329 bp, Enterobacter cloacae
atgaagggaatgcaaaaaatccgcaggggtaagagcttcgcagggatcgtgctttacgcattgaaaccagcttctcatcataaaaaagatccgatagtgattggcgggaacatggatggaagcgatgtcggagagttgattgcagaattcaatgcgactaaagcgcttcgtccagaagtcgttaaagcggtatggcacaattcgcttcgtttgcctaaaaacgaggcattgactgatgctcagtggtctgaaatagcagatgattacatgtcccgcatgggcttctctgaaacgcatctcagatgctacgtcctacatgacgacgaagatggtcagcacatccatatcatcgccagtcgcatcgaactcagttcggggaagctctaccttggaaaaaatgaaaatctcatcagcacccgcatcatccagcagcttgaactcgactatttactgacaagaaccaaagggccggaagctaaggcacctccggcatcgcccttccctgaaccaaaacgcaaaaaatcacgtaatgaagcgatgatggaggaaaggattggtgagttatgcccgaaaaccatcatccagaacgctcttgaagtattccttgccaataaaccatcaaccactgagtttgtgcatcagcttgtggcacaaaacatcagagcaatcccgaacatcgcttctactggccgcatgaacggcttctcattcgaataccaggggattgtgttcaaagcatctcaattaggaaaagggtattcttgggctgaattacaaaacaagatcgattaccaagctgaacgcgataatgcttttctgttcgaactgaaagcatctgtcaatgaagattctgaaatagtcatccctacagaaaccataacagaagacgtgaataaagccatcgaagtgattatccccgttaatagtactggtctgggcgaagagtgtttacacgaagctgacgaaagccctcaaggtttactgagagtggaaataatatctggttctattgcaacagaagaggctgccgcagcacttctctcagaagcttgtggaggtactaaagaagtgtatgcaaccgaagcggtaaaagaagctcgcaacaatcagtccctgcctatggtgcagactggtttcagatggttggaaaccatcccctatctcgatatctttatgagaatattgaaaaagctaaaaatcccatttttgaaacccccagaaaagcacaagactatcatctgcgttaaggtagttgagacgtttccctcaagatcaaaaaactatattgagacgccttcatttcgtcgtaaagcaacacaatcaatgtga

SEQ ID NO: 151572 - DNA, 441 bp, Enterobacter cloacae
atggccgcaagtaatacttttaataagatcgttataagtaagcattcccgtaatggaagcgttaatgaagcgaaattctcacactaccagcttcgttctcattgcgtcagtgtcaggctaaataatgaagagctaacgcttctcaacgagaaacgtggccgtcatcgtaaaggcgaatggcttcgtttatctttactcaataaacttcctgctgtcgttccagcaatcaatattgaagcatggaaatcgcttagcgaaatttcacagaagctgaacaagcttgtggctcatcttgataacaagagccatgaaagctctctgacgcaaacggaactcttcgcggtgaagcgtcagatctcagagcttcgcttgcatttaattaccgctgatctgtggagagcaccttctgatgaagggaatgcaaaaaatccgcaggggtaa

SEQ ID NO: 151573 - DNA, 246 bp, Enterobacter cloacae
atgcgattaccacctttaaaaagaaaaagaaacatactgggtttgataataattttaatcttattatccttatcggatctgataatattcaaagccattacagatgctatatcgaatattgactcctattccaataaattattttcagaatcaataatagtaggggtttatattttgggggctttaaaaataagtacaactttgagagtattaaaattaacctttacatatattagcaagggctaa

SEQ ID NO: 151574 - DNA, 165 bp, Enterobacter cloacae
atgctgtccggcagtgatgcaaattcaaagacctcgtcttcttcttttaacgaactgaatgccggagagaaagccgccctcgtgcatgagcaggtcaataatgccgctgcggaagctcatcagacgcaggcaagaaagcttcgtgggctggattcgtccaggtaa

SEQ ID NO: 151575 - DNA, 738 bp, Enterobacter cloacae
atgtattctaccgatgtcgtaaaagaaaatgcctacctttcagccacccgctcggggctggaatcgaacgagatcgctactcttcagcgctccttgccttcccggtttaatctgcggcatttgaaaaaaaatgaatcattaaaactcgtactgcaaaagaaagcgggaaaatcacgtgtcgtggcctataaatttacgtccggttcatttaattacacggcgtatcgtatatcagacaaaaagttctataatctttccgatacttccgggaaaggcagtctcgattatccgttaccagccacagcaagactcagttcacctttcaatcctgcaagacttaacccggtatcgggaaaagtgagtccccataatggcattgattattccatgcccatgaacacgaaaatagtcagcgtcatcgacggaaaaatcacccgggccgaatacaacagtaccatgggatattttgttgaagtaacgggaaaagccggtgttaaaactcgctatctccacctcaataaaatactcgttactaaaggggccagagttacccggggaggtgctattgcgttatccggtaacagcggacgttcatccggtcctcatttacattacgagctggtcatcaataacaatcctgttaattcactggcgttccgggcatcggcacccgctgataacaaactcgaacagcatgcctttgcgcatgccagagactacgaacgatacctggactga

SEQ ID NO: 151576 - DNA, 198 bp, Enterobacter cloacae; identical to SEQ ID NO: 117752

SEQ ID NO: 151577 - DNA, 468 bp, Enterobacter cloacae
atgagatcccatttcgagtatcagaaccggaaacgccagcaacaaccccagccagaagcgtcttgtcatgtcgcgaagttcatcactcggccccgtggatgccgtggctacgagtggttccagtgccattccacagacaggacagcttcctggaccacgacggcgtatctccgggtgcatcgggcatgtccacacaccttcagaaatatcgttctccgcctggtggtgaggctgttttatctgatcagggatgacctcgtggtgatggtggtgatgggaatgttcactggcatcttctgtaagataatgatcgggatgagctttaaatttgctctcacagctggcggagcagaaataaagctgatgctcctggtatcgaatgctgctgtgcgccttatcgggcatgattgtcatcccgcacacgggatctctcaccttatgcaatacgtgactctcgtccggggataa

SEQ ID NO: 151578 - DNA, 468 bp, Enterobacter cloacae; identical to SEQ ID NO: 151577

SEQ ID NO: 151579 - DNA, 1173 bp, Enterobacter cloacae
atggcctatctcagcgaagtcagcgcggagcaactggagctggtctccagcgccctgaaagtgatccgcacggtcagagtgaaaaaggcctgtacccgatgcgactgcgtcgttgaagcgccagcgccctcacgtcctatcgaccggggcatcgccgggccgggtctgctggcccgcgtgttaacggccaaatactgtgaacacctgccgctgtatcgccagtgcgaaatctttgcccgtcagggtgtggatctgagtcgtgcgctgctctccaactgggtggatgcgtgctgccggttaatggccccgctggatgaagccctctaccactacgtgatggactgccgcaaactgcatacggatgacactccggtgcccgtgctggcgccgggcagaaagaagacgaaaaccgggcgtatctggacatatgtccgtgataacagaagcgcgggttcatcagatccgccagcggcatggttcgccttctcaccggaccgacaggggaaacaccctcagcaacatcttcggcactatcatggcgtgctgcaggcagatgccttcgcagggtacgacaggttgttcagcgcagagcgtgaaggtggcccgttgacagaagcggcatgctgggctcatgcgcggcgcaaaatccatgacgtctatatcagcacccggacggccacagcagaggaggctctgaagcgcatcagtgagttatacgcgatagaagaggaaatacgcggccttccggcatctcagcggctggccgccagacggtcccgaagtaaaccgttgctgatatccctgcatgactggttggtggagaaaagtgccactctgtcgaaaaaatcccggttaggcgaggcgttcgcttatgcactgaaccagtgggatgccctgtgttactactgcgatgatggtctggcagagccggataataacgctgctgagcgcgcgctacgagcggtctgtctgggcaagaaaaactacatcttcttcggcagtgatcatggtggtgaacgtggtgccctgctgtatggtctgatcggaacgtgcaggctgaacggtatcgatccagagggttaccttcgccatatcctgagcgtattgccggagtggcccatcaacaaagtggccgaactgctgccatggaacgtagatctcaccaataaatag

SEQ ID NO: 151580 - DNA, 315 bp, Enterobacter cloacae
  misc_feature (285)..(294): n is a, c, g, or t
atgacgatgtgtcgggtactgaatgtcgcccgggccgggttctatgcgtggctgcacaacccggtctcggcgcgtgataaagataaccagcgtctgctgatgcttatccgcgactcatattcactgagcggaggcgtatacggttaccggcgggttcatggcgacctgaacgaaatcggggaaacctgcggcaaaaaccgggtgggtcgtattatgcaacaaaaccggatcaaagccgtacgcggctataaagcgccgcgtcgtatcgccggccggccttcagtnnnnnnnnnngccttcagtggttgcccctaa

SEQ ID NO: 151581 - DNA, 393 bp, Enterobacter cloacae
atgtggaattttatccctaaaattgaaattcctatatttaatgctggcaggaataaagccaatctgaagctggctgaaattcgccagcaacagtcggtggttaattacgaacaaaaaattcagtcagcctttaaggatgtttccgacacgcttgcgctgcgcgacagccttagccagcaacttgagttacagcagcgttatcttgattcacttcagataactctccagcgtgccagaggattgtatgcaagtggtgctgtcagttacatcgaagtgctggatgcagaacgttccctcttcgctacccagcaaaccattctcgatcttacctattcccggcaggttaacgaaattaatctgtttaccgcgctgggtggcggttgggtagagtaa

SEQ ID NO: 151582 - DNA, 393 bp, Enterobacter cloacae
atgtggaattttatccctaaaattgaaattcctattttcaatgccggcagaaacaaagccaatctgaagctggctgaaattcgccagcaacagtccgtggttaattacgaacaaaaaattcagtcagcctttaaggatgtttccgacacgcttgcgctgcgcgacagccttagccagcaacttgagtcacagcagcgttatcttgattcacttcagataactctacagcgtgccagaggattgtatgcaagtggtgctgtcagttacatcgaagtgctggatgcagaacgttccctcttcgcgacgcagcaaaccattctcgatcttacctattcccgacaggttaacgaaattaatctgtttaccgcgctgggtggcggttgggtagagtaa

SEQ ID NO: 151583 - DNA, 354 bp, Enterobacter cloacae
atgcgtaattcacttaaagccgttttatttggtgccttctctgtcatgttttctgccagtcttcatgctgaaacacatcagcatggcgatatgaatgctgccagtgatgcttcggtacagcaggttatcaagggcaccggtatcgttaaagacattgatatgaatagtaaaaagattaccatttcgcacgaagcaatcccggcggtgggctggcctgcaatgaccatgcgcttcacttttgttaatgcagacgacgctatcaatgccctgaaaaccggcaaccatgtcgatttctcgtttattcagcagggcaatatctccttactcaaaagcattaacgttacgcaatcctga

SEQ ID NO: 151584 - DNA, 309 bp, Enterobacter cloacae
  misc_feature (268)..(277): n is a, c, g, or t
atgagcaattaccgctattcctggaatgctgaaaagaaagcggttaacccttatctggatacagataagcgtaccacttcatccgtgctttcaaacctgattactctctatgctgcggataacgagcaggaacagctgcgccgcgaacccctgagtaatgaggtctgggatcgctatttcttcaatgaatcccgtgatcctgttcagcgggaaatggagcaggaccagctgctaagccgcgccaaaatggcccgcgaacagcagcaannnnnnnnnnatgagcatgtgtctggatgctgcctgcggtga

SEQ ID NO: 151585 - DNA, 381 bp, Enterobacter cloacae; identical to SEQ ID NO: 19851

SEQ ID NO: 151586 - DNA, 135 bp, Enterobacter cloacae
atggtctttctcaccctctcttttcgccatatcggacgttttcccgtaaagctgattccaggagacgcctatatagggtgcaaactcacggcgtatttcgtagcgcagccgaaggcccagctctgtgtcagctaa

SEQ ID NO: 151587 - DNA, 381 bp, Enterobacter cloacae
atgtcgattttacataaagccattcttacaggtggcctggttatgggcgtcgctttttctgctatggcccatccggaattaaaaagctctgtgccacaggctgattcggccgtagcggccccggataagattcagcttaatttctcggaagatctgaccgtgaaattctcaggtgcaaaattaacgatgacgggtatgaaaggtatgtcatcacattctccgatgccggtcgcggcaaaagtggcaccaggcgctgaccctaaatcgatggtcattattccgcgagaacctttacccgctggcacttatcgtgttgactggcgcgcagtttcttcagatacgcaccctattaccggtaattacacctttacagtgaagtaa

SEQ ID NO: 151588 - DNA, 378 bp, Enterobacter cloacae
  misc_feature (8)..(17): n is a, c, g, or t
atgcgctnnnnnnnnnntacagtgatcaccctgctgagtgacattagtgagaagctgcaacacaatgcgccgcgccgcgtaactcaaaagcctcgggtaaatatacctgcttcatctgttggtatttcaagtgagttacagaatgaacctcatggcgtgttacaacgtaactccacgggcgggcgatacgatgaggatcttgtattgaccacaatccggcagatgagggaggagcaacgcaatagcggtttcaggtatgataacaaggcgatagctcaggcgctgaatgatgccgggctgctccagtcgaatggtcgtccgtggaataatgaccgcgtgaacaccgtcataactagaaaaatgccggatttaaaataa

SEQ ID NO: 151589 - DNA, 285 bp, Enterobacter cloacae
gtggacgggcagcttactttttcaagcatttatccaatgcttcaggcagtaaaagatggctacggcctggcctacctgccggagtcttctgccctggcggggattgaggcgggacactattgtcgggtgcttgaggactggtcagaggcttttcccgccgacatgataattccaataatgtccattacaggctccggtaaagataataccgacaccttacatgagaaaggcaaaagcaatataacctgctgtgctccggattttaagaatgagcggtttacgtag

SEQ ID NO: 151590 - DNA, 399 bp, Enterobacter cloacae
atggctaagcatataaatggttatcatgagaagaagattgtagatgttattaacacatggtctatagatgaaaaacttacctgggaagctttgtgcgataggttagtcagggttattgggaaaagaccatcaagacaatccttaagtagtcatgtaaggattgcggaaagcttcaatgtgaaaaaagccaatatcaaatctggtgtaatacacactgtaaaacctgctaatttaaaagtggcttctcaacgaattagaagacttgaagcagaaaatgaagctttgaaggcattaaatgaacgctatttagagcagttcaaagtatggctttataatgctcaccttaaacaaataacgattgaagaacttaataatccattacctgcaaaatacctttaa

SEQ ID NO: 151591 - DNA, 192 bp, Enterobacter cloacae
atgaccgtggcggtgatcattgcgggtctgctgccaatactctggggaaccggtgcaggttcagaagtcatgagccgtatcgcggcacccatgattggtgggatgatcacggctccgctgctgtccctgttcattattcctgccgcctacaaattaatctggctgcgcagacataaaaaaagcgtgtcctga

SEQ ID NO: 151592 - DNA, 321 bp, Enterobacter cloacae
atgccgaagaacgacatcatcgtgctggcgcagcaccttatgcagcacggagtcgtcggaaaggcaaaggttcgccagctgcagcgccacgaaacaggcgccagaacgaacgaatttaaagccttcgactatatcagtgcagcgcgcagtcacttcgaaatgaaccgcgctgaagcctctcagttaacgatgaccgagttccagatgctgctggcggcgaaatacccggaacagaaaggcttcactcgagaagagtacgacagcatcgccgacgaatacctggctaaacaggccgcacgcagggcaaaagcaaagcaataa

SEQ ID NO: 151593 - DNA, 237 bp, Enterobacter cloacae
atgcggccacagcaggctgaccagcccttcggtcagttcaggcaggtcgtcatcgagcttttcacgcaagcgccccatcaggaaggcaaagccctcgaacaggcgttcaacatacgggtcgcgcgctccggctttatcaaggttgagcattgctgcctgctcggggtgagcacgggcaaactcttcaccggcttccagcaggtagcgcatttcagcgtcgtaataacgcagggttaa

SEQ ID NO: 151594 - DNA, 300 bp, Enterobacter cloacae
  misc_feature (207)..(216): n is a, c, g, or t
gtgagcgagttctttggcctgaacaatctggcgaaaaactacggcgtgatctatctgggcttcgggatcggcagtatctgtggctcgctgattgcttcactgttcggcgggttctacgtaaccttctgcgtgatttttgccttgctgattatctccctggcgctgtcaaccacgattcgccagccgcaacgtgaagtttttaaagannnnnnnnnnaggccggtaatccggcctttttgttttcttaacctggaaataaagcgattttgtctgtttttggatttgcttttttgtaaataa

SEQ ID NO: 151595 - DNA, 246 bp, Enterobacter cloacae
atggaagtggaactgctggagcgtccaggtttgcttgtccagagtgatggtgtcacgggtgtcagcctgttcgctagcctgaatggtatggccattattggtcagcgttacaggaccatcaatgtagtgtgtttgcagcggggagagatgggcgttagcggtcgaatcaatatttatcggagactggttcatcccgctctggcaggtcttgtaggcctcgtccagttcaccccagtgttccggtga

SEQ ID NO: 151596 - DNA, 243 bp, Enterobacter cloacae
atggcgatagtgtttcatcgccagctccagtgcggccttgccgatgtgctgcttcacgtcgatggtgtccagcgggtcgtgctcggcccctttggccacctcgggcagggtaaagacgcgcgcagccagcaggcggcaggtctgcaaacgttctgtcagggtcagcagctcgtgttctatttcccgaaacgtgctgttcagccgttcgataagatcgtaggtcgccataagcactctcattag

SEQ ID NO: 151597 - DNA, 147 bp, Enterobacter cloacae
atggctttcactcccttcccagtttccctgccccatccgtatcgcgatatctatcccttcctgctgcaggctggtgaccgtcagactggcctggatccgcagggtaataagcggatatttcgcccgaaagcgttccagacgcggtaa

SEQ ID NO: 151598 - DNA, 177 bp, Enterobacter cloacae
atgaccggctcctggtggccgattgtcgccatgctggtggcctattccgtgattggactgatctcggcgatcctgatgccggaagttcgcgaccgtgatttaagcgcggtgcaagacgcagccgagtctgcgccgagagagacggtcggttacggtgccgtctcctcgcgacgctga

SEQ ID NO: 151599 - DNA, 285 bp, Enterobacter cloacae
atgatctgctgcagctttgccggcagctggggcacctccagcagcataaacaccaccgttaagaacagcaggaaaatggaggtcatggcgttggaaagctgcgtcagcaggctggtgacgatcgtcatcgccgcattggggtcgatatatttcaggagttcctcaaccgagatttcgatccccgcgcgctgcagccagggctccagctgcagcagggggatcgccagcgaagagcgatatttcggcagcgttcgcgccagttcattgagcgaggtgcccagataa

SEQ ID NO: 151600 - DNA, 135 bp, Enterobacter cloacae
atgtcccgctccaggaccgatgtcgataacctggtctgcctgagtaaccgcccgcatatcgtgttcaatcattatcaccgtattttctgcatcaacaagccgctgcagctgcacaaggaggcggtcggcgtctga

SEQ ID NO: 151601 - DNA, 168 bp, Enterobacter cloacae
atggcggcggaagcgataggcgcgctgctgcgcagcagcccgaccatcagcgccgtcatttgctataacgatgtgatcgccatgggcgcctggtttggcctgatccgcgccgggcgatattatttcaccgtcactaaccgcgccgccacaatctggtgcccggcctga

SEQ ID NO: 151602 - DNA, 174 bp, Enterobacter cloacae
atggcgctggcctgggtattacgccatgaggacgtgacgtcggtgctgattggggcaagtaaagcggctcagattgatgacgccgtggggatgctggcaaaccgccatttctctgcagaagagttggcccgtatagacgcgatcctgagcagctcaatataccatcacttttag

SEQ ID NO: 151603 - DNA, 246 bp, Enterobacter cloacae
gtgcggcacctctctggcaaacgcctcaaaggcttttacctgccgcatcaggaggtgcgcctggcgctgaagctgttccccttcgggcgtgagccgcagggtgcggccgtcgcgaataaacagcgcgtagcccaacccatcctcaagaaaatcaaccagatcgcgaagcgtcgtgcggtccttcttcagcgccaccgcggctttactgaggctcacgttctcggccacagcggtaaatgcctctag

SEQ ID NO: 151604 - DNA, 213 bp, Enterobacter cloacae
gtggaggataaccgctggcggcagtccatcagtaccctgcagcgcttcgcgcataaatatgccatagcggtgctgatggcgaacacctgcggcggtagcgcgctgtgggatgagaaaggccagctgatcgttcgcgcggataagggcgagctgctgttgaccggcacgctcggaggagagggttggcaaggcgatatcattcctttaggctag

SEQ ID NO: 151605 - DNA, 234 bp, Enterobacter cloacae
atggtgctgtcgggtgacgataaaacgcatcgcgtcattaaagcacgccgttcagcaaatgatttcctgcagtttttctcgcagtggacggggattaccgccgggcagataaaaattgtttacccgtttgtctctaacaagaaagctcccccagtgtacgttaccaacttcaagttacagaaagttgactacaaccatctgggtacggatatttttgatattaagaataagtaa

SEQ ID NO: 151606 - DNA, 222 bp, Enterobacter cloacae
atggccgccacgttatcaatcccgatgttcatatcaatcggatcggcgcgcatggcgcccatctccatcaccggaatcgaggcgtttttcagccagtggcgaacggtgtcggtatgttcaacgctgagcaaaatcgctgcggcgatatttgacgccagcagcgtctccagcaacttctcctcctgctcaagacgatgctgggattctgccagcatgatctga

SEQ ID NO: 151607 - DNA, 255 bp, Enterobacter cloacae
atgttgcctgcggtacagaccctgctggttaaatattccagcgaccaggtgacggggcgtatttttggatataaccagtcatttatgtatctggggaatgttgccggtccgcttattggcgcctccgtttccgcgatggccggttttcgttgggtatttgcggcgacggcgattgtcattttaatcaatattatccagctggctattgcgctgcgacgccgcagacaaatggcggaggcgaaatcggcgagataa

SEQ ID NO: 151608 - DNA, 279 bp, Enterobacter cloacae
atggggctggagcagtacttctatgacgcctgcagcggggcgggctttcagccggacgtggtacaaaacgcgaccgacgtgcccacggtcatcagcctggtttcggcagggtttggtctggcgctgctgcccgcgtcggcaaaggcggtgagcgttgagaatgtcgtttacgtggacatccttgaccggctgcgggagagcgaactcaccctggtttgccaccggattattcgttcagaagtgctaaaaaagtttctggtcacgctcgatcacacctga

SEQ ID NO: 151609 - DNA, 171 bp, Enterobacter cloacae
gtgcaggtcttctaccgcaagggcttcaagctgctggctggctttttgactgagcagaaaagtgaaaagcagaaacagcgtggcgacactgacgcccgtaagcagcgacagtttcgcccccaggcctgcacggcgaaaaacgttgatcataaattgctcatcattgaatag

SEQ ID NO: 151610 - DNA, 198 bp, Enterobacter cloacae
atgcagcaggtcgacaacctgctgcacctcttcctgggtcagcgccccgtctttcacccactgtacgcggccgttcttatccagcacgacaatcgcagagctctcttcctccagctgccaggccttacgggtgacgccgttgctgtcgacgataaactgcgaccatgggtagagctttttattgctctcaaggcttga

SEQ ID NO: 151611 - DNA, 210 bp, Enterobacter cloacae
gtggggctcaaacgcgcacgcgcgcgcggcgagctggaccgcattgaacaagagtcctttgatttctttaaccgcacccgtgcacgctatcttgagctggcggcacaggacagcgctattcgtaccatcgatgcgacgcagtcgctggatgacgtcacgcgcgatattcagcagaccgttacacagtgggtacaggagcaacaggcatga

SEQ ID NO: 151612 - DNA, 186 bp, Enterobacter cloacae
atgaccgatccgggtgacgaactgcaggcgtctcatccactgcgtgatgcaaaagtggtggtggaagatattgaagataacccgggcttcttccgcgtgaaattgtatgcgattccgcacttccaggtggaagggatggacgtcaacctgtcgctggtttcccagatgccaaaagcgaaatcgtaa

SEQ ID NO: 151613 - DNA, 138 bp, Enterobacter cloacae
atggggcgcagatttagcccgacgataaaagcgataatagcgaagagtaacggtgacgtgcgtttcaacatggcatccttttcgggtgtgaatggcccgggcaaattgccgcgagcatttatcttaacgttaagataa

SEQ ID NO: 151614 - DNA, 174 bp, Enterobacter cloacae
atgtacggtcagcaccacctcagcgtcgacacgccggtggcgcatcaggtctttatgtatacctacctcagcatggcgatcattatcgccctgcccgctttcatcttcgccagagtgccggatgataccagcaagaacgtcgtgattaggcgcggcaaaaggagtggctcatga

SEQ ID NO: 151615 - DNA, 204 bp, Enterobacter cloacae
atgatagtcagtattgttctgctatcctgggcgatgcgctctttgcctgtgggaacggcttatgccgtctggacgggtattggcgcagtgggggccgccatcacaggcattttgctactcggcgagtcagcgagtctggcgcgtatcgccagcctcgctctgattgtggccgggatcgttgggcttaagctcagcacccactaa

SEQ ID NO: 151616 - DNA, 207 bp, Enterobacter cloacae
gtggtggttgcgggtaccgccaaagtcaccatcgacggtgaagtgaaactgctgggcgaaaacgagtccatctatattccgctgggggcgacgcactgtctggagaacccggggaaaattcctctcgacttaattgaggtgcgctccggctcgtatctggaagaggacgatatcgtgcgcttccaggaccgctacgggcgagtgtag

SEQ ID NO: 151617 - DNA, 195 bp, Enterobacter cloacae
gtgagcggcgaacaggtcaattatgatgactacgctgagcaggtgaaaaaactgctggataagcatgtcaccggcgttgaggtccgtgaaccggatggcgtttatgaagtcggtaaaatgggcaagagcgaaaagcccgaagagtgggacaacaacaaaacccgcaatgaaaccgatatcattaaaacccggtga

SEQ ID NO: 151618 - DNA, 183 bp, Enterobacter cloacae
atgcgcgcgctggtgggcgtcctgccactcttcttcaaccagcgggtgttcgtggtggtgatgttcatgatgatggtcatggtggtggtgatgatcatggtcgtgatgatgatcgtgtggctggctctctttccaggttcgccacgccatccacagggcgatcgcaacgatcaatacccctga

SEQ ID NO: 151619 - DNA, 453 bp, Enterobacter cloacae
atgtatcgcatggacaaactaaccaccggtgctgcttacggcgcttcagccggtagcatcctaaacggcatgctgaatgcctatagtcccgagcagtggaacgctatcggcgtgctggtgggcatcatcgtcgctgtactgacctatctgacgaatctctatttcaaaatccgcgaagacaggcgcttgaaggcgatccgtgcgctaaccagcttgttccttctgccgctgctgacagcctgcgggaatacgcagacagtttacgtcccggctccagtggtgccgataagcactgacctgaccgcagacacgccgatccccggaatggtggctccgttcacatggcaggcaagtctggagttaaacgctcagctctacacggcgcttgggcagtgcaatctggataaggcggggattaggcggatagaatcagcaaggaacaagttaaagtga

SEQ ID NO: 151620 - DNA, 1770 bp, Enterobacter cloacae
atgaccatttcaactgacctttcactgctcaatgacccgcgacgacaggcgcgcctgttgtactggcaggggttcgccgtgccgcaaatctgcgacatgctgcagctcaagcgcccgacggtgcagagctggaaacagcgcgatggatgggaggaaaccgccccgattaaccgcgtggaatcgacgttagaggcgcggcttattcagctctacgcaaagccagacctgaccgcgcatgacttcaaagtcgctgattttctgtcgcgccagatggagcggctcgcgcgcgttaaccgctacggccagaccggaaacgaggtggatttaaaccccaatatcgccagccgtaacaaaggggatcgcaaaaagccgaaacgcaatttcttcagtgatgaagcgattgaaaagctggaagagattttcttcgaccagtcgtttgactatcagctccgctggcatagagcgggattagagcaccgcatccgccacatcctgaaatcgcgacagattggcgcgacgttctactttgcgcgcgagtccctcctgcgcgcgctcaaaaccgggcaaaaccagatatttttgtcggccagtaaaacgcaggcttacgtgttccgtaagtacatcatcgcctttgcccgtctggttgacgtcgacctgtcaggcgacccgatcgtcatcggtaacaatggcgctgagctgatttttctcgggaccaattccaacaccgcgcagagccacaacggcgacctgtacgtcgatgaaattttctggatccccaattttcagaagctgcgcaaagtcgcctcgggcatggcctcgcagtcacacctgcgcaccacctatttttcgaccccgtcgacgctggcgcatggcgcgtacccgttctggtcaggcgagctgtttaaccttggccgtagcaaccgcgaggaacgtgtcgacatcgacatcagtcatcaggcgcttgccggaggcatgttatgcggggatggacagtggcggcagattgtcaccattgaggacgcgcttgccggtggttgcactcttttcaacctcgaccagcttaagcaggaaaacagcgcggatgacttccgtaacctgtttatgtgcgaattcgttgacgataaggcgtcggtattcccattcgaggagctgcagcgctgcatggtcgatgcgatggaagaatgggaggacttcgagccgttcgccgaccgtccgtttaactggcgccctgtctggattggctatgacccgtcacacactggggacagcgccgggtgcgcggtactggctccgccgctggttgccggtggcaagttccgcatccttgagcgtcaccagtggaaaggaatggactttgccgcgcaggctgaggccatccgtgcactgaccgagaaatacaccgttgactatatcggcatcgatgcgaccggcatcggccagggtgtttaccagctcgtgcgctcattcttcccggcggcgcgcgccatccgctacacgccggaaatgaaaaccgcaatggtgctgaaagcaaaagacaccattcgccgcgggtgtctggaatacgacgccggtgcgaccgacatcacgcagtcatttatggctatccgcaaaaccatgaccagcagcggccgcagcgccacctacgaagccagccgcagtgaagaagccagccacgcggatatcgcgtgggcgaccatgcacgccctgttaaacgagccactttccgccggtagcggtatgcaatcaagctcaattctggatattaactaa

SEQ ID NO: 151621 - DNA, 1026 bp, Enterobacter cloacae
atgaaaaaacgccaaaagaaacagccaaaacagaccagcatgacggccagcgcgccgcagaaaatggagacattcacctttggtgagccgtctcccgttctggatcgccgggacattctcgactatgtcgaatgcatcaataacggcaaatggtacgagccgccggtcaacttctcgggactggcaaaaagcctgcgcgcagccgtacaccacagctccccgatttacgtcaagcgcaacattctgaccagcacctttatcccgcacccgttgctgtcccgtcaggactttagccgccttgtgctcgattatctggtgtttgccaacggctatcttgaaaagcgtatgagcgtgaccggccagctctttaaactggaaacctccccggccaaatacacccgccggggcgttgagtatggcgtttactggtacgtgtcggactatacgcacccgcaccagttcgcgcccggttcggtgtttcacttgcttgagcccgatataaatcaggagctctacgggatgccggaatacctcagcgcgcttaattctgcctggctgaatgaatccgccacgctgtttcgtcgcaagtattaccagaacggcgcgcacgcgggttatatcatgtacgtgaccgacgcggcgcagagcagcaccgacgttgaggcgctgcgctccgccatgcgtgactcgaaaggactcgggaattttaaaaacctgtttttctacgccccgaacgggaaaccggatggcattaagatcgtgccgctgagtgaagtcgccacgaaggatgatttttttaacatcaagaaggtgagcgccgctgacctgctcgacgcgcaccgcgtgccgttccagctcatgggaggcaagcctgaaaatatcggctcgatgggcgatatcgagaaggtggcgcgggtatttgtgcgtaacgagctgacgccgctgcaggagcgtttcaaagagataaacgactggctcgggatggaggtgatccgctttaaggattataacatcgagaccgattaa

SEQ ID NO: 151622 - DNA, 1005 bp, Enterobacter cloacae
atgcttcgtttcaatttagacaaaaagcttttttcaatgataatgcttatttcattgatattcttcattcctattattttatcaagtcactattacgttgatgatttagggcgatctatttacggctattcaaagtggtctgagaacggcaggcctcttgccgatcttttatttctatctttgagctttgggcctcagttgccagacatatctcctctaccgcaattgcttgccttgagcatcttatcgctaagtgtttacttttctgcaaaagcattcctcactgaatttgacgggtacgttgctgccatcatttcaatggttgcaatttcaagcccatttttgttggaaaatctatcatataaatatgatgccttcccaatgtcgatatccgtgctgtgcgcgataattccttttgcagtaaaagccgttaatttaaaaaaacaatttctatattgctgtgcttctgtaattctaattttgtgcatctatcaggcatcaattaacatatatataatattcgctattttatacgtattaaacttatttaggttaggcgacactcgcaatggattattatcaataatcgcatccattggcggattggctattagttatattatatattcaacattcatttcgccgtactttttagttggtagttataatctaaggcatagtgaacttgcgacctcaggaataaatgatgccttaacggttgtatcacgtaacatttccgaatttggaaatatgctaagtcttgttgttactacaccatttataatctttagtatagtggtgttaacattatctttaattgcgttaataaaaatagcgtttgttaaatgcagttcctctaagcctgagaagataatgaagcttttagtcattgtattttctccagtggcagttttgtgcatgataacaggccccatgatgctcctgagggatccagtgctatctcccagtgacctgcccccacgattagatacaacactcagttag

SEQ ID NO: 151623 - DNA, 1215 bp, Enterobacter cloacae
atgacgatcaagggcaaaggaacaaattatctttacgtaaacagtgacgggatttatatcatccagcttcatattcccgtttacatgcgccacctctggaacggtcgcaagatgcttaaaaaatcaacaggtactcgcgatcttgtgttggctcgtaggtttcgtgatcagtacctgatggagttcagaaggctacaggcgcaattcaacccaaatgcttatctcctcaagattcagtcagccattaccgatctacgtttcgttggtgctgcatctactaatctcgttccagattttcagacagccaccaaagggaaaccttcaacgccaaagttaaaagacctttgcgacgaatacatgaaggtgtattcagacaggcggagctactccactttgcaaaagtctgcccgtgctgtcgaggcgtttacgaaatccataaaaagaccagcgattacaattggcagtattggtcgccgtatggtgacggagttcctggaggctaaccaaggcaagttttcacctcaaacgttgcagaactggctaacctctttggggagtctgtacgaattcgccaaacgtcgatatgacgcaatcccggacagtaacccgtttcacggtcacaacctcgaagcacggcgcaccattgaaagttatcaaccgtttgaagccaatcaactggatacccttatcagagaagcggatgacgttctacgcgatgtcatattaattgggctgtattcaggaatgcgacttgatgagatcgccagcattaaacgggatgagattgtaatgttggagggtgtcagatgtttctttgtcagcaagtccaagactgtagccggggtgcggtatgttccgatccactcgctactgatggggattgttgataagcatctgacacagaacagtggtgaatatcttctggcacagtctaataacatcattcggaaggatggcaagcgaggtccgtggtacagccaaaagttcacccggctgcgtgatagcgttttgccaacagctacagatcggcagtgcttccactctttgagagggatgttcatcacctgcctggaccgggcaggagttcccgaacaacggatcggagccattacggggcacacagagcagaaagcgaaaactgaagcattcagaacctacagcaaaggcgcggggatgaaggaactatcagagtatgtggagttggtgaattactga

SEQ ID NO: 151624 - DNA, 279 bp, Enterobacter cloacae
atggcaaataacctctttgtaacttacgacctgatcaagaccaaagactacccggcagtacataaagccatccaatcattaggagcttgggcaaaagtcacagaatcgaactggtatgtgaactcaacttataccgcctcgcaagctgcggaaattgtgcgaaaatctatggatgcagacgataaattaatcgttgttgatgcaagcaacaatgttgcaagttggttcaacttgtcggcagaggttgctaattttattaaagaacaatggcctaaataa

SEQ ID NO: 151625 - DNA, 1017 bp, Enterobacter cloacae
atgaaattaagtgattttactaatctttctggtcaattcgtgaagccaagcggcgaggggttccttctgtccagcctggggatctttaccagccgtccaagtgatacgcaaatcatcgcactcgacacacttgaagatgtgcagcgtgaagtgactaaatcagttgcccgttatggttctgaaatgtcgggtctaaacttccctaaagcggctaacgtgaccgttcaggctccactgcatgtctacagctcaaccatcaccagccaggattggcaggggaaacgtcagccgggaacaaatcgccagatgaccgctgaagatgtagttgctaatcataccctgaagcactacctgcaaacccgccgtgatgttgaatatgccatggcgcagagcctgcttcacaatactgtagaggcgacacacctacgtgaaggtcctgatctgaactggcaaaccttctggggtattaaccagccgtctgctgtggtgaaaactggcatcagtgccaacgtcattactgagatgcagaacgctgtcacgctgctgaagaaaaatctgggtggctggtcttccagcatcaagcaggtttatctgctggcgagtccgagtcttttcaccgccattcaaggcaacccaaccgcatatcaggcggctctgtttggtgctacgtcccgtgacatcattttccctgacactttgggtgcatatgatcgatataacatcgggcgtgtaacagtggtgcaggttgacgatccgctatatggcattgcagatggtgaaggctacatgctggcgacgttctccaatgttgttgaaggcgacctttcaccttatatgacctactgcacgccagcctcacgccacgcagaagttgctaatggtccggtttatccgtcttaccattacgttctgcgtgataagttcatgaattatgaggtggtcagcgagctatcacaaattcagatcccaatgcgtccggacttcgttttgaaaattacgatggatgacgcggcgtaa

SEQ ID NO: 151626 - DNA, 345 bp, Enterobacter cloacae
atggcattcgaatacgaaagcaaaaccccacaggatgtattggtttataccgattcaccgatctttcataagcgcaccgtgatccttgatctggctgctgatgtgacttgtggtgatgtgattaacccgaccactggcgcggcatacgttgcagcagatgctgataactgtgctgtagctctgcaaaatcaagtcgctggtgatgcccgtagccttgttatcagtgatacccaatgcgtgttcaatccatcaggtctggttgtagcggctgctgcaaaagatgctgcttacgctgcccttgttaagcaaggcaaccgtattgctgacgcaaacaccgcaatctaa

SEQ ID NO: 151627 - DNA, 2169 bp, Enterobacter cloacae
atgagtagtggaacaaccaacaagatagtgacgagcaccgtcaatatcgtaagctgggaaatttcccgctctagttacgaagcagcgaagaagaaaattctgtcacttcagcaattaactaccaaacctgctaaagcgctggagcaagctcagaagcgaaccgcccagagtgagggtaaagcagcccttgaagcagcccgcgctcaaacacagcgcctcaaaatggctcaaaatctttcgctagagcaacaacgccaggcccaagcccaggcaaagatcgcaaaacaggaagaggctcacgcccggaaaatgcaggctcttaacgccagagggcaggctcaacaattggcagatagtgaacagatccggagacaaaacgcccgtttagccaatatatccgcaaaagtgcaggccgcagccagatcacgagcgatgacctacaaccctaacatgggcggtcaacattacgatcctggtcttgtttcccgtcagactgacgcaatgaaccgtggtcacggcgctgttgctgctgacatcgcagccaccaaaaaggcgatggccctggaagagaagcgccagcgtgagaaagaagccagcctcaagcgccagagcactgcatacgacaccctacgccgcgccagtttaacgatcagccatatcgaaggtgccagcctggctgacaaaatgaaagcggtgcaggcaatcaaagaggctaccaagggatactccgagcagcgttataccatcgcagaaatgcgccatgaacttgctaaagcgactctggaaaccaggcggcaggcacgtattaaccgccagatggttaaggatcgggctaaagtagagcgagcagggcgcgttaatgctcaacgtttgagacgtgaacgtagcgaacgtggttatggtggcctcgctgccactggtgtaattgcagggggatccctgattggttcaatgggagttgctcgtgttggtcagaccctccaggggagtcttgaacgctccagagaggcgcagcaattaaggcagtatgatattagccagcttgaatttaatgctatccatgacgttgtacagaagcgtacagggtacgacctgaccgtagataagtatgcgtccatgaataaggattacttcgagaaagcaggtgagctactgaataccggttcctttaaaactaacaagcaaggggtaacaacattcagcggaggtggtgaacttgccgatctggtgaatgcagttcttagcaaaaccaaccagcgaacagcacaaaaagtgattggcgagcttcagaaattggacatggggaccttcgttacctatgtgcggcagttgggtaaacaattcggctggacagagaattccatgcgtcattttttggaagcgatcaatgacggatcggtcttgatggcgggtatcagtggggaaggtgatgaagttattgcccgtatgcatcaactcgcttctgaaggatggaccctatctgatgcacagcaggccaaccttgataagctggcagctttgggtgctgagtacaaccgagtacaaacaagtcttgcggatcacttctcagcctcgtttgttgaaggcctggggcagtacgctgccaatactgacactctacgtcagaatatgactggactgatcccaatttccgatgccctcggcgttgctcttggtgagctaaccaccaacattctttccttcgctggtcgagtcggtgaagaactcaagaaaggcgcaacattgccggatgcggtttatacgagcgtggtagatgactcctcaaatggtgctgccgattggattaaggaaaagaccggctttgatccacgtagcatcggtcagacgcttaagcagatttacccgtggctggatagttccgctccgagcaatatcggctcaggcatggcgtataacgatccagcactagcgttgaatgttcctggcctgaactatctgacaccccagcaaccaacgttcacggttccgacaattgatagcatagttcaacgacagccgattcctgttgcggtcactggcgaagctgagatcaagtttgcgcctcttgaggtgaatgttaatgatggtgcgattaacggtctgattgataccaagataagggaaaacaaccaggcgcagaataacctcatccttgggattgcggactaa

SEQ ID NO: 151628 - DNA, 804 bp, Enterobacter cloacae
atgagcaaacagaaccgggacagtaaggattttgtaaaacttgaatacagcgttctcgaccttaccgagtacaacggcctgaccattaatggcaacatgaaaattttgttatctctggtttacagctatgacaaaacaggcagaacttattacgaatctgttggcacgattggtaaacgttgcggctgcaagcccgaagccgttcgcaatttcaggaacaagcttcgtgaagctggaatgatcacttttgaggaagtgaaggggagtacacacaaaatttctccggtcgaactcgatccatcgctgatggtttttcttgacgatcataattccgcgcaggcgagtaatagaaaagtggaaaccgaggagagcggtaagaatgagcaaaaacctgttgtggaatctttcgtggtggcatctgccgcgcctgttactggaaaaccagacggcgtacctgctgtggatattcctgtcgatgttgatttatccaatagtgatgatccatcactgagtgagtcagctggggaaaatgttgtcgggataccatggctcgccaactcgtttacctctcgtggggatttggttccagaggcgcgacgctgggcgcaatcccatggtgctacaacctggcaggatgagatcaaacttgtatggaaactgaaaggcaaaaccaatatgggtgagccaggagaacagatgcggcctgacgatatacccgcaacagaaccagcgccagtaaagcaacaagttaacgggccggatgtatatcactacgatgaagatgatcctgagatccctttttga

SEQ ID NO: 151629 - DNA, 204 bp, Enterobacter cloacae
atgaacatcaaatttcaacagcacgtttatcaggctctactggctgaggccaaaaggcaggacaagcccctggcacggctctgtaatgaaatcttggagactgccgcgaacattttcgacaacacaccagacatcaaaccagcattagccagcaaggcgacactttacggagaacagaatgagcaaacagaaccgggacagtaa

SEQ ID NO: 151630 - DNA, 210 bp, Enterobacter cloacae
atgaagaaaattttactatttgttgtggtactgctgccgctggcggctcatgcaggaaaaatcaccataagcaaccccgacgaacaagaattacagggcgggaaaaggctttgcacttacgaaaacagcatttatctgtttacgctggtgactcgctcgcaatcctgccctttctcaaaaacgttcgatacaaatgataatgaaaagtga

SEQ ID NO: 151631 - DNA, 483 bp, Enterobacter cloacae
atgtcaaaagaattgctgcctttttttagcgctctattctctttcattgcacttgttgtcagtataactgctctgtataacacctatcgatcaagaaaaaatgctgagcatgattcattaaggaaaatgaaaattgatacagtgaaagagcttcgtgaggtcgaactggtttaccgtggaatatgtagtgacacggaagagcttatcaagtctatagaaacgagtacaaatatgaacccttatggtaagaaagaacttcttaagggtgtcagagataaccttggtttctttacacaaagtagacaaggtgtcacaaatatgctctctaagcttgatgagaattttatgagcatcagccgcgaagaaatagaaaatattgctcaattcactgcgtttgaagcgaatcgtttagccgagaatggaagaataatcaaagaacgcttcaaagatcttaaggagatgatcggcaaagcaccccattag

SEQ ID NO: 151632 - DNA, 699 bp, Enterobacter cloacae
atgacacgcctgaaggcgctgatcgatggatgtacccatcacggcgctttatggctcctattgcctaaaatctggttcgctgtaaaattgagcataaagaatagcttaataagaagaatttctatggcatggttgaaagaccttagcaaagacagcatatcgggcgttatcgttgcacttgtcactggaggaagtgggatcgccgtcgttgtgtggctatggaattacattaagcagttcttccattggttaatggacatccttaccttcccagtcacaatgcccttatggatgctcctcattttatcgattttattattggcaattttacctactgttggatttgtaatgcgccgtcgtattgcagcgaaagctacaggacaagagggcagttttttgcattatacttcggataatatttatgaaatgatagtttcttgggaatggactaaagcattaggtgatagtgggtactctttaataaatcttcacatgagatgccctaaatgtggaggccttcttagccaacactccagcgttgatctctataactatgtcccatttcctattattaaatgtaatttcaaaggttgtggttggaaaatagcctcagatatggaaagattaagctatggagagatgcggactagattggcacaagagattgatcgacgttgttttcaaaaatttagaagttaa

SEQ ID NO: 151633 - DNA, 378 bp, Enterobacter cloacae
atgccggagttgtacgacacgatcccaggcgcgcgggactggcccatcaaggccgactccgctcgacccgagacgatcagctatctcaagcggcagggcttcaacatctctgctgccgagaaatggcagggtagcgttgaggacgggatcgcacaccttcgcggatttgacgaaatcattatccatccgcgctgcaagaacgtggcgcgggaggcccgcatgtggtcatacaaaacggaccgcatcaccggtgaggtgttgccgaaactggctgatggtgatgagcatacgtgggacgccatccgctattcccttgatggacatatcaaacgtaaacagcagggtgtcggcatgatgattccgaaacgccttcgataa

SEQ ID NO: 151634 - DNA, 2325 bp, Enterobacter cloacae
atggcccagaacgtaggtgatatcgaatatgtgataaaagccaatactgcagagctgctccgtgcggataagcaagttgtaagcgtcaccaataacatggagtccggatttaaaaaagcagatagctcagcagaaaaactgaacaccactgtaacaaaaacggccagtgcagtttcaggtggtttgaagtcaggaatgcagcaagctggttaccagattcaggattttattgtgcaggttcagggcggacaatctgcgctggttgcctttagtcagcaaggttcgcaactcgctggcgcgtttggtccaggtggtgcagtagttggggcgtttatcgctttaggttcagtactggttggaactctatcaaccgccttaggcagtacgaaagacgaaatggaacagctgaaaactgctgctgaaacattaaataaagtggtggttataaatagccagggagttgcagctctatctaatgattatgctcggctggctgctaccaatgccactttagctgcacagttaagagacaatgctattcagcaatacgagatagctgttagggatgcgggtaaggctatcacgaacatcattgatgagcagtcatcttggtggagaagtcttaatggcggcgtggctagtgttaaggcttttggtagcgcaatggatacgatggagattagcgctgacaattttaatgacgccataaaacaagcaacctctttggggccttcattcaactccgcaacattgacgctggtaaacactgtagcaatgctttcaagtcagtttgatatatcagacgacgcggcatacggcttgggtaaaaggttaaatgacctggcaaaaaacccgtcgccacagtctgtaagtttgcttgtggattatatgaaatcgcttaagccgaccacgcaagatggggctgaagctataactaaccttgaaaagaaaattcttgatgccgccgctgcaatgcaacaggcccatgacaatggcgagtcgttgcgaaaaacacttgatggtctaaaaacagaggcgcaacaggctaattttgatggcataagcaagcagcttgaggcgcaaagaattgctttgaccaagggtaagcaggcagcaatagagtatggaattgagcagcaagatttaactcgggagcaaaaggatcagcttattgcgctttctagaactaacgcgcaattggcggaagaaaaagaaaagagagataaagcatcaaaggcagggttgaaacaagcagcggccacagaatcagtttctctaaaacttgaacaacttcgtaagaggtcggagctatcaggtgaaagtaccgctgaacttagccgtgagcaggcaattctgacagcgcaacagtctttaggcaaggcggccacgaaagagcaaatagccttagcaggccaatatgcagccaagacatgggatgcggctaacgcattaaagaaaaggtcgcaggctgagcaggcgaggcgctttacagatcaagagattgctaccaataaaaccactcccgacgcaataactggtgcggttgcagacccgacagccttgataaatcttcaagagcaacaaaagctagcagctctagcacaataccagcaaatgggggtgttaagtgcccagcaattcgaagacacaaaaacagcaattcaggaacaggcatctaatgctagaaagcgaatagctcaggacgaagccaatagtcagatggcggccactgtttccatgctgaatgctgcttcattagggtttgatagcttggcaggaattattagtggagcggcaggaaaggctagtagcgcatacattgcaatgtttgccgcggctaagtccttcgcaatcgcttcagccacgttggatttcaatggcgcactgcttaaggctctcaatgcaccggattcattaactacggcgcaacgctttgctaactatgcagccgttgcttccgctggggcgtctgtcctttccaatattgcaagtgtcagcatgagtggtggtcgacgttacggcggcacggtatcagccggcaatgcctaccgcatcaacgaagatggacgctctgaaatcttccagacagcaggtgggcagcaggcattcatcccgaaccagtcagggaagatcattcctgctgataaggttggaggaggcggtggggtggtgcagcacatcactttcgaaatcaacaccactggcggcatagacgatgcgaccaaggcgtggatttttaaatcgatgaagcaggtagccctgttccagatcaatgaccaagccaaccgaccaaatggtatgatacagccccgaaacaagcgttga

SEQ ID NO: 151635 - DNA, 222 bp, Enterobacter cloacae
atggcgattgaaacagaagttggcagcatcactgctttcgataacgttaacggccaaggtattcttgcgactgtagaattcaaagattatgacatgccgcatgaaggtattcgtgtctttgtgaagctcccgcttaataaagatgcctccgttgcagatattgaatctcaggccactgaggacgccaagcttcaactgaaaaagttagtttctggcttctaa

SEQ ID NO: 151636 - DNA, 921 bp, Enterobacter cloacae
atggagataacggcgggcctgcggtgcccgtcatttggagcaagttttgacagtggatatcagaaagccaagtacgcagacattgccggttatgtttcaggtgcgcaggtgctgtttataccgcatgcgactgcctatgttgattcagggctgtggcataaaatgaattccataaccatctctggtggcagggttacgcagaattcgagaatgcaggctctgggcattagtgaaagagatagcacctatacgtttcccggtagtgtctggcagatatttccgacaggtcagcgaagcggggtgggcctgcttatcagcgacagtactgacttcacctcgataaccaatgccacgcagtcagggcagtgtatctggaagggtaccgttaatgttccgaccggggggtgggcggttcccacgatagcaggatacgacaagtcgaaatatatcgttttcggacgctgtaatagcggtaatacgattgacttcgacggcaacacagtaagattcttcagtcctccgtcaactaatgatgacgctcccacaacaggcacgatagacatcgttatcttcgccagtggcgtagcgccgcagcctggtactggcctcaatattttcaacgctgaaggggcctgtacgttttcaactacaaagcgacctttcgtatacctcaatcaactctggtcaccttccacaagtgccgtgagcatcggcagcggctatgtaccgctgggcagatttggtctgatgattcatatggtaaatggcatgtacgtgtatcggatgttcggaataaagatacagaacggtagcgcttcagttcagggcgggaaataccttggacgcgagcagtatgccatattcggtaataacacgattactccgctcagccttccagtcttgcctgatatgtacgtctga

SEQ ID NO: 151637 - DNA, 1125 bp, Enterobacter cloacae
atgatttataccactggcactattgccattagcggaaatacccttacaggtacgggaacaaacttcactgcagctggatcgctgattcgtaacggctgtaccgtcatcgcactgaccagccccgcccaggtattccagatcactgctatcggcggggcaacaagtctcacagtgactcctgcggcaagtcctgcaataccggcgggaacgaagtattccattttgctaagcgacagcctgagcgtggatggcctggcgcaggacattgctgaaaccttcacgatgtaccagcgctacatgagcggtttcgctgatgtgatgaacggtactacagacgtcactatcacgattaacggtgtggccgttaccgtgccgggtcagaaatcgctggcaaagaaaggggctaacagcgacattaccagcctttccggtctgaccacagcactaagcgtggctcaggggggaactggtgcgaaaaatgcggcagacgcccgcacaaacttcgggctcggaaccgcagcactcaagaattatgtaagcggcacgaaagatgatgtgatgcttcagggttacggcaatttagtagttttatcgcagtacaacccgggcctaccgctctttcaaacgggagtgtatggagaatcgtcgcccgccggatggaaaccaactactgcgggcagtggattcgtttcgggttatgatagtgttcgccgccagcaatattggataagcactcagggaggtttctacgtacggcacattgaggacgctgcctataatattagtgcgaccacttacccatggacgcagatgcaggccgtcggcacatcagacatcaactttaaaaaagatatcactgaacttgatacggaaatcgcgctggcaaacatcgacgctatggaattcgtatcgttcagatataagaatgatgacagtggggcggtacgccgtggtgtaatcgcgcagcaggttgagaagattgacccgcagtacgttcacagcgccgagggagtgggcaaaatgacccttgaccttaacccattgcttatggatgccctagccgccatcaaggcactcaatgccaaggtggtcgacttaagtcagcaaattgaagcactaaaatag

SEQ ID NO: 151638 - DNA, 582 bp, Enterobacter cloacae
gtggttgcccctaatcgcgtgcagcggcagttcaccgttgtccgggcgaataaggtctgggtcactgatataactaatatccgcacctggcagggctggctgtatctggcggtggttatcgatctcttcgcccgtaacgtggttggctggtcgatgaagcccactctctctcgcgaactggctctcgacgcgctgatgatggccgtctggcgtcgaaaaccggacggtgaggttatcgtacatagcgatcagggcagccagtacggcagcgacgactggcagcgcttctgccgggctaataacctggccccgagcatgaacaggtgtggcaactgccatgataatgcggtggccgaatcgttcttcagttcactgaaaaaagaacgcatcaggaagagaatatacaaaacccgggatctggcccgagccgatgtcttcgatcacatagaagtgttctacaaaagggcccggcgcacagtcatctcggcggcgtcagtccggaggacttcgaacaggcctcattgtgaggacagaatttgtctacgggcgtggggtcagtgcaatatttgtttatcatcatga

SEQ ID NO: 151639 - DNA, 285 bp, Enterobacter cloacae
atgacgatgtgtcgggttttgtgcgttgcccgggccgggttttatgcgtggctgcataatccggtttctgcgcgggataaagataaccagcgcctgctgacgcttatccgcgactcatattccctgagcggaggcgtatacggttaccggcgggttcatggcgatctgaacgaaatcggtgaaacctgcggcaaaaaccgggtgggtcgtattatgcaactgaaccggattaaagccgtacgcggctcgtcgtatcgctggccgaccttcagtggttgcccctaa

SEQ ID NO: 151640 - DNA, 666 bp, Enterobacter cloacae
atggcggtgatgactctcatccttgccgactccgggtatggcaagacgtacagcatccgcaacgttaacccggaaaacgctattctcgcccgttgtattcgtaaggccctaccgttccgcaatacgggttggaaacttcatggtaaacgcctgcctgataacaccatccagcgcgggaacgtggttgatatccgcaatggacggcatcttcttgacgtgatccgtaacgctgcgatgagtggacgaaaaatactgattatcgatgattttcaggccgtcatgcagcacgagaacatggaccgggcctacgagactggctacaccaaatttaccgaaatggcggagcacgcctggcgcatcatcgaagcggccacacagctacctgatgacttccgcgtctacttcctcgctcacaccgaagagagcgaaggaaaaatcaggatgaagaccgtcggcaagatgcttaacgaaaagctcactcctgaaggctacttccctatcgttctgcgcattatcaagcgcgacggcaaacaccttttcctgttgaagggcgacgacaacgacaccgtgaaatgtcctccagacctgttcggtccggaagtgactgacatggataacgacctggcggcgttcgacaacgcaatttctgaattcactgacttataa

SEQ ID NO: 151641 - DNA, 396 bp, Enterobacter cloacae
atgcaaccttacgagcgattaacctctgaacgtctggcaagtttgccagaaggatcccgactaaaactcggcgggcaaattatcaaacttaccgggcgcgggtcatttaccaacagcgccgggcgcaccgagaacatgatcgagtatgtcgattcacgtggtgtgccaggcagttttgcggaaagcatcattctcgactcagctaccgagcacctcagctctgtaatgtgtgcttactgcggcgcgcggcgtcataagagcgattgcactgctcagacagtatcaacctacatgtcgacggcacaaaagcatttctgcaccgacaaaggctgcgctgagaagttcttccgccagaacccatcccgcgccaagacatcacggagaacgcgatggtaa

SEQ ID NO: 151642 - DNA, 438 bp, Enterobacter cloacae
atgacaaacattaacgcagtggaaaaaatggctgaattaatgcagcagatggaagagagctcgccgcgggtggctgctctccagtattgcctgacacagctggaagccaggtgcgcggcgctggctgcggagttgagttcagtgcttacagaccgcgctgtgattcttgaagatctagataacacttgcttcgaaattgggatgcagagaggcgagaaggccgaagcctaccccacgccggtggttgctaatcacgacgctttcctggctgaagtgcgggcgcagggtgtggagcggttggcgaatgcctggtacgccattgcaaacgaaacagacccaggaattagcatcagcgattcatctcgcctgaagtatcgtcaaagagcagatgacgcagctgattttgcgaatgaaatccgccaggaggccgcacaatga

SEQ ID NO: 151643 - DNA, 291 bp, Enterobacter cloacae
atgagtgaattcaaaggaacaccggggctgtggaaatacacaatcagaaatgtgaatgaaatgatgacgacatttcacggcgtagttatgggcgacacgtacattgaaattgcaaccagaaacgaacgagaggatgcacaattaatatcagcggcacctgaattactggaagctctgcaagacttcatgtctgagtcgtcaggaaattcgaaatcatgcggccacgatttcgaatgcatttgccgttttgataaagctcgaaccgccatcgcaaaagcactcggaaagtaa

SEQ ID NO: 151644 - DNA, 135 bp, Enterobacter cloacae
atgattaatcacaacatgcttcgtgcagctcagaacaaagcgctaatcgccagattcataggtgattcggtgatgtggatgtctgcctacaacgatatgaaggcggcaattggttttccgtggcacaggaaatga

SEQ ID NO: 151645 - DNA, 159 bp, Enterobacter cloacae
atgacagtcacccacaacggcaagcagtaccacgcatcaaaactcaacgacaacgagtggcaactctcatcagtcgataaacctcgcgagaaaatcacaatgaaccgctggcagatgcacattgccgggttattgcagcaggtggagggtaaatcatga

SEQ ID NO: 151646 - DNA, 249 bp, Enterobacter cloacae
atgagcaacccaatcacagtaggtttttcaggcctgacgaagcgaattttcgcaggtcgatcaaagccaagcaaattggcgcccggcgttcgtgagttcaccggtgagaaatttgatgtcacagacgaggcgctatttgcagtggcccatcttctcgcggttcgcgatgacatcctgatattcccgacagctgatgggaaagagattcacctacgcgccgacatcaaagaaaagcgggaggcatcatga

SEQ ID NO: 151647 - DNA, 246 bp, Enterobacter cloacae
atggtttttgaggcgacaacacctttgaatcgtacgcagcgatttagcttagccttggcgagagtgaaggatttcataattagtgaaacgatcggtttcaacgcccttaaaggcaataccagctttgaagagcgactggctcttaagtatgcaaacagcttgagtagatacagcggtaacttgaacgcacgcttcggacaaaatatctacggaaaagcagtcctcttgtacaaaaacaatttttaa

SEQ ID NO: 151648 - DNA, 966 bp, Enterobacter cloacae
atggagaaccagaaaaccggattcatcccgttgtaccggagtgttcttaagcaaacctggtcgaaggacgtcttcctgcgcacgctgtgggaaaacctgctgctgtgtgctgctcgccagccatatacagcaaacttcaaagggcgccaatggccgctgcaaaccggacaactggtcaccacctcagccgatctcgggctgaatttatgcgacagggaagggaagccatgcagtcgccacgccgtagacaggatgcttgatgttttcgagcgtgaagggatgatttctcgctccggagagaagcgaaagggctctgtgataaccatcacaaattacgctgaatatgctcaaaaaatggacgatttacccgagcgtatcaccgcgcatatctccgcgcttaatgccgagcatggcgaatccagtaatggcgcggcttcggaaggttatgccgcgcataacggagcgcatttacccgagcgtttcaccgagaatcatgaacaacaatgtaataacaacaataaaaacattaaaagatcttcgtccgagaattctgacgaatcctctgacgcacgtctgaagaaatttttatcagctcatccagaagctgcggtttacaccccatccggtgcgaagtggggatcggctgaagacctcgagatcgctaagtggatttcctccagggtgaagctgattaacccaacctgcaaagccccggacatgacctcctggtctaacaccgttcgcctgatgcgccagatagacaacaggtcgcaccaggacatctgcgcgctgtacgactgggcaagcaaacaccacttctggcagaccaacatcctgagcccggaaagcctgcgtaagcagtgggacaagctgacgatgcagcgcagtgctggtggtgagcagcgaggcggaaagccggatctggacttcaacaacactgactgggcctatggggtgattcgatga

SEQ ID NO: 151649 - DNA, 690 bp, Enterobacter cloacae
atgaaatctcttgcagagcagatgcgtaaccacgaccgcgagcagatgagccgcatggcccataacctgccggagcagtaccaggagcgcgcgccagtcgagctggtggcacaggtattcaacaagctgttcaacgagctgcgtgccgcgttcccggccagcatggcgaacttccgcactcaggaagacctgaacgaattccgccgtcagtggctgcttgcgtttcaggagaacgggatccactcaatggcccaggtcgatgccggcatgcgtgtagctcgccgccaggagcgtccattcctgccgtcgccgggccagttcgtcgcctggtgcaaacagagtggcggggcgctgggcatcaccgttgaccaggtgatcgccgaatactgggactggcgtaaccgttcgttcgagttcacttccagtgagcaattcccctggtcgcagccggtcatgtaccacatctgcgtcgagctgcgtcaccgcagcacagagcgccagttaacgcatggcgagcttgcgcatgaagccggtgatctgctggacatgtgggagaagcgcgtcacagagggtaaaccagtgccgccagtgcgccggtcaattgcagcaccggctgccgagcacgggccgacgcctatccagctgctgctggcgaagtataaccgcaacaagtcgaacgggatggtgtga

SEQ ID NO: 151650 - DNA, 192 bp, Enterobacter cloacae
atgaaaacctcatcgagtcgcatgaaaaacaaggtgggggcacaaaagggggcatttataaagatgaaacaagaaaatatgtatatttatcaatggttggatgggttgtgttatgttcctattatcaccattaaaatcaaattgttacgtaagatcttatcattctcccaccaaaaaattatcttaatgtaa

SEQ ID NO: 151651 - DNA, 567 bp, Enterobacter cloacae
atgagcaactcgatcgcagacggcgcaaaattaacgccggaaacattcgcagatttcattgaacgtttgaagtaccaccatcgcggagagggcgtaaatcgtcatgccaccgccgatccgatttttatggttcagaagcaggcgactatttacggcctggcagaagagtacggcgaatcgaaaatagtccatgtcgaagactgtgaatgggacagcccgcaagaatattgggatgacctggatgagctccagcaggaagagctaaacgccttctgcattgaccagtgcgatacagcatttaccgaactcgatgaagacgctcagtgggaagtgctggctgaccttgacggccacactgtctgcggaactcgtaaggaatggcagaacatcaacgctcactttactcgtgaagcagcggaggctttcattcgccgtaagcagcatgattaccctcctctgcgggtctacgtcgagagcatgtacttcgggtgggagtatcaggaaatcatcaaggccctgtgtgatggccgcttagtgctcgcagaaaatcaggagtccgcccaatga

SEQ ID NO: 151652 - DNA, 897 bp, Enterobacter cloacae
atgagctttagcatcgttgagttcgttaaacagcaggagccgctctttgccggggcggtcacagatcagtccgtagcgtgggcgaaagaaagccagttcgcaattcaggcatttcagcgaaacgacaagctggctacaacggcaatcagcaacccggccagcgcgcagaacgcgatcatcaacgtggccgccatcggcatcacgctgaacccagcaagcaagctggcatatctggtgccgcgtgacggcatggtgtgtctcgatatcagctatatgggcctgcttcatctcgcccaggctaccgggtccattaagtggggccagtgcaagctggtctactcaaacgacacctacgagtcaaacggcctcgatactgcacctactcacaaatataacgccttcggtgaccgcggcgcggttgtcggcggttactgcacggtgaaaactcctgatggtgattatctgacggaagaaatgagcctggcagagattaaggcgacagaagctaccagtaaggccaagaacggaccctggaagaacttctgggaggagatggcgcgcaagaccatcgttaagcgcgccagcaaatactggccccgcgctgagcgtctggataacgcgatccacgtcatcaacgaagatgagggaatccaccaggagccggttatggcccacacgccagaaagcgaagtaatcctgtctgaagagcaaagaaagcaggagcttcacgacaaggtgtcggcgctatgcaatgaaatggagcgtgctgaaaccatgcatgacctgaagctgcacttccaggcggcctacaaaatgacggccggcatgaagctgcagcagaacgtccaggccatctattccgagtgcaaaatgaagtttgaggaggtggcacaatga

SEQ ID NO: 151653 - DNA, 483 bp, Enterobacter cloacae
atgaccgctctctacaaaatagccaatgacttcgccaagctcactgactccgatatggacccggagatgatcgccgacaccctggacggcatcgaatgggagcttgaagcgaaagtagagcagattcttgcggcctgcaaaaacgagcaggcctatgcggagactcttaaggaggaatcccgcaaactggcagagcgcgcaaaggctgctgagaaccgagtggttagcatgaaggagtatgttgcccggtctctcaatacagctggcaaaaagtcactcaaagcaggaatccaccaggtaaccgtcagggccccatccaagtcagttgagattaccgacgccgcctccctgcccgctgaatatgtcgagtacgacacggtcatcaaggcggataagttagccatcaagcataagctcgatgctggcatcgacatccccggcgcgcgcatcaagatcggcaagccctctctcatcatcaaataa

SEQ ID NO: 151654 - DNA, 219 bp, Enterobacter cloacae
atgctgatgatggccttctcggtgcgctccagcttctcggcgatgaccgggatcggcatggtgctgccgacctcatacaggaacagcttttcccatgactcccacagggtgtatttcatttcgaccccgctattatttgatgatgagagagggcttgccgatcttgatgcgcgcgccggggatgtcgatgccagcatcgagcttatgcttgatggctaa

SEQ ID NO: 151655 - DNA, 180 bp, Enterobacter cloacae
atgcgtgaatggacgactgaggaactggcgctgttatggcgtcacagcaacgaggaagttgcggaaatcaccgggcgcagcatcaaagaggtgggagatcgtcgcctgcaggaaaatctggagcgcaacgggtgggataaacataaccccgaggcggtgactaagtgggaggcggcatga

SEQ ID NO: 151656 - DNA, 297 bp, Enterobacter cloacae
atgaagatttacatagccgggccgatgagcggcctacctaattttaaccgttccgcttttaaccatgcgcattttcatctctggtcgaaaggccatattgttctgaatcccgcccgtctaccagatggattaacccagggcgagtacatggacatctgcctgtctatgcttcgctgtgctgatgctatctacatgcttgaaggctgggagcactccgctggtgcccgagcggagaatgccctggccgagaagctggaaatggaaattatcttccaggaagaggatcgcgccgcatga

SEQ ID NO: 151657 - DNA, 630 bp, Enterobacter cloacae; identical to SEQ ID NO: 18390

SEQ ID NO: 151658 - DNA, 306 bp, Enterobacter cloacae
atgcaggcgcaattcttgattggcttacaagttacgcctccggccagggctgcgatgcaatgcatctggataccggctacgcacggcatgccgctcaccgtgtctacctcagcaaaggtttcgaactcaactgtcaccacttggccaaagccattcaaaagcagtagttctagcactatgcacatcttccactacgcgccccagcctaactgtcggttcaacgccgacgccaacactggccatggcttcgccattttcatggccagtgttggtgccctccgcgcttcgcgctccggcgccggttaa

SEQ ID NO: 151659 - DNA, 765 bp, Enterobacter cloacae; identical to SEQ ID NO: 6031

SEQ ID NO: 151660 - DNA, 213 bp, Enterobacter cloacae
atggcgttgactctcagtcatagtatcgtggtatcaccggttggttccactctctgttgcgggcaacttcagcagcacgtaggggacttccgcgtttccagactttacgaaacacggaaaccgaagaccattcatgttgttgctcaggtcgcagacgttttgcagcagcagtcgcttcacgttcgctcgcgtatcggtgattcattctgctaa

SEQ ID NO: 151661 - DNA, 129 bp, Enterobacter cloacae; identical to SEQ ID NO: 33085

SEQ ID NO: 151662 - DNA, 1191 bp, Enterobacter cloacae
atgaaatctaacaatgcgctcatcgtcatcctcggcaccgtcaccctggatgctgtaggcataggcttggttatgccggtactgccgggcctcttgcgggatatcgtccattccgacagcatcgccagtcactatggcgtgctgctagcgctatatgcgttgatgcaatttctatgcgcacccgttctcggagcactgtccgaccgctttggccgccgcccagtcctgctcgcttcgctacttggagccactatcgactacgcgatcatggcgaccacacccgtcctgtggatcctctacgccggacgcatcgtggccggcatcaccggcgccacaggtgcggttgctggcgcctatatcgccgacatcaccgatggggaagatcgggctcgccacttcgggctcatgagcgcttgtttcggcgtgggtatggtggcaggccccgtggccgggggactgttgggcgccatctccttgcatgcaccattccttgcggcggcggtgctcaacggcctcaacctactactgggctgcttcctaatgcaggagtcgcataagggagagcgtcgaccgatgcccttgagagccttcaacccagtcagctccttccggtgggcgcggggcatgactatcgtcgccgcacttatgactgtcttctttatcatgcaactcgtaggacaggtgccggcagcgctctgggtcattttcggcgaggaccgctttcgctggagcgcgacgatgatcggcctgtcgcttgcggtattcggaatcttgcacgccctcgctcaagccttcgtcactggtcccgccaccaaacgtttcggcgagaagcaggccattatcgccggcatggcggccgacgcgctgggctacgtcttgctggcgttcgcgacgcgaggctggatggccttccccattatgattcttctcgcttccggcggcatcgggatgcccgcgttgcaggccatgctgtccaggcaggtagatgacgaccatcagggacagcttcaaggatcgctcgcggctcttaccagcctaacttcgatcattggaccgctgatcttcacggcgatttatgccgcctcggcgagcacatggaacgggttggcatggattgtaggcgccgccctataccttgtctgcctccccgcgttgcgtcgcggtgcatggagccgggccacctcgacctga

SEQ ID NO: 151663 - DNA, 636 bp, Enterobacter cloacae
atgaacaagctccaacgcgaggccgtgatccgaaccgcgctcgaactgcttaacgacgtgggcatggaaggtctaacgacgcgccgactggctgagcgcctcggggtgcaacagccagcgctctactggcatttcaagaacaagcgtgcgttgctcgacgcacttgccgaagccatgctgacgataaatcacacgcattcgacgccaagggatgacgacgactggcgttcgttcctgaagggcaatgcatgcagttttcgacgggcgttgctcgcttatcgcgatggcgcgcgtattcatgccgggacgcggccagccgcgccgcagatggaaaaagccgacgcgcagcttcgcttcctttgcgatgctggcttttcggcaggtgacgcgacctatgcgttgatggcaatcagctacttcaccgtcggcgctgttcttgagcagcaagctagcgaggcagacgccgaggagcggggcgaagatcagttgaccacctcagcgtctacgatgccggcgcgcctacagagcgcgatgaaaatcgtctacgaaggcggtccggacgcggcattcgagcgaggcctggctctcatcatcggcggtcttgaacggagtgcttgcgcaatctcgctcctttag

SEQ ID NO: 151664 - DNA, 336 bp, Enterobacter cloacae
atgaaagagacttgtgagcagatggattgtgagctactggagtttggtggagaggacgatcacatccatatgatggtgtccgtacatccaaaattggcaatctcaaatttagtcagcaagttaaaaggtaaatcgtcttacatgatccggcgagagtattgggacagggtaaaaacaatgctttggggcaaccatttctggtcgccaagctactgtgtggtttcttgcggaggggttgccctcgatgttgttcgggagtacatcaacaaccagaacgaaccgcccagcgaaaaagccatgaagacatcacaagcgttgaagcaaagaaaagagtag

SEQ ID NO: 151665 - DNA, 1380 bp, Enterobacter cloacae
atgttaactggcatcaagctacgcgctaacccgacatctcaccaaaaactgatcttgagtcagtggatggggtgcgctcgtagtatctggaatgccaaggtagaagaagagcgttattaccgaacctatgcccgtaaatattgcaccatcggaacttacgcgcccatcgaccagaccacttcacaattcaaatccaaagagctttctccgtggctaagtgaatgccctagtcaaatcttgcgtaatagcgcggttaactggtatcaaacttatcagaaattcatgagcgggaaatgcggcaggccaaagcgaaaacctaaaacggacaaaggaagcatttatcttacccgtgaagtgttccgtttcgaccattgcgatgacggcaacgtgcgcctgtttattgggacaaagaccaacaatatcggttatctgtcctttaaggcacatggcaaatttgagatcccaaactcgctttatgtgagaaaagagcgcggccactattatgtgtcattctgctatgagcaaggacagcctgatcgcaaactaagtaccaatgaagagcacttagcttttctgcaaggggcgaccagagaatatctggaagagcacaccatgggtgttgaccgaggcgtggcgatccccgtttgtgctggcgaacaaacctatgatttcacccatagccagaaaaagaacatgagcaaagcagaccgctatatcaagcgattgcagcgcaaactggcaaggcagcaaaaaggctctaaccgcagagccaagaccaagcatcgaattgcggttcatcatgctaaaaaggctaacatacgaaatgattttgcgcataagaccagtcggttattggttgatagcagcgccaaaatcattgtgtttgaggcgttacgaaccgcaaggatgacgagaaggccgaaagcaaaacaggatgaacaaggtcgattcatatcaaataaagccaagcagaaagcaggactgaataagtctattcttaatgtgggctggcatgtgatcgagacttacacctactacaaggcttattcatccagcaaagcggtatttaaaatacccgcaccaacaaccagtcaggagtgcgcaaaatgcggtcacactcatcccgacaatcgcaaaacacaagccctgtttgtttgcggtaattgtggaaatactgacaatgcagatcacaatgcatcactggttatcaagaagcgggcaattaacttaattttggacactggaacggtgttatctggcgatggggttctgcgaactcagtcggatagtggacgtggaggcaatcgtaagactggccgagccaaaagctcaaccagcagtgctcaacgaagcgtcaaaaaagaaaagctggccgcttag

SEQ ID NO: 151666 - DNA, 177 bp, Enterobacter cloacae
atgggatgggccatcgaccagaccagcagcgggcttgtgctggtaagtcgtcccaaggaactgccgttccttgagggtgagcacgacatgcgccccagcgaataccacgacctcatgagccagccgccaatgcaagaaccagatttgttcgacccgcaggactggacgccggactga

SEQ ID NO: 151667 - DNA, 234 bp, Enterobacter cloacae
gtgcagcagcttggcggcttcactctccagctcgttgcgctcgaaaagcgaaaccttgacgtgttgctctcgaaaaaccgccccggtcaggcgcggattgacggcaacaaagatttccccagtcttgtgattgaaccgactcgaaaggagattgcagcggtaatcccagccggtagcgtgattgatttcccgtatctggggtcgtttgcgggagagggcgaaatcctacgctaa

SEQ ID NO: 151668 - DNA, 498 bp, Enterobacter cloacae
atggcagaccatgacgacgcgccggataaaattagatgcctggagtgcgggaaagagttttctttccttgcccctcatttgagtaaagcccaccagatgaacgccagacagtaccgggaacgctggggcataccactacaaacgccgcttgccagcgccgagcattcccgccagtgtcgggaaaatgttttgcgccgtatccggcggggcgagattcgccccgctgaccagctcgcactcatggccgaagggcgcaggaacgccccgaagcgggaccgaagtacccgcctgcataaagtggcggcggcacaggtcgcgcgggtgcatcagatatggaagcattctccggtggtgaaggtcgttcctgatacgctcagggacgaagccgtgcaaagaatgacggccagaaaggtgactggtgagaaagttaaggatattgccgccgatctgaatctgtcggttgggtgtctgtacaaatgggtggcgggcgctaaatag

SEQ ID NO: 151669 - DNA, 270 bp, Enterobacter cloacae; identical to SEQ ID NO: 18428

SEQ ID NO: 151670 - DNA, 558 bp, Enterobacter cloacae; identical to SEQ ID NO: 18429

SEQ ID NO: 151671 - DNA, 567 bp, Enterobacter cloacae; identical to SEQ ID NO: 18430

SEQ ID NO: 151672 - DNA, 231 bp, Enterobacter cloacae
atgacggcgcgaaatgctgggttgccatgcctgaaaaagacgacgtttagatgtaaaaaggcggggagtggttgcccccccgcctttagttacgtttccggtcagtcgatgaactgccggatcagttccaggacagctatcacagcgtttgacactgcgactaccgcccgcagaacgacgattaacatgttaatcatccgtttgctccatacagagcaggaacgccgctga

SEQ ID NO: 151673 - DNA, 543 bp, Enterobacter cloacae; identical to SEQ ID NO: 18383

SEQ ID NO: 151674 - DNA, 588 bp, Enterobacter cloacae
atgagtttcaaaagcggtgtaacaacgagggtggataacgctcaggccattctggatgcgctcaggtcgctaaccaaaaaggatgtgctggtcggcatcccttcggaagacagcgagcgtgaagatgttccgtttggtaatgcggggatcggctacgtcaatgaatacggctcaccggcgcaaaatatccccccacgcccgcacctgatccccggcgttaaatcggtagaggaacagacagtgccgcagcttaaagcagcggcgcaggctgcgcttgatggtaatgcggcgggtgcagaaagagcgctaaaccgcgccggaacgctggccgccaatggcgtcaggcgttacatgactattaccggctttacaccgcttgctgatagcaccgttgaagcccgcgcgcgtcgaggtcgcaaaggggcgaaagctgagttagcacgcagatcggcagacggaaagcttaatgctatcaacccagattctggtcaattgataagcaatgagaatgtaaggccgttgattgataccggacaataccgcagagccattacccatgttgtgagggataaagatgccgactcttga

SEQ ID NO: 151675 - DNA, 1740 bp, Enterobacter cloacae
atgagcggtaacgcagatacgattaaagacttccttgtttcgctgggattcgatatcgatcaggctggcgctaataagtttgaagccgtgctgaaaggcgttaccgcaaacgttctgaaggtcggcgcggtggtggaaggcgcagcgctgagcattgtcggatttaccacccagatcgcgaatggtctggataaaatttactgggcatctcagcggacgggggccagcgtccagggcatcaaagcgctgggctatgccgcatcgcaaaccggtgccagcgctgagtcggccatgtcctccctcgaagggctggctggcttcatgcgtagcaatccgggggcggaagggttcctgaaccgtcttggtgtccagacccgtgatgccagcggaaagatgcgtgatactgcggccatctttactggcgttgggcaaaagctcaacaacatgccgtattaccgcgcgaaacaatacgcgcagatgcttggcatcgatgaaaacacgctgatggcgatgcgcagagggatggggcagctcagttctgagtacgcgttgacggcaaagcgtattggttttaatgctgagtcagcggctaaacagtccaatattttcatgacctccatgcgtaatctgacgatgacgcttggacaggcgaaagacaagattggctctaacctagctggtggccttgctggcagtattgataacttccgcaggcagatactcgacaactggccgaagattgaagcggtcatcacgaagatcatcaaaggaattctctgggcaggtgacgcgattacccgcgtgttatggcgaactgggcaagctgttgagggtgtgatcgcctggttcaaaaagctgaacccagccacgcagcagcttatcgcattgttcagtgggctgttggttgcatggcggctgctaaataccgctttcatgtcatcacccttgggcatgataacgacgcttattattgcacttggtctgctcttggatgattaccagacgtggaaagaaggtggcaaaagcctgattgactgggggaaatggaagactgaaattgatcaggccgtcaaaatgattggtgacctgaaaaagactgttacggacctgacaaaagcgctggctaagttgctcggtattgaccccaagtcatggtccctaaagtgggattttagcaacttcatttcgcaaatgggtgagttcggcaagatgctgaacatgatcgctgatttgctgaatgccataaaagatggcaactgggcgcaggccgctagtataggcaaacagctgctaaatcagggcagcgggcaaccgagtgccacaccggcagtagaggatagcgccaacagaagcgctgactgggttaaggagaatctgggatttgacccgcgcagcgtaggcagaaccattcgcgggtggtttggtgatgatgagcctgaccaacatgcccagtctgctaaagctccacgaggtattagaaataataaccccggtaatatcgactttcgtgggcaatctggggcgacgctcgaaaggcctggcggcaggttcgcccggtttgaaactgcctatgatggcctgaaagcgctttcccgacaattaatgcgctactttgaaggtaagacgacaggcaagccgctgcaaacccttaacgatataatctctacgtgggcaccggggaatgaaaataataccggtgtgaatcgccacgcgtttaacagacacctcagagtcatttaa

SEQ ID NO: 151676 - DNA, 936 bp, Enterobacter cloacae
atggaatatcaattagatttaaaagaaaatgcaattgatagttttaatgaggcattggcaaagtatgaattaggtcaggaaggggaaacgcggcaatataaatttgcaattttacatctatcacactttcttgagctagtgctgaaattatatatcgtctctgtggacgaatgtctgctgttcactaaatgttataaccctattagagataaagctaagcgagaatcaatagaccttttgggagcgtataacgctcttagcaaagaaggtgtcgacttaggtaaattcattgatggtattgcccgtccttacaccattacattagaccaagcgttaagtttcgctaagtgcgaaaaatgcagtaaaacaggtgtcgattttgtagatattgatttttgtaacgatatcgattggctaaagaatttaaggaatgatatcgaacattatcaattcagactcaccccaaaagaagctcggctgtgtattggccgtcttgttcgaggtgtggctgagtttatcgatatattcgatctttttaatctagaggatgaggtcggctctgaaaatttaaagatatttcaaacgttggctgatgaatattcccatttgcttagtgaggctgaaaaggaagtcaaagaaaaggagtccgaagcattttacggcgtaagaccaaagttttatgaattagttaattggaatgtatatgaatgtcccgcttgttcaaataatacaatgattccatcagatgaatcgacgacgggttacaagtgtacattttgtcagaatgaagatagtgatgatattgaggtggcttgtgattgttgcggtgcaatggctcccggtggtgaaatgagcatttggcacatggatgatggagaggtcgagtatcgctgttactactgctcaggacaatatcatgcagataaagatgattaa

SEQ ID NO: 151677 - DNA, 1770 bp, Enterobacter cloacae
atgaccatttcaactgacctttcactactcaatgacccgcgacgacaggcgcggctgttgtactggcaggggttcgccgtgccgcaaatctgcgacatgctgcaactcaagcgccccacggtgcagagctggaaacagcgcgatggatgggaggaaaccgcgccgattaaccgcgttgagtcgacgttagaggcgcgcctcatccagatttacgccaagcccgacctgacgccgcacgactttaaggtcgctgattttctgtcgcgccagatggagcgcctcgcgcgcgtgaaccgctacggccagaccggaaacgaggtggatttaaaccccaacattgcaagccgcaacaaaggggatcgcaaaaagccgaaacgtaattatttcagcgacgaggcaatcgagaagctggaagagattttctttgaccagtcgtttgagtatcagctcaggtggcataaagccgggttagagcaccgcatccgccatatcctgaaatcgcgccagattggcgcaacgttctactttgcgcgcgaagcgctcctgcgcgcccttaagaccggccataaccagatatttttgtcagccagtaaaacgcaggcttacgttttccgtaagtacatcatcgcttttgcgcgtctggtcgacgtcgacctgtcaggcgacccgattgtcatcggtaacaacggcgcagagctgattttcctcgggactaattccaataccgcgcagagtcacaacggcgacctctatgtcgatgagattttctggatacccaatttccagaagctgcgaaaagtcgcctccggtatggcctcacagtcgcacctgcgcaccacctatttttcgacgccgtcgacgctggcgcacggcgcttatccgttctggtcaggcgagctgtttaaccggggacgcagtaaccgcgacgaacgtgtcgacatcgatatcagtcatcaggcgcttgccgggggcatgttatgcggggacggccagtggcggcagattgtcaccattgaggacgcactcgccgggggctgcaccctgtttaacctcgaccagctcagacaggaaaacagcgcggatgacttccgtaacctgtttatgtgcgagttcgttgacgataaagcgtcggtattcccgttcgaggagctgcaacgctgcatggtcgatgcgatggaggagtgggaggacttcgaaccgtttgccgaccgtccgtttaactggcgtccggtctggattggctacgacccgtcacatactggcgacagcgcaggctgtgcggtgctggctccgccactggttgtcggtggcaagttccgcatccttgagcgtcaccagtggaaaggcatggactttgccgcgcaggccgaggccatccgggcgctgaccgagaaatacaccgtcgactacatcggcattgatgcgaccggcatcggccagggtgtttaccagctcgtgcgctcattcttcccggcggcgcgcgccatccgctacacgccggaaatgaaaaccgcaatggtgctgaaagcgaaagacaccatccgacgcgggtgtctggagtatgacgccggtgcgaccgacatcacgcaatcattcatggctatccgcaaaaccatgaccagcagtggccgaagtgccacctatgaagccagccgcagtgaggaagccagccacgcggatatcgcatgggcgaccatgcacgccctgttaaacgagccactttccgccggtagcggtatgcattcaacctcgattctggatatcaactaa

SEQ ID NO: 151678 - DNA, 171 bp, Enterobacter cloacae
atgagaacgggagaaacccttacccaagtgaattggttcgtatggccgctggtggcggtgcttcacaaaacatacagcaagaaacggttattaatattcacggtgtatctgatccacgtgaggctgccaatatcacagttgagcggcagaagaacgttaattcacaactaa

SEQ ID NO: 151679 - DNA, 357 bp, Enterobacter cloacae
atgaggataattgtgaaactaactcaagtgctattagctacagcatttattttttcatcttcagcttttgctgacgggcaatgcgggccgtttaggttaagcgctggcccagacgatggttggtttcgcattaatggcgccaagcctgaatctcagaaagtcaccttcctgaaaggcaaagaagactacgacaacatcaagattgactggcgcatggctactgaccaacccggccgctgggttgggctcgaatacatcaagcgcaatggcaaagccattctcaacgcacagtggttgcaagccagcatgaatgcgccgcgtcagtatgcaacatacgactgcgtgaaggttaagtga

SEQ ID NO: 151680 - DNA, 210 bp, Enterobacter cloacae
atgcaacagcgagtaagggagcttgaaaaagacgtccagtctatcaagacagacttggctgtcatgaaatcaaattacgccacaaaagaagacgtcagcaacgccaagaacagtatcattatgtgggttgtcggtgcggttatttttgctcaattaatacctgcgcttcctgcaatccttgatgccgtcaaacgaatgttgagtggctaa

SEQ ID NO: 151681 - DNA, 384 bp, Enterobacter cloacae
atgacaccaatgatgtacgaacgggtcagaaacatgttcggcgacgccgggctaacggccgggttcacggtgcaacagctgatgtacgacgacccgggagatctgtcgaaagcgatcatggtgttcaggccaaacggcgggtcgaatattcgtactgacctaggctctgagtaccacgtcctggtcgacgttgtcggcgcgaaagacaagcgcaaagacgcgcttaatgccgtgcagcgcatcattgattatgtccaggccaacccaatgaccgacgattgcgtcggctacatccagaacatgggcgcaattcccgcgcctgtgctcacagaagaagggcgaatagtcttccgactccagttcgcctgcacctatggagagtga

SEQ ID NO: 151682 - DNA, 744 bp, Enterobacter cloacae
atggctaattgcagtaactcaaatgagcggctatttggagctgccgtcgtgctcgaagtggctgatggctgcccagatgtaaagccggaagaatcggaatggatggcgttagcggccgggacatctaaagggttcgacttcaaccctaactcagtaacttctgacgcagatgatggggcaggctacgtagagacaatcatcactaacagcgacttcacgatcagcttcgagggggaggttcgtaagaaggataagctcgaccagtatggcattggcaaattcattacctacttcgctacagaattaaaagcgaaacgtcagcctggaatgtgggtaagaatggattacggcccggtagagtttgttggttatatgaatatcagtgcgctcagttcagacggaggtagtaacgacatcgtcacgttctctactgagttcaaagtcggcgatgcgagcactatcgaagtgaacgaaatcactgcggttgcggtgactggcgtgacggtaaccccgacaaccagcaccggcacggcaggcggtaccagcaccttcacggtgaacatcgcaccaaccggcgcaaccaacaaagatttcactgtagcgactaccgatgcgaccaaagcaacggccaccgcatccggcaacaccgttaccgtgacgcgcgtcgccaccggcagcgcgcagatcatcatcaacaccgaagacggcaactttgtggccgtgcatacggttaccgttacgtaa

SEQ ID NO: 151683 - DNA, 327 bp, Enterobacter cloacae
atgtccgagaaaatcgcagagcaattggtcttccaccctgccagtgaaaaactgacaaaggatctggatggtgagtgggtgattctgctcaacccatgcgatggctggcatattgcccatgtattggcgtttgaagaggatggcgaggtctaccatgtcggcgcatatcaatttgcgggtggagaatttgaaccgcatgagttttatgttgcctgggcgctgcttcctgattcgataaagttgtctgaccgatttgaagaccagcgcctgacgcctgaaatccgagaggcgcgctttcgtgaatggttagccaaaaccagtaagtga

SEQ ID NO: 151684 - DNA, 141 bp, Enterobacter cloacae
atgactatcaagatcatgaaatgctatgtctgcaatcattccataatccacgaaattttcttggcagtaatcgaggacgatctgcttcttctggccgtcgtccagctccttggggatggctatgtccagataacggcataa

SEQ ID NO: 151685 - DNA, 384 bp, Enterobacter cloacae
atgaataaacttataacagaggcagaaggtgcaaaaatcgaaagtgtttttaaatacatattagaggcatctgaaagcatattaatagagcatgggcatgttattacggggcaaataataaaaaacaaaaagttctttgctgataacggtcataaagattttgaaaggttagagtattaccttagctcggcaattagttctcttgtcgaggataaggtaacagaaggcattaaagacattaacacggatgagaaccttgtttttaaaaaaataaatgaattgagtgacaaggaaaaattaattttagcagagtgcattattaaacattttgaatattcaaatgttagaggaatgcaaaaggcatttaatatttttggggggtaa

SEQ ID NO: 151686 - DNA, 270 bp, Enterobacter cloacae
atgagaagaagcacaataagaaaaggtttaactcaaaaagaaatggctgaaagatttaatatatctgttaaaacggtaaaaaaatatacatccgaaccgcgtgaacaatacgaacaaacagcggctgatcgtcgtcgtcaggcttacgaactacgaagccaggggctgaaatggcaacaggtagccgacaaaatgggctgttcgtatcacggagccgttgccctgtatcgccgttatgttgccttagatatgcctaaaaacagcctgtaa

SEQ ID NO: 151687 - DNA, 1440 bp, Enterobacter cloacae
atgaataatgaatccgcaatgcccttcccaatagaattttttaaaatgaatggtgtttatgggtacaaaaatctttctatgacaatgaaaggtaagtcaacaatctttgtttcagaaaatggttcagggaaaacaacgatacttaacgcattgaattatgtattgaaaggagagttttcaaaacttaaaaactcttcattcaagacgattgaagtaaaattgacaggtattgaagattctataattttagataaagaaacaataaaaaatacaccaccagaacttcaagatttaataacggattctcttagtctaatggacgttgacttttgggatgaacatcaaattgaggatgtttatattgctatttcctctgttaatgcctttgcgccgtttactcttcctgaatccaacatcattcgagggctttataacgcttcggaacttcctatgtctgattttttagtaactttaaaagagttgaaaactaaaattgaaaatacattaattccacatgatactgagttagctaaattacttgaagcattgtcgagttatgaggttatttatcttccaacctaccgaagagtagaaaaatctttcgatcttaatatgaaagatgattctaggcgtagagctatggcaaggaaaggtagacttaaatttaataaccaagacagaatttcttatggtttaagagatgtagaggaaacacttagcgcaattacgctggatattgaaaggcaatctagcgccggttatcgctcactcagtgcgacgatgcttgatgaccttattaggcacgaacataggattaagcaagcagataacaacgttttaccagaaatagaggatcttacacgatttttgagtcgtttggataagcctagagttaattatcaaacagtatcttcatatggaaaaatagcgccacttattgaaaatcttaaagatttatatgcaaaagatacaattaaagaaaatcattatctaaactattttctgtctaagctaaatcctattattcaagatactaaagagcaagaatcaaaaattgagacgttcgtggctatttgtaacaaatacttaaaaactgctggtgattctaaatttcttactttcgatccatctaaactggaagtggttgtctatgacgatttctcgggtgaggaaatacaattgaatgacctttcatccggtgagaaacaagtcatatcgttaatgtctattctttatctttatgataactcaaataagataattttgattgatgagccagaattatcattatctcttccttggcagaaattattattacctgatgttgatcaatgcaataccgtatcgcaggttatagctataacgcattcaccatttatatttgataatgagctggcttctaacgccacccctatgcgtgttacgaaacaattaatttag

SEQ ID NO: 151688 - DNA, 882 bp, Enterobacter cloacae
atggtagatactaatttacaattactcgacagtttacgcatggctcaatcaacaaaagattccttaatgcaaactgtgttaatggcactatctaagtgtcaatctattattgtttttgaaggtgatactgactatcaagtctacgatgaatggctaaaagatacacctaaatacagaagttctgaacatatttgcgcaaaaggtaagtcgcaacttattgagttatacaagcatgcgatcgatattaatcatgttgagctaataaattgttgcaagttttttgttgatcatgattatgatttaatatcttataatgataattgcatcactacactaaactgttattctgtcgagaattatctggttaatgtagatgccataagtaatatcttaaaagatgagttccatttggatggaagaaaaataatcgagcgtaatctcctcattgaacactttcttgaggatttagctgtatttaatgaaatggctaaggaactatgtttacctcttttcttaaagcataacatagagggtagagctagattttataataaaataagtgatttgatagttattgagtatcaaaatgttagactcaaagataatgcatctgacagtatgccggatattgttccatctgaagaagttaatcgtttgaaagcagagtttgaaagactgccttatgagcgaagtatcagagggaagtatcattttgagtttgtaaaaaaatggctagtaagtttaagggaagtaataaattctgagcagttattggatattccaagggttagcaaggaccctgcacaaatggacatgcgtcgtttcgctagtgctacaattgcaccacaggaattgatgaactctgagtgtctaaggcattaa

SEQ ID NO: 151689 - DNA, 189 bp, Enterobacter cloacae
atggcgactcgcagactgtcagttgaaatcaagagcaggtggtgggtgccggtctacctcaggacgctgaaaatgttctgcgtgatgatgtgttgcgagcctaactaccaaaaggtgggtaacttcctcgttaagcatggcattagccagaagttgaaggtggagccggtaaaatacaaaacggagtaa

SEQ ID NO: 151690 - DNA, 183 bp, Enterobacter cloacae
atggcgaccaatgctgaaaagatgaagaactacggcatgacctctcaacttatcgagcaggccgccaaagaaatgggcgatgcctacaccaatcgccagaaaatcgagcattcaagccctgatggcagcatgactccgcagccgaccatcatccagttgttacccgttgagccgaaagcatga

SEQ ID NO: 151691 - DNA, 540 bp, Enterobacter cloacae
atgcgccatgatgataaaatcatttctacagggcgagagaatagggatctcccggcagtaatgaatgcgttaaaaaatagcgacgttacgatagatatttataccagcgatttgtcattacaggatagttatgttaatgcaacaggaaaggttgatgtaaataaaggaagatgggaatataaagaattacttgaaaaagtaagtgcttcaaaatgtatgataattccgcttaaactttctaaggtaaattattgtgtcggattatcttcgttgattgaagcaatatctctgggagttccagttatagcaacctataatccatactggtacgtcgatatcgagaaagaaaattgcggtatttatattagaaacaattcagagagtgagtggttgcgagctcttgaacagttgaataataatccggcgttggtagagcaaatgtctaaaaatgccttgaaggtatttaaagcgaaatgtgattttgcccgtacggaagacatactcgcgttacatgtagataaattactaagaaaaatgtaa

SEQ ID NO: 151692 - DNA, 1173 bp, Enterobacter cloacae
gtgaagggtatgcggaagatcaagaggggtaaaagcttcgcaggtgttgttcaatatgcattgaagccgggagcacatcataaaagcgatccagtcgtaatcgggggcaatatgcttggagattcagcccttgaactgattgctgaatttgatagcagcaaacaacttcgccctgatgttcagaaagccgtttggcacaactcgcttcgattacccgatggtgaatcactaacggctgaacagtggtccagcatcgcagatgactatatggaaagaatgggattcagagatacccatctccgttgctatgtcttacatgacgacgaaggccagcacatacacattatcgccagcagaatcgacctcaatggggggaagctttaccttggtaggaatgagaatctcataagtacccgcataatcggtgaactcgaaatcgctcacggtctgacattgaccaagacagcccattccattacaccgaagcggaaaagaatctctcgcaacgaacagatgctatcagaacgaactggtgttccctgccccaagaaatcccttcaacagatcattgataaaagtttggcagatacgcctgaccttctaaccttcacaaaacgactcgaagattcagaagtcggctggacggcgaatgtcgtttctaccgggaaaatgaacgggttctctttttcctaccgcgatatagctttcaaagcttcgcaattgggcaagagctacagttgggcaaatcttagtaacaggctcaactacaacccagaccatctagaagctctgcgaaccggcataccaccagaagacctccctgctcctgctcctgctcctgctcctgctcctgctcctgctcctgctcctgctcctgctcctgcaacaattttggaaaccagggagcaaaaggaaagtatcagtgaaaaaattgctgaacttgaactgcgactcagaaaagacagacgaaacgagatcgttgagaagattctccaaaagaatgaggttaaccagcaaaagcatctcaggcttatcggctggcttccatttcttagaaggcttgcagagcttctccgaagctatggaaagagcattcttcataagacccctacaaccttctcagaagtctattcaacacatcatctgaaatcttcaagaaaaattcgtttatag

SEQ ID NO: 151693 - DNA, 429 bp, Enterobacter cloacae
atggacaaaaaaatcatcaatccagagtttactctggaagagcaacttatcattatcgtcgataggtatatctcaaaaagataccagccgaacgataaaagtttttcataccagctttacttaatttttgtgggataccatttgaaatatttctatccaagaaatgtatatatacagtccagccgaaacatagataatattatgacgatgttcagttctgtatacaaatgtctgacaagtaatcttttgcagaagttaaacaataaagaggcagttcttagagagctaaactcgcttgttaattatatagataacaatcaagaaaaagcagaagaaatttatgctgttgtaagaacacagtatgaagtgaaggttatcgagaaagagttaacccatgaggttgttagagtaagaaatgttagattataa

SEQ ID NO: 151694 - DNA, 339 bp, Enterobacter cloacae
atgagagccggggggctgagaagccgcgtcactattcgggtattcactacccacagggagccgtccggtcaggttgttcaggtctgggaagacggggaaaccatatgggctgaggttaaggggatcagtggccgagagttaatggcgtcaggtgccgaggttgccgaagcgacgatccgcgtttgggtgcgtttccgccgtgatattaccgcagccaaccgtctgaaagtgcttactggcccgtttgctggcagcactctcaatattatcgggcctcccataccggactcaggtatgacgcgccttgagattctctgcaaacaggggaccgagaaatga

SEQ ID NO: 151695 - DNA, 339 bp, Enterobacter cloacae
atgagagccgggggactgagaaaccgggtaactatccgggtattcactactcacagagatccatctggtcaggttattcagatctgggaagacggggaaaccatctgggctgaggttaaggggatcagcggtcgtgaactggtagcggctggtgccgaggttgctgaagcaacgatccgtgtctgggtgcgtttccgtcgagatattactgctgccaaccgtctgaaggtgctgactggcccgtttgccggggcgacgctcaacattatcgggccgcccataccggactcaggtatgacgcgccttgagattctctgcaaacaggggaccgagaaatga

SEQ ID NO: 151696 - DNA, 123 bp, Enterobacter cloacae; identical to SEQ ID NO: 80537

SEQ ID NO: 151697 - DNA, 339 bp, Enterobacter cloacae; identical to SEQ ID NO: 144243

SEQ ID NO: 151698 - DNA, 1080 bp, Enterobacter cloacae
atgttcaacgcgttacgaaaaaacttcacttttaaaggcccaatggcatttgccatggcgagcttgttgttatcccttagccagacaggctgggcaggggagtgccgaatgaacgatgggcatggcggcaccactaccctgatcaacgccgagtattcgggcggccccatccgacttccaccaccggggaatgacatcggcgtctattttaatgttaacctcacgccaggcattcaggcccagtgtggtccaggaaacgatggctataacctcatgtctcaaacagacccgtccgtgttcgtggggagccattatttcgcgggcatgtttgaaacgaatattcccggcattcattattcggtgagggttcacactgccgaaagcgatggtggcaagggaaactatttcggaacgaatactaccggctgggccatgatttctgcatccgaaaatgctgacccctgggataacaaatggattaatacctcagtttatatttatgttgacgagggctatcaaggtaacccgaataaagagaccttcatcaaacccaaaccagggactttgggaaaaatgtcgattggcgatccaaatgacagtaacaaccagccatggacatttatggtcaatgagagctcattccagatccctattgttcttccaacctgcaacattgccatgctttcggatgggactaacgatgttgacctgggagaatattatgtttcagacatcaaaaacaatcggatcaaggatgtcccgttttccattcgtcttgataactgcaccagcgtggcaaacgtcacaaccaagctgacaacgacaaaattaaccggaactaacaatgaccttcttggtaacacattgtcgtccggagctgagggggctggcgtaagaataatgtataacgggacgtcccagcttatgccgaataatcctaactcaacctatgtcgtaaccgactactccatgccggtttcaaagcaaattgagtatgttgcccagctggtagccaatggcagcacggtgaagccgggttcgtttaaagccactggcgtgttcaccctttcttacgattga

SEQ ID NO: 151699 - DNA, 603 bp, Enterobacter cloacae
atgcaacaatcaccgtttacattataccagcccggtcttgtgttgcttatggctctggctggcagcatcctgcctggcgtaagccaggcaggctctgggctcgacgtcaatcttacggccaatattgttaatagcacctgtaagttaagcgttgagaatggcggagagatctatctccccaacgtgatgcggaattggttttataacgctgatggtagcgatcgctatacggctaccgatgatgcgggcggtacgccttttaagatccatgttgatgattgctacggagacagcagcaccgctaaaaagctgaattttagcttctcgccacaatcaggattctggccggggcaaaaccaggtatttaaaagtgaagagactgctgccggggctgccaaaaatgttggcgtcgtccttttctctgagaaatataaaacgaatgtgttaaacaacgacggtacgtcaaaagtcgtttatgacgtaagcggccagggtactgcatttttaacggattatcagttctatgcccgctatcagaacactggcgtagtggctggcggtatcgtcaccagtaaagtacgggttgacgtcacttacgaataa

SEQ ID NO: 151700 - DNA, 555 bp, Enterobacter cloacae
atggttgttcactcaggtggcgttgtatttacgccaggcagtatcggcgaaacggattcactggcgctggtgaaagcgagtggcgcgacaggggctcgcctgggttatggccagagccgtattgataactccgggtacggcattatgccgtatatgtctgcctacagagaaaaccgggtttcaattgatatcagcaccctcgaagcggatgtcgaaattaaaaacacaagcgcagttgctgtgccgcgtaatggctccgttgtattagtgaattttgaaacggacgaaggccgttcgcttgttctggaattacaacgttctgataagggctttattccgctgggcgcagatgtgctgaacgagaagaatgaaccaattggaacagtaggacaagctgggcaagcgtatgtacgcggtgtggaagataaaggtgtcctgcgggtggtatggggcagcgatagtaccagttcttgtaccgtacattatcagatcccagcgaatgcgcaaaaagcgggtctcacaacccttctgagtaatcagcagtgccaaatgtaa

SEQ ID NO: 151701 - DNA, 723 bp, Enterobacter cloacae
atgtggcgtaactcagtgcttaagatcgctgacgatatggccccgttatcgtgtgcagttatacccgctcacccatgggtttacggtctggggcaatcaacagattcaggtggttatcttagcccggctaatgcgctgggctacctcgccggaaaattggcttcaagtgccaaaagcggcgatgtgatagtcatgatgattgctgaaaatacccatgatgtgtttatgaaagccctggggaatctggcaacggttttccctgcgccggtctttactcaggttagccgtatggccgccgcagccgctgaactgagcacggtaaaaatgcaactaccgtcaaaggtcacaagcctgccggtcgccgcgccattatccgtgccaactaaccgactcgctattaatgcgcagcgggttgccgccgcgcagcttgctgccgcaatgccgaccagcatcacgggattacaaagtcagatcgcgggttttatccgggagcgggccagcctgctgaaatcagttagccagtcactgaatgaattaaagggggccagcgctgagatcttttctttctcttataccggaacccatcgcggtgccgctgtggagttacttaaaaatattccccgaacaacggctgtgcatactgccgcaatgatgttcatcggtgattcattaacagatttagggaaaatgatttatgagccagaccgcgctgctggcgcttga

SEQ ID NO: 151702 - DNA, 564 bp, Enterobacter cloacae
atgaagaccaccggaatttttaggctttacgaaccagttgaagaaaatttaataaacgatgcaaagaccattaaagaaaatactgggatggatgtaattttcttacgcgattccgaaggtgagctgtggcatgaagtacagtatcaatttaacagtaaaacaatgaaggtcgtttttgatgaacgcggcgtcatcatcatgttttcaaaagacgcaacactgcttaaccctgttgattgtgctgttgcagaagtgagcgtaaaaaacgtccctgctgaactggatgaatcccaggaatgggtgtttattgatgggaagattaaaaagcgcgtttattctgaagaagaatgccgagataaaacagagttagaaaggaaagatatcattgcgcaggcgcttgataaaatcgccgtgattcaactgaaattacaggcagggcgtaaactaactgacagcgaatcacaaactttaaatcttatactggattatatcgacgaggtggaacagttcactgtatcggaatatccagttgcatggccggagatccctgcgaatgtggcgtaa

SEQ ID NO: 151703 - DNA, 594 bp, Enterobacter cloacae
atgactgacttttcccgaaaactggccggtctgaaattaccgtcatggatggaccggggcgatcctgcaaggcttctgcgggcatgtgtgaaattctggtcgcaggtctatgactggatcacctggccgttaaaacagtttgatccgctgacctgcgcggaaccactgttaaaccttatcgcctgggagcgcgatattacccgtttcaggggagagcctgttggcctgtatcgcaagcgcgtgagttacgcatttatcaacgcccagcaggccggagagattgccgggtttatcgctatttttgagcgactggggatcgggtatgtcgagcttcaggagcgtcaggaggggatggactgggacatcatcaccgtcagggttacagatagccagatatcagataacagcgacctgctgttagaaattattcgtaagtatggccggacgtgtcgccggtatcgctttgaggtgatcaccaccctgccgatgcatatcaatattggctggtttcagggtgactatgtttgctggcccgccacgctgggcgacgtaaccaacgaatcaagcgcaacatatagcgccagtttgctgtag

SEQ ID NO: 151704 - DNA, 1185 bp, Enterobacter cloacae
atgactgagaaaccaaacgtcgattttgagcaggtacttaatgaaagcggtatgccctcaactgaggccgaaatcacggcggttttcaagaaaaccgttgaggcggaagggtttgtcaccaacacgtccagaatgtcaccgttctggcgcctgatttcgaaaattgtcaccacgccggtgatctggctgcgcgatgcgttaatcaacgttgttttgcgcaatatgtttgttgcaacggctaccggttcaatgctgcgcctgcttgcgtgggccgtgaatatcgaagcgaaaccggccagcccagccgcaggtgtgctgcgattttataagcagaacgcagaagatgaagtggttatcccagccggaacggtagttcagacggagcgtatcaacggcatggtgtattccctggccgttaccgaggacactacgttgccggaaggtgttgaaagtggtctggtgtccgtggcggcaaccggtagcggcagcggttataaccttgcgccggggtattacaggatcctccccgttgctgtcgccggaattgccagcgcagtgaatgaggaagactggctggtgacgccgggggccaatgaggaaacagatgatgaactacgtgaccgcgtgcgcaatcagttcaacctggtcggcagttatcacactgacgctatttaccgcagcatgattgcgggtgtggttggtctgagcgtggatcgcattttctttttgcatgacgccccccgtgggccaggtacagcaaacgcctatttattgctggatagcggcgaagcctcgcaaccctttattgatgcggttaatgattatgtgaacagccagggtcaccacggacatggcgacgatatgcagtgttttgccatgccggaaaccagccacacgctggcggtgaccgtgtatgtggaaagcattgaaaacatggaaccggaagccctgagcgcactaaagagcaacatcacgaaccttattcgctgcgcgtttcgtgagaacgccgactatgacgtaaaaaaaacgtggccttatgcgcgtttctctttttcgaacctgggccgtgagattcacaagatgtttccggttgtcgattctctgagcttctcgctgtccgacattgtcagtgagctgtcagtgccacgccttgcaggattaaccgtggagatcgtgaatgactga

SEQ ID NO: 151705 - DNA, 2247 bp, Enterobacter cloacae
atgagccacctggattttacgctgagcctgattgacaagctgacgcggcccttaaaaacggcccagtcttcgctgactggctttgccgaaaaatcgcaggcgtcttttacaaaaatcggtattggtgcagcggcgatctggggtgttgcccagtccatcgcgggcgtggtcggccccgcatatgaaatgaatgctgcgctttcggaagtgggcgccaaaggtgtggcagaagacacgctgaaaagactgtccagcgaagccctgaaattcagtgttcgttacggcaaaagcgcggttgatgtggtgaattccagctatgcaatgaaaggcgctatggcgggcctttctgatgccgatttgccacgagtgacagtggcggccaacacactggcggcaggggtaaaagccacgggcgaggaagctggcgaatacattggcgctatggctacacgtttcaatagtgagctatcgaagctgggtaacgttcgctttgctgaggaactatcaggtaaaaccgcctggatggtgcaaaacttcggcgtgaaaatgcagaccatgcaggagcttatagagggcaccaaaaacgccggtgctgacttcggcgtcagcatggatgaacagttcgcggtgctgggatcgttatcgcgcaccctgggtactgaggccagcggtatttacgagcagtttttacgaagcgcgccggccgccgctgaaaagctgggtatgagctttgttgatgtcaccggaaaaatgctgccaatgggcgacatcctgcaaaagctacaggacaaatacggccagagcattgaaggtaacgtcaaagcccagcaggcgctggacgccgctttcggtggtggtgctgatgtcatcaaaaaattgtacggccagcaggcaattttaaaccgcagcatcacggaactggggcgcaatgacggtatgaagcgcgcccaggaaatggctgaacgtatggcgaaaccgtgggaacgaatcgtcgcaactttctatgccatgcgcgtggccctgggcaatacgctgatccctattcttacgccgatgatgaaccgtgttgccgacgtgggggccaagtttgcccgctggctggaaatgttccccaacattgcgcgctggctgggttatatcaccctgggcgtgctgtccttcgggctggccggtgcggccacaaatatcgtgatgggcgtttttggattcactatggtgggtctgagtgctatcgctaaagtgctgggcggcgcatggaaagcccttttatggacgctcaatttgttgcgtccttcgctactgacaacccgcattggcctggccgcgctgtggatccagtcgaagctgttagcgctgtggaccggtgtttgccgcatcgccctggcggcctggaatgttgtgttgaaagccggagccgttgctatgcgtgtgtatggcgtggcaaccatgtttgccggtgcggccatgcaactgctgaccagtccgatcaccctgattattgccgcgctggccctgctggctgtcggggtgtggtacgtcgtcacccactgggaacaactgaaagcggcggtcatgaataccgaagcctttgcctgggtaatgaatgttgccactcaggtaggacaggtctttgccagcgtatggcaatccatcactgacggctgggccgtggtggttgcgttcttcgctggtctttcaccgctggcctcttttgaaggattcgcggacaccatcggtggcatattcagaaagctttttgacaccctgaaaaatacctttgcatctacatataactggattgctgaaaagctaaacaaaatccctggggtaaatatcgatctcaaaaccgcaccgccgccagcgttagcgcctgacggggtgaaattgcctgccggtactgaaagtgcgcagcctgtcgttatgccagcagccggggcggttcctgccggtgttgacgcgccggtcgtcacgcctgcggtggagatggttccttctggggcgacagttcaggaacgtactgtcattcctgaacgtgcatcaccgccgccagcgctaaatgcttcgtctctgctgacaggtaacaatatcaacgcggatatcccgcgcggtggcctgattagccaggttaaatccgacacaaaaaccgtcgtggatagtcgtaaaacatggggcgatacctacatcaccgccccgaacggaatcaccccggcccagttggccgaatggcaggagcttaacgccggatga

SEQ ID NO: 151706 - DNA, 384 bp, Enterobacter cloacae
atgcgtaacttgctggggttggtgctgatcctgactgctgcaatgtcagcaggctggcaggcgcacgactggcacaacgcaaagctggaactggctgccagtaaggcgacagaagaaacgcgccagattgtcgtggaggttacgcggcagtccggtgaagcgctggaaaagaaactcgcggagttaaaagccaatgagatccacaccgaacgtgttatccgcaccgaaactattaagccggtttttaacaatgtatgtgcttctgatgattacgtccggctgttcaacgaactggcggccagcaccgagcgaaccctatcaggaaaaccagttagccctttgcccggtagacctgccgaggctggcaggaccgaccggcaatga

SEQ ID NO: 151707 - DNA, 1149 bp, Enterobacter cloacae
atgacctggccgacagtcacagttagtcagaaaaaccgctataacggcacgacggacgacattgaacgcgttgtcctgtttgtgggttacggcgacaccaacaccggcaaaactcagccgctgaataccggcaccgatctggataaggcactcggcgacagcgacagcctgttaaaacggattgtggccgcagccgccagcaacgccggtcagaactggtttgcatacgttcatgtgttaccggaaccggatgtcgatgccgaagattatgaaccggacgcggactggattaccgccgttacgcaggcccagagtgtggcatcaacggaaggtgttgtcctggcattcgatacaacctcaaaagccacgatcaaccgcgcaacagaactgcgctcaacgctacaggcaaaattcgggcgtttcgtctggtttgcaatctctgtgggcggtcccgtcaaggatgaggcctgggcagattatgtaacccgtctggcgacaattcaggatggtattgcctcgcctggtgtgcagcttacgccacgtctgtgggggaatgaaccgggtgttctggcgggtcgtctgtgtaaccgttctgtaactgtggccgacagtccggcccgcgtggcaacgggcgcagtgacggcgctgggcaatgatgaactgccgaaagatggaactggcgcagagttagatctggcagtgctgcaatcactccaggcgaaccgttacagcgtgccgatgtggtaccacgattatgacggcatttactggtcagatggtcgtacgctggacgttgagggcggcgattaccaggtaatcgaaaatgttcgcgtagtcgataaagcctcgcgtcgcgtccgtttgcgtgcaatccccaaaattgccgatcgctcacttaacagcacgccgggcagcattgcggcgcatcaaacttattttggcaagccactgcgtgaaatgtcgattgcgacgcagatcaatggggtggaattccccggtgaagtgaagccaccccaggacggtgacatcaccattacctggaccagcaatgttgcggtgcaaatttatattgtggttcgaccgtatgagagcgcgaaagaaatcggcgtcagcatcgaacttgatacatcactggagagccagcaatga

SEQ ID NO: 151708 - DNA, 219 bp, Enterobacter cloacae
atgaaatcgaattttatcagttactttgagggttacgacgcaaacggccgcctggtttttaatggcaatggttcatcgtcggttgaatacgacgatgcggtcgggattaatccaactgaattgctggacgggtgctgcgagcatcttttgaaggttgctcaagacaggaaccccgatgttgtaagggttgctatcttaaatttaatgaaggtatggtga

SEQ ID NO: 151709 - DNA, 468 bp, Enterobacter cloacae
atgacacaattacgagaaattgatttaacagcgggatctcaacatttacgccagttcccgttagataatgcccgcattgcccgcacgtgcaaaatgaccaccgcacaggctgaaagaatccgggatatgaataccgaagaactgcaaaaacagattttcgttacgccgatcgaatttgcttatctgactggccgcactttaaagagcgttcgcaacctgatggaccgcgcacaattgccagttcatcgcgaagggatgccaggttcgaaacgtcctaaacgtttcatcatgctgcaagagtattgggccgccgttgcgcattgccgcgccctcatcaccccagaagaaaggcacttcattgatcggttgatgcgcgacaagaaaacctatcgccagataactgggaaaacgcttcaaacacctaagcgcacccgccgcaattctttttcacttcaacgcgcctgctga

SEQ ID NO: 151710 - DNA, 756 bp, Enterobacter cloacae
atgagaacttttatagtcaatctcaaacactcgctcgaacgtcgtgcgaaaatggaatgtcaattgtccgaattgaacattgcatacgagtttattgaagcagtagatggtcgaaaaatgactgaaactgaactaagaaatgtcacacgggagacaaattatgcttttctcccgggagaagtgggttgtgcattaagccatcaaaaaatatacaaaagaataatagatgaaaatatcgacgccgctcttatccttgaggatgatgttgtactaaacagcgatctgcgtgagatacttaatagcgttacgctcagcaaaacaaaacctgagattcttcttctgagtcgggtcaataaatattacaaaaaaccgttcaaacacattttcggctcatataatatacataagactcagcatgccacgactactcatgcatacattatcaatcaaaaagctgctagaagccttctggataacctttatcctgtatggatggttgccgataaatggagtttattcgaagacctatcactggctaaaattcactctatagtaccttatccagtacgcctttccgaagaagccaatgtttcaacaattaatgaatcaaaaggtgatgccatgctggatgccaaaaagaaaaaaatttggaatttacttatgcgggaaaggccgttagctgcaaagcttcgccaccgttatcgaagagccataactcctttattgaatcaaataatcgatcagggcaaagggtaa

SEQ ID NO: 151711 - DNA, 1092 bp, Enterobacter cloacae
atgccggacttgattactgatacattgaaagtagttacttctttttttgtggcattagtcctcaataagtttttatctatatttaggaaaagacaactttacttatcctgctggaactccttaagtaaaacctcaatatctgacaatgcaatagtaataaatgcatcagtatttaataaaggtaaggataaagaaaaaaatgtagaaataaaagtcccaaacggtatgtcttgtactgtaattgcaagtgatcatgatgcaactaccgaaggttcttttgtaaagatagatagaatattagcaaataaaaaaatatccatggtgctcttgattgaaggaacaagaattcttgataaaagtaccatgccttccataagatcagaagatactgacgggaaaacatacctttcaaaagactcagtgccaccgagtgcaggttcttttatcttaggtggtgctatttttgctgcatttttcagttatatggtcatcagtatccaaacagaagacaaccctctcgcgggccccttgaaagcatataactacatgatttataacaatatgtacaattctgggctttcgattaatcctataggtaatggactgataactgaaaattacaatctaagagcgaatgaataccctattgaaataatagatgccaagatagaaaaaaatcaaataatgttcaaatttagaataattaacaaaacatcagaagtactgaaggtttcaggcggatggagaatatataaaaactttcaatatatttccgaacatgttgatacatttgattataaagatgaaaagaaaagagatgatgaagaaataagagtgtataaaaaatacaatgttgaatttgttaatgataatggatatcttatggaaaaaccgaaaaaaagggttgaggttcctgcaaattcagttggctatattataataagcagaaaatactctccaagcattacttataatgacctaaacatcgagtttaactttagtggtggctcaggtgaaatataccaagaagcagatatgctttttacagctaagaattctaatataagcagtgctatattagacaaaaaataa

SEQ ID NO: 151712 - DNA, 420 bp, Enterobacter cloacae
atgagtagaaataacgaaacaagcggcgttgaactggttgtcgtgggcgtatttgctttctgtctggcagttgttgcctggctaatgaaaactttcgatgttgaatggcaaacagcactggaaactgcgcctggcctgatagtctggttgcttgttgtcggtgcggggatctttttcgggatcaaaatggaaacaggtcttgttcgctggggtgccccactggcgatcgcccttctgattccggtattcaaaccaattcttaaggaagctgccggagtacgtgaaatgggtgggttggttttcgatgatatggtttcgtggtacggaactggctggggaatgtctctgatgttttttgggattcttatcgtcggatacggtctactttattggtggcaccgaagaaattcatattattga

SEQ ID NO: 151713 - DNA, 447 bp, Enterobacter cloacae; identical to SEQ ID NO: 13744

SEQ ID NO: 151714 - DNA, 1053 bp, Enterobacter cloacae
atgatcgactggtttaccggaatcctgccttgcacacaccgaccgttaccggctggtagtgtcgtcagcgtcgatgctgacggtgcagtggagtgggaaacagtaaaacggttgaccgttcgcggttcgcatgagtccacaatgaatgtaaggtctgttggatctgatggtgaaggtcgggcaacacatctctacattgacggtaatccatcaaagtttttgcaaggtcactctgttatcggttccgacgatttgcaagggttggtgttaacagcttacgccagaatattggcattactgcatattcctcatgatctaccatcctatcggcaggtcatggaagggcaatttaagatctcgcgcatcgatatcaattacatgtattcattgtcaacattagaaaatgtccgcgcatggttatatgccgcagaatttaaagctaaaactcgccacggtcgcgcctgtggtaaaggtggcactgtttacttagggaaaaactcccgtcgttggagcctgaaattttattcaaaatatgatgagcatacatctggcaaaaaagggcaccagatggcagacgaattcgttaaagctggtttactggactggtcaaaagataaattacgcattgaattaacattaagaacaactgaattaattgatttgaatctcacgcttggtaatagctggaatattgagacacccaataaattattctctgactatgtagggagaatagaaatgaatcaaaatactatattaactgatgaaaaaataattaatctcccaagaaaaatacagtctacatatttattgtggaagcagggcgcgaacatgaaagagatgttaccgaaacctacattctaccgacaccgtaaagaattactttctttcggaatagatattaacttttattgtgagtcaccggattctaataacgttgttccgttggttcgtactcttgaagccaaaccagccaaaattccatcatgggtttatgagaaaggtttaattttcgattataaccgtatttcacatgccagtaactggcattaa

SEQ ID NO: 151715 - DNA, 318 bp, Enterobacter cloacae; identical to SEQ ID NO: 10871

SEQ ID NO: 151716 - DNA, 252 bp, Enterobacter cloacae; identical to SEQ ID NO: 16616

SEQ ID NO: 151717 - DNA, 234 bp, Enterobacter cloacae; identical to SEQ ID NO: 10869

SEQ ID NO: 151718 - DNA, 1713 bp, Enterobacter cloacae
atggaaattgggttcccttttatgggggatcgtctcagcttatgtcgttattcttgggctaagaggctgacggtttattcctttattttttcctttctctgggtttcctttccccgatattcatattcatttgtaccagcaattgcagcagtggctgcgcgggctgttattcctaaagtcgttggccgggtgcttgttcgtcgctttgctgccaatgatgcgatttatacggcatcacagcttacagcaacccgtgtttttgttggccgcgctgcggctaatgctgccgaatacttgcctgctgcctcatcatacaaaatgagcggtgttgcaacgtgggcgggtattgctgctgctgtatcatcttttgttccgtcttctttgagttcatctgacggctcggtaatggtaatgactaacggtaaaaagatttccgataatttatatgaagtaacgtacagtggtcaaagtggtgaaagtaagacgataaccgttaattttgaaccacaggaattaagtccggtaatccttcatgttagtcgtaataatgtggatgcgggttctccagttgtaggtgttgaaacaggatattccacgccagataatgcactttattattatcaggattcgaaagagctaatttattactatggtgataatccaactgaaattgccagaaattatcttaatgactataactcgcgtacttatactgaaacactaacgaattttgaacgcactgtgacgaataaagttgtcaacagtaatggagatgtatcctttactgaacagaattataagtttacttatccttcctcattttatgaaatacctgagattacacacttgtatagcaacccggccgcatcttcatttcccgcaggtattcccatgtatgaaaatgtagcagggcttcctatgtattacagcgttgcttatttaacagcaggaaagcaatatcagtatcacaacacgccttgtaaaacgactaatcagtcaaatggtggatattcgacgatttgcgccgttcctgaaaaagaggattacaccgcaaaagatattgatgaaaagagtgagcttactatctggaccaataccaaatataaagccatgacggaagtactggaggcaggaaatattgagtccatgattgattatctggagtatcttgatagtgttagtgtatcgccagcacttcttgccgacatgattaacgagctgtggtctgaagctgccgttaatgccgattataacggcttaccgtttaaagaggtttcaccggctgaagtaacttctgcgatgtcggaacttaggctatctccaacgttattagatatgctttcacctgtatctgacagtgcaggggctgacgtcaatattgatattaccattaataacaactcaggatctgacactggaaataatggcaatatagatttgggagaagatcccggtgtaaaagagcctgagcttgaagaaacgccaacggcaagagatattttaacgccaattattaacttgttgccttttacaaacgaatttaacatcggctctcattcagcatcctgccccgttgttgaattcagcgtgtttaatcaccagtacagaattgactcccattgtccgttaattgagcagaacagaagcgccgtagaaaccatatttctgattatatggggatttgttgcgctccgtattattctgagtgcctaa

SEQ ID NO: 151719 - DNA, 288 bp, Enterobacter cloacae; identical to SEQ ID NO: 10867

SEQ ID NO: 151720 - DNA, 1026 bp, Enterobacter cloacae
atggctatttctgcatatattggcatacccggctcaggaaaaagttatgaagccgtttgcaatgtcattattccggcatttaccagcggccggagagttgtgacgaacatttatggtttacaaaaagataaaatcaccgaacgttatcctgatgcaacgggagaaattattgttgtggataatgatgatgtgcttaaagcagatttctttccttttaaaggtggggatgggagcttttgccagtttggtgatttaattgttattgatgaagcatggcgaatcttcggtagcgataaggatatgacggctgagaagaaatcatttattgctgaacatcgtcattttacgcaccctgaaacgggtattagctgtgatttggttattgtaaatcagtcactttctaatattgctcgctttctgaaagacaaaatagaaacaacttaccggatgcgcaagctgaaagcgttgggcctgaataatcattactgcattgacgtatattcaggccacaaaatctataaaagcaacctcgtcaccagttatcgcaataaatataaccctgatatttttgaactttacaaaagttatgaaggaaataacggtaatgaaaagcagacagataaacgccagagcatctggaattctggcaaagtcaggttctttcttgtgctttttccattgatgtttatcgggtcaggctggctgatttactcatttttcagcacgtttggccgaagcgatccctcgccagatttgactacaacagatgtacgtgatgcggccatgtttcgttcttccgctgctactccagcaccagatactccctcagaaccagctgaaccgccactttcaaccgagtggcgtatatcagggagaatgaccagtgaaggcagggcgtttgtgattcttgttaacggtgccggtgttttgcgtgccgttcctgcatccagttttaattacaaagggatgttgatgagcggaattattgatggtgagcgtgtgacgctttatacggggaaaaaatag

SEQ ID NO: 151721 - DNA, 1245 bp, Enterobacter cloacae
gtgaaaaagattttactcgcattaacgctactattttcttcatgtgctttcgcagggtcagagcttgaattaaataaagtcaagctaccggaggctatttctcttatttacagtgaggtgcttaaagtcccgtatatgctagatccacagcttgttaatgatgaacgaatgattacattcaggttaacacctgatattgatgaacgggaatttgtaacccgttatcttggcaatatgaacattcgaatatggacgaaaaagggtgttgattttatcgcgccctatacgccgaaagagccggttaagccacgttatacatggacttatacgcctcagtaccgttctgttgcctacctgtctgatattcttggcggctacgtttcaggctccttcaataacagtggagccgtgatttctgacgattcgctaaaaggttcatcaggggcaagcaactacatcaatcgaaccggtgatattctggtttattatggtacgaaagaggatatcgccatcctgaaaacactggtcacttcgctggatacgatgagtgatgaagtggttgtttctggttatgtttttgaggttcagacctcgcagtctgacggctccggcattcttttagcggctaaaattctgtctgataaattcaatatttcagttggtgctgccggactggataattttatcaatattcgaaccggctccattgatgccattttcaatctgctgaaaaccgacagtcgttttactgttgtcagtgcgccacgactgcgggtaaaaaataatgcctcagcgtctttttcagtcggctctgatgtgccagtactgggcagtgttacggtgaataacaatacgacaacgcaatccgttgaatatcgttccagcggtgttttgtttaacgtgacgccatcaatcaaaagtcggacaatggatctcaagattcagcagcagctttccaactttgtgaccactgaaaccggcgtcaataactcgccaacccttatcaagcgtgatgtaacaaccgaagtcagccttgcagatggtgatattattttacttggtggccttgctgaacagaaagacagtaaggccagttccggctggagcttcttcggttcccgtaccagtgaaagcaacaagactgatattatggtgatgcttcaggtcagaaaggttgaccggagcagggcgacgccccgcagcgccgcgaggagcggtgaactgttccgggacaacctgaactga

SEQ ID NO: 151722 - DNA, 249 bp, Enterobacter cloacae; identical to SEQ ID NO: 11349

SEQ ID NO: 151723 - DNA, 201 bp, Enterobacter cloacae
atgcgatgggcttatctgacgagggataggcttcataatatcttatttaacataatatacattatgcgcaccaatggtaaggatggcagaatctggcgggaatcgttgacactggccgtcaactggctactatcgacagtgattcaaaatcatccgtttctccaaacgaatcagaatcaaatgtctgtcagcagtaagtga

SEQ ID NO: 151724 - DNA, 714 bp, Enterobacter cloacae
atgaaggcttctgattatttaaggataaaatttcagagtgaccgccatttggctctcactatgcagaacgcaataggtggtattttacgatcggcaaaaggggttgcatccgatatatattctggcattgagcgagtgagttggtattcatcctgtttcattccccagtataatgatgtctgtcaggagttaaaagctgaagaaatcagaacactctactcaatagagtcgattttcaaacacgccgacgtcattgcacacatattttatctgtatctgaaaacgatatgtgatgacatagaggatggtaatgcagaaggttcagcccgtaaacttataaaaagaattgcagaattcagctctcacatgaacgtagcgggagcaacacgctatgcgtttgctactgcggcctcagtcgcgctttctcattccagccttatttcggaaattgttgttgaacgtctgtcggcaaaattaccacaaggggtattcgctctccagttctatggcattcaacagaaatgtgctctcgctgcccgccatttgaaagctattaaccccgattattactggattctgtaccaggcaaaactggagatgctctattacttttgtgagccaatcctctcaaagttatttaaaaaaatgaaatcaaatgctttttcaaacctggatgatttagccgattttctacaaagggatttaaatgtttaa

SEQ ID NO: 151725 - DNA, 480 bp, Enterobacter cloacae
atgtccaatccagcttatatgtggttaacggatgaaaatggttcaccgatgattggctcatctttggtctccgggcgtatcggtgccattgagctaaaatcactgactcataatgtcaatatcccagccgatagcaatacaggtcgcctaacgggcacacgtattcacgcaccgattatgtttcagaaagaattcgatcgggttaccccccttttatacaaggctttaactactggagccacactcaaatcagcaatgataaaaatgtacataattaacgaagctggaattgaaagtgaatactttaacatattcctggagaatgttaaaatcacatccataacatctgatttatatcctgacgcaggttctggcactcacctggaaacaatccttctacgttatgaaagtattacctggaagcactgtgaaggtaatatcgtttacaaagatagctggaaccacagagtcacagcataa

SEQ ID NO: 151726 - DNA, 126 bp, Enterobacter cloacae
atggcaacagtaacccgctggcgggcgctgacgcttattgcctgtggtctgctcgcaggctgcgctctgacacagactgtcacggacggtacggtcagcatcacgaaatccatcttctacaagtaa

SEQ ID NO: 151727 - DNA, 162 bp, Enterobacter cloacae
atgtgtctgacaggcatctttccattcatagaaccgtttcgctacactgaaagtgctacaatcttcaagattcagttaccaaaagaaaatatgtgtaaccaaatatgtatttttgggaactttgtgaagcacctcaaatttcagtgccgcctggcgaattaa

SEQ ID NO: 151728 - DNA, 897 bp, Enterobacter cloacae
atgcagttatatgccttacgtgtgttaatgaaaccgcgagatccagaccttttttcgaaaggatttgttcagaaagacattgctcattttgaaaatgctatggttgacgcagcaaacaaaattcatatgacttcatcaacaccttccgttcataagaaaactagttacacccttaaattgagcataaaacctactgatggtgttatggctggagtcatatcaaagcaacaaaagattaaggggcatgataaagattttcgtgagtacgatgtagacgactatccacctatcgtatggatttgggacagggaagagcaagtattactagttgaacgtaaaactgccgttttcagggatgcacaccaagttgctaaagcgttcgaagaccttaccaataacgaatatttggctcagttaggacttaggatattcatagagccctgccttgaaattgaagatttttggtcagagtatcagagactcccatttattgacaaagtcagctttacactgattactcctaacattttcggaagcagtaaagaagctttaactaatgatttacggaagctagaagaagataccaatgcaaatacagtaaccactacttttgaaaacaaagatggcaatttgaaactcaaaggatctcattgggctttagccctagttgactgggtcaaagatggtggcgggtcatggctaataaaagggcgtaagacacttaagtcaaaacctacgaccgtgtccagtaatcaaacagccaaaatagtgatgattgaaggtgagatatcagaaattgaacttaatggctactcagcaagcgatgttagagatatcatagccttacatcaaaaaaggtatacattcaaagatgaaaactccaatcgtctggattaa

SEQ ID NO: 151729 - DNA, 1572 bp, Enterobacter cloacae
  misc_feature (434)..(443): n is a, c, g, or t
  misc_feature (987)..(996): n is a, c, g, or t
atgttagagtttagggttattgaaagaggtgggtatattcctgcggtagaaaaaaataaggccttcctacgggcagatggctggaatgattattcatttgttacaatgttttatcttactgtctttgatgagcatggtgaaaaatgcgatatcgggaatgttaaaattggttttatcggtcaaaaagaagaagtaagtacttattcattaatagataaaaaattcagtcaactccctgaaatgtttttttccttaggtgaaagcattgactattatgttaatctcagcaagttaagcaatgattttaaaaataaccttcttaaaggtatgcaggatttggtagtacggccaaatcgattagtcgacattgaaaatgaaagtgtccttaacacctcattacttagaggggtcactctttcagaaattcatgggcnnnnnnnnnngtcagatttccacttttcatataacagaaaaggtgcttccggattcagtgatttaactataccttttgaagtggcgattgattcaaagcccagcacgaacattcatgcttttatcgggcggaatgggtgtggcaaaacaacaattttgaatgggatgattggtgcaatcactaatccagaaagtaatgaatattttttctctgaaaataatagatttattgagtcacgaatcccaaaaggatattttcgatcgcttatttcagtttcgtttagcgcatttgatccttttactcctcctaaagaacaaccagaccctgcaaaaggtacacaatatttttatattggacttaagaatgctgccagtaataatttaaaatcactagacgatcttcgtctggaattcgtttctgcatttattggttgcatgagagcagatagaaagagacaactttggcttgaagccataaaaaaactaagtagtgatgaaaacttttccaatatggaactcatcagtctcatttctaaatatgaagaattaaaacgnnnnnnnnnnttaaaacgtaatgaatcacagattcaagtagacaataagaaattcactaaattgctttatgataatattcagaactatctgcaacgaatgagctctgggcatgcaattgttttatttactatcacaagattagtagatgtcgttggtgaaaagtcattggttttattcgatgaaccagaggttcatttgcatccacctttgctctctgcttttttacgaacattaagcgacttactcgatgcacgcaatggtgtagcaataattgcaactcattccccagtagtattgcaagaggttccaaaatcctgcgtgtggaaagttctgcggtcaagagaagcaatgaatattatccgtccggatattgaaacttttggtgagaacttaggtgttttaactcgtgaggtgtttttacttgaagtgacaaattcaggataccaccatttattatcacagtccgttgactcagggctttcttatgaagctattctaaaaaattataatgaacagataggattagaaggacgaactgttttaaaagcgatgataatgaatagggatgaaggtaaagtacaatga

SEQ ID NO: 151730 - DNA, 891 bp, Enterobacter cloacae
atgaaaaaactacctctcccagtgagaacttatagcgaaatgcttaataagtgctcggaaggtatgaagcagataaatgttagaaataacttcattgctcacttccccacttttttgcataaagaacagcaatatagggcattaagctcaataggtcagttatttacctacgttaggacacaacctcttgcacctacaaccttggtagttggtaacctaacaaaggttaaattagaaaacctttatgaaaataatctccgagataaaaacaaacccgctagagaatattacgatgacatgctagtttcatcaggtgaaaaatgcccattttgtggtgatataggacagacaaaaaatatcgatcattttcttcctgttgcacattatcctgagttttcggtgatgcctattaatctagttccgtcgtgccgcgactgcaatatgggagagaaaggtcaagttttcgcagtggatgaggaacaccaagcgattcatccctatattgacaaggatattttctttcgtgagcaatggatatatgctaatttcgtttccggaaccccgggagctatcagtttttatgttgaatgcccggcgacctggcggcaggaagacaaaaacagagctattcatcatttcacgcttttaaatattgctaacagatatcgcttggaggcaggaaaacacttgagtgaagtgattactcaaagaaactctttcgcaagggttataagacaatttagtccaaccgctacctctcagcagctacggtcggcatttattgaagccaatctgaaacctattatagatttgaataatttccccaattattggaaaagagttatgtatcagtgcttggcaaactcagcagagtttttcagagggatctag

SEQ ID NO: 151731 - DNA, 1578 bp, Enterobacter cloacae
atgcctaacgaagatactattaatgttgatggtagttctggcggtaaagatagcggcattcattggggtggcggcggtaatggaggcggtaacggatctaattcatccggtgcaaacctctctagtacgcccgaagcgcagaaacctgctgcatacggtgtacccgctgtcattggcgtttatgatggtatgtggggttttaccttgtttaccaaaacgacgcttcaggaagccatgcaagctgcacttacgcgccttgagcaaggtgccgtcgctgcagctccgcttgccggccgtcttttaggagcaactattggcgctctgattccatccgaaatcgccaaagacgatccccgtatgatggcgacggctcatctggtcaactctttgccatttgataaagtctcgaccactcctcccgctgcattaccgactcagaaagctacagttgttcacactcgaattgctgatattgttgatgaggatggtaaacagcatatcgctgtggtcaaaagtaaaaacatgccgatgagcgttccggttgtcgatgcgaaaccaacgaaacgcgcaggggtttacactgctggtgtagttccgggtaaaccggatctgcacgtgaaagttgatacggggaaagcaccggctgtatcacaatcacaatcaaaaggtattcaaaaagagcagggaccatctcgtttcccggggttcacttctggccaaagcactcacgaagccgtggttcgtttccctgatggcaaaagccctcctatttatatttccgtgacagaggtgagcacccctgatcaagttaaaaagcgacaggaggaggagaaacgtcgtacgctggcttgggctttaaataacccggttgatgctgcagctaaagaagataaagacgccggagatgagttgagtcgtgctcaaggcgatattgtaaaagctcaggcgcgaattaacaaagctgttcaggcgatccctctgcgtaagagtgaactcgacgagtctaataaacgtgtagaaaatgcaaagaagttcgttcaggaaactttaaaatatgctcatgaccagagtcatcctggccatcgtgtattccagcaagctggttaccaattggggttagcccaggaggatgccaaaaaacggcaaacagcctacgatgcatcccttaaagaaaaagtagatgctgagaaagctctgagtgttgctgtcgaaagccgtaagcagaaggagcaaaagaaaaaggcttcagagcaaaaactggctgacgaaaagaaaaagccgcgtaaaggtgcaaaagattatggccatgattatcatcctgttccaaaaactgatgaaattaaggggttaggtgacctgaccaaaggtgcacctaaaacacctaaacaaaatggtggcggtaaacgacctcgctggtatggtgataaaaagagtaaaatttacgaatgggattcccagcatggggagcttgaaggttatcgcgcgagtgatggtagccatctgggcgcgtttgaccctgcatcgggtaagcaggtcaaagggccagatccgaagcgcaacattaaaaaatatctttga

SEQ ID NO: 151732 - DNA, 540 bp, Enterobacter cloacae
atgctttcattggaagagattggccaatcagttagaaataatatccagttgattttggataacattcaacttcctttggcggtcggcccaatcagcgatgatgactatagaattctttgtggtggctttggacagttagagtgggattatgcccttgccacccatggaaacgatccgagcaaatttgaactatgcatcaagtttgtagcacatggtgcagtacagggtgtaccagatggtgccgctttatgtgtgttcgacacagaaagtcatacattcaacattcatatgattgagcgttttactcgcgatgatgaacctcatccacttaacggacgcatggttctgattaccctgatgagcgcttacatgttctgcaaagcggttgagtgtgaagaaattcgtattattgaacctgtgcctgagttgcttgcttactattcctctttcggctttgttctggatagaagcgggtacgttatggtctgtgaaacaaccacaatcgaagctgttttcctcaaattcgcacaattagggtag

SEQ ID NO: 151733 - DNA, 174 bp, Enterobacter cloacae
atgaaaactcaaaaagcgaccaagccacaagtaaaattcgacacaatgaaagcattcgcaggtatgggtgctgctgttgaagtactgatgaaggctgctcctaacgcgttcactgacgccactgtttccggaaaggaaaagcagggtaagctgcgccatcgcaaagcagcatga

SEQ ID NO: 151734 - DNA, 534 bp, Enterobacter cloacae
atgaaaactaatctgggtcttatcgtcgttgttgttatagcaggcctgtcaatagcacttgtgaagagctgtgcagatgcaaccagcattaagagtgataacgacgtcctacgaaatgataacgctttgcaggggcaggtgatcgccactcagtccttcaattttaatcggtttaatcaggttgtagaacatgccaacaggcttaactccctagtcgatataagcactgaaaaaaccgtaatcgaatatcgggagattctccgccgtgaaaaaacttgtgatctgcctgttcctgctgacattgctggtgggttgctcgaatacgcgcaccgtttacgttccagcgcaatgcacgccgataccgacgaaccttacgcagccgatgatcgtgccgctgccaccagcgcaatgacgttttgccaagctgtgctctggataaaacctctcctggcagtgattgaaaagggcaaccaaaaatttgtagacatcagaaaaattgaaacgataagaagtcaaaactactcagaacgttga

SEQ ID NO: 151735 - DNA, 240 bp, Enterobacter cloacae
atgaataaaacgatgcccattctgatagcaattgctttcggggcagctttgatattagccattgtctttagagagaatacagcagtgactttctctttactctttgctgcttttgcttgcgtcgagttattcattgagtggggaggcattcaaggactaactaggctgtgggttgctactatagcaaaagccgttcctgtgctaatcgcaatcttatatgcagcaataccaaatctttaa

SEQ ID NO: 151736 - DNA, 159 bp, Enterobacter cloacae
atgaacatcgccagcagcatgccggtgaaggatggcgcaactatcaaaccggtaaaagccgacaagagcgtggttacgggcgtccatgggaagtcaggcgtgcacgtattctccagcgagataaacacatctgccaggagtgtcgacgcgcaggtatag

SEQ ID NO: 151737 - DNA, 435 bp, Enterobacter cloacae
atgggaacaggaatgcgatcacccggtgggggaaggaaatctggcaacactggatcacaggtcagttctgttactcgcgcggtcacgcctcccgatgaattactcggtgatatggcagtcgatgcctggcggcgtacatgccgaatccttatcgaccgtggcacgttcgaaattgaggactgctatctgctgatggaatactgcaacaccgttcagctcctgttcgatgccaatcaggaaattaaaaatgatgggctcggcgacgagacagctgccggtgggcagaaaatgggcgcagcagttaaggctcgcgacaaatacatctcccagcttattcggctgagcgttgttctgaaacttgatccaaacagccggatggtaaagcgacctccactcggtgggggtaaagccgaaaacgaatttgacgaattttga

SEQ ID NO: 151738 - DNA, 210 bp, Enterobacter cloacae
atgctggcggaccgatggggcgagaaggacccccgcaaaatcgccgcacttccggcgaacatactgacctactggcaggcctatttcgatctcctgaaaacggaggctgaaacgccagcgccggttaactcccttccggtgactgctgctcaatctgaaagcgagcagcaattcgctgactgcttcaggatattaggaaatggctgctga

SEQ ID NO: 151739 - DNA, 489 bp, Enterobacter cloacae
atgcttaaaatatgtggttttgtagttctgacgctcggtgttatttgcatcattatgggacttgatatggatgttactgtgagctcaggtgccaatatgaacgtatataacacggggctgattgcttccagacaaatgaatatctcaattgggtgttcacttcttgtcaccggggcgattcttttgtcaggtggtattttgaaagaggcgattatcaagagtgccttatcacatacaaaagcagagattgaaagtctggctaatgaatcgcaatttgtagagaaaggcgctgacggtagctttattcttaatgaaaatgcagttcgtcattatgctgaaaaattgcataaagaaatgccagataatacggctctctccgttatggttactaatgcaccacatattgaaagaataaaatcgaatatgtctcctgaactggctaaaaggtttgaaagacaactggagatagaattacaaaccatgaaataa

SEQ ID NO: 151740 - DNA, 189 bp, Enterobacter cloacae
atgaaaactacctccgcaacttatacagagaaccgctggatacctatcaaaactttcagtgagcgtgttggtatcaaattacgtacagcgcgttactgggttcactcggggaaagtgaaaatcaagccgaaggaaaaaccaaaagaacacgtttatgtagattggtacgcatggaatgcagaccgttag

SEQ ID NO: 151741 - DNA, 444 bp, Enterobacter cloacae
atgcgtgataactttcctgcggatcttgttttgagatgtgcgttagaaacaggggcgtcaatctactggcttacgactggtgagggtgccacctttgaccacctggccagcgacacgcttagaatcccagcatttaaaattactaataacgacttcatcagagaatcatcttacatttacgacaaagcagttctcccagactactcaggagaactacaaataatcaaagatgacaaagtaacctactttgtagatatttcttcacatcaggcttctgacggcaagtatttgattgaatactccggcacaaagagcatcaaagaacttacgctgcttcctggcaacaaacttcgtattgattggggcaaataccctgtggattgcgacatttcagatgttgtgctgcttggtaaagtggttgcaacttatttggttaatgattaa

SEQ ID NO: 151742 - DNA, 678 bp, Enterobacter cloacae
atgaataataaatttaatgtttttcaaatggatgctgttgatttccttaagactctgaaagatgattcattagacttagtcattactgaccctgcttatgagtcacttgaaaaacatcggaaagtcggcacaacaacaagattaaaaaatagtacgaaatcaagtaatgagtggttcgaaatctttcctaatgaacgattcgaagagttgtttagagaaatctatagggtcatgaaaaaaaatacacacttttatcttttttgtgaccaggaaacagcgttttacgctaagccggtggctgagaaggtggggtttaagttttggaaacccttagtttgggataaacaacgtatagggatgggctaccattaccgtgcgaagtatgagttcattctattctttgagaagggaaaacgaaaacttaacgatctttctattcctgatgtcctctcttgcccaagaattttgaagggatatcctacagaaaaaccctcaaagcttatggaaatattgctaaaacaaagtagtattgctggtgaaattgtctgcgatccatttatgggagcctgcccggtaggtgttgctgctctagaaaatgatagattctttctgggtaatgaccttagcaaagaatcgcttaggattgcgaatgagaggcttaactctttgataaattga

SEQ ID NO: 151743 - DNA, 384 bp, Enterobacter cloacae
atggattattctgaatatccttggccggctgattttcctgagtatgttcctcctgaagatgcagtcgatgctacaggagaagcttttcggatcgtggcaaatgacccgccgactgacaaggactttgtggggcataaccaggaaccttacgttaaaaaaacaggtaagcttagtcctagcgattatggtacatccatgttcagggactttgagcaggtgcagtgtgcaagaaatttttacgctgctttacggaaaaaaaagattgcaattggtacacttgaacctgttcatggtaaagcgtcaaaaccaaataaaaaatctcatttcgaaacttggttaagactaaatactcgaattgaaaataattttaagatagtaggttaa

SEQ ID NO: 151744 - DNA, 1278 bp, Enterobacter cloacae
atgtattacttaccaattacgaatgaacttggtgagctttctatagagaaaatctatagtttttatgatgtaccaaggacatttttagcgaagagcgcaaaaactaaagagttctatttagtctattggtttgatgagtctgatagttttgattcatggtattatgcaccgatgaataacttagagatttctaatcttgattctggacttattcaagttagagatttttttattaataaaaatgttattattatatcaactccgtatgatttatctgactgcaaagtagatattcttccttatcgggatattgactcagaaacgcttccgccagttggctattttatagcattagatgaggatggtgagttttctgttgtctataatgatgagagagagatattaaataatgtccacgaaataagaatttatcgtgaccgaagcgaaaagaatattgagtgggagccaatccaaaaaattgttaatacttggaattctttatataacaaagtagccaaagttatttgtaatgatgacttttcacttataccctatacttcatccataggttcttataaatcaaaattcatcgccgagaataatgacgttttcataagcaatttcattgaatttctttctgttttgaagtcatctgaacttgattacgaggcaattaaaggtcttggtgttgatttggatgattttgaggctttactctccagtttaagaacttacaactataaattagaagttaggtcaaatactggggcatctttatttaccatagatgcaaaaaaattagcatctgaaaaagagaaaattcaagagcataaccaaagatacttttctagtgagcttgtcccccaagctgatgatatctatagggttattaagtttgttaattctgttggtaataatgagttattcaatgaagagtctgagggtattactccgcggcaaataaattattataagcacgcagcgaagttgttgggtttggttaaaactaatggttttgttcttcaacctcttggctggaaagttttttatgctcaaaactccaaggagcaaatatctttgctggcagaggcattcgaaaactcagattgtggttgggcttggatgaaatattgtggtgtggagaagatcaccgaaattgatgagtctaccgctgcagagttccttatcgaaaaagctaatggattagcagtggacacagctaagcgtcgctcaaaaactttgtcttcatgggttaaagaatttaaatcggctttatga

SEQ ID NO: 151745 - DNA, 264 bp, Enterobacter cloacae
atgaaaattcaaaaagataaattagttctgatactaaaaggattagcagaagtttatccttactacccttcttccgagtacatgcaagggctggcaaacgatgttggcagtgaaaacgagttcgatgggcacatgctctatttgtctgataaagggttgattatcacggatatgaaatgggactacttagaaggtagttactggttttcaccagataagacacgtatcagttgccaaggtttagactaccttgcagagcaatag

SEQ ID NO: 151746 - DNA, 405 bp, Enterobacter cloacae
gtggagggcaataccacgctgtacgccctgccccgcgcggagatcgtcgaacgctggcgtgagcaaaccaccgacgacttccgcttttgctttaaattcccggcgaccatctcccacaacgccgcgctgcgcaactgcgatgatttaacccacgagtttttcacccggatgtcgcctctggccaaccgtattggccagtactggctccagcttcccgccacgtttggcccgcgcgacctgcctgccctctggcagtttctcgacgccctgccgcatggcttcacctacggcgtagaagtaaggcatccggaattctttgccaagggcgacgcggagaaagcgctcaatcgcggcctgcatgaacgatcggtcaaccgcgtgatcctgaagagacctttctattga

SEQ ID NO: 151747 - DNA, 810 bp, Enterobacter cloacae
atggatggaggtctcactgattcagtgaaacatgctttagaacagaggattaagagtcccttgtgggggttcattattctggcgtggacatggtttaattggcctaacctagcaatgttgttcatgagtgatgcgcctgtaaagttccgaatcgattacatcctttcacaggattatttctatctgtattacgtgtttgcccccatcctttctggcagcattttggctgttgtctcaccctatgctcagtggctcctgtctcaggcacataggtgggctgatgacagatacaaggataatgtttttcagtccaaggagagagtgtttcaagataacatcaagctatcaaagcttaaggttcaatcagatatggcagtggatgttgaaattgccaaaatcaacgctgatatacagactgaagtcgaaagaggcaagcgcgagcagatactaactgaagagcttgaaacccaaaagaaaatccttgatgaaaagattgaacttcttactaaaaaacttgaggatgagaaagccgattttgaagagttgttaaaggaaaagcaaaagattcaagatattgcgataaacgttacgactctgttagaaaaagccctaagacttgatgacagaaggtcagttcagcaattggtggatgaaatttctgatttgttcagcgtggaagacttcgagctttcagaacaaaggaatgctctgaagaatggtataaggaaaaaacggagcgtagctgaatttattgaagaggttaaactcaaccaaagcgaaacatcagagattaatcttcaaaataagtga

SEQ ID NO: 151748 - DNA, 564 bp, Enterobacter cloacae
atgactaatttaaatcaagctgtaagaattgaatcgccagttgcaagcatttcccacttattaccgttcgaacagaaacagcatattgaaaagttgtacttcccacggattcaacaggccactgaccgaatgagtaaagctgaatttgaatatcaaaacgctctagaatcccgctcagtgcttattcaacagaagacggctgagtatttggctaacccgtctgaaagacacggttttaaagttgttcaggtttacccaacaaaccagcaatctgtgattcgaagcatggctgaacaaggttatatcgttcatcgtgtaggaatgggcttaatctatttcatctcatctaaaaagaatgctctgaaagacgcaactgataaagctgaagctgaagctgaattagccattgaaaagatgattgaacgtctgaaggtaaaaacctctgaagctgtacaccagcgaaacaagattgtgattgaagcccgtaaagctctggatgctgtaaaagactttacagattacctgaacgtgattgtcaccgattctgaagaggtgactgaataa

SEQ ID NO: 151749 - DNA, 528 bp, Enterobacter cloacae
atgtcggcgcaaacaattctttacttgttttgcctgctggaagaatatgaattttatgtctacgaaaaggaattgtcctcaaatttacagagggtttgtaatgatgataaatacaccttgaaagatgtagaagagtatggcatagaaggcattagaagaaaaagcattgacaggcatatggcagagtatcaattctcctcatgtcgtaaaagaattaaacggtgggggaggttgggtgtaaaagagttatctgaaaatcagatttctctttatgaagtcatctcaaaaagacgaaatgaacttacccatttatcatcacctgaaccagcttcaagacttgaggcattgaactactatttagtttgccgaaatattgtccggtatatatcgatatgcttcggtgataaaagtatcgatgaagttgatgttgactgggaagtttggtctgagctagagcatagcattcaaaatgatagttcagttaatgatttggcaaaaatggttcgagatggtggcgccagagagtaa

SEQ ID NO: 151750 - DNA, 537 bp, Enterobacter cloacae; identical to SEQ ID NO: 16554

SEQ ID NO: 151751 - DNA, 525 bp, Enterobacter cloacae; identical to SEQ ID NO: 16553

SEQ ID NO: 151752 - DNA, 126 bp, Enterobacter cloacae
atgaagatgttgaagactgccatcatcgagacgattctccagcttaatctggaatctcatcatgatgaatctctggtggtggtcatcggtgagcaacgggaagagataatgcaggataaagtttaa

SEQ ID NO: 151753 - DNA, 258 bp, Enterobacter cloacae
atgtactgggccgaagaaatcatgaaacattgcttcacgttcgaggacttcgtagatgaatggagcaatggcaatgagcaccgagaaataaatcgatgggtggatagtggagttctcagcatggaatactttgaaggaaaattctattacgtcacctcgtacattgttggaggtgtaagcccattttattgtcacacctgcaaccgaatcaacattaagaaacttctatctataaaggagcaatgtcctcatgactaa

SEQ ID NO: 151754 - DNA, 468 bp, Enterobacter cloacae
atgactaagctaccagcagcattcaccaaagaaataaaagccgagtttaaaatacagcgtgatcaatacgtagctgattacatcgaatcccatctcacggatgttttcagtatctctgatttttatccggtagtgctcattaagctacagaccgctattcaagatgggtacgaaatcgcggagtttgagcgccagccattctacaacattggtgatcctgcaatgcgtatcgtgatgaacaaaaagcagcaggaaatcgacacagagcgccgttccctcacagaggcagcagaagcagctttaatggcctcccttgaggctcaagcggaagagctataccaacagatggttgcagaggaagaacgccgtaaacgtgcagaagcagccgcgcaagcagcagcagaaaccgaggctctcaccttctctggtcgcctacgtgcatcctttgtgaaaggctcccatgtttga

SEQ ID NO: 151755 - DNA, 435 bp, Enterobacter cloacae
atgtttgaaccttatgcgcagaagcgcaacccggcaaaactcgcccagaggagcgccagcgactaccggaaaatgatgatcgccgagcaggacgggagggacttcataacaggctcaccactgacagatccggttattgaccatgaccacaggacgggacattgccgcctgatcctgaaccgtgtgacgaatgccatagaaggcgactttaatctcatcctgtctcgtgttgcttatcgtgaagattttactccgcttttgtgggaagtttattttggctttcacgataccttgtacgatgaattatacaatgccgcgcttgagcgccggaatggttatttaaaagaacaccacttcagatttatcttaaaacagtttgcggtgtattacgccgtgcgattcgaccacctcaaccatttggagtattacagatga

SEQ ID NO: 151756 - DNA, 186 bp, Enterobacter cloacae
atgactacaaaagcagagaaatcattatcatggcttagaagctactggaacaaccaaccaccagcagagatagccaaatctgagattcagctattcagtaaggaagtgaataaactaacgattggggagttctaccagtggctattatccgaaggttacatctttaaaaataaggatactaaataa

SEQ ID NO: 151757 - DNA, 156 bp, Enterobacter cloacae
atgctgcaacttaaaatagctcgagatctgctgacgtggattgatgcaagcaagggtgatgacagtcgcccaacttttattatcaagacattacgtaaggtaatgacgaacgaggaaacgaatgaatccaaagctacaaatagaaaagctgattga

SEQ ID NO: 151758 - DNA, 417 bp, Enterobacter cloacae
atgtcaggacgtacccacgcagcatacgtaaattatttccagaacggtcgcaaggcccaccgtttagccgaggttgagcgccagcttgccgcagagacaagccaccagcaagagaagcgccagctcgaagcggaagcacggagcgctgagaacatcgcagaccatttcccaagagtgatcccggatacgcctttaatcgaaatgcaccccggctactacattcaccgccttgagtgggaagctcaccgcgacggcttgagcgtggtcacggtcacagacgaacgaaccaccagagatcccgaacttgtttcctatcagtggaaccactttgtaatcacgcaccgcagcccctgggcacttgaggactaccgaatcagatactacccgtttagcctcccggaacatgtagcgaaatag

SEQ ID NO: 151759 - DNA, 558 bp, Enterobacter cloacae
atggctaacatcggttacattcgagtaagtacagataaacaatacacagagcgccagctcgacggcgtgacacttgatgaaaagtttgaagagaaggtaagcggcaagaataccaaccgtcccaaactccaggagatgattgcttacgttcgtaaaggcgacgtgatccacgttcacagccttgaccgcttagggcgtaacctccgtgatgttctcgacattatcgagcacgttaaagccaaaggcgcaagcgtccaattccacaaggaagggataacagcaggagcagaagccaacgccgccagcaaccttatgctaaacatcttcgcggctatgtcacagatggaacgtgaaatgatgctcgaacgccaggcagaaggctacgcagcagccaaagcagcgggacgcaaaggcgctcgtggtaatggcgcagcggttgaccgtgtagggattgtgtcagcacttgccgctggtcagtctatccgaaccatagcgaaagatttcaacgtgtccaccagcaccgtgcagcgtatcaagaccgaacaagccgccgcctaa

SEQ ID NO: 151760 - DNA, 426 bp, Enterobacter cloacae
atgactgacataaccatttaccacaatccagcatgtggaacatcccgtaatacgctggctttaattcaaaatagcggtgttgagccaactgtgattctctatctggaaacacctccagacagggataaactcaaggaattgattagcgcgatggggatcagtgttcgtgcgttgctacgaaaaaatgttgaaccatacgagcaacttggtttaacagaagaccgtttcaccgatgaagaattgatagaggcaatgctaagtcatcccattttgatcaaccgtccgattgtcgttacgccacttggaacacgcctttgccgtccatcagaagtggtattggacattcttccaaaccctcagaaaggcgagttcattaaggaagatggagaaaaggtcgtagggaaggatggcaagcgactaatttaa

SEQ ID NO: 151761 - DNA, 1290 bp, Enterobacter cloacae
atgttattggcaggagcaatcttcgcactaaccatcttctttgtgatttggcaacctcgcgggcttagtattggctggactgcctcaattggtgcggtgctggctttggttacgggggttatacaaataagtgacatcccggttgtatggcacattgtatggaatgctaccgcagcctttatcgcggttatcatcatcagcttactgcttgatgagtctggcttctttgaatggtgcgctttacatgttgcccgatggggtaatggacgtgggcggctgctatttacctacatagtgttgctgggggccgctgttgctgctctgtttgctaacgatggagccgcgctgattcttacaccgattgttattgctatgctactggcgttgggattcagtaaagaaacaacgctggctttcgttatggcagccgggtttatagctgatactgcaagtttaccgctgatcgtatctaatcttgtgaacattgtttccgctgacttcttcaaacttgggttcagtgattacgcttccgtgatggttccggtagaccttgcggcgattgctgccacgcttgcggtacttcatctcttcttccgtaaagacattccagccgtttatgaattgtcccggttaaaagcgccagcagaagctatcaaagatctggcaacgttcagaactggttggatagtgctattgcttctcttaataggtttttttgtactcgaacctctcggaatacctgtaagtgcgattgcagcagcaggggctttaatactttttcttgttgccaaacgagggcattcgattaatacgggcaaggtgttgcgtggtgcgccctggcagattgtagtgttctcgctcggtatgtacctggttgtttatggtctgcgtaatgcaggactaaccgaacatctttcgggtgttctaaaccagcttgctgatagaggtatctgggccgctacgctgggaactggcttcttagctgcgttcttgtcatccatcatgaacaacatgcccactgttttgattggtgctttgtcgatagatggaagtatggcatcagggattatcaaggaagcgatgatctatgccaacgtgattggctgcgatctgggaccaaaaatcacacccataggaagtcttgcaacgctgctttggttgcatgtccttgaacagaaaagcataaaaataagttgggggtactacttccgcgtaggcgtgattatgacgctgcctgtgctgttcgttacccttagtgcgctggcattgcgcctgtcgttttccctgtaa

SEQ ID NO: 151762 - DNA, 702 bp, Enterobacter cloacae
atgaagacattccccgctcttaatactgattgctttgatgcaaccatagctgaaaaggtcggaggtacagccatccctcctcgctttcttctcctttacggctcagtacgtcagcgatcttttagtcgatttagtgccgaagaagccgggcgattgcttacggaaatgggtgctgaagtgaaaatttttaatccttctggtttaccacttcctgacgatgctcctgaaacacatccaaaggtgcaagagctacggagtttggttcggtggtgtgatggcatggtgtggagttcgccagagcgacatggcgcgatgagtagcattctgaaagcccaaatagactggattcctttaacagaaggagcgattcgcccttcccagggaaaaactttggcagtgatgcaagtttgcggtggttcccaatcgtttaacgcagttaaccaaatgcgtgtccttggacgctggatgaggatgtttactatccctaaccaatcatcggtagcaaaagcatggcaagagtttgatgatgatggacgaatgaaaccatcttcttattacgaccgcattgttgatgtgatggaggaactattcaaaatcacactgattttgaaaaaccatactgaataccttgctgaccgctacagcgaaagaaaagaaaatcacgaacaactctctatccgggtgaatcagcggaaaatttaa

SEQ ID NO: 151763 - DNA, 1677 bp, Enterobacter cloacae
atgtataacaaaatgggtaacgcaatgaggaacagagtgtacaacaagactcctcgattcacgacgaagcgcggtaacgtctactacatcaactttcgacttcccgacggaacatttttccgtcgtagcctcggcacagattcattgcaagcggtcggggttacaatgtcacgtcttagtgcatacatcccccttgttcaaaatggttcgctgtccatcgaacagttcaaaatgcacattgacggtttcagggaagccactcagcgcgatttcgacacttatctgttggactggcttaggatgggtgttgatgaagctaaacgaatgccggaacttggacggatgcaacgcaagatcgatccagatgcagcaatctccccgactgccaacgttacagaggctaaaggccgtgctgagatacatctgaaccgagtgtataacggtgatgattcaacggcgcggatgcttcttgccactttgctgatgaagaaggtttcctttgatcaacgtgatgttgaacaggcttacgatgtggcggggcagattgatttacatcaggctatgctccaccaagcctacgacgctttctattctggtgatcttgttcgatatcgctctttggtcgaagagatgcaattcaagctgacagaagccgagcgattgaagaagccagcagctaaacatgctgtagcgccaacggttgagtctgaaagtaacgatacgcctctgctttctgtttcatggaaaatgtttaccactgaaaaaggaaaggactgggtggcggctgtcgccaacgaaaaccagcgcttctataatgtgttgttgcatgttatcggtgatcttcctgtcggagtgatcacgaagcagcacatacggcaaactataaccattattgaaaatcttccccgtcgaaataaaaaaccttattccgaaatgacgcttacggagtgtattgattttgatgtaccggaagaggatttgatgagcagcgctaacgtccaaaagcatctcaagatttattcctcgttcttcaaagtcttcctgaaagatgaaaaggacattttagagaaagcccccacagaagggatcaaatacgaggtaacggagaacaagggcggctcttactcaaaacctgagatgcaacgccttgtaacgtatttgaatacttgcaaagattggcgacgtgattatttcctgactctgatttataccggagcacgccggggcgaaattgctgctatccgtaaagagcacattcgcgaagatgaagaaacacggcgttggtatgtcttcattgacggcgggaaaactgaacaggctgtgcggcagataccgttaaacaagacctcagaaaagttacttttggcgcgtgttaaatcgctcaaacccactgatcctgttttcggtgatttaccgacgtatgagcagatcgggcttgagtggaacagcatcatggccgattgcaacatacaaaaatttaatgaatttggacaaaagagggtgatccatgcccttcgtcatacttttatttcagaggcaatgacaaaagcgatgcccgtgatggtgcagttttgcgtcggacactcccgaactcaatcgttaggtatcacagcacggtatacacataggccaccgctgagggacttacttccagtggttgatggcataaactggtaa

SEQ ID NO: 151764 - DNA, 705 bp, Enterobacter cloacae
atgactacaacacgagaaaatcattatgttccggtatggcatcaaaagggatttatggatgggagggataatcatttatgttatttgacgcgtagggaatttccattaaaaaattctgaggttaaaattgtcaatgaaaaaaaatggtataaccccactcagaagctgtatctaaaggatttatattcaatattatttgatggtgatattaatgacgatatagaaagaaaattgtttggcccaatcgatgataatggttcgagggctgttcgggcttttttgactgacgaccaagggcaatggcatcataactttaaggagttttttacttatctggatgcccaaaagttacgaactcccaaaggtttggaatggattaaaactcagtatcatggtttaacccaggaaaaccttatggtcgagatgcaatcactccggactatgcattgtacattgtgggcagaaggtgtaagggaatttgtatcagctgaggactcagatgttaaattcattacctcggatcatccagtaactatctataattacgcttgtcctcccgattcagatgcatgtctgtatcctagagaccctgatatctctttgaagggttcccagactatatttcctctggataaaaatcggtgtttgattttaactaatttagagtatgcacgatctccagaaaatgtaaatcctttggaataa

SEQ ID NO: 151765 - DNA, 174 bp, Enterobacter cloacae
atgaaaaataaaattatgatggtttttattacagtcatttcaatcattatatgttcttgcgaaaaaaaagataacgattgctcatcgatgccggataataaatttgatgcacctagatccgataagtgtgcattgcgtagtaataacaatccaagccctaaacgagaatggtaa

SEQ ID NO: 151766 - DNA, 429 bp, Enterobacter cloacae
atgtccagaactccagattcacggttacgccatgagggctttcgcaaagcagaggcttccctgagacttgaaggaatggaccccagtggtacgcctctgtacgagtccgttaaggcgcgtattatttcaggcgagctgacgtatgagcaggggcgttctgagatttttacatactacacaaaatcagatactgccgggcctgtgaccgtgggagaaatgctgacagaggagtttttaaaaccgctgagcatgtctcatgatgaactggcggaagctattggtgtttgcaagcaggatattgaagatattatctgtggtttgcgttgtcttacggatgatgaggctcgcgttcttgctgacatatttggtactgatgaggatttttggagcaatctgcagatgttgcaagatcggaaggaaggacggtag

SEQ ID NO: 151767 - DNA, 891 bp, Enterobacter cloacae
atgacattagttgttgcaggtttcgagaaagatggaagtattgttttttgtggagactctctcataaccactaaatctcaaggaatgtcagtaaaattgacatcaagctttagaaaaataatgccgcttgaaattattgtacgagttcctgattttgatactagtgggaaaatcgttcgctattttgaaacagagtcctggcatcgttgtatgattgcttttgccggaagcactttagtatctcaacatataattaattctatacagggccacttaagacaaataaaatatacttatgacaaaggggagtatgactatcactcaggcactcaaaaaggggctggttacaagctaatcatgggatgtgaagataataatgaagttgaaaacacgctctgggatgatgatgtatttatcgattgcagagaggcagccaataacctgttaagcagtgaattccttgttagcttagttaaacattgcattgagaaaataataactgagttttaccttaatactgatgaaaaatttgagaaggaatggtttgcaagtgatttcatagtagccttatcttgttataaaactggtaaaaaccatctctttacattcaaaatggaatttgatgataactctgtcaagcttgtaacaagggaaattggcgcaaatgaattagccattatcggtataacacggtataacaatgaaatacatcatacctatcaggttaatcaatcatcattaagcaccgaaagtatattatttaaagaagtcgtaaaagctgttgaggataatgagagcgctgatttgagggaaattggcaaacctattgtttttaaaaagtttgataagcatcgtgaattacgcgataagcaaaaagagtacagagggtaa

SEQ ID NO: 151768 - DNA, 1092 bp, Enterobacter cloacae
atgtctgatttaagttcggcaatagttcatttaacaatgcgttttaacgaacaaacattatcaacagggagtggcgtattctataaaagagctggtcaatactatgttgtaacagcatggcataatgtatcgggtcgccatactgattccatggaatgtcttgaccaaaagaataatgcggttccgaataatattctcgtgtctttcaaatatcacatattcggtcaggtaacagttaggaatatcaggttgcctttatacgatgatactaaagcgctttaccatattcatccagataactggccaagagtggacgtagtcgcaataccttttgacgtaaacggcttgcatacctctgtagggtattctggctatgagaagatggagtttgaatattcactttttgacgaagaggataatttaacaattcatgcaatccagcagtatctcgttgatgatgttctggcaaaacgatggatgaattcggctaatgttactgatgaggtgttcattccgggctatcctcacaatataacagatcaattttataacccggtctggaaaagagctacaatagctacgaatccagcattccaatggcaaaacgcgagaaagtttcttatcgacagtgcttcaagcagtggtatgtccggtgcttcagtattttattataataatgcaggggatgtgagtattcttggtcaccacattaacgttggtcgcattgctgctattcatgctgggatttatgttggcagagtcggtgttactgagaaggcggacccgcaggttgggattgtatggcatgcgtctgttattgatgaaataattgatgggaaagtttttgattttcatcctgatgaaattgaaatggctcgcaaggatatcgaggcggttattagagaacacttaaagacggcaaatgccaagggtatagagaatatattgaatgagaatactccttctcgtcattacgttcatagtcagattatgaaggacattaaaggcagagctaaacccggggaattgatgcagcttattctcgatgtaacagccgcttatgatgggcctctggttgaggacaaaggttga

SEQ ID NO: 151769 - DNA, 783 bp, Enterobacter cloacae
atgataggacaaagaacccgctattcgttagcgcaattcatggaactgcaagagcccataaattcaatcgtgcttttgggcaagtacggggtgcaacacttatccttgccccacggacaactgttatacggtttactgaacacgctacgtgatctcgatgaccgcacgctcatgctggcgctggccgaggtcgttgcgacaacaggcgatctgcgggctagggtcaatcctaagtatcgtttcgatgagcgattgcacgacctgacgcagtgcctactgctagacggctacatcatcaaggacaagaagctggttcaaactgatccatcgattaccgatgcggcgcccttagaggatgacttgatcgacgccttgcagaagtcgggggctccccgtgcgcaggaaatcatcgccaagatcaatgactcggctggcgcgttccggtcgacaccacccgactacaacgcgtcgctcgtgaatgcccgcgtggcgctggagacgctggccggtgacgtggctgcccataacgcctcacagcagccgacaccagccacctacaacccatcgaagtggggcgaagtgcttgcgttcctgcgaagcagcggcgagatcacggtcgaggaggaaaaagggctggctggcgtgttcggttttctaagtccgggcgctcaccgcccgatgggcatcccagaagatcagatgacgcggctcggccgctcattcgcgctcaacatgtgctggttcttgctcaagaaccatctcctgcgaatccaacagccttga

SEQ ID NO: 151770 - DNA, 1722 bp, Enterobacter cloacae
gtgattcatcacattttcagcacgctacctagcttcaaaaatcttggagatctgaagcccggcctgaatgtgctgctcgctcaaaaaactgagggggcatccaccaagcaaacacgaaatcgtgccggcaaaaccagttttgtggagttggtacattttctgctcggtgccgatgccggtccagagtcgattttccgcaccccggagctggccgaacacaccttcggcatggacttcgatctgaattcggaacgaacggtcgtcgagcgcagtggtggttccaaagccaaaatattcgttacagctccgcctgccgcgaaggtcaagttctcggccaccgagtggtgtacgttcctcggcgaacaaatgtttggcctgagcagccttgaagctgcaggcagcaagccgccgtcattccggtcgctgtttgcctactttgtacgccgacaggcgagcggcgccttcatgacgccagaaaaacaggctacgatgcagggaactggcgacatgcagatggcgctaatgttcctactcggactggactggcagattgcccgagattggcaagctgtacgcgatcgggaaaagactctcgaagagctgaagaaagcggctggcaacggtgccttcggttcaatcatcggcaaagtcgcagacttgcgcacagagctaaccattcaggaggcccgtctcaagaagcttcatgcggaagttgagactttccaggtgttgccggaataccgggagctggaagtcgagagcgcaacgctcacccgcgagctcaacgacttggccaacgccaacaccatcgacttctcggctattcgtgatctggaaaacgccctcgcctccgagattcctccggaccatgaagaccttcaggctgtctatcaagaggcaggtatcgtgcttcccggcttggttaaacgccgctatgaagacgtgaagagctttcacgactcagtggtgcgcaatcgcaaggactatctgtccagcgaactcgaagctgccaagctgcgtatcgagcttcgtgacagtaagaaagcacagctcgaccaacgtcgtggcgaaatccttggaattctcaagagccatggtgctctcgaacagtttctcaagttgcaaggagaactgggccggctggaatccgaagtggaatcgttgaggcaacgtttcgaagctgcagaacagctcgaaggtaccaagaacgagctggacatagagcgcaatcgcctcactattcgactgcgacgtgactttgctgagcagaaagaccgattggccgaagccatcgtcgcctttgaggaaacttcgcaacgcttgtatgaatcggccggcagtatgacggtcgatgaaacctccaacggaccaattttcaaatttccgatgcaaggtgagcgcagcaaaggcatcaagaatatgcagatattctgcttcgacatgatgcttatgcgcttgtgcgccaaacggcagatgggaccgggatttctgatccatgatagccatctgtttgatggcgttgacggacgtcaagtcattagcgctttgcgtcttggctcagagatcgcccaagagcttggctttcaatacatcgtgacgatgaatgaggacgacgctttcaaggaaaccatcggtggcttcgaccttaatgaccatgtgcttccaacacgtttgaccgatgctacggaggacggtgggctgtttggtatcagatttggataa

SEQ ID NO: 151771 - DNA, 921 bp, Enterobacter cloacae
atggatcgcatacaacaactcaactacgaaaaggatttccgcattgccttcttagaatctaagggggacggttttcaacgtttatttgagaagctgatgtcgaaggcacatcccaacgacttcatggcatgtcggccttggggcaatgttggggaccggaaaaacgacggatatctgccttccgctcgaatactgttccagagctatgcccctaatgatttaagcgctgctgaggccatcaagaagatcaacgaagacttcgaaggggccaaggagtactgggaagattatttcaatgaatggaccttcgtccataacgcaccggatgggcggctaggtccgcacattattgaagctttagccaaactagctcaggacaacccgctgattaagataggacattgtgggtacgaggaaatgctagcgaagttccgtcaactaaaacttcaggatctcgaatcttggtttggcccttcgttaacaatggaagcaaatataaatctgggcttcggcgacttagctgcagtgctcactcacattagcatcacccccatccctactgcgagcgatgtgaaagatgtttcgcgcggaaagatcgaagcaaaccttctatctcaagctgttgcagacttcctgaagataggtatgcagaagtctcctctcgttgcgcagttctttaatagctggaagaatccttcctacggcgagcagatcgcacaggctttcaagagcaaatatgaggggctgcgggatggaactcctcaacttcatccagatgaaatattcggccgcttagaagcatgggctgggggtactatgaataccacgcctgctcacaaggcggccgtgttagccgtaatggcttacttgttcgacaaatgcgaaatttttgaagatgctcaaactgtggggactgtatga

SEQ ID NO: 151772 - DNA, 3054 bp, Enterobacter cloacae
atgtttagcgatattcctcagggcattagcctttgggatcaccaacgcagagcgctttcattcgtcattgagcgtatgcgagccaatagtactgcttgcctagttcggatgcctaccggtacaggaaagactggcgtcatcgcctgtctgtccgtgatcagtgcgccaggtcgtgtcctggtacttactccttggaagaatttacgagaccagatggtcagcgcgctccagcacggattctgggcaaacgttagatacccagcgccaaatgaaaaaactattgtcggttttgtgccctcatccataaaagacgtattaagtaacaccgatgccaaggtgcttgtctgcacgttcaccacactgactgaactccaaagatcctcgcctcaggagtacgccgcgctcgccgcatccgtcgatgccgttgtcgttgatgagtgccactacgaaccggcactacgctgggggaaggcggtgaaatcgcttaacaagcccatgatcctcatgactgcgacaccgtatcgcaatgacctaaagctgttccgcatcgagaacccaaaagaatccgtttttcatttttcacaccacgatgccgaagcggcaaagattattcgtccccttaagacgctatccctgcctgatgcgatggacgttccgaaactggctcaggaattctccgctgcttggaaggccgcggtacagtcgaatagtctgatcagcagcacacctcgggccatcatatgctgcaccagtgctgctgacatcaaggcagcagtggcagtgattcgcgacgcgggtcttgacgccattggcatacatgacacttttacagggaaggctggctcgcatttgttgaaggaagtccctgagaggcacagcgcggtgatctggattcatcagcacaaactaaccgaaggactggacgaccaccgattctgctgtgtcgccttcttcgggcctgttggcaatgaccgcaagctcattcagcaaatcggacgggttctgcgaaggggacgttcggatcgagaggactgtgcggctctactctacgcgccgaactacttaaatctgggtgatcgttggctggcgtaccgagagttcgaaaaaagcgtagaactcctgacagcgcagcactatcgcaatgttgtcgagcgtatgttggagagtcagccttccgtggagtacttcgatggtcgcttccggcgaaggtttcgtcaggatgtgcttgcagacaatcctcaggttgttattgcgccaagcgtgctcgtgcgcaggctaaagagcagcttttctctggaagaatatatcgaagactgcaccgacagtcttaaccttacagacgcaatcattcttggtgagccgaatgcgccgtgccagcgagcgacagacttcgcactatgggtctacgcatcgatagcaaattcccgtcttctggaagagacatcactgtatgaagtcagactcgaagtgcactgcgtagtcgttgctggcgactaccttctggtttcggacaccacaggtacttatcctgaagcgcttatcgatgtgtcgaccacagctcttggggcagccgagctatctcagttacttgatgcgtcgtacagcatcaccaatgtttccacgagcagcgctattccatttgacactgtgatcagggcgtcagttcatcgcggtcacgatctgaagctgatccctgcctcgctgactgaccgggttcagatctgcaaagcggcccgtggagcgtcggcaaaggggcgacgctacgttggtatgcatcgcgggcgggttcgtcaggatattcccgagcagcaaagacgacgccactctgtatctttgtttaaagaatgggcaacgtcaatcgcctcggcgctggcctcgacgcatgttgacaatatcgttttgcaaagatacatgcagacctgcaagccacctctaaaaccgcttccggtgacaatgtcgatcgatttgtcgcagtcgaagatccgcatctcttccgccgaaggcgaagaacttcgcatcgtagcttcttccgttgaggtcacgtcgccaaagagcgggccatccggcacaagcaccaatatgcacgagtgcacatacatattcgaagatctcgcggacccgccggtaagcgttgagctggaattgctcttggagtaccagcaagataagggtcgcttctggttcaagggaaagggcgttcgaggtgggtttggcgttcaagtcttcgaggacgacactgggagcagcgccaagtcgttcacggactacctgaaccagaatcaggagttggttctgatcggtcttcaggatggggccatggtttaccagggccgcaacttctacaaggttgactatgctcacgccgaggaatcccttttgcagcacttcagtcgcccacgcatcgctgcctgcgctaacgaaaagggctcgaccgatgagttagatgcagccaagaagcaaggtacgaaggccactgcctttatcccaggctctctcttcaaagcaatcgccgatggtgacgtatcgcccggattctcgcctgagttggtcatctgtgacgacttgggttcggagtgcgccgactttgtgctggccaacttcacgaatcgtcaaatcgcactagttcacgcaaaggctggaaagggtacgtcgatctcggcctcggcctttcacgatgtcgtcgcgcaagccatgaagaacttagtttacctagcgcgtggatcggagacgcctgacggggcaaagagttggacgaaatccaccttttggaacaacacgaagattccacggctatataaggcacccgcgaaatctccaacgggcatcgcgctgtggaggaagctacggagcgacatcatcgagcgggctgacgcgcagttgcatgtggttttagtgaccgctggctgctgcgaccttgatgcacttcagagggtgatcaaggatccctccaagagaaccgcagaaaccgcgcagctatttcacctgtttgatggtctggttggttacgctagacaattgggtgtgcgagtgaccgtgctggacgttcctcactaa

SEQ ID NO: 151773 - DNA, 2667 bp, Enterobacter cloacae
atggcagcagttatatctaaacagagttttcccgtcccttcagatgctaaaggtcaggagtttacttctgctgaagagttattattgaagcttgaacgcgaaaggtcgggactatatctggtgggaagtcagggaatgtggcatggcggtatccatattactgatgccaccattccctggtgtgccctgagtacagatagtgagcccgaaaaagaatattgccgtgaaccttataaaggggagcaatttattcgttgtatggctgatggtgagatagttgcctggcgtgtctgtaaggattatgagggggccgcgattgaatggcgcggtgaaaaactgtttctttcaacatcctttgtgttggtgaaacactatatccagccgggtgatacagaagaaagtggactgacatttttcactctgtatatgaatctggcgccctttgttgcttataaacagcagggaagccagtcagacagaaaagtggcaggagtccagcgttactacaccagcgtggaagatttgcaggcggggagcgcagccggaaaactggctaaagacacgcctgtcacgctgagtgatgccatagtgacccgcagaagcgacgggcgtcagtttactgaagtgaccattaccagtgagacgaaaaatgccgcaggagaaacgcttgcagcaggaacgaaagtctggacggtgtctgaccggggttcactgaaagcgtcgtcgtcagtgtccgttccctcctggtgggaaaaatgctctcctgcttacactactcagccagacggtatcgtgaactgtacctctcgtacagactgggcgtactacctgagcagtgaagatgtactgcaatataaaaatgcaggcaaactggcggcagatttcccgctttcttacgagcctggtaataccgcgcagcaggttgtccgttccggcaggaatcctggcgatgtcgcaagaacattcagtctggtcactctggggcgggataaggataagctgaaaaagggcgaccgggtatgggtagtgtcagacggcgacagtctgacgccggttgcaccggcagcatccggtagcgaacctgtttttaatgatgtgtatgtaccttcagcgcctgttccggtcaatgccggagacagtcttgggcatatgggtttttatcagctaccggaagaaaacggcaaacgctcgcgctaccaggtacatatagagtgcctgagcatggatgatatggagaagttcatcactaatcccggaagagcaggagaggatgcgccggtgtatctgacctggaaagctgatgcaccgttgtttgaaaagggtgagaggggaatggttgcgggcagtcgtaaaacaaagatatcgggtattgttacgcttgcaaaagtgccgggtgccgatgctgagggaaatgcactgacaaataaccagaatgcggcttattttcacatatacaaagaaaatggctggttacctgccgccagtgttctgaaagtgtcgcagtatgcgcttggtgagctcggctttgttactctgaataagacaccggagagttttgacctgataaatgggataaaacaaccggataacgtggtgaagggaatactggaacaactgtataaagcggcacaggatgaatcccgcaccagccatgcgctgaacaaatataattacgagcggttgctggagatgatcgacacaaaccaggacggctattactcggagcaggagtatcttcaggcagtgcataatgcgtcgtaccgtgatcgcctgtatcgtattattgcgaagcacgccagcgaatggtatcacgggaaggatgacccgctctggaaggcatacctggatacattaaccacggatgcgccgttatggaaaacgtatctggaagcgtttctggataagatgacatggatgaagacggtgtgtgaaaaaggtgtggtactggggccggagccgtggcatatgcatccggtggtgtttttggaggcgatgaaaccagtaaataaacaatgcttttgttataagcaagggattgttgaccgtccgtgtcaatcggggactgtagatgtaaccaaagatgactttgaagtgctagctgcgcagcttggtgttgagcgagaagtattaagagcaatcgcggtggctgaaactggtgacaaggtgccgtttagatactatgtaagaggtgagaggcacgcggcaattctttacgaaagacattttatgaagagaatctctctaaatttgggcgtaagtccagagactgttcgtgatatcgagtcttcagaaccagacattatgcattcctatgatagtagctatcgtcatggaagtgatagtgaacagtatcagcgattgttaagggctcgtgaaattaactatgatgctgcaaacatgtcttgttcttggggaaagttccaagtaatgggagaatattaccaccatctgtatggaacaactcaggaattagtggatgcacagaattattgtgcgatgcaacacctgcaatactttaaaacttttcttgttaacgaaaaaagaatgcttcaaccgatgaaggataaagattggctaaccattgccagaaagtataacggtactgggcagataggatatgatgaaataattgaaaatgcatataactctttaaaaaatgagtggtaa

SEQ ID NO: 151774 - DNA, 675 bp, Enterobacter cloacae
atgaaatcttacagtaaatatcttatgagtgttttattgattattctgtctttttctgtttttgcggaaaagtctagtatattaacgacagagaaaaacactgatggcagtgaatggctcatcgaaaaaaatggtgaaagctacaatcttaagtatataaatgcaaagggagatatttatagtaacgataaaataattacgtctgatattgaaggaagtggcttgtttttaaattctgaatcagatggtacggtatctttggtcatggattacccacgggatgtatatacattcaaattcacctcaggtaaaaaacctcttttcatatcagcatgtaagcaaataacactgccatcatcggaaaaccaggttgaagcgttactaaccttgtgttctaaagatgatgaaaagactggtctaaatttatcaagcctggatgtaagtaagcttctaaaatctgataatttagtacttaaaggtaaggttaaaacgcttattggaagcgataaggcttttttatatgatgagaataaaaaacaacagagaaataagccatatttgataaagggagatgttgttgagattttagagtataaaagctccatgctacatattaaatacacctccaaatccagaactgtcattgcctggataaaatttattgatattttgtaa

SEQ ID NO: 151775 - DNA, 1395 bp, Enterobacter cloacae
atgatatggaaaggttcatcaccaatcccgcgaggttggggggatgcaccggtttacctgacctggcagagggatgcgaccttatctgacaagagcgataccggaataacagcaggcagtcgaaaaacaaaggcaccagggagcctgacgcttgcaaaagtacccggaattgatgctgaggggaatacgctgaccagtaacaaggatgcggcatactatcagataagacccgaaggtggctggctggcggctgccagtgttcagaaagtgtcgcagtatgcgcttggtgagctcggctttgttactctgaataagacaccggagagttttgacctgataaatgggataaaacaaccggataacgtggtgaagggaatactggaacaactgtataaagcggcacaggatgaatcccgcaccagccatgcgctgaacaaatataattacgagcggttgctggagatgatcgacacaaaccaggacggctattactcggagcaggagtatcttcaggcagtgcataatgcgtcgtaccgtgatcgcctgtatcgtattattgcgaagcacgccagcgaatggtatcacgggaaggatgacccgctctggaaggcatacctggatacattaaccacggatgcgccgttatggaaaacgtatctggaagcgtttctggataagatgacatggatgaagacggtgtgtgaaaaaggtgtggtactggggccggagccgtggcatatgcatccgattgcatttttatcagctttattatccgatggtgatcaacttattacatacgagcaattaaaattaatgctcccttccgatcgagaaggtggaattagtatttatctggaaccgttgaatgaagctatgagattatttgaaataaatacaccattacgaaaatcgcattttatagctcaaattctccacgaaacaggttttttcagatatacagaagaaactgcttctggaaatgcatatgaaggtcgctgtgatcttggtaatattcatgtcggagatggcccactatttaaaggcaggggcttgttacagattactggccgtgatagttacacaaagtgccaggaatatctcaggactaagcttaatgacagtacgtttgacataacgtcgtcagtgtctagagcaaaacagttatcagaaaatccacggtatgccgcattagcatctggatatttttggaagtatataaaacctaagttaaatgctacagctgatagggacgatatttattgggtttcagtttatgtcaatggatgggcggtgcaagagcatccttattatccagacaaagctagagagccgaataatatgaatgatcgagttaataaattatctatcgccaagaatgtatttggtctggagtga

SEQ ID NO: 151776 - DNA, 354 bp, Enterobacter cloacae
atgggcaaaatttcaattagcggagcggtttttatctttctggccagaggcgaaaaactaaaggattctgactactttcccagtacaggaatgcctgaccaaaaatatgtgttgtggccacgcggtgaaggatgggacgtacgttatctggagttcggtacgagagggattgagtggttgccgattgcagaacaacttttcgccaatgagccggaggcatggcaagcggcatatggacattggatggaaatatgtaagcgctgggaaaattttttgactatttctggtgctgctcaacagcatagctcttttgactcgtgcgacacttttgcgacactggggcttgaaaagtaa

SEQ ID NO: 151777 - DNA, 636 bp, Enterobacter cloacae
atgctaggggcggtagcgttgtcaattgataaaacagttaaaaatttactttttcttgatatttgtggaacagtgaccaaagaaaatactactcttggttttttgcgaactatcggaataagagcaagtatgactgaacgcattataggttctattctttggcggtatttttcttatgattatttgcgacctaaattattaaaacgattggcaggaaaaaatcaagcagaactattgagtttatctaatgactatgttgcctcattagattatatcaatgaggttatagaaattatagacgattacaaactcaaaggctataagcttgtaattatatctgcaacgatcgatactatagcaaatgctattgcaaaaaaattcgatgcggttttatgttactcttccgttcttgagtatagagatggcacatgtactggacggctgtcgcacgaccttttggataataagcttagttatattaagcaccttttccaacataatacagcgattatcactgacaattatggagattatgagattgtcgcgcattgtgctgaagctttgggcatagcgcattgtaaaaatgatgaggttttttggggtaaaaacaaagttaactttattagagtcaaataa

SEQ ID NO: 151778 - DNA, 822 bp, Enterobacter cloacae; identical to SEQ ID NO: 16544

SEQ ID NO: 151779 - DNA, 2109 bp, Enterobacter cloacae; identical to SEQ ID NO: 16545

SEQ ID NO: 151780 - DNA, 564 bp, Enterobacter cloacae
  misc_feature (520)..(529): n is a, c, g, or t
atgagtgctacccggattcaagcagtttatcgtgatacgggggtagaggcttatcgtgataatccttttatcgaggccttaccaccattacaagagtcagtgaatagtgctgcatcactgaaatcctctttacagcttacttcctctgacttgcaaaagtcccgtgttatcagagctcataccatttgtcgtattccagatgactattttcagccattaggtacgcatttgctactaagtgagcgtatttcggtcatgattcgaggtggctacgtaggcagaaatcctaaaacaggagatttacaaaagcatttacaaaatggttatgagcgtgttcaaacgggagagttggagacatttcgctttgaggaggcacgatctacggcacaaagcttattgttaattggttgttctggtagtgggaagacgacctctcttcatcgtattctagccacgtatcctcaggtgatttaccatcgtgaactcaatgtagagcaggtggtgtatttgaaaatagacnnnnnnnnnnaaatctgcttgaattttttcagagcgttggattga

SEQ ID NO: 151781 - DNA, 174 bp, Enterobacter cloacae
gtggacgccaccacggagattaaggtggcgctgcgcctcgccggaacgccgataggcccgaacgacacggcgatcgccgggcatgccattgcggccggcgccgtactggtgacaaataatgtgcgggagtttgagcgggtgccggatctggtgctggaagactgggtaagataa

SEQ ID NO: 151782 - DNA, 714 bp, Enterobacter cloacae
atgacggcatacggaacggagtttttctcaatgaacgatgtaaaccgactcaggatccttcaggacgttatcgaccgccgtcttaccacacgtcttgcagcaacccggcttgagatatctgacagacactgccgacggttgctggagcgctatcgtgaacatgggccgctttcacttgttaaccgtcgtcgtggccagcccggcaaccggcaactcatgccgggcctcgctgaacgagcactgcgtattatccgcgaacgttacgctgattttggcccgactttagcctgtgagaagcttgccgaggttcatgggctgtatctggccaaagagacggtacgcaagctgatgactcaggctggtttatggatcccccgcaagttacggccgccgcgtgtacatcagccacgaccgcgtcgggcctgcaccggagaactcatccagattgatggctgtgagcatcgctggttcgaggatcgtggtccggtctgcacactgctcgtttacgttgatgatgcgacgagccggctgatgcagcttctgttcgtcagttctgagtccactttcacctattttgaaaccaccccacctagggctatctggagcgttacggtaagcctctggcgttctacagtgacaaggccagtgtcttcaggatcaacaacaagcaggccaccggcggagatggtcagactcagtttggtcgtgccatga

SEQ ID NO: 151783 - DNA, 1155 bp, Enterobacter cloacae
atgaatagatacttaattgtcgatgatgacatcaaccgcggtttaaaaattaaaaaattactcataagcaatcatcgaatccctgaagaatttattgactatgccgagtgcgttaacgaagctacgtcatttttgagaagaactttttatacaattatttttgtcgatgttgcacttcctcagcttaggagaggtgagatcgatccaattgcaggtttgaatattgtacaggcaataattaacaataggctaaagcgccctggtaatatatttgcctattctggtatagaagatgaaatcgagagtcataaacaaaaatactataaggaaactggcttcgaattactttattgtccagctaatgatttttcatggcttgaaaatagaaaggctattatagattacaatgcagcattgtttaatggcttagaaaacaagaattctgatattgtaattcttacactacatggtatacgtacatatggtaaatggcaagataagctcgcggaaatctgtaaaagtagtgaagattttacgtcagttaaaaatcttccatttaaatatacactaatttctacattgtctttccttataccatcaagaagaaaacttgtcgttgatgattttaaaaaagtactaaacgaatatttggaaaataatcgttccagaagaattatttgcataggccatagtttcggaacttatattttgatgtatgctcttaaagaattagaggaccgctcattgttaaaagagctagatttgattgtcctttgtggctctgttctagataggacctttaatttcgattttttggattttaatgataatttagtaatcattaacgaatgtgctgtacacgatttacctcttgcaataaatgaagcatttgtacctgacgtgggtttggcaggtgttacgggcttcaatggattttccggcaagaatgtattcaatagatatcacgctgggggacatagttctttctttgagaacgattttatggagaaacactggttgcctattttcctaaatccacagcaaataaatcatatcaatgagggtgattcacaaagttatctttataagattttcgcattgaagttttgcactttcataggaatgattaaaagaaaattctattcgttattttaa

SEQ ID NO: 151784 - DNA, 441 bp, Enterobacter cloacae
atgaatattctaattattgaagacaatgagtataaaacacaaaaaataattgattttatctcatcagaatttccagaatcaatcatctcttctagccgttcatattcaagcggaattagtctgttgagctccgagtcttttgattttgctatcattgatatgagcttgccaacatttgataaagatgcaggaatgccatcaagtgaatttcgtacttttggggggatggatatagcaaaatttattaaaagaaaaaaactcacattacaatatatacttttaactcaatacatatcctttgcttcagacgataaaagctatgaccttactaacattgaaaagatgatgactgataaatatccagaaaattataggggttgtataaaatatgataattcaagtattgtttggaaagaagctgttaaagagttaatggtgtaa

SEQ ID NO: 151785 - DNA, 753 bp, Enterobacter cloacae
atggattacaagggatttgtagaagttataaaggattttatatggctaattctagaaacttcattccatctagtaagaagatttagtaatgaagtgatcaaaccagcatttgctaaagagtgtgatgatttaattgctaaaataaataatattccagaggcatcctctaaaagcaatataatcaataaaatcacactggcaaaatttaacgtcaatgaaaaactttctgattttgaagagtggtttcgaaagccggtgcatgaattagatgaagatgttgaaataggcgctattttgcaagcttccaaagaatatattgatggtatttacacacctcaggtaattgatatgactttcaacatccaagaagatctttcgtgggtaatgaataataaatcgcttcttggtttaacaagatctctagttaccatgtacatgaattgtttaaaacatggtattcataaggccggcactcatatctatgtatcggtaaccagtgaagaagacggaaaggttatcaaagtatgcaatcaaatcagtgaaattcagttcaatgagttatcagaagccaataagattcaaggaattgctgatttcgaaagtcaaatagataatattaagcttacaaacgaaggagggacagggctatataaagtatataaaaacatctccgacgcattttctgatgctcgattttatatagagctagaagacaacatgttcaagcagattatcaacttccagaaggcttag

SEQ ID NO: 151786 - DNA, 462 bp, Enterobacter cloacae
atgaataagaaagacaacacactcttaagacttgagatagccttagaccgaattttatgtggcgagccaaagagaattttacaatctcggaaacttagtgttcgtgctgtagaggttgaatctggcctcggtaatggaagtgcatattactaccctgaaattattgaaaaaatcacgaaaatcaagcaagagagtaattctccctttgccgtaagcagtccaaaaaatcaacaaaaaaaatggaagcagaaagcacttgaagcggaacgattaaaaaacaaattccgagatgaaaacattgcattgaaaacttttaatgcacaaattgccgcggaccaatacaagcaaatgagttctttaagagatgcattacatcatatattggaacttgaaaaaataattgacagactaaattcagaacttattgagacgaaaagaaaaaacattaccctactcaaatag

SEQ ID NO: 151787 - DNA, 2094 bp, Enterobacter cloacae
atgagaaaacatactctggaaatctatttgcctgacaatattaatgagaatcattgtccagaaacttgtgatgtagtctctcttcatagagctcaatgcttcaaagagttaaatgatgttgctatttgtatggatgacaaggggagtatagctgccaagtttggtgatattatctggaattgctcccctttaataataactaaaaacttaacacataaacaaattaatttctccgaacttaagtctcattcatcactattatacgaaatgaaacttatctgttatggttggttatttacaaaaaatatgaaatacagttcccccacaaaaacatcaacaatcatttccagatcatcaggtttgaagaaaagttataattttcttatgttaaataatctcgacagcatttctcgcataagcgaacctgcaacatgggaaaaatatttatctttccttgaaggtgaaagaatgagcgcaggaacaatagttcatatactttctgctcttcaacaagctcatcagatgttcccttggatgggatttgattaccctgaaataatattcaaaccaacacctttaagtaaaaagatatgccgagaagaagcaaccgaaagagaacagacattagccataccggaaggtatcgcagataaattattacacaatgcggtaaatctcgtcgaaactgcgtggcaacatagagacaagctgggtgaaacggagcgacgtcttcaggaaaactacaaactaggagaacaagaagttcataataaaataaaatcgggacaatggaaatggctaacggttcaagaaggtacccctgaatttaggcatcattttgccaaagaaacttcccatttttcccccttcaaaccatccgatatcatttcagaacttcttggtgaataccctgaccggccgaccgatgctaatggagcctggtggcatctgcagcgcgggaatcttacggccgcttgttttgtttgctgcgcagcattctccggtatgcgcgaaagtgaactttttgagctaacttcggatagttattacaatgctatatacagcggtagaacctttcattttctaaaagggaaaacccataaaataggggaaaagcatactgagtgggttgtagctcctatcgttcaaaaagcggtggaacttatgagcgtattaacaaaacatttaagagagttcttgctacaagaagcattaaccgagagggacaaagaacttgcacaatgcctttggctttcccaagggcagcgctctactgaccccaaaagaatatcgtgctggattttacggcttaggaatttctccaaatatgctggtgcaatagtttcggaaaaagattatgcagaatgtcttcgagccaaccccaatagccaagaaaagattaagaaccatgttcatgttggaatacactggaaactttcccctcatcaattcagaagaactcttgctttttttacaattaaaaacagattggggaatgctatagccatcaaacaacaatttaagcatctctatctacagatgtctgaatggtattgcgaaggtggtatcccttcacgcctggatgaagtagaagctgaccaagaattacagaaaatgatagatacaataggtaatgagcaaattacccaaaagtactggtcttggtttcatggtactgaagtactctctggaagtcatgggaaagatattcttaaattgagggatgatttaccagtcatgtttaacagttgggatcaagtttataaactggtgaaagataaaaaaatcactttgcacggaacgctacatggctattgtaagaatggatatgactgtgagatggatggggtcgtcaaccctgcattctgcgtagattgcagtacacatggaagtattatagatagcgagcaggcagcatggtggaaaagcaaacatgaaactttagtcttatacctaactgaaaacacaggagtatcaatggcggtttatactcattgcattacgcaaattcgtgcggctgagaaagtgatgtctgacttttcaatagaatatcgaccctatcaacctgaaatagagatcaggacagatgaataa

SEQ ID NO: 151788 - DNA, 1722 bp, Enterobacter cloacae
atgattgaaaaaagaccccctctttctgatgaaattttatcaatacaagttactgacggaggtaactgtttaaaaaatctatatttcaatcgctacaactatttatatttcccgtcatttcgcactattctaagaggggaatgcgttgttgtacccagagaaattagcgctgaaagtatatacattgctttcaaagatagcagctatgctccggcttcaaaattttctttgtttgaggcttttagacaatacatctatttttgcgatgcaaacaatcacccaacctttactaataaatccgtgttcgcttatagtgattaccttatatataaaaataaatgtggggaaataaaaaacagttcatacactactgcaataagtaccactaagaaacttttcgctttgcttgatttacctgagagatggtttgatgaactcccaacattaggaagatctcagtcagagtcatataaatcctacagcgataacgatttaaaaaaattacttccattgctacgggcttttttcaaacaactttccaaacaatttcttcagaagccaaagatttatatgtcacaaggtaaaaataatacgccaatgaattttatatgggaagggagagtatactctatatatggaagcatcagtcaattaatgacttgtggtgtatatttaatgtcatactatacttgggccaacactactacactgcttgcaattgaaaggcccagaatatcaaaaaacaatttaaatgaagtttggtaccaaatgcccgcatttaaacgccgagcatttagagttatcacagttcaaattggagaccacggacaactaaacgtcccaaaatattcactggaatttttcaaccaacttcttaaagtttcaaaagcaatttcagttagtagcaatttactttttcagactgcgtcacttaatcgtaccgctcgattaacagcatatcatatgcaaaacttcaataaattcctgtatgagacatttaatttaaccgatgataaaggatttagcttaacacctattgtatcgaggttccgtgcaactggcagtcaattgatacaattacatcactctcacatacagagtgcatctctcttagggaatttaccgcaaacgacccgcagatattactctgaaggaaatgaatacgaaaatcagtcaatgatccaagagacagtatctattttagcagataaagcaaagcatggtggaaacgtacagcaatcaaaatcaagaataaaaaatgaacttaatgttgaaattttaacatatgaaaacatgcttaaaatgaagtcacccccgatgcgacaagcccatggtagttattgcaaaaacccgtttggggaacaagcgaaaagatttttacaacgagcacaaagacatgacttaatttctacagaaaagtttgcctgctcagatctgttgatatgcttctcctgccctcatcaagttattgttgccgaacctactgacatctggtgtttattaagttttaaagaatgtatagaagagagtatttataagcacgttaatcactaccatttccaccaaaattatgactctgtcttgacattaatagaaaagatattgctgaatattgataaaaaaaccctttcaaaagcaactcaaaaattgctggacgaggggcctcatcctttatggcaagatcaatcatttctttacccatttaatagtaaggaagcatga

SEQ ID NO: 151789 - DNA, 1311 bp, Enterobacter cloacae
atggcccgaattatacattctgccagagtcacacatggtgctagggcaaaaatcagtttcgactcaatagattattgcgatggcattgaaataggcagcctgcctacgctttacaatgaacatggtcagtttgttgaaattgtaaatttgtggtttttggatcttaagacagtcaaaaggttagaagatataagctcttctgccagggcactgcttcgttactggtcgtttctagaacgtgaagagcttgaatggaatcatttccctccagttaagcgtttgaagcccacataccgcttccgcaccaatgacttattaaatgctgttaaagaagggactctcgctttcacaacagcaaatacttatatagggcatgtggttcaattttatctatggacaattgaaaatcatcaccttgttatttcagatgaaaaagaagctccttttaccattgagtttgttgaacgtaggaacaatgatgtactagctcatcttcgaccgaaaattagcgtgcaaacaagcgatttacgtatccgtgtccccaaagtcgccaatgccgaagttcagtcattaacgccattatctcaagaacatctttccttactttcatcgaacctgtgtcatcaatctaccgaatttatgcttatggttttgcttgcttgtaaaagtggattgagacttcgtgaagtgtgcagcctcacaattgaagcactgtctcaagctaggcccgccaacgaactaaagttgcgttatatgatcaccattggccctcaaaatggggttgagacaaaattcagaaaaaaaaggacgatagaagtaccctctcccctattaaacgcattacaacgctacgccttgtcagaaagaaggcaaaaaagactttcaaaattacatgcaaaaatagccaagcaagaaatatctagggtcaaaatttcggacaatattaagaaatcccttaagaaagcctctcgatttgaacctctttttatcagtcagcaaggaaattgcagccaaccagaagttctaaactcacgatgggtagcattcaggaatgaactcgctaaaaaagagcctggctttcgctatcggtttcatgacctccgaagtacttatgccacatacagactacaagacctgctggaaagtagtcttaccgagggagaggctcttgactgcattatgggatggatggggcataataacgaaagaactacatttaaatatatccgctacttgaaaaaaaatgaaatgttcaaatatgtcttctcactgctggattcagtgatggataatgccataaggggcaattaa

SEQ ID NO: 151790 - DNA, 570 bp, Enterobacter cloacae
atgacaaccatgacgcgggaaaggctgctcagtgaggccgaatatctgatgcgcgaaaaaggctattcggcattcagttatgctgatttgtctaaaattgtcggcattaccaaggccagcattcatcaccattttccgaccaaagatattctgggcgaagaagtggtgattcaggcattggcggatactcaacgcatgtttgaacagattgaggcctcagaaaaaacagccgcgcaaagaatagctgcttatgttgacctttttgcccagagtcatcgcgcatcattgttaccgctgtgctgtgcattgtcagctgagacagccaatctgcccagcaatatcactgaccagacgtcgcgctatttcgatatgcagattgagtggctgatgagcgttgtttcacgtggaattgctgccggtgagattgcgccgcaaggtgaagcctctgacctggctttgatgatcattaacctttgcgaaggtgcaagcgtcgtggcccgtgctacggcgaggccagaagtttttagtagcagcctcaaatacataaagctgctccttaatacccgttaa

SEQ ID NO: 151791 - DNA, 846 bp, Enterobacter cloacae
atggctaaaactgcactcgccctgaaagtatgtctggccatgttggctttcgcggcaaactctattctttgccggttggcactcaagggtggacatattgaccctttttccttcagcagcttacgcttgcttagcggtgcgttggttctgctgccttttctgtttcttcacacccgcacctccctgtccgtatggcgtccattaagtgggttctatctgatggtgtatgcggttctcttttcagtcgcctacatccacctcgatacgggcgccggggcgttgttactttttggtgccgtgcagtttgcgatggtgatgtacggattatttaagggagagtcactgtcagtattgcgagcaagcggtcttatgctcgcattagcgggcattgccatacttttgttacccggagctaaagcgccccccatttttagcgcggttctgatgattgtggccgggttagcctgggctgcatattcgataacggggaggaagacacaaaacgcgggtgcatccacggcggcaaactttgttatggccgttccaatggcgctcattctttcagtgctgtctataaaagagggtcactacgatgccgcgggaattagtctgtcattgctatcaggagccgtcgcatcagccggagcctacgtgctgtggtacacccttttaccctccctcgcctcgattacggcaagcacacttcagctcagcgtcccttgccttgccatgctgggaggggtcgtgtttctcggtgaatcgttgacttccagaatggtattttcagccctcgccgtactggttggtatagtgatggtgactcaggaaaagaaaccgacagtctga

SEQ ID NO: 151792 - DNA, 1209 bp, Enterobacter cloacae
atgaggaatatgcatcgacaggtcctgatacttgcaggttctcaggccatctttcaatccatagcggtactgataatgactatcggtgggcttgcaggtgcgcttcttgcccccggccccgcgctgagcaccgtaccgctcgcaatggcaagtcttggcactgtgttagtgatgtttcctgcatcgttatggatgagccggataggcaggaaaaccggctttataaccggtgctctgagcggaattatgtcggctattatttccatggcggcaatgatccaatattccttcattctgctgtgtattggtatgttctttctggggatttatcaggcgttcgctcagttttatcgctttgccgccggtgaagtcgttctcccggcattccggactaaagctatttcgctggtattggctggaggtgtcgttgccgctctgcttggcccgtttctggcaagcttcggaagcgcattttttagcgtttcctatgcagggtcattcctctttatgggaataatggcttcggtgggtctgttgctattatcacgtttacagataccggttcagtcaatggaagcttctgaacacgttatcgcgaggtcatggaaaaaagtcgtttttcagcccgcttatcttgttgcccttttttccggcgcgtcaggatttggaattatggtactgggcctgaccgcgacacctatcgcgatgaagcactacgattttgacttgcctcaaattgctaccgtgatacagctccacatactgggccggtttgtaccgtcattcttcaccggaaaactgatcgaccgatttggcgtcattaacattatgctggcgggcattcttctcatgcttgcttaccttgctctggcgttttcaggcgtcacctggggagtgtttacgggtgcattaatattgatgggaatcggttggaactttctctatgtcggcggaaccagcttattggcaacaacttacactacagaggaaaagggggttgcgcaggcgaccaatgacatgagcgtctttatcttcagcctgatttgttcgctgggtgccggcccactgctaaatgcttatggctggaaaaccatgcacctccttttagtaccctgggtcctgtttcttatggtgccgctactgtggctcgctgtgcgtaaaaaacgtcaggataacgctgagaatgaggtcactttaccactgcagtaa

SEQ ID NO: 151793 - DNA, 489 bp, Enterobacter cloacae
atgaaaaatgctctgattgttattgatattcagaatgattatttcccgggcggagcctttccgcttgaggagcctgagctagcctgtaaagctgcaatgactgcgattgaaaaagcgcgcaaagaaggttggcttatcgtcggcatccagcatattgcaacgcccgaagctcctttcttcaaacctgacagtaaaggcgcgaacattcatccggatgttgttgctgcactgggaaatgcacccgtgattatcaagaaagaggcagacagcttcttcgaaaccagccttgagcagttgctacgtgagaatggcatcactgatatctatcttaccggcatgatgacgcagcactgtgtcacacatactgcgctttccccgcaagctcagggcatgaagatgcatatcattgcgcaagcatgcgctgcacccaccaaagctctgagcgatcttgccctgttcggactgagtgcacgctgcaatgtgagttaa

SEQ ID NO: 151794 - DNA, 780 bp, Enterobacter cloacae
atgaaattaacgcaaatccgcaacgccacgctggtactggaatatgccggtaaaaaattccttatcgatcctatgctggccgaaaaagaagcctgggacggctttgctggaagtgcacgcccacatctgcgtaatccaatggtggccttgcctgtggccgttaaggatttactgacggttgatgccgttatcctgactcacacccataccgatcactgggatgaggctgcccagcaggctattcccaaagacatgcttatctacacgcaggatgaaaaagatgcggcacttctccgctctcagggctttctcaacattcgcgttctgaaagaggaaaatcatttcgtagacggcatgactatttacaaaaccgacggccagcatggcagcaacgaattgtacgctgatgcccagtggggtgagctactcggtgatgcatgtgggctggtcttcactcaccatgatgaaaaaacgttgtatatcgcgggtgatactgtctgggttaagccttacgcaaaaaacctgcaacgtttcaaaccggagattgtggtgctgaacaccggttatgcggtaaatgacctttacggtccgattatcatgggcaaagaggacacactgcgcacactgaaaatgttgcccaatgccaccgtcgtggcgtctcatatggaatcgattaatcattgccttcttacccgtgcggaacttcgcgagttcacgcttgaacatggtattgaagataaggttctgattcccgcagacggcgagacaatggctttctga

SEQ ID NO: 151795 - DNA, 975 bp, Enterobacter cloacae
atgtctgcactgacggtcgccgtgattgccacggccggatttagcccatttcacttttcagtcccttgtattattttcgggcagtctatgccgcaaccggatttattctgcgtcgaaatctgcgctgaaaaccctggcgttgttatgtctgatatgggcctgtccatcaacgtggagcatggacttgagctgctggacaccgcagacattattatcgtgccttactggaatcatccggaagaaaaaccatctcaggccctgctggatgggttaataaaagcatggcagcgtggtgcagaagtggtgggactttgtctcggtgcttacgtacttgcctattccggcttactggatgggcaccgtgctgccacacactgggaatacgaacaggactttattgaacgatttcctgctgtccatctggacagcaactcgctgtataccagtgatgaacgtctgattacctcagcgggcaccgccgccggtattgattgctgcctgaatattatccgtgaccattacggttctgctatagctaaccgggtggcaagaagaatggttgttccaccttaccgggaaggtggccaggcccagtttattgaacgcccggtcccggtatcgacccgggatagcaaaatgaatgaactgatagagtatctgcgccgtaacctggacaagcctcatgatctcgactcacttgccgggtttgtcagcatgagtcgacgaacgttaacgcgtcattttttcagggcagccggaacgacgcttggcgattggctgaacgcggaacgccttcagagaagtcaggagttactggaaacgacaaacattagtattgaacgtgtatccgaaatggtgggttttcagtcgccagtctcatttcgtcagagcttcaaagcgagattcagcgtcagtccaagcgaatggcgtagagcttttcgagggcctgcgcctgttgatgtcgacgtgaagtga

SEQ ID NO: 151796 - DNA, 876 bp, Enterobacter cloacae
atgcgtcatcataatctctcaacgtatgttgttgatgtgccaggtataattcctgaagaaatgcattatccgcaatatctccgcgtatggtatgccgtgacacaactaaattccgcttctgctaaaaatattgttcagtggatccgtaacagcaacgcccccctgaaagagagcgagattcgtattcaactggatgcattaaccgttaatagcaactcccgatatcgatatcttggtagccgaaaaagcgcccggactgacctgggtagcccatacgacttgttatttcgtagcggaaacctacgaaatacacggtatgaacagtatgtgcaggagctgcacggcatatgggacattggcgatgatggtaggacgccaattcagattgccgccccaaggccaggcgatcggatggtagttgaagcgagagatgaattattcaatgaattgcctgacgatgaaggtgactttcgcctcaaagcactacgtgaggtcattattcgagaagggcaaccagtatttagacgaaagctcattgaagcttatgagggtaaatgcgcagtaacgggctgttcaatccaagtgttgcttgaagctgcacatatcaccccctacgcaggagcttggcatacccgtgctcagcatggcctgttactgaaaacagatatccatactctatttgaccgtggtttgctctggattgataccgagttgaaaataaggatatcagaacagttggccgggacagaatatgcagagttagatggccgatatctcaggttacctaaagataagcaaaactggccgttaacaactcatctgataaatcatcggcaatattggattgaaaatcgtaatgatgttgaaagtgcttaa

SEQ ID NO: 151797 - DNA, 267 bp, Enterobacter cloacae
atgaaacctgaattcgaatttggtgattatgcgctgattgagcaaaagcgctttggcgttccaaacgaaatgtttgtctacaaagtcattagccagattagctccaatacctgggttgaagtgcctgtcaccgttggcaagaaagaggaaatccactacgactctgagcctgtttgtttatgcatttgctgtggtgttgatgaaacagaggtcaggcgatatcgagtaaaagacatgcagcattatccgagggaggccgcccaatga

SEQ ID NO: 151798 - DNA, 420 bp, Enterobacter cloacae
atgttaagtgcatgtgtcgaacacaaacagaacagaaaatacggaattaccacgactaaggttaacggtaaaacggtatcaataaagcttcacaggaaggcttattgcgaggcaaacggactcacattggatgacattcgcggcttaattgttatgcacgagtgtgacaacccaaagtgtatcaatccttctcacctacgaattggcacccatcaggacaatatgagtgatatggcacttaagggtagaagttgtcaccgtcacggcgagttaaacccaagagcgaaattaagtagttctgacgttgatgaaataaaacggcttaagggaaagaaaacgcaaaaacagattgccgatatgttcaacgtcagcaaatcacatatcggcagaattcagaggggcgatcgctggggtggttaa

SEQ ID NO: 151799 - DNA, 309 bp, Enterobacter cloacae
atggagtaccgcgaacgaagcgagtcgttgggcctctctgatctgctgctggtttaccatgatttcctcttggccttatcgcggcgaacggaacggttaatacaagacttctgcgctaatgggcggtggatggccgccggttgtcataacgaaacaggctctttgaacccgtttgggtatgaaaaaagccgctggttaggcggctttgattgctcgaattgttgtccaagtcacggagtgctccgccgtcagtttgaagtggcgctcgcactcatggcattgatgctcttcctggcaggcgtcgtatga

SEQ ID NO: 151800 - DNA, 456 bp, Enterobacter cloacae
atgattctcccaaaagacggcatcaagctacatcgtggcaatattaatgctatcacccagcaccttcacccacttctgaatgacgggcaatgcttccgccttcaaattaagccgtggagagagaagcgcagcctgtctcaaaattcacttcttcatatgtggctggctgaaatcagtgaatacctgattaaatccgggcgcactgacgctaccccagagtgggttaagcgcaacctcaaaaagacctatctcggctgcgaagaggtgacttataccgacttcatcaccggtgagaagaccaccacctgggagccgcgccacaccgcagacctcgacaccggggaaatgcatatcttcctggtgaaggttgaaatgtggtgcgctcagttcggcctggcgctgactatcccgaccggctgcgagtaccagcaactgcgcgataagcaggaggcctga

SEQ ID NO: 151801 - DNA, 240 bp, Enterobacter cloacae
atgttcaatattattattcttaaaggtgaatttggtacttttgttgatgttcaaaagtatagtggtgaaattccacccagcacaacatctctaaagctagatggagaaactttcaagctatccctttacgagttaaatgacagacagtatttaattgcacatcagcacgatgttacagaggaaaacagatccgctgtagatgacgccatcattcagttgaacatcaaaccagttggttga

SEQ ID NO: 151802 - DNA, 402 bp, Enterobacter cloacae
atgagaaataatccaagtaagcacgatatccatttttttgataaatatattaaatggctctcaagcaaacccataatgatctctgcctggctattaactatggcggctggggttgttgcttcttactgcttaaaacagtggtctatattacccagatttggttgcatggggataatgattggaactcttttgacattatcccctctttttgctcaaggagtttacctgtctcgttctgaggcggctattgcattcgggcatgaggatgaagatgggaatttggtagtaacaagcccaaaaggtagggcggtgtcgagaaatatactttatggtgttttgatgattgttatttcatcgattatcaatgcttttggagatcttttaggttattactatgcctga

SEQ ID NO: 151803 - DNA, 390 bp, Enterobacter cloacae
atggggttcccgagtccagctgctgattacgttgaatcacgcctctcacttgatgagacgcttatccagaaaccagccgctacgtactacatgcgggcgggtgagactatctaccgctgcggcatcatgaaagatgccctccttgtcatcgattcgtcgcttaagccttgtgacggatcgcttcttatctgtgactgcaacggtgagtttaaagtaaagaggtatcgcacatacccgcaaccgcaccttgagaatgtggcaaatgggagaaaggagaggctacctggcaacgacgaaggtatcagcggagcgctaccaatatttggagtcatcacgtacataatcaacgatgcgcgctctggcgagttcgacgactgcccggtgatgtaa

SEQ ID NO: 151804 - DNA, 1290 bp, Enterobacter cloacae
atggctcgattgataacgacaaccccggtatcaatcggcggaaaaacatctttctcaggagcagtaatccatttcaacgaacagagaacacttcccccattgcctgccttgtatgatgcagcaggatactatgtcaactcagtgaacctctggttcatttcactcgtttcagaaagaatgcttcaggacctcagttcctgttccagagcacttttacgctactggcgttttctggagcgcacagatatacaatgggactttatgcctttttctcgtgcggataagcccctttacctttttcgaaatacagacttattgcctgcaatcaataatggagacctggcgtattcaaccgccagtacctacatggggcatattattcagttttataattgggcagtatcaaacaacctgttaaaaacagacgagaaacatgcaccgttcggggtggatattattcacattcagaaccccgatgaacccggaaaatttcagcgacgctcgatgaccatcccttatgacctccgaatccgcagcccccgaaaaacaaatatcaatggtgccgcgtctctgaatcccttaagccttgaagaattgtctctgatgtttcaccaactcccgtcaacatctgttgaattccgattgatatgcacgctggcgctacagtcgggactcagactggaggaggcttgtggattcactgttgatgctctctttcaggcagccccaaccagccatctcaaaaaccggtaccttattcggatcggccctgaaaatgggattccaacgaagtattctaaaacgcgtaaaattgaaatatctgcttccttactggaaagtctgaaggaatatgtcatacaggagcgcagattacgccgactgaatgcactattaaacagacgatctgttgcaccggaaacgaagaatacccggtgccggttcgaacccctgttcatcagccagcagggaaatccagtcactccggcagttttcgctacccgctgggcagagttcaggacccatctaaaaacgtttgtcccaacgttcagacataaattccacgatttacgctgcacctacgccactttgcgtttgcaacacttactcgatgctggcctggccccacatgaggctatggatctgctgatgggatggatggggcataacaacgaagccaccacctggaagtacctgacttatctgagatacgaaacactgcttaaggataaatttgagatgatggataacatcatgcacctcaccctgaaggagcctcccggtgataaataa

SEQ ID NO: 151805 - DNA, 1698 bp, Enterobacter cloacae
gtgataaataacccctgggatccacacctctgtcttaagtgtttgcacaatgagcgaaaaaatttgcttctcgactttaatcgcctgagatacctgcatattcccctcactcggacgattcaggggtgcggtaagctaacatttgcccaccgagacccgtgggttcgctctatgatatcagcattaaaacaaagaaatgatttaagcagcgccactaaagggacgctatttacgttcatgatatcccacacccggttatgtgaccgtgctcaactgacgcctttctctgcggaagccgtgcagttgcaggcacagttctttactgaccaaaacaggaaaggaaagctgaaagatacttctctggtaggcctgcgttcccagctctcatcctgtctgaacctgcttggtcttccagccgaagcactgatgagcgatgtccctgtcttcagtcgattacagcgtgtaccggtacagggttacagcaccacagagctcagacgcttactgccgttactgcggggaatgtttaaacagctatcaggtcagtttatcgctgaccctgcaaaacacatcaacgcctacagaaccactccgtccatgcacttcaactggcaaggagtgatttacccggtctgtggagggatcagcaagctgatgtgctgcgcgctttatcttctggcctactatacttggtcaaatacttcggttcttttgtccctgaagcgaccacataacagtgcacgttctgtttcagagagctggtaccggatgccggcgtttaagagacgggctttcagaacagtgaccgtttatttcaccgggcatgaccacctggatattcccaaatattcactgcagttctttgaccagctcacggccgtttcccgcctgctgagcgatgaacccgaaacctttctcctcaaaacagcagtcaacggtaagattgtcccctttccaataaccgcattatcgacatttaatcggcgatttatttccggtgttctggggattaaagatgacagcggcgcgcctcttcatctgactgccgcccgcttcagggcgaccgggagtatgctctcgcttaccagatatgatccgctgcaaaccagtgtgttacttgataacacacctgcagttgtaaatacgcactacgccagtggaaataagcacgataacaacagaatgctgcgtgacgtcaccgccgtgctcgaataccagtcacgacaccgctcaggaatcgaagccgctgaagatgagctcaggaagcaactggacatacctgtactgacgtataaagcctacctggaaagcgtctcccgccccctgagaagtgcacatggatgctactgctctgctcctgaaggtactgaaagtcgaaaattcacactacagtccctcacccatcaactggtcggtaacggcgagctactggcctgtgccagtttgctgaactgttttgcctgtcgacaccaggtgcttgtggagtcagagaccgatatatggtgtctgctcagcttcagagacacattgcggaattcccgggaacaccatcttaatctgaatcattaccagaaaaatttcctgacgttgctcagttcactggatgaaagaatcaaactgctgaacaccgatatggtgagacgagcagaacggcggctgaaaaatcacggtcctcacccactctggacaacggagtaa

SEQ ID NO: 151806 - DNA, 2124 bp, Enterobacter cloacae
atggcatacaaagtcccgccgctggccattgaaatccctgaggggagttcgcaggcatttataccaggaacatcagacattatcgccctggtaaaatcaggtaaccggaatgcactgaacaggaccgtcatctgttatgacaatgacgggcatcccgtcgctttatttggccaagacacatggaactgcaggccttatgctcacacaaaggaatccagagtaagcaaaaatcgactcagatttgcttatctgaattcatgtcccgaccttcagcttgaagcgaaaatcattgtttatggctggttatttcatcgctcatccacgcgttcgcgtccggctaagttctcctcgatagaatcccgttgcaatacaccgcttaatgagattttttcttttttagcggaaaacaagcacaacagtatcgtcgcgctgaatcagaccggggtatggcagtcctttcttgcgtgggtgcaagctaaagactggtctcatatttccgtcgggcatgtgttgcggacgctccgttttattgccaaaaacgcctgttggcataacatcagactgatacttcccgaatttaaggtcgacgaccttgctggacgactctgccacaacgaacggcgtacacatcagcagattctggctctcccgcaatctgtcgcagacaccctctacggtgaagctattcgctttgtcgaatcagcatggccgcacagactttcactggaagaaaccgaaaggcggcttcaggaaaactatctccaggctaaatccatcgtggatgcttatcttgctgagggtcattttcctgccctagttaatcctgaaggggaaattacagataagcaccggtacagtctgaccataaagtcttttctgcgcgagcgtgtgcaggatacgattcattcctgtctcgggccctccggactactccccggggaaaaagccgacggtgactggcttaaaaagttccggggacaactcctgacgtcctgtttcatttgctgcgcggcgttcagtggcatgcgactcagcgaactttttgaactgacaaaagacagttttcatactgaggtcatcgggggagaaacattcttccttctgaaaggcagaaccttcaaatttggcgaaaagcaggagacctgggtcaccagcccgataacggagaaagccattcaactggccacctccctgacccggctggcccgatgtcagttggaggacgctgcaaaatggagtactggaatctcagaaaaagaacactacctaaatctttcacgttcactctggctgagccagacataccgttcacgccttcccgttctgattattcgctggaacgcccgtctgcaggcattttccaggcaagtctcagccaccattgataacgacacactgagggaatgtattaccctgaatccaaacagtaggctacggacagaaaaactccagaacagtaacaccaactggccaatgaccactcatatgttcagacgaacactggccgtctttgctgtcaaaaataacttaggaagcgccattgccatcaaacagcagtttggccatctccggttgaaaatgtccgagtggtattgcgaagggggaattgcatcgcggatgaacaatgtgcttatcgatacagaacttcaggatctgattgatcgcgaacgactcgataataatactcgcctctattacgattggttcaatggcattgcgccgctcagcggaacacatggaaaagccattgttgccatgcgtcaggacttacccgtggtgtatcgctcttgggaaagcatctggcagcttctcagcacgggcaggctcactcttcacggtacactacatggctactgtaaaaacggttatgactgcagtatggatggtgttgttaacccagcattttgtgtaaattgccgcggaggtggaagcataattgacgccgaaaacgccgcctggtggaaaaggaagcacgcacaactgatagtatggctggcagagaacccaaccttctcaccccaggaatatgcccattgcatcacacagatcagggcagcagagaacgttatgcaggattttgacctgccgtttcagcgctatgagggcaaaggagaacaaagatga

SEQ ID NO: 151807 - DNA, 435 bp, Enterobacter cloacae
atgaaggggtctgacaacacacaactcaggctggaatccgcactcactcgcctgcttgaaggcactccggtgcatattcaggctgaccggaaactcagtgtcagagccgttgaagaggaagccagactcggaaacggcagtgcatactactaccctgaattgatcacccgaatcaaagttgccatattgcagggtcagaaatatgggcctgcaacaccctcacctgtaccgacgttgcgagcccggctcaataagacacaaaagctgaaactggcacttcgcgaggaaaaccgtgcgctgaagcttactgtttcaaacatggcagcagaacaccaccggctggcctgggcattgcgggaggcacatcttcgcattgaggaactggaagtcgcattgacagaagcgaagcgggcagggatacaccgactaaaataa

SEQ ID NO: 151808 - DNA, 378 bp, Enterobacter cloacae
atgaggcggtgttatacccagtttggccgtgcgatgcacgagctgaacatccagactatctgcgccaataccagctcagccaaaggccgcgtggagcgcgcccatatgacgcttcaggatcgccttgtaaaggaactcaggcttccctactccacttatgatcgtcttcaggaaattgaccagggtgctatcgtggacaacaagcgcctcggacggagacttgattttattaagctggttcaggacaaacgcgacaataaccggtctcaggctctccctgccggagatggctcctcgcggcggcgcaggaaacccacagagaagaaatcacagcgctctttggggtcagtttggatatcgaaaattattgtacgttaa

SEQ ID NO: 151809 - DNA, 1128 bp, Enterobacter cloacae
atgttgttacgcgagtccattgaactaaacataagggagtatatggggttagctgaaacattagttagtattccgcagtctgaaagaggcggtgagattgctcaacgtgggtttgactatcaaacttgctgggctttatctcaaatgctggaatatgaactagatgaaaagaactatgtgtttatcttcgaatatcatgatgatgttcttattcttgatgacgaagtttctccaacacaactcacatttgctcaagtaaaaacaagagagaaacactggactgcatccactcttagtaatagcaccaagaagaaccccatatctatcatcggtaagttatttattcatcaaaagaatttcgccgaatattcacccaagctcctttttgttactaatgcttctttcaatctatgtgaggaaaacggtggtaagtcttgttttggtgcaaatgaagtcaaagtggagtatcagacgagctttaagaaagcaatcaaagatcaagtaaagcttgatgactccagtatcgatctttctgttatgcgtttcgttcaatcctcattaagcctagatgaccacattacacatctaaaaggtaaactatgcgatttccttagcaagaagtttggcgatagcattagcctgagtgttaatgcattagcttctttgcttgaacaggcgtgtcgagaaaaatccaaggtaaaatccgcagatattattaattttcctgaacttatctcacgaaagggtttctcatcagaagcattgaatggtgtgcttgattccttgaatgcaagtaatagtttaaagcctgattgggacaaagctagtcccctattcaatgatcttggcaaaacatcgcttcagctcattatcctgcaagccatgttctcacaagtttgcatcgaccttaaccaaaacaaaaaaaatccttcgactgtatatctagaatatgcaattagcctttacgatgaggcgagtgctcactcggatttgaaattatatctaactgaaaccatgtacaaaattgatgcactttgtccagattatgcattgactttaaagtcagggaagaaagaatgcatagttatttactcaataatccagaagctcttagagggaggtgaataa

SEQ ID NO: 151810 - DNA, 1653 bp, Enterobacter cloacae
atgaaaagcatatactttaaaagtgctcatatattatcccttcgcgataagaaaggattctccttcaagttctcacctgatattaatatcattacaggtgagaacgacacaggtaagtctagctttattaagagcttatatcatacattaggtgctgatgttcgactggataaaaagtggaaagaagataactttgtttcaaaagttgttatttgtgttaataatcgtgactatgcgtttcttcgccacgaaaaacgtatttccattttcgatataacagcaggacaagagcatcacttagtgacctctagctctcgtgcagagattgcattagctgtgcgtgatgtctttgatttcaatttggagcttgtgactaaaactaatttggttcagggacaagcacaaccagcaagtctttatctcccttactatattgatcaagataacggttgggggaaggttttagattcatttagcagtttggctatgtatgaggactggcaaaaaaatatcttgaattttcatactggtgtaaaaccaaaggagtactatactttacaaggaaagattaatttaattgatatcgatcttgttgaaatccgaacgacgttaaaagctctaaagagagctaaaaagcgattcgaagagtcatttggaagagtacttttcgatgtggatgtaaaatattatgaagagctgctggaacgtttccttcgtaagtgccaagacttacatcaagaagaaacagaatacagaattaagctcataaaaatattatctctacgagatgaattagtaacagaaatagaggaatcaaaaagacagctcgatgaaaatgatatagattctttgctaccatcggcaggcttagaagcgagatatgtagtacttgagaataaagaaaagctattgcaaatcataccaaagttgtatgaggaaaaatctgtatatgatgatcaactctctaaaattaaagaagatttgaaacaggctataagcttaagctcagaactcaaaaacatgcttctggaagtcaaagagcaactgactcttcaagacgttattaagtctcaagcaagtaagcaggttgaggtaactttcgatgagcaaattaacgaattactgctaaaaataggcgaattggatgttgctagaactcagctttcaaaagaaatagcaaagttcgaagataaaaagcgagcaaaagaaatcaatgataagtttaaagagtcactgaagtttgcgcaaactgagttaggtatcaaagatcctaaagttggaactattcttcaatatggtccgatttctaagagcgaaacaggcagccgtgctccaaggtcaatattggcttatcactatgctcttctaaaaacaatagaagataaatcgacaagtcctatgcttccagtagtaattgactcgcctaaacaacaagatccagatccgcgcacaacaaaaaagttattcgatttatgtattaatggtttatcaactaatagccagctaattatcggctcagtttcatttgaaagagaaacgaatcagtttaaaacacttattatgactgaaaaatacagtctgctaaaatcagagctttacaatcaggtttatcaagagattatgcctctttatgaacgagctgcgttatcataa

SEQ ID NO: 151811 - DNA, 609 bp, Enterobacter cloacae
atggagctgaaatatcaacttagttctcaagaaaaagagcttgaagttgatcttgaagttcgtagggtacgtgaaattgaaaaagctgtagctgaaatccaggaatggaaaaaagatagagagtttgagcgtatggagcgaaccactgctgctattgccctttatcttgaacaacttacaaagttaaatgtagaaactataaatgccatagggcatatgcaacttgaactcaaggagcgagctcaacaactagtatatgataaaaccattcagtataaagaacttcaggatacagctattgaagaagcaataaatgacttccttaggatagaagaaaaatttggtgataatgaaagagcaaaggatattctaattaaagctgtcgatactaaaatgggtaatataataaacacatccactcgtttcctcgaagagttgaacagagacattgtaaacctaaacgaaagcattgatagattaacaaatcaaggacaaaaatttatcgaaaatcatttggaacgcttccacgtttctgatgtaagctcaccgttaacactctcagcagaaaataaagaaaaattaatacccccaaagaaatataatgattaa

SEQ ID NO: 151812 - DNA, 480 bp, Enterobacter cloacae
atggctgcgttatcacctgaggttaaagcctttatagttcaggcgttggcctgcttcgacacacctacgcaaattgccgagcaggtgaaacaagaatttgggctaaccataacaatccagcaagtatcctcatacgaccccaccaaggcgattgcaaagaatcttgggcaaaagtggattgatctgtttaatgctacccgctctcgctttcagactgaaatatcagacatcccgattgctaataaagcatatcggttgagaatgcttaatcgcatggcgaccaaggcagaaactatgcgaaatcttgcactcacagcctcgctggtagagcaggctgcgaaggagtgtggcgacgcttacaccaaccggcagaaggttgagcatacagggaaagacggcggccccattgagtcagccacgctaacgaaggacgaatacaagaaagctcgacgggagatgctggaggatgacgactgttga

SEQ ID NO: 151813 - DNA, 1464 bp, Enterobacter cloacae
atgacgactgttgagcagcggaactatgcccgcaagatagagtgtgaagaagaggggctgtacttctcccgctacttcttcaagcagcgcaccggcggcaagatgattgtcgcaccacatcaccgggtaattcagcaaacactggatcgggtgatagacggagaaattaagcgccttatcatcaacgttccacctggctacaccaaaaccgaactggcaaccatcaacatgatgggtagaggtctggcgctgaataaccgcgcccgcttcatgcacctttcctactcgcacaacctcgcactgctgaactcgtccacaactcgcggcatggttaagtcgaaagcctatcaggctatgtggcccatggaactgcgcgacgatgcagacagcaaagctatgtggtggaacgagcatggaggcggtgtatatgcttcatcggcagcaggtcaggttactggctttcgtgccggacacatggagccgggctggcagggcgcattaatcattgatgacccggttaaacctgatgacgcctacagcgaaacagtgcgtgacggggtaaacagccgctttaacgaaacaatcaaatcacgattagccgtcgaaacaacgccgatgatcgtgattatgcagcgcatccactatcacgacctgagcggatacctgttgcgcggcggcagtggcgaagaatggcatcaccttaatcttccggtgattatcgacaacagccagagctatgccgagcgctacccagagaatacccacgcaatacagattgaccacggcttacctgatggctggttatggcctttcaagcacaacgaaacgcatcgtgtagccctcttctcgcatcggcgtactgctgaagcgcagtacatgcagaatcctcgtcgcttcaatgccgaaggcgcactgtggactgagggaatgatcgctgcggcgcgggcgctaaatatcagcgaagagctttccagaactgttattgccatcgacccccaagcaactaacagcgaagaaagcgacgaaacggggattgtcgctgccagtgcctatggcattggtgaccgcaagcaatattctgcggatggtgactacagtgggaaatactcacctaatggctgggcaactcgcgctatggacgcctatgcacagcatgatgcagacgcgattgtgattgaaacaaaccagggtggcgatatggcagaggatacgctgcgcaacgctggctttaaggatcgcattattcgggttcacgcgagcaaggggaagttcgcccgcgcagagcctatttcagctttatacgcgcaaggtcgcgtggcccacaaaggcaacctctatcagcttgaaaatcagcagatggaatacgtgccaactacttcaaagaaatcaccggacaggcttgatgctctggtctgggcgatgacagagctaagcggtcagacttctggcgcaatcttcttctaa

SEQ ID NO: 151814 - DNA, 1455 bp, Enterobacter cloacae
gtgagtgaattaaatagcggggaacaattcctcgtgaacgcccttgctgatgctatagggcggcagcgcatgctgtacgcgcatggcccaaacgggaataccaagcgtaccaagttatgggatgaattcggttacccagacacagttaacttcgacaactactaccgggcatacgaacgtaatgctgtggcccacgctgcggtacacaagctgcttgatacttgctggacagataacccgacgataatcgatggcgcggagaaggatgaagccgcagaaacgacagagtgggagtcatcaacagccaagctactcagcaagcactgggcaaagctgaaggatgccgaccgccgtaacctggtagggcgatattcagcggtgctactccaaattaaggatggtcgagagtggtatcagccagttgatagcaatgtcgttaaagcactaggcgataaagcattagttaagttaatcccagcatgggaagcgcagattaagccgggtaacttcgatatcgatactcagtcagatacctacgggcagccggtcagctacaactttaacgagcagccagttggcgacgacggcacttacggaactgtgcgcagcgttaccgttcatccagatcgggtgatcatcctttgtgaaggctcagaggatgagaacatgcttgccggtgttccattgcttcgcgctggcttcaacaagctgctcgacattgagaagacatcaggcggcagcgcagaaggtttcctgaagaacgccagccgccaactagcgatggagtttgacgctactaccgatgtttcaacactggttaagcaggctaaagaagccggttacgactctcttgctgaggcaatgaatgacaaggtcaggaagctaaatagcggtactgactcggcgctggctatgcaggcgggtaaaacaagtgttctctctgtcgcccctgcagatccaacgcctacctggacggcagccgcaaacgagttctcagcatctattcaatgcccgttcaccatccagtttgggcagcaaacaggccgcctcgcttctgatgaggataaaactgagtgggccaagcgctgtaatggtcgtcgttggggattcctcactgactacatcactcgcgtcattcagcgattctggacattgggcattatcgatcctccgcaaaatggagaggtaacactggcctggtctgatttactcgcgccgagcgagaaagagaagatcgcaaatatgcaggcaatggctgtcgtggcgaaagatacccaacaggcatacggcactccggcagtggatgaaaacgaaatccgcgcagtcggtgagctggagcctcgcaaggtcgtgcagccacctaaccctgatgtaaagcaaaccgataaggatccgctgacagatgatgacgacagcgcaaaccagaatcgggacgccaatcgtaccgcgcaataa

SEQ ID NO: 151815 - DNA, 993 bp, Enterobacter cloacae
atgatgacgacagcgcaaaccagaatcgggacgccaatcgtaccgcgcaataaaactgaccccacgcagtcatcgcggcaggtaagccggatgttcaacgatatcgaagaccggtatctcaacattaagcgccgcctgaaggatgtgttcgacctgcgactgaccgggcgccagcgggaaaccaacggcgagcggtcatggataatgtgcaacaacgagggttcagatccttcgctgtaccaggtgaacgccggtacgtacatctacgatatgacagcggcgcaactggctgacctgttgcaggtggttcagacaatacttgatgacgagcttctcgacggcggtagccagaatatctgggcgatggactatgtggtcgcagagtatgagcgcggcacgcttggggcattcacgaatctttcggtgcagtcaccggtatacgccagccagacgacgttacagcaacttctgtccagtgcggcatatcagaaccagatcgccagtgcatacgtcagcacttacagcgactggaagggcatcagcgacactgcgcgtgccgaccttgccaatgtcattgccgattctatcggacgagggattaacccgcgcgagacggccagcatcgttagcaagcgcctagatgtcagcatggctaaagccaagaacatcgcgcagacagaacaagttggcgcgctgcgggaggctaactggaatgagactgactggtccgctgacaggctgggtttaaataccggcttgctacacctttcggcgctcaagcccacaactcgacaaactcatgcgttctggcatggaaaggtgaggactgttcaggcagtgcgtgactggtatgctgtcgatggcaacaaatatcactgctattgcggtcagattccggtgcttctcaacgacgacggcggcatcttcaacgaagggctggctgagaagctagcgaaagagcgcaagcagtggaccaccaaggaggtagcgtga

SEQ ID NO: 151816 - DNA, 237 bp, Enterobacter cloacae
gtgatttacccatttgatgccgtctatgcccagcaggttttgagggtgcattaccagtacgtcagcgctctgcccaaagcgacagataagcttgtcgcaaaaacttccgggctaattgctcacgacaggtttttagcgcggatggatagcgatgccaagcgcgaggaaacgagacgaaccgctgttgatagatatgggtatctgaagaagagctctgcccaaatcgatgtcgcttag

SEQ ID NO: 151817 - DNA, 1236 bp, Enterobacter cloacae
atgctgggcttttttgaacgattaaccaaaccttttcctgatgatgagcctactcagccacctcaaggtttatttgcgttttgtttacattacagcaaaggtatggtgctgccgctgatcctgatgtctattgcaacagcgctgctggctgcgctggaagtttcattattcggttatatgggccaactggtggactggctggtgaataaaaacccggaaaccttctggcaggaagaacaagataccttaatcaccatggcagtcgtgatgctggtggtgttacccgctttagtgtttttccactcagccctgatccaccagaccatattgggtaactaccctatgtcgatccgctggttagcgcaccgttatttattaaaacaaagccttggcttttatcagaatgaattcgccggccgtatcgccactaaggtcatgcaaacggctctggctgtgcgggaaactgccaccaagctgctggatgtgatggtgtatgtggtggtgtattttggctctatgttgtacctgatagcagatgcagactggcgtttggtgctgccgatgcttgcatggttagtcatttacacaggtctacagttctattttgtgccgcgcctaaaacaggttgctactgagcaagccgacgcccgttcagaaatgacaggccgtattgtcgacagttacaccaatatcagtaccattaaactgttctcacacacagcacgtgaatctgattatgcccgcgacagcatgcagctgtttctggtgcctgtgtataaacaaatgcgccttgccacctggctgaacatttgtgtgcagggtctgaattatctattggtattctctatcgctactctggcgatatggttatggtcggtcaatgcagtcactgtgggttctattgccatagccgtcagtctggctttgcgtttaaacggtatgtcgcaatggatcatgtgggaagtcagtgcgctgtttgaaaatataggtacagtggctgatggcattgccactttgtctcagcctcagcaaatcgttgatatagcaacagctaagcctatcgaagtaccacagggacagattgaatttaaacagctgaactttaactacggtaaagtcgcaggcgaacatggccccgtcattgatggccttgaattgtcgattaaaccgggtgaaaaagtaggattagtcggccgctctggggttctagggattttcccctctaaagtaacataa

SEQ ID NO: 151818 - DNA, 636 bp, Enterobacter cloacae
atggatgccagagaaatactgctacacatgaagcaagcggaacttcaatctgagttaattgttgaagctggccaggaacttgaccgggccattaaacaattgcaggactggtctgaagactgggattgtcagcgccgcgcttgcgaagatatgtacgacgctgtgcatcttattttgatccatacctaccaattatcccggatattctggcctgcgaaatgctgtggagagcagggactggaactctgtcacagagctatggcgctgcgtggcgaaattaacttacctgatcttaaccatgcacttcgtaatcaagccttgtggcgacatgcagatgagttggaccattcagttcgggataatagtaacaacgcaatgcgtcgctacaacgctcaccacttaaccagttttaatcaggtggttacctggatggacaacgaagctatgttttgctggcttgaacctgccagtaaaacctttgtgttccataccgaggagtttaatctggcagagctgttggatgcagtgcatcaggttcaacaggagatccagcattacttaaaaaagcagcatcagccaaaccttagtctggccagacctgcgttttatcagtatcagaaacaatgggctaactaa

SEQ ID NO: 151819 - DNA, 327 bp, Enterobacter cloacae
atgattgagtttttatcactgcttgtgctggctgtgctgctgttaagtggtctgttttggtataaaaaaacctgtcgccatttaaccgtcaaggaaatagagcaacgggtttcacagcaaatggaacaaagagcgcacaaactttgtatgcaggcctttgatgtgcaaagaacctgcgaagctgaagaacgcagtcaactggacgaacagtttcaagacgacttgcatctgtatgtagaagacttccaggcagaagtggctgaaagcttacaacaaaacaaagtgctggatattgaaagttatggctttatcaggctgactaaatag

SEQ ID NO: 151820 - DNA, 165 bp, Enterobacter cloacae
atgtccttaacaaaccagaatatggcgaatggcactacggaaatgttaatagaaacaatgatgtatttgtatatttcagataacaagtttgtgtcaaaaacaattctgtcagcgtatcgcataaactgcagagcacacaagcttaacaagcagaccataatatag

SEQ ID NO: 151821 - DNA, 1071 bp, Enterobacter cloacae
atgaaacttattactctcccacaagtacgccttaaaccattccataatcagttagttaagctcggaactcctgaatttatgcgtcaagtgtttgagcaggcgctggcacttcatttgccagccatgcacaccttttcggacgcctatcgggggcatttcaagcaggtactgttgcaggatggcaccagtttcgctgttcatgacggcctcagcctgcatttccccgggcgattcagtacacactctcctgcggcagtggagcttcacgtgacctatgaccttgaaaaagcccagcctgtccgcgtttctctgagcgaagatactgcatctgaacgcgactatctccccgtagctcaaagtctacgtggttgtttgctcatggccgatgcaggttatttttcaaaagcttacattgaatcgctccaaaacgaagcggccagctttgtgcttcggatgcccgcttcggtgaatccaatggcgacttgcaaccaaacaggactctgtcagccgctacgcagctggctggccgtattgcctaagcatggcgaattggatttggatgtgcagtggccagatggtccggtgtaccgttgtgttttgtttgcttccactgaccataaagacaaaccggtttgtctgtgtacaaatttggaccggcacacattcccagccgcaacagtgggcgaatggtatcgtctgcgctggcagatagaactcttgttcaaagaatggaaatcgttgaatagtttgaataaatttaatacggaatactcaacgatagccgaaacgttgatttggggaagtctgctggcggcaacgctcaagcgttggttaatcaacggagcacagcaaaaatatcggcgagtgttgtccatgttcagcggggccaaaacagccaatcagtggtggcttcccttttgtataaaatgggcttgttcagggataactgaaattgctgcggaattgggtaaggtttttgcgtttctcgcggaacattgccagagggtaaatgtaaagcgagatcaaaaatcaggggcttttaaagtgttggaaatcacatatgaatcatga

SEQ ID NO: 151822 - DNA, 498 bp, Enterobacter cloacae
atgaagttttatacggttgatgagcagtacatagccgccctgaaggcggcacaaccaagaaaagtattggataactatcaagggacgcgcccatacattggggttctgcttgaagttaacggtacaaagttcctggcaccacttacttcgcacaagccgaagcatgacaccatcgatggtagtaagcccacggtgttcaagcttcatgaagtagggaactcagagaacaaacttggaatgatccaaatcaacaacatgattccggtttacgatgacgtgattgagcttctggatcttggcgcgctcccaagggggtatcgcaatctattagatctccagaggcagttcattcgtaagcacgagtctgaagtcagtgatcgagcagcaaggctgtataagttggtgactgaggatgccgacaaggacagcttctttagtcggttgagttgtgactttctattactagagcatgtaatggaagagttcaggaatgcctga

SEQ ID NO: 151823 - DNA, 288 bp, Enterobacter cloacae
atgaatgtgggtatgcatatggcaatggagggttatattggcacatatgctatttcagagaatcattacaggaacttgattcaactggccaaagacaatgactacgttgctaacgttagagcaattttcgctgagtcgatagactttgttgatttctcccgtcgcgttggccaggcaacagtgcgggtcgatgctcaattacccacctcagaattttttagaaaattctttggtttggacgacatctttatgcagcagataatcgcagatatatatttttggctgtag

SEQ ID NO: 151824 - DNA, 321 bp, Enterobacter cloacae
atgcttgaactgtcctattgcactaagaatttggctgcgttcggatttttcagttcattgttccaaaaggctgaatacaaaggcgctgtcatacgtatgagatcttactatctataccaaacattgaaatactttaacttgcttatggaaattagtgaggcaaccttctacaactggcgcagtaagtacgcaggtctggaagtgaacgaagccaagcgactgaaagagcttgaggtagagaacaacaagcttaagaagatgctggccgacaaaatgctcgaagtcgaagcgatgaaggatgtgttgtcaaaaaagtggtga

SEQ ID NO: 151825 - DNA, 816 bp, Enterobacter cloacae
gtgacgccagcggcaagaaaacctgttgctcagcatttgatagaagctttccgcctgagtgaacgggtggcttgcaagttggcgggattgagtagaacagcattgcggtataagccaaaaacgaatgcagatcacagcatacggcagcggctgaaagcattggcaacccaatatccgcgctatggctatctgatgttgcatggtctgcttcggggcgaaggctgggtcaaaaaccgtaaacatacctatcgcctttataccgaagaaggtttgcaggtgcgtacgaagaaacgcaaaaagctgacacgaccacggcagccgatggaagtgcctacagcggtgaatcagcgttggtctatggactttgtatcggaccaactgagcaatggcaggcgctttcgggttctaaatgtggtggatgattattcgcgtgaaatgcttgggcaattggtttcggtttccatcagtggcagacaagtcgccagattcttgagtttgctgattgagcaacgcggcaaaccaaacaaggtaatctgtgacaacggaactgaatttaccagcaaagcgatgttcttctggagcaaagaaaccggtgttactctgggttttattcagccaggtaaaccaacacaaaacgcatttgtagaaagtttgaatggcaagttcagaaacgaatgcttgaaccaacactggtttagaacgatggacgaggccagatacgaaatagatttatggcgcgagcattacaatcatattcgcccgcacagttcgttgaattacatgtcgcctgttgagtatgcaaagcaggcagcataa

SEQ ID NO: 151826 - DNA, 1554 bp, Enterobacter cloacae
atgacacgtaaaaagaaaatggtaaggacagatatgcaaacttatctggatatattccgccttaaatttgaagccaagttaagcgatcggcaaatctcccaagcgttgaatattggccgggcaaccatcagtgatttggtgagccgctttaacaatttaggcctgagctggccgcttgctgctgattatccgcttgatagcctcgacaaacagttattccccggccgtgattacagtacgcagcgggtgttgccgctgtgggtgcaggtgcatattgagctgcgcagaaaaggcgtgacgaaaatgctgttatggcaagagtatcaggcagagcacggcagtaacgcgcttggctacacccagtactgcgagcattaccggcgttggtgtgctgtgcaaaaacgctcgatgcgacagcatcatgaagccggtgagaagctgtttatcgacttctgtggcccgacggtgccgattgtgaaccctcaaaccggcgagataaaaccggctgctatcttcgtcgccacaatgggcgcatcaaactacacctatattgaagcctgcgaaggccaggatatggaatcctggctgatggcgaacagccgttgcctgacgtttttaggcggcgtaccggcgttattgatccccgataatctcaaagccgccgttgataaagcggataggttcgaaccggtgattaacgataactacaaagccctggccagacattatggctgtgcactgatgccgacccggccacgtaaaccgcaggataagggcaaagtcgaatccgctgtgttgattgtggagcgctgggtattagcccggttgcgccatcaggtgttttactcactggccgcgttaaatcaggctatccgggcactgaatactgagcttaaccagcggccaatgaagcattacaacggtgccagccgtgcgcagctctttaccttgctcgatgcgcctgcattacagccactgccgccttatgcctatgagtacactgattatcgcattgcgaaagtcgccaaagattaccacgtacagtacgacaatcactggtactcggtgccacaccgtttagtgggtgagcgggttgaaatcagtgccacgcaaacgctagtgaaggtttaccatcaggctaaatgtgtcgcccagcatccccgcagccataatgcgtacaggcacagtacggacgtggcgcatatgccagaaaaccatgctgcctatcaggagtggaaccccgagcgtattcgcagctgggccacgcatattggctccaataccctggcggtggtattagccgttgaacgcagtaaagaccatctggttcaggcgcagcgcgcctgccttgcactactgagcgagcaaaagcgctacggcagtgaccggctggaaaacgcctgcgcactcgcccttaaccgccagctaccttatataccggtcatcaaaaagctgcttaaaaatggcgaagatatgcgctggcaacctgatgaaaccaacacacttatccctggcgttcacatcaacatccgtggttcaaaatactaccaataa

SEQ ID NO: 151827 - DNA, 747 bp, Enterobacter cloacae
atggacacactacttatccaactacgccagcttaagctggcagccatggccaatgcgctggagcagcaacgccttgccccccacacttatgcagagcttagcttcgatgagcgactgggattactggtcgagcaagaacatctggcaagagataacacccgcttacaacgcttacgcaaacaggcgaatctgcgccttaaagcgacaccggaaggcttacgctatccggcaaagcgcggcttacgcgctgagcacattaccccgctgctgcaaggtcatcacctgacgtatcatcagaatatcctgatcaccggccccacggggagcggcaaaacctatcttgcctgcgccttaggtgagcaagcttgccgtcagaataaacgtgtactgtattaccgcttaggtcggttactggagagcctgaaaatggggcatgctgatggcagctatctgaaacaactggtacagctacaaaaagtggacatgctgatcctggatgattggggccttgagggatttaaaggtaagcaagtcagcgacttactggacgtaattgaagatcgctacgagcaacgcagcacgattatcgtcagtcaattaccggtctcggaatggtacggcctgatggataacccgaccgttgcagatgcgctattagacagagtgatccacaacgcccaccgactggaattaacaggtgagtcacaacgcaaaaaaacactggttcagggtgaagaagtcgggtaa

SEQ ID NO: 151828 - DNA, 333 bp, Enterobacter cloacae
atggccgatgttattaagcacttcaaaaacagccttgaaccagtgtttgttgtcttcattaccgatggtggcatcactaaggcaagagctatcaaagatgcaatccgcgagtcggctaattacccaattttctggaagtttgtaggtcttggtgggcacaactatgggatattagaagaactggacgatttcaccgatcgccttcttgataacactgactttttccctattgataacttcaaaacggtaccggacaatgtgctttatgacaagctattgactgagttctcaggctggcttgctgaggccaagcgtaaatcgataatcaggtaa

SEQ ID NO: 151829 - DNA, 1539 bp, Enterobacter cloacae
atgaacagcttacttcctgacgatatcgatgaactgaaacgtctccttgccgaacaggaggcgctgaaccgtgcccttctggaaaagctgaacgagcgtgaacgcgaaatagatcacctgcaggcgcaactggataagctgcgccggatgaacttcggcagccgctccgaaaaagtctcccgccgtatcgcgcagatggaagccgaccttaagcagttgcagaaagaaagcgatacccttaccggccgggtggatgacccggccgtgcagcgcccgctgcggcagacccgtacccgcaaaccgttccctgaatcacttccccgtgacgaaaaacggctgctgccggcagcgtcatgctgcccggaatgtggtggtgcgctgagttacctgggtgaagatgccgccgaacagctggagctgatgcgcagcgccttccgggttatccggacagtacgtgaaaagcatgcctgtactcagtgcgatgccatcgtgcaggcccccgcgccttcacgtcccatcgagcggggtatcgccggaccggggctgctggcccgcgtgctgagttcaaagtatgcagaacataccccgctgtaccggcagtcagaaatatacagccgccagggtgtggagctgagccgctcactgctgtcgggctgggtggatgcatgctgccggctgctgtcaccgctggaagaggcgcttcagggctatgtcctgaccgacggtaaactccatgccgatgacaccccggtccaggtgctgctgccgggcaataagaagacgaagaccgggcggttgtggacgtatgttcgtgatgaccgcaacgctggatcagcagtcgcgccggcggtgtggttcgcttacagcccggacagaaaaggcatccaccctcagacccatcttgcagggttcagtggtgtgctgcaggccgatgcgtacgccgggttcaacgagctgtaccgcgatggccagataacggaagccgcctgctgggctcacgcccgccgtaaaatccacgatgtgcacgtccgcacaccgtcggcgctgacggatgaagccctgaagcgtatcggcgagctgtatgccgttgaagcggagataaggggaatgccggcgaagcgacgccttgcagaacgtcagcaaaaagctaaaccgcggctgaaatccctggaaagctggctgcgtgaaaaggtgaaaacgctgtcgcgacactcagaactggcgaaagcgttcacgtacgtactgaaccagtggccggcgctggcttactatactgacgacggctgggccgaggcagataacaacatagctgagaatgcgctacggatggtcagcctgggccgcaaaaactacctgttcttcggttcggatcatggaggagagcggggagcgctgctgtacagcctgatcgggacatgcaaactgaacggagtggagccagaaagctacctccgtcacgtccttaacgtcatagcggactggccgataaaccgggtcagcgaactactcccctggcgcgtagcactgccaactgaataa

SEQ ID NO: 151830 - DNA, 348 bp, Enterobacter cloacae; identical to SEQ ID NO: 16878

SEQ ID NO: 151831 - DNA, 537 bp, Enterobacter cloacae
atggatggtgatattcatagtttgaaatgggtcgggattactgaaatccaaaacgaaattagtgatgacagtggtaataaacaatatatcacaaaagattatcctgcgattgcaataaatcttttccaagatctattgacagaaaaatttataaaatttcaagaacctaaatttcatgaacaagattcattactacaaaacgaattactttcgcatataaactatcttaaaagtaaatcatcagtagactttataaaaaaactgaaagaatctcaacaatatcataatctgattacctcacgagaaaactttatttggtggaaagcgggtgaatactctgtaactataaaagcaaaatcctccgataacttcatattagaaaataatacattcacatttaaactaagccaaacagatattgatttattgaaattcaacatcccttgtatctcgacatttattgactgccaaataactcaatctgatgacattaggaatataaaatggaattgggttaatccaaaagttataagatga

SEQ ID NO: 151832 - DNA, 990 bp, Enterobacter cloacae
atgaaaagtgtatttgactcctccgatggggggaaatcagtaccggaaaagtgtctgcatattgggttgatattatggccccgttattcactcctggccgtctccgggttgctggaggcgctgcgttatgcagcgaaagctcaggataaattagcatttaaaatcagcctgataagtgaatttcctgatatcccgattatcagcaatgcggggattatcatgagaccggattctccccatgcgccgccggacagttttaactaccttgctgttatcggcggtgaattgcagtatctggacttagggtatcagggggataaagcgtatctggcacatgcccaccatgccggggttccgctcattggcattggcaccggcagttttgtcctcgcacaggaaggattgctgaatgaacgacgagcgtccatccatcctttccaccttgatgcatttcggcaggctttcccgctggtttatgctgagcaagggtatgatttcatcgacgatggcgatgtgctgacctgcccgggcggtatttccaccctgacgctggcaactgagcttatccgcgcccatgccggggatgatatcgccagcaccacctgtcagcgtttgtcgctcgttccgcatgaaattgccaccccgcgtccggcgaattttgcgcttatccctgactcgcggttgcgccgcgccgtcatgctgatagaacagttcctgacccggccgctcaccaccgccgggcttgcgcgagaagtggcattgagtgaacgccagctcaaccgactgttccacgcagaattcggcaaaacggcccgcgaatttatccgcagcgccagactgcgctatgcttgctggctgctgaagaactcacagcaaagcgtgacggatattgcgcagcggatggggttcagcgactgcgcgcactttattcgtcattttcagacggagtatggttgtacgcctggcgtgtggcgtacgtcgcagagctga

SEQ ID NO: 151833 - DNA, 330 bp, Enterobacter cloacae
gtgcgtggccacgctgccccccttcggatcgatatccagaaggttactcagctgaagtttgcagccgaacgtctccaccttgacttcctcattaccggctttggcatagaagaggaaatccactggttcaataccgcgccaggaacccgccgatcgtgcttttgccgtcagcacgctcagcactttggaactgacttcaatttcaccctcagcggccacatcaccatctacgtgtccatccggcacgccacgggtctgcgcggcggcgctgttgtccgtgatatcgagagaaattttctcgatgtggatcagatcgccgtcaacgtatga

SEQ ID NO: 151834 - DNA, 1953 bp, Enterobacter cloacae
atgactgggaacgataagcttaaagcagatctgcttaatggttatcagttggactactacgacagaagtatgcataagcctttaaaacctgatcatgataaccttatgttgagggattttcaggtatggatctcgctatcgattcctttacagtctgcccttcctaccgagctggaacattcgcgtatcgattcactttactctgaacttgtaagtaagttaattacgattggattgcatccgtttaaggtcgatgcagaaaactggctctattgtatagataaggtcgtaaaccccggaaagaactcccggtgggctgaaggtttcatagacgttaacactatgaaaaggcttaatgaacaagttaacgttcccggccgtaagtatacagtcacagaaaatcatttctcatcagtcacacaaagtgacgacgaatctgagcatcgttacttcaaacaactttccgttgtaaagtttcctgaatacgtcaatttcggttgtatgtatgagttagtagttaactggatgcatggacgtaagacaattttcagcccatttatgatcactcagactgttcagtttgccgatccgctcaagttgtcaaaagaaaacgtccgctacaaagcaatcactaataaacaggcaagtataccttcagttgtcacattctgccctcgcctgcgggatatggataatgactacatggccgtaactcgcgagcttgaggatggcgcaaagcttttaagagggtatcttactttcactgttatgggtagtaatgccaattctgtgcagacagcagctaacgatctcaaatccttttacctcgaaagccgggtcaaagtagcagatgattcctttatcgttttcccgtcatttatgtcatgtctgccaatgtgcaatgacccaaagacaattttcgaccttgaccgttccgaagtagtgagcaacaccggagcggctcatatgacaccgatctttgggccctggaaaggtaatacagatagaccagtactgagtttagtttctcgtgaaggtcaactcatgggacttgatattttcaagacttctgcaagctataacatggttattggtgcaacgtcaggtgcagggaagtcattctggacagcatatctaatcaataactatcttggagctggaccgcgatctaataacctcgttcattatcgctcaacatttaagcattttttagaaaacgaatacccagatgatgatcctgacggtgctcaagtatttgttgtggacgtgggccgttcttaccaggggattgcggaacaatatacaaacagtcaatttattgatttcggtaaaacccctgacttcaccctaaatccctttgccttcctaactgacatcactgttaacgacgatgtatttaacgaagcacctgaatttaccggtgaatcaacttcaaacgatgcagaaaaagacaaagttgctcagaccataatggttttgaatcagctaaaaattatggcttcagagaaaggccttatcgatgattatcaacaatcagtgatgcttcagcttattgcagaagagtaccaagaatccagaaaatcaggtcggaccggttcaataaccggctttgctctgcgttgcaagaagcatgaagacaaacgtataaaggatattggggagcaactcggagcatggtgcgaaggtggaatttatgggcaccggtttaccgatacgttgcctccaatcaacttcgacagcagatttattgttttggaactggaggagctaaaaggcaccccccaccttcagacagttgtattaatgtctatcattcaggctgctcagcatgcaatgttcatcaaaaaagatgggcgtcgtcgcttgttcatccttgatgaagcatgggagtacattcgtcctgataattcatcaggtgcctatgagacatctggtttaattatttttgcttga

SEQ ID NO: 151835 - DNA, 309 bp, Enterobacter cloacae
atgaaacaagaaaaagaaagcattgaagcaatgaaggctaataaatatttttctacttcagatgcagaatatgaacgtatgaaaaatattcgtacagtcaaaaaggtgttttcagagatgttagtcaggttcgaaaacttccaagagatctgtcggttatacgtagaccggaaaatggagctttgttttactacggatagtgctgacaggagtaaattatgggaaattcaaagccgcgagaattgtagctatggcgaggcaatagaaattctctatgctcaagaagtagcagcgggtttggccgcgtag

SEQ ID NO: 151836 - DNA, 2754 bp, Enterobacter cloacae
atgaactggattggttctcggtggtggaaattcgacttccacaatcacactccgacatcggacgattatgggaaaggccctaaccaggcccagtataagcagatcactcataaggattggctactcaactacatgcggcaaggcatcgattgcgtcgctgtaacggatcataattcaggcgcttggattgatccactcaagcaggcactccaggagctggcatctgaaggtcatgcagattatcgaccgctctacctatttccaggcgttgagcttaccgttcaggggaatatccatattctggccattttcggccaagacaagacaacctctgatatcgactcactgctcggtgcggtcaggtatcgggccaccaaagggaagagcgacggctgttctgaatgctctgcagttgaggtgattgacgaaattgccaggtctggtgggcttgcaatacctgctcatgtcgatcaggccagcggactttttacggtctgtaccggcaacacactggagcaggtgcttgacaacaaatgtgtatttgccatggaggtaacggaccttgctcaggcaaaaccgcagctctacatcggcaagaatttgaattgggcagaggttcttggaaccgattcccatcatccgtccggtaccggagatcaacgctaccctggtagccattttacctgggtaaaaatgtcggagccatcctatgacggattacggctggcgctaattgatggagctctttcactgaagcggtcggacaacttcactggtgaccccaatacccatggacaactcgccatcgaaagtatcgtggttgacgatgcgaagtacctagggcgagggcaatccttatcctgccagttgaacccttggctcaacaccatcattggtgggcgaggcactgggaaatcgacctcgttggagttcctgcggattgctctcaaacggaagggagaaatccccaagagccttgaaaaggaatttaccaaatacagtcaaacgtcgaaagaccgccaggatgaagggctgttaaaagatgccacgaaaattaccgtcggctttcgaaaagacggtggccgttttcgaatcacctggtctaacaccgacaacatctacggcatagaggaagagaccgcgcccggaatctggagcacttcggagggagacatagcacaacgatttcctgtcaggatttacagccagaaacagatattcgaactggcgaagcatccccaggcactcttgcaggttgtcgatgatgccccagcggtcaatcatcgtgattggcagcttaagtgggaggaattgctttccaaatatctctcgattcgcgcccaggagcgtgaagttcaggccggacttcaggaggaatccgtaaccaaaggtcagcttgaggacgtcaaacgcaagctcgatgtttttgaaaaggcgggccacgcggatgtcctgaagacttaccagctcagacagaaccagagtaaggctatggactcttggggaaagacctgggaaggttccgccgaacaggtccgggatatttcaggaagtctgttgccaccagaattggatttacaacatttcgacgttgggaatgcggatgacaaagaactcatcgataacgtcgagggcatccgtgcgacttttgagaagctccagatagagatgaattcaatcgcgcagcggattgatgatgcgaagagcgcatggaatcaagcgcggccagacttgagaatatcgaaaaaaatcacaacggcgaaccaggaatacaccgacctcctcggtcaactcagtgcagcagatgcgggcgatccatctgcatatagtgttctggttaagcagcggcaagatttcgaagataagctcaaaggattcaacaaaaagagagaaactcttgcgcaacatcagaagagcgcagaagagtgcttggtcaagctccatgagcatcgggccatgataaccaagcttcgcgaggactttctcaaggagaccctcgtcggcaattcatatgtacagatcaatgtcattccgtttggaaacaagctcacggttgaggaagaattccgtaacctgatcggccgcggcagtggcggctttgatcgcgatattggggtagttgacggggatgagggcttgctggctaatctaacgcaagagcaatccagaactatggatgaaaaaattgagacattgaaatcattgctacttgcaatccatgcaaacgatactatagcggtggcttcctccaaagatcgacgctttgtatcccacattcaggggctaactccggaacagatagatcgaattcaatgctggtttccaggtgattctctggatatcagatatagccttaagaatggcgagagcttcaaacccgtagagcaaggatctccgggtcaaaaaacggctgctctccttgcatttatcctttcatatggcaatgagcctctcgtacttgatcagcctgaggacgatcttgacaaccacttgatctatgacctgatcgtgacgcaattgcgggagatcaaacagaaacggcaggttttagtggtcacgcacaacgccaacatcgttgtgaatggtgacgcggaaaacgtcattgcccttgatattaggtctggccaaaccagaattgtgacgcaagggggtcttcaagagccttccatacgcgatgagatatgccgagtgatggaaggtggcagagaggcctttacccaaagatataaaagaatcaatgcagtaatcacataa

SEQ ID NO: 151837 - DNA, 498 bp, Enterobacter cloacae
atggaagtaatattaatagccaagagccctaaaaattgcgacgcaaatgagttaaaaacatttgaaaaactagtaatcgaggggtcggaagtcgatcctgtggggctaagtggaaggatattggatgctgagcatctgttctttatctataccaaggaacgatgcgttggtattggtgcaattaagcgtccaggagcagggtataaattaggttcttttgaaaaggctggagtttccgagcaagaaaaatacgattttgagttaggatgggtctacgtcaatgaaaaaatgagaggactacaactaggaagtaaattaatggaatcaatatgtcattacatatctgagaatttatcagacaagggatgctttgccactgttcgtcaaattaatactcgtatgcagcatttgttcgtaaagtataatttttcaaaaatcggtcattcatacaaaagtggaaggggcgattatttcctagatctatatgtaaaagcataa

SEQ ID NO: 151838 - DNA, 498 bp, Enterobacter cloacae; identical to SEQ ID NO: 16552

SEQ ID NO: 151839 - DNA, 372 bp, Enterobacter cloacae; identical to SEQ ID NO: 16551

SEQ ID NO: 151840 - DNA, 378 bp, Enterobacter cloacae; identical to SEQ ID NO: 16550

SEQ ID NO: 151841 - DNA, 126 bp, Enterobacter cloacae; identical to SEQ ID NO: 16549

SEQ ID NO: 151842 - DNA, 1617 bp, Enterobacter cloacae; identical to SEQ ID NO: 16548

SEQ ID NO: 151843 - DNA, 1527 bp, Enterobacter cloacae
atgagaaactttcctgttccgtactcgaatgagctgatttatagcactattccacgggcaggcgtttatcaagggattgttagtcctaagcagctgttggatgaggtgtatggcaaccgcaaggtggtcgctaccttaggtctgccctcgcatttaggtgtgatagcaagacatctacatcaaacaggacgttacgctgttcagcagcttatttatgagcataccttattccctttatatgctccgtttgtaggcaaggagcgccgagacgaagctattcggttaatggagtaccaagcgcaaggtgcggtgcatttaatgctaggagtcgctgcttctagagttaagagcgataaccgctttagatactgccctgattgcgttgctcttcagctaaataggtatggggaagccttttggcaacgagattggtatttgcccgctttgccatattgtccaaaacacggtgctttagtcttctttgatagagctgtagatgatcaccgacatcaattttgggctttgggtcatactgagctgctttcagactaccccaaagactccctatctcaattaacagcactagctgcttatatagcccctctgttagatgctccacgagcgcaagagctttccccaagccttgagcagtggacgctgttttatcagcgcttagcgcaggatctagggctaaccaaaagcaagcacattcgtcatgacttggtggcggagagagtgaggcagacttttagtgatgaggcactagagaaactggatttaaagttggcagagaacaaggacacgtgttggctgaaaagtatattccgtaagcatagaaaagcctttagttatttacagcatagtattgtgtggcaagccttattgccaaaactaacggttatagaagcgctacagcaggcaagtgctcttactgagcactctataacgacaagacctgttagccagtctgtgcaacctaactctgaagatttatctgttaagcataaagactggcagcaactagtgcataaataccaaggaattaaggcggcaagacagtctttagagggtggggtgctatacgcttggctttaccgacatgacagggattggctagttcactggaatcaacagcatcaacaagagcgtctggcacccgcccctagagttgattggaaccaaagagatcgaattgctgtacgacaactattaagaatcataaagcgtctagatagtagccttgatcacccaagagcgacatcgagctggctgttaaagcaaactcctaacggaacctctcttgcaaaaaatctacagaaactgcctttggtagcgctttgcttaaagcgttactcagagagtgtggaagattatcaaattagacggattagccaagcttttattaagcttaaacaggaagatgttgagcttaggcgctggcgattattaagaagtgcaacgttatctaaagagcggataactgaggaagcacaaagattcttggaaatggtttatggggaagagtga

SEQ ID NO: 151844 - DNA, 333 bp, Enterobacter cloacae
atgctgaaagaggattacgattcaagcctgttaattcccactattaaaaaagcgtttagccagaatccaacgatgacaagacaaaagttactgcctcttgttttgcagtggttgatggaaggcgaaacggtagtgtcagaactagaaaagccctccaagagtaaaaaggtttcggctataaaggtagtcaagcccagcgactgggatagcttgcctgatacggatttacgttatatctattcacaacgccaacctgaaaaaaccatgcatgaacggttaaaagggaaaggggtaatagtggatatggcgagcttatttaaacaagcaggttag

SEQ ID NO: 151845 - DNA, 195 bp, Enterobacter cloacae
atgaaagcgttcgttacctatctgaaaaaagaatctccggccatgcaactggcaagcggctccactggatggattgagctgcccaatggtcaacgctggaatcctggccacgtacataaatttactgcgcatcaaccgtgccgccgttggtggcatcgcctgatgggattgttccgggggcgttatggccattag

SEQ ID NO: 151846 - DNA, 438 bp, Enterobacter cloacae; identical to SEQ ID NO: 78663

SEQ ID NO: 151847 - DNA, 288 bp, Enterobacter cloacae
atgttggttgagctgtttaagcagtcctggcagtggcgtgttaataatcccatgtggattcagctccatcttcatttacgtgatacacagtaccgtaaggaatggttggtcgatcacaaacagatccttgctgctttaatcaaaaaagatgcacgggccgcgaaattagccatgtggcagcatcttgagaatgtgaaaaaccgcctgctggaactctcagatgttgatgatcttaatttcgacggttacctcttcgaatcctggccattacgtgatgctaacgcttga

SEQ ID NO: 151848 - DNA, 1752 bp, Enterobacter cloacae
atgctaaaaggaagttttagctatgttgacttcattcttgcaaggatagccagactttaccctgcattgttgttcacgctggcttttgtttttgctggatgtttccttctttactctccagctgattttgctgatgtgtctcgttcagctatatatgccattttttctgcaaccaatatattttttgcaaatagcgctggttattttgatacatcatctgaaatcaacccactacttcatacctggtctcttggagtagagcagcagttttacattgtatggccgattcttctttctttagcattatttaaaagaaaacaacttgttacttatctattggtggttgtttctttagtatcactgcttgcatctcaatgggctaccacacatatgcaaacagaagcatactactggatgccatttagagtgtttgaattatcacttggtggtattgcttttttaatttctcgctcaacaaatattaataaattattaaaagaagcgctgatgtctatagggctgataatgattattgtatcggctgctaccttttcttcatctacgcagttccccggactaaatgctcttattcctgttgttgggtcaatgctttgcatattgtctcatgatgcaaaatttgcaggttatgttgttaacaacaaaataagcgtggcaatcgggattatttcatattcagtatatcttatacactggcctcttattgttttttataaatactggatttttagagaaattaattcattagagaaaaccgtcattttggcattatccttgataatagggtttgccatgtattatggaattgaaaatagattcaggaaaatggcattgagatctatttcgtatcgtcaggcgtgcttttatgggttgactatagctattatgatatctttttgcatcactataaaaagcaatgggttcccatttagggctgcaaatgatatcgcaataaattatgcagacaacaaaaagtttcaccatgatttttttggcgggactggatttaaacaaggacatcaaataatcggagataaaagcgcacaaccaaaatttgttcttatgggggatagttttgctaggcaatatgctaatgctataaagaaacatattggagacaaaagctattcagtggctgctttttttgcggatgggtgctatttgtctgcttctttcacaagaatgtggaacggggttccaggcaaggaatgcttaaagatgtacaaagaagctattgagtatgctgaaaataataacattccagtggtttatgcgcaaaggtggattggttacaaagggcttatcggagatgagcatggggcgtgggcttcattcaagagcgataatgattacgctatatttttggttaacaacatcagaaggatgagtagcaatttaaaatctaacctttatgttttgttagcgccgaatggagctggggtttctggggtgttgtcatgcctttctaggcctaaattggcctcatctttttgcatgcaaaatatggaaacacatcttggatcatctagagttgacaaaataaacaacttgatagccactaaaatagtgggggatgaaaaaattaaaataataaatgttaatgaacggctatgcaaaatggatatttgttcgccagtagatgaaggtggtgaaatactatattctgatagtgttcacttatcaaaatatggcgctgaattgtcgtgggaatacataagtaaaaaaagcatgtaa

SEQ ID NO: 151849 - DNA, 2037 bp, Enterobacter cloacae
atgacggactccgcaacacaacttaccgacatcgacctttttaaatgcgatttgcttgatatcggcagcagtgctgatatgtactacgggaaagaatttaatatccgcgtgatggatttgagcatcgaagtatctaaatcaatgtcagataaaatcgtctcgacaggacgagaaaatatgcgcggcataatgagaacgtcgtgctcatatgcaaacacccaggcccccagcaagctgcaacaaagcatcaacgctattaagcagtccaccgggacgattaagatagcggtgtacggagattcaaccgttgacggctataacacaactggatggacagctaacccggttgatagcaacggaaacgctatcggtaatacaaaccataacacccagtcgcctaactcatgggcgacccagttaaacacgaagctgaaaacggtcaatgagaacgtctctgtgtataacgcaggctatggcagtagagctattcaggatggttgggcaataaataactatgatgcggcaatcaccaacaacccctattacggtaagtgtgattattgcctagtggctttcggactgaacgaccgcgcccgcgcaggctgggatgccgacacgtataagcagaaatacattgaactgattgcgtttatccgcagcaaaggtactgagcctatcgttgtttcaagcgacccaacaaaccgtaatgatggaggcccatcattcaagcagtacagggaggacctgatatcactccagaaagtgattgccgaagagacaaactgtggatatatagacatgttcagttacatgtcatcagtacaaaactggaccgccttgcagtcagacggcatccactttggtgacactggaaatacccgcaaatcagattatgtactgtcactttttaaccggtcgaatgagtatgccttaaccgctacatcaaaacgttatgggcgcagtctcattagtggcaatatagtaaaagcctatatgcccgcgatgggaaaccaagatatcgcgaaattcaccggtcagatcctgaaccaaaagattgtagagaaccatttctacaatacaaaccttgcgtcatctgctgaggttgatttctacgctggtgtctcacattctgttgtgtcactcaacaccttccgaaatgtgtcatcgaagtttatgtcgcttgaaaattccggtggtcaagagtatttgtcaaccgttggaactgctgctaactcaaactcatggttcttcgatgatggggcggtgaataactatggtgtgtatttcaaaggggacgtctcatcgttcaacggtaataccatcaccaatcatcaaagccttccatcagaccaattctgcgccttgtggtctgaggcgaatcgcggtgccgggggatatcttggttcccagaacccggtcggcaatagtatgtgcaacaacattgttgacatacagtgcccaacttacaacggccaatactggcgaccgttcgagtctccgtccgttgatttcgcgagcgtgtttgctggcaacgtgttccttggggggtcattgcgagaaatcgccggcaaccagaacattatggctcttaactccttcattaatgtatcattcgcgaagggtgttgaactgcgaagcaaagtcaatgggaataccgtagcgagtatttccaacggcgtgcttacagatgctcgagagacaacagcagcgtgcaataaagacgggagtaacatcaacacgctggcaatccctgcgccgtgggatagcgtagatcgaggagaatgggtattgcaggtaagggccgtcgcttcacctagcaacaataataactggcagacattcatgattacggccaatcctaacacccagaccgtaactcaatcatcaggaagacttgcgacgaacacgagtgatagcgcgtttaaaaatattatttttaacgtcgctatcacttccggagggatgactttgacatctattggcggaaactcagacactgtcaatgtcacatataagtgggtggatgccagacgatag

SEQ ID NO: 151850 - DNA, 450 bp, Enterobacter cloacae
atgttaagcagtaaaaaaaggaagtcccctacaaatatcaaagaatcgctcaatgataacgctgaccgtttttataagatgtttcgcattcataccacggcaaaagttgctatgtcgctaattgccatgaccgctgtagggttttctttctacaatctttacgaacaatggcaggacgctgaagggaagaaagaccatatagctgtaatacggatttctggcgagatgggtaccggctcggaaacgggcgatggaacagtgatcgcaacagctcttgccaaagcttacaataatccccatgccaaagcagttattatcgaggcagagtcaggtggtggtggtccctctgacgccatcattatttaccgccagataaacgcgcttaaaaaccaccagccacagattgaacgcgtatcagatgccggtggctctctgatcctacccacgtaa

SEQ ID NO: 151851 - DNA, 3150 bp, Enterobacter cloacae
atgatgaatttcagggcgctgtatttatgtattaaacggattttggggatattctcatctcaggagaatgatgcaacctctgtaatgattgaggatatatcaagcctctctccttttgcgcagattctaggagatcagaagtacactgttcctgatcatccaaatccagaagtcctgaaattcatcgagtatccaactcgtccgacgggcatacagacatttaatgaacagtcaatcctgtctctgtatcgggaaaagctgcactcaatttcaatgatgttagctatcagcgatagcgacatcagggacgatgcatatacatttactaatttagttttaaagcccttggttgaatatgttcgctggatacatcttttgccagcttccgaaaatcatcatcataatggtattggtgggttactttctcacagcctggaagtggccatactctctttaaaaaatgcgcatcactcagaactgagaccaatcggatatcaagatgaagaagtagtccgtagaaaagtatatctctatgctgcgtttatctgtggtttagtccatgatgccggaaaggtttacgatctcgacattgtaagcctgaatttagctagtccgatcatttggacgccaagctcacaaagtcttcttgactgggcacgtgaaaatgacgtggttgaatacgaaatccactggcgaaagcgtattcataatcaacataatatctggtccagcgttttccttgagcgaatcctaaacccggtatgtcttgcatttttggatcgggtaaataaagaacgtgtttattcaaaaatgatcaccgccctaaacgtttatactgatgggaatgactttttgtctaaatgcgtgaggaccgctgatttctattctactggtacagaccttaatgttttacgtgaccctatcatgggtctgcgttctaatgatgcagcagcaagggccattagtaccatcaagcacaactttaccagtatcaatatcaacaattacaatgctaagcctatgcacatcattatcgtaaatggtgaggtataccttaacgagaacgcattccttgattttgttctcaatgatttcgaattacataaatataacttccctcagggagaggctggtaagaccgtattggtagaatccctagttcaacgtggttacgtcgagccctatgatgatgagcgtgtcgttcactacttcattccgggtatctattcggaaaacgaaatatcaaacatctttagaaatgggatagggaaactagaattctataaccttcttaagctaaggtggattggtttaatctttgattcctataaaatccctgactcagtgccgggtctttttagcgttaatgccaataaagactttatttacattgacgagcaaaaaacagttactgaatacagaagaccagtgcccggtcgggacgttataactaaaattactgatactgttgagacggctgttcttaaggttaatgatttaggccgctcctctgcctctattgatgttgatatacattctaagaaaaatgaaggctcatccgacgattttgagaagaaagccgaaagtgataatgaaattgataatgacacgcagatagttaaatctgagggtgaggaagcagctgatcctgtcattcctgatatagaagaaagtgaagatgaatcggcaaaggacacggaatcccatgtcctggtcaaccaacttcatgaactccttttaagcgctccactttccaatgactatatagtgtgtgttgatgctgtcccctacctcaacatagataccactatggcattgctgccgggattagatgaaaaagcattcagtgaagagccctatttccaactgacattcagagaaggctctctcgatggaatgtggatagtaagggacattgacgatctgcgtttagtccagctcggcgataactgcgccgggttccagctcacctatcatgagccaagaaggccaacaactttaaagtcacttttcaatacttctatgtatcaggcattagtgattaatgatgagtcttctgttgaaaactctgccccacgtccaaagcaaacgcttgagctgcctcccccacgtgtaaatgcagtcgaagaacattctggcgacgtggaatatcatggaaccgatagtgcatccgcgactggtccgctgaaaactgaggctgtggaatatgaacattatcaacatctttttgagaaagaagatgaagagcatgagatcattgattataccgatttctcacagcttagtgtttctcggccagaagtcggtagttgtgcaacaagctcttcggtccataatgaaaagcttctctccgagccgtcagaattaccagaacttaaccgagaacagaacgctgatccccagggtacgaatgaacgctctatggatgtttctgtaggacaagaaaactcagaaccagatactgagggtaactgcccaccaccagctgaagttgtgtattcccagaccgaagcagccgcaaccagtgtgatggcaagtgaagagcccgccttacctcctgtacttgaagaatcaaatggagagcatgcgcccacagacgctaaggggcatcatctttcgccagcactggccagactgttcgccccaacagcaccggtagaaaaacaaaatcccaagcgcaaccggaataaatcatcggacaaagcagaagtacaaaaaccagcatcacctgtttctggtcacaatctgaacagtaaagtctttgcatctactgaatcagaccaaaatggtgaattctcgcttataagcgaaggtgacgttacagagcttgaatttgtagaaattgcgttagtactgcatcaaattctgtccaaaatggaggtggcgtttaaaagaaagcgcaaaaacagatttatggtaagtactcctaatactctctatctgacccaatcttgcgtggaaaaatttgggtcgcagttagaggctcaagatcttttcaataagcttcctcagtacctcgttaattctggtgctgtgatcaatacaaaatgccatgcatttaacatgcctactttgctggccgcatcagaccgggcgaaagtggacattgaacgaattatcaataacctgaaagaggctgggaacctataa

SEQ ID NO: 151852 - DNA, 2985 bp, Enterobacter cloacae
atggctataaaaaacgaactctcaattcttaccaaagctgagcagcttgatctatattctccgccactattaacccttgaacagcaacgattgtattttacgcaaaacgagatcgagttaacagagtcgaaaagcattcgcctaaggagccatcgatgctatttcattgcgttattagggtattttaagtctaagcctgtcattctttcacctagctttaacctcatctttaacgatatgcagtttatttcaacgcaagttcaaggaggcaaagggctcaggcctttcagcataaataagatgcagcgtgaccgtatttatcaaagaatactgaggctactaaactatcagaaatgggaagaaagtctgcactttgcgccgttgtacgatcatcttgtaatggtcggcaaagcttggcttgagcctcgttatctatttgatgcagccgctgaatatctagcaacgcatagaattgccatccctaaatatactgtcgtacaaaagcttatcagtcgtgttatccaacaggtcaagaagacgttaaataataagcttcgtattcatgtttcatctgaactacacggatttctaaatactattatcgatgacaaagatgggctctccttaagccagcttcgagcaggtgcaaaaagcgttatggtgacagagctaaaaaaagaactgattgtttatcatcagttacagccttatacaagacagattgatgatgctgttaaggacttagccttatcgtctaaaaaccaacaacacttcggtgaaatggtggattattatggtagtaaactaaaacgctttaagcgtccacagcaacacctatggttgctgtgttttctgactcaacgcatacggcaaagcttagagcgactgactgatggttttattcatcatatccggaaacaacaagaagctgcgcatgcgtttgcccaacaggcagtgtttgattcatggaggtcagctgcggacaatgtcaccaaagctgcagaattactccatctgtttgttgatgacagtatcgacgataatcaaccatttgcaacggttaggcaacaagcattaagtgtaatgaataaccaagatatagaaacgctatgcctgtacttaaaaaagcaaaaacgcacagtagaagaatatcaatggcaatattatgatgatcaaaacaccttacttgaacagttattaaggcccgtgtttctatgtcttgaatgccaagcaggtaaaggctcagaagtattggtgacacagctcagaaccacaaaaacagaactattagcaggtaatacattgcaaacaatggatagtacacttatccaacaaaaacatcgtccatggttactcaacaacgatgttgttcatccacagcgatacgaatggttgctttaccgtcaactggcttctcggcttaatggtcgaatttacttatcaaacgtcactaaatatcgtgcgctagaagacgacttaattgcatcgtcaatacagtctgatctattggcatcgtcaacgttggaaaagctaaagcagccgattcagaagctactgcaagtaaaacaaatacgcttagcaacatccctagaagatgttgctcgtcacattgataatggtgataaccgcaatgtgatcatgaagagccgaagtggcgcacgatggcgactgccagttaaaggctcccgatcatttgtcaacaaccccttctttaaacagatgatccccgtcagtattgctgatgtgttgcgttatgttgaacaagaaaccaactttatgcaatgcttcgcacacgtgctgccaatccaaaaacaagtaggcgccaatcaggatgatttattggctattctcattgcgaatgcgacacatcgtggcgtatatgggatggcacaaatatctgatcgcagttatgatcatctaagcactatacaagctaattatattaggcctgaaaccttgcaagaggcaagtgatatcatcaataacgcagtagcggcactccctattttccgtcactatcacatccaagaagacgtcctacacgccagtaccgatgggcaaaaatttgaaactcaccttgagacttttaaaactcgctactcctcgaaatacttcggcaccaacaaaggtattacggccatgacgttagttgccaatcatagtgcgttaaatgcccgtataataggatctaatgagcatgagtcccattatatttacgacttactacaatctaatactagtgatcttaagcctgacgtactctcaaccgacacccatggtgttaatcatgttaattatgccttattggatttatgcggttatagttttgcgcctaggtatgctcagttcaccagtgtgatcaatgacctatttaacgtaactgaaagcgacgacggaaatacgcatctggcgctgaaaaagccgataaaaatgaatgtgattgaggaaggctggcaggatattcagcgtattgtgttatcccttcaagaaaaacgcacaacacaggcattgctagtacgcaaattatctggttatccatctggacaccctatattacaagcattaacggaatataataggctcatcaaagcccaatatttacttgattatattgatgatgcaagtctgcgccaatatgttcaacgagcactgaaccgaggcgaagcctggcatttcctcaggcgagccattgcatcggtcaatcgtgaccagttccgcggaaaaaacgaatcagaaatagtcgtttggaacgagtgtgcccgtttgacggcaaatgcaattatttactttaactcgatgatcctaagtcatctactactgcactttgaagacgttggtgacgaggaaaaagctgcaataactcgacaagtatcacccgttgcatggcagaatattaatctaagcggcacttatcagttcgctagtaaccgcaaactacctgatttacaggaaataactaggcctattgttcaaaatgaagtctaa

SEQ ID NO: 151853 - DNA, 2802 bp, Enterobacter cloacae
atgaatcatattccttccggcgtccggcattttaccgccagacagctcgggattcgtgatatcaccgttcttgcagaatacggtcagagggaaaatacccgccgtgagcatgcagcgctgatacgtcagcactatcagtatcgtgaatttgcctggccctggacatttcgccttacccgtcttttatatacccggagctggataagcaacgaacgtcctggcctgcttttcgacctggcgacagggtggcttatgcaacatcgtattattctccccggagccaccacgctgacccggttgatttcagaggtaagggaaaaggcgacgttgcgcctgtggaacaaactggcactgataccgtcagccgaacagcgttcacagctggagatgctgctggggccaactgattgcagccgcctgtctttactggaatcactgaaaaaaggccctgtgaccatcagtggtccggcgtttaatgaagcaattgaacgctggaaaactctgaacgattttggcctgcatgctgaaaacctgagtacactcccggctgtgcgcctgaaaaatctcgcacgttatgctggtatgacttcggtgttcaatattgccaggatgtcaccgcagaaaaggatggcggttctggttgcctttgtccttgcatgggaaacgctggcgctggatgatgcactggacgttctggacgccatgctggccgttatcatccgtgacgccagaaagattgggcagaaaaaacggctccgctcgctgaaggatctggataaatctgcattggcgctcgccagcgcatgttcgtacttgctgaaagaagaaacaccggacgaatcgattcgtgctgaggtgttcagctacatccctaggcaaaagctggctgaaatcatcacgcttgtccgtgaaattgcccggccctcagacgataattttcatgacgaaatggtggagcagtacgggcgcgttcgtcgtttcctgccccatctgctgaataccgttaaattttcatccgcacctgccggggttaccactctgaatgcctgtgactacctcagccgggagttcagctcacggcggcagttttttgacgacgcaccaacggaaatcatcagtcagtcatggaaacggctggtgattaacaaggaaaaacatatcacccgaaggggatacacgctctgctttctcagtaaactgcaggatagtctgagacggagggatgtctacgttaccggcagtaaccggtggggagatcctcgtgcaagattactacagggtgctgactggcaggcaaatcggattaaggtttatcgttctttggggcacccgacagacccgcaggaagcaataaaatctctgggccatcagcttgatagtcgttacagacaggttgctgcacgtcttggcgaaaatgaggctgtcgaactcgatgtttctggcccgaagccccggttgacaatttctcccctcgccagtcttgatgagccggacagtctgaaacgactgagcaaaatgatcagtgatctgctccctccggtggatttaacggagttgctgctcgaaattaacgcccataccggatttgctgatgagtttttccatgccagtgaagccagtgccagagttgatgatctgcccgtcagcatcagcgccgtgctgatggctgaagcctgcaatatcggtctggaaccactgatcagatcaaatgttcctgcactgacccgacaccggctgaactggacaaaagcgaactatctgcgggctgaaactatcaccagcgctaatgccagactggttgattttcaggcaacgctgccactggcacagatatggggtggaggagaagtggcatctgcagatggaatgcgctttgttacgccagtcagaacaatcaatgccggaccgaaccgcaaatactttggtaataacagagggatcacctggtacaactttgtgtccgatcagtattccggctttcatggcatcgttataccggggacgctgagggactctatctttgtgctggaaggccttctggaacaggagaccgggctgaatccaaccgaaattatgaccgatacggcaggtgccagcgatcttgtctttggccttttctggctgctgggataccagttttctccacgcctggctgatgccggtgcttcggttttctggcgaatggaccatgatgccgactatggcgtgctgaatgatattgccagagggcaatcagatccccgaaaaatagtccttcagtgggacgaaatgatccggaccgcaggctccctgaagctgggcaaagtacaggcctcagtgctggtccgttcattgctgaaaagtgaacgtccctccggactgactcaggcaatcattgaagtggggcgcatcaacaaaacgctgtatctgcttaattatattgatgatgaagattaccgccggcgcattctgacccagcttaatcggggagaaagccgtcatgcagttgccagagccatctgtcacggtcaaaaaggtgagataagaaaacgatataccgacggtcaggaagatcagttgggagctctggggctggtcactaacgccgtcgtgttatggaacactatttatatgcaggcagctctggatcatctccgggcgcagggtgaaacactgaatgatgaagatatcgcacgcctctccccgctttgccacggacatatcaatatgctcggccattattccttcacgctggcagaactggtgaccaaaggtcatctgagaccattaaaagaggcgtcagaggcagaaaacgttgcttaa

SEQ ID NO: 151854 - DNA, 519 bp, Enterobacter cloacae
atggatgagtttattaacccagtgatttataaatatgagcacgttgaaataaacggggttatgcgcacaggcctttattttcaggatgtgcatggtcgggactggtatgaaacgttaactggctggaagggggctgtgtctctggatgcaggggggatagttattgcctatgaaaaagatgtttcttatttaggcatggaggaaggacgcaatgtttatgaggttgacccgcaaaatgttcctgacgatgtattaggcaactacaaatactctaatggcgttttcgaagatatccgccccaatgcagaaacgcttgcggaacaaaaaagagaattattaatggtggaggcaaaccttgccatagcacctttacaggatgcggtggatttaggaattgctacagactctgagtatgcgcagttattagactggaaaaaatatcgtgtccggcttaatcgcatcaaaatggattcagccacggatattcaatggccggaggtgccaggggatgtggcgtga

SEQ ID NO: 151855 - DNA, 948 bp, Enterobacter cloacae
atgtattatggaattgaaaatagattcaggaaaataccattaaaaagcttatcttttaagcagatagcttttttatcaacagttgtttttgcattcaccgcattctacgggtcggcgaataacaatggatacggatggagggtacatgatcagcgtattatttctgagttattatcaaatgataacaaagctaaactgtatggtggctatggcgttcgccagcaggttaaggttgtccttggtgtaaaaaacgaagatccgttgtttgtaatgatgggtgatagttactctagacagtatgcaaatgcaatagatgagcaacttaataaaataggaaagtcagcagttgggttctttaaggacgggtgttttttctcttctgacattatacttaatatcaaaggcaaaattgaaaggacttgcaaaaacgtagcaatgaaggctattgattacgccagggaaaacgacctccccatcgttttctctcagtcctggatgaactacagcgataaagttgcgattggaaatggtgaaagattatcattcaaaagtgaaaaagattacgcaaagtttaatgcagataatattaacagaatacaagatatttatggcgttaaggtaaccgttattggaaacccgccaccttcaggagctggcgttgttgacggaagcttgtcatgtatgacaaggccatcatacctaccaaaagcatgcattgatcaaatgtctgctaattatgatgatgagcgcagagaatacaactccatgcttaagaaaaacttaaataataaaatagtatttattgacccttacgattttatgtgtactaacggaaaatgcccttctgttagtgatgctggcgcgcccctttactcagatggcacccacctatctatctacggtgcaagatacctttggggtagaattagcgcattaaaagatttttga

SEQ ID NO: 151856 - DNA, 1038 bp, Enterobacter cloacae
atgccttccctttcaaaccaggacatagggaaggttacaggtatgtttctaaatcagaaatacactgataaccacacatggaatacaaacattgcatctagtgcagaagttgattttttctgcggaatggagagtggagttgtaagcagcaacacattcaggaatgtatcaacaaaatttatgtcaaacaacaactccgctacatcggaatatcttgtaacccagtcaacggtcgtcaatggaatcagcctgctgtttgatgatggagcagttaatgattatggcatatatcttatctcagatatgaccactttaactggttgtgtaataaggaataaccaaacaaaaccattggggcaatttataggaatatggtcacatgtaacacactctccaggcgtgttagggtctacagtccctgtaggtaacacggttacaggctgcgtggttgacatcagatgtaatgattacaatggccagtactggaggccattcgagtcaccatctgtagggctggggggcggctggcgtagcaatacattcatcggaggaacccttagagacctggtgggcggcatgaacgtagtgtccaataataccttcattaacgtgacaatgcctgttggggtcgagctaagaagttatcatggtctgaacaacatggttaacataacctcaggcgtggcaacggatgccagagatgtcttgccggttgttggtaaaaatagttctaccaatatcaatacagcgggggttgtaattccatgggtatctgatgacagggctttgtggacccttgcggtagaatcaacctcctcggccgccactaactggcaattctttgaagtttcttcttcacctcttaatggcaccgtaacgcaggtgggaggaagataccagaccactcctacagatgtgaatatacagaacgtatatttccagcttgtcataaacaatgggtctctcacacttacgtcagtaggaggaactacagcagttgtaacagttaagtacaggtgggtagaggcaaaaagataa

SEQ ID NO: 151857 - DNA, 294 bp, Enterobacter cloacae; identical to SEQ ID NO: 78648

SEQ ID NO: 151858 - DNA, 252 bp, Enterobacter cloacae
atgccagtcttgctggataccatccctgaaaaggcggcgaaggttccacgacctgatacccgccgctggctgctgttcctggcatttgtcatgtcaggaggggttgcgttaacgctctggaactggacgacagaacgcactggctttattttctggtttactgcgctgggattgcctttctgtctttggggactgcttttctccctgcgccggtttgcatacaaggcagagcaggtgggggccgagtcctga

SEQ ID NO: 151859 - DNA, 636 bp, Enterobacter cloacae
atggttcttcaaaaccatctccctctggaaagtatcttaatcgtaacgagtgtctctgggggatatgtagagtttggtgatggagtaaaaaaatataccgataaggcttattgtagtgtcgtggacatgaccaatggttgcattgttagtgactgggatggtgaggcgtgtggttatagctgggtgggtaataaagatgtattagccagttcaggaggtgtgaacgcagataagtttgacttccagtcgatgtgccccgtgatcaataaaattatagatgatttttctggaatagatgaaaaagatattgccaacctgattcggtgcgactcaccatctaaggaaaatgtaaatacatatcaaagaatggcaaaggaaaacaaaaaagcaaaaagggttgtattgaaatccatttctgaatatctaagcggaattaccgagatatccacggtgaaaactaagtcaaatttgttcactttgccaaatgacaataacaaaaccagtgcttaccttgttcccggagataaggtaagggtgatacagacgtcgccagataataaatggataaatattggctatatcaatgcaaaaggttcaccccttatatcttgggtcaggactgaaacacttgagtaa

SEQ ID NO: 151860 - DNA, 216 bp, Enterobacter cloacae
atgataaagcctggtttcttgaatgttattattttgactatctttactgcgaatgtaagttatgctgatatagaaattaaatccccagaaggaggtcgtttaattttttcccaggaaaaaaaggtgagcattatgaaaataattcatgggggggaatcgttttttatcgtaacaattattcggcagatctcagtcgcagcgacagatattatatag

SEQ ID NO: 151861 - DNA, 471 bp, Enterobacter cloacae
atgacagatctcactcagctaatatcttcggcagtcaaagcatctggtgctgatgaatcaatcaacaaacaattgacagaagcgctaaaaaaagatctaaacgactatatcagtttagagcgacttaaaaacaagctagaagttttatatacttttgagaaaaactatcttgaacttgttaaagcatataaagaagaaattaagttcgccagtactttacaagaggacttgcgtaaagaacgctcaaagtttttttctgagacccttaaagaggtttcagagacactcagtgcatctcaagttgatcagtccgttgcttcaaaatggttaaaagaactagtcgatagttacactaaaagcttagatcttagtagcagcttaattgaggagcatacacttgatactattggaaaaattcgttcagaagcgaaattaagcaaacctaatttatcttctgataacttagaatga

SEQ ID NO: 151862 - DNA, 507 bp, Enterobacter cloacae
atgctattaaaattagcagaagccaagattactcaaaaaccgatgagaaagccactaatcgagttgttaacagctttacgagaggcaagagaggaactagtctcgcgtagtataaatgagcaccctcaacttttttcttgtttatttcaatatgagaagaacgagaatcttctatccctctcttttgaaagggaattctctattttcatcaatagcaacctggaaagaatttctaataatattagtgattttgaagatgttaatttgcaacatacgctgaaagacattgtcaaagagtttattgaccacaaacattccagaggaacttcaaattcttatgttttctttcttgatgataaagtagaccaaattggaaatatattgtcagtctttgaaagagacaaggatagaattgaagaaatcaattacttgagacgaaaagaacaggttctttttgatagattattcgataaattattaggagagcaaaatgggtttattaagtaa

SEQ ID NO: 151863 - DNA, 1167 bp, Enterobacter cloacae
gtgttccgctcttacatcgtcaacattgccgaacagtatttcggtatcacgctgaccgggaacccgatccgcttaagcaacggcgcagaactgcgttttctgtcgaccaacaaaaacaccgcccagtcatacagtggccatctttactgtgatgaatatttttgggtgcccaacttcgcaaaacttaatgaagtggccagtgcgatggccacacatgacaaatggcgcaccacctacttttccacgccatcggctaaaacacaccaggcgtatccgttctggacgggtgaagagtggaaacagggcagcaagaaacgcgcggccatcaaatttccgctgttcgatgagatgcgggacggtggccggctctgtccggatggccagtggcgctatgtcatcaccatggaagatgccattgcaggtggcttcaatctggccaacatcgagaagctgcgcaaccgttacaacaccgccacgttcgacatgctttacatgtgcgtgttcgtggacagcaaggattccgtgttcagcttttccgacctggaagcgtgcggcgtggaggtggacacctggcaggatcacaacccggatgcaaaacggccgtttggtgacaggcctgtctggggcggctttgacccggcacgcagcggcgatttgtcgtgttttgtgattgtcgccccgccgatgtttgccgtggaaaaattccgcgtgctgaaggtgatttactggaagggcatgaacttccgtcaccaggcaaagcagatcgaaaagctgtttgaccagtacaacttcacttatctgggcgtggacgtaaccgggatcggccagggggtgtttgacaacatccagcactttgccatgaaggttgttgttccgattcgctacgacatgaacaccaaaaaccagctggtactgaaggccgccgacgtggtggaaagccagcgtatcgagtgggacaaaaacctgaaggaaatccccgccagctttatgtcagtgcggcgcactaccacgcagagcggtaacgcaatgacctttgttgcagaccgcagccaggacactggccacgcagaggcattctgggcaatcacccacgccctgcataacgaaccactcaactatgaaaacaaaccaaaatcccgctggggtgtaaggaaacaggcagcatga

SEQ ID NO: 151864 - DNA, 810 bp, Enterobacter cloacae; identical to SEQ ID NO: 26634

SEQ ID NO: 151865 - DNA, 297 bp, Enterobacter cloacae
gtgggccaacttaaactgggcaatctgaagtttgacctgtttgcccgctatgcgggcaaagtcctcactccaatcgaattggaaggcttcgccacaagcaaagcgcaaggggatgaaacaacccttgcccgaggtttgcgccttgaactgttcggaatctttccactgtcgggcaaaggcacacactcggtcataagacccggtaaagcccaaagcgaccaaatcccggtacatgctgcgcaggtttctgcgcagcttctttgtctttttgtgctcggtggagagccactgccttaa

SEQ ID NO: 151866 - DNA, 267 bp, Enterobacter cloacae
atgaaaacatcacgctttagcgatgcacagatcatcgccatcctcaagcaggccgagtctggttcacccgtccctgagctctgccgtgagcatggcatcagctccgccaccttctacaagtggcgctccaaattcggtggcatggatgcctctctcatggcgcgcctcaaagagctggaagaggaaaatcgtcgccttaagaagatgtatgccgaggagcgcctaaaggctgagatcatctccgaggcgatggcaaaaaagtggtga

SEQ ID NO: 151867 - DNA, 801 bp, Enterobacter cloacae
atggcgaccaaggctgtggctcattacgccatttctatccgtctggcttgccaggtgttcaaggtgagcgagggttgctaccgttatcagcccgtgctggctgatgaaaaccaggagattgccgactggctactgcgcctcaccgccaaccagcgcaactggggtttcggactgtgcttcctgtacctgcgtaacgtcaaaggctttggctggaaccacaagcgggtctaccggatctatcgggcgctagagctcaatctgcggataaaacccaaaaagcggctagtacgcgccaagccggagccgttggcagtccctgaccaaccgaatcactgttggtcgatggactttatgcatgaccagctcagcgatggtcgttcggtgcggttgtttaatgtgatcgatgacttcaatcgcgaagcactgtgcatcgaggtggatttttccttgcctgcctcgcgagtcaaacgggtgctggagcaggtcatcgagtggcggggcaaaccagccgcaatccgctgtgataatggtccggaatacatcagcgaagagctcaagcaatgggcgcagcagaagaggattgcgctgaggtatatccagccaggcaacccgcagcagaatgcctacatagagcgatttaaccgcactgtgcgttacgactggttgggccattacctgtttgagtcactgaatgagttacaggaatttgccacgaactggctgtgggtttataaccatgagcggcccaatatggcgctgggcggctacacgccgaaacagcgcttggcacaggccgcatga

SEQ ID NO: 151868 - DNA, 270 bp, Enterobacter cloacae
atgagagtcctgaagattgaatgcccggagtgcggctctaaggctgtgattcgcaaaactaaccggaagcaccgcaagattgcagatatctactgcgcctgcgctgacgtggagtgtgggcacacttttgttatgaatttgacgttttcccacactctcagcccaagcgctaaaacgggtgatgttttggtgaagactctgcttcaaaacttatcacccgatcaaaaacaaatggcgctggatttactgaaggccgcccccgccgcctga

SEQ ID NO: 151869 - DNA, 297 bp, Enterobacter cloacae
atgactgcggctcagagactggaagacgtcgtaaaccctttctttaataaattgattgcggtcattaagcaaagcaacgactgtgcctactacagcgtcagctgtgaaatcagggatcacctgaggcggcataatatagcggtcggccgtaaactgcttatcccattcgttacgtttggcatccgacatgataggcaaaacatcagtgagtgccataacgcgtttccagtattcagatctcagagcgttttccgcgaacaaggcatccgcttcagagatactgtggttgtagcctga

SEQ ID NO: 151870 - DNA, 297 bp, Enterobacter cloacae; identical to SEQ ID NO: 26486

SEQ ID NO: 151871 - DNA, 363 bp, Enterobacter cloacae
gtggacgtaaccgggatcggccagggggtgtttgacaacatccagcactttgccatgaaggttgttgttccgattcgctacgacatgaacaccaaaaaccagctggtactgaaggccgccgacgtggtggaaagccagcgtatcgagtgggacaaaaacctgaaggaaatccccgccagctttatgtcagtgcggcgcactaccacgcagagcggtaacgcaatgacctttgttgcagaccgcagccaggacactggccacgcagaggcattctgggcaatcacccacgccctgcataacgaaccactcaactatgaaaacaaaccaaaatcccgctggggtgtaaggaaacaggcagcatga

SEQ ID NO: 151872 - DNA, 204 bp, Enterobacter cloacae
atgtcaaaacgggtgcaaccaatgaaaagtggaaaatattctaagaactgttttgtaaaccatgccagctgggaatacgaaatgatttctgaaacggaagcattgctggagccttacagagaaatgcttgagctctatcattcagcatatatcgaacttggacgaaaaatccgtcaatactcaaaaactaaggtggcacaatga

SEQ ID NO: 151873 - DNA, 141 bp, Enterobacter cloacae
atgattgcaaagctacccaaaatcaattatcccgtactgtcaaacaaaaatggccatgctttttcctcggtggaggatattttatcgatgtttggtagcgaaagtttgggactgtatctggtgggaagtcagggaatgtga

SEQ ID NO: 151874 - DNA, 168 bp, Enterobacter cloacae
atgccggataagaaacaggcttcagtagtcaatatgccagtcaagacgcttgaactattgagtcaattaggtgaaaaatatgatttaacacgacagcagaccttagcagtgttgctcaataagaaaatgaatgagattagtggttgtgataaaataatagttgtgtga

SEQ ID NO: 151875 - DNA, 132 bp, Enterobacter cloacae
atgaaatacgtagtggtgcatattgcgccagcactaataaaaaagctagaagcgctatctaagctgtacggcctgagccgtcagaagaccttagaaattatcgtgaaagaggagttaaacgatgccggataa

SEQ ID NO: 151876 - DNA, 399 bp, Enterobacter cloacae
atgacggttaataatacgaacatctttcatggctcagtgaataacgccggagctatcggggcaggaaatactggtaacatcagtcaacaaaactctatctcggtgggtgacattgcatcccttgagcgtgagctaaagagccacggtcttgatgataatgatgttgatgaattgaaacagcttgttgagcagtacccgaaaccagcctcaaaagaagaagttgaaaaaggtttcggctcttggattggtaagatgacaggcaaggcttttacaggtgctttaaaaattgctggtgcagccgctcctgctgttcttactaatgcactctgtggttacttcgaagtaaccacagagtgcattagtaagaacagcaggagcggctgcaccagcaatttttaa

SEQ ID NO: 151877 - DNA, 399 bp, Enterobacter cloacae; identical to SEQ ID NO: 151876

SEQ ID NO: 151878 - DNA, 345 bp, Enterobacter cloacae
gtggttgcgctggcgtttgtctggggctggctgaccgctgactggcggcgcgacagtctggagctggcgatcaattccgccgcgcaggttgcgggtaacaagtcccgcaaggcgatgcaggagatagccagtgaatccgccagggggctggaagataagctggaggcgcttgaaagtggcagaccgaaggaaatcaggacggaaattcttaagccggtttttactaacgtttgcgtgtctgatgattttatcaggatgtataacgcaaccgtcgacaataccgaacgtaccctatcaggaaaacctgaagcgaaaatgcccaacggaaaatcttccgcgcattaa

SEQ ID NO: 151879 - DNA, 243 bp, Enterobacter cloacae
atgcgccggggcaactttgttatccatcgccatttcattaatgaatttgttataggcggtctggttaggcgcaaaaacaatttctttaccacatacaaccagattaattttctgttccatttaatacgctctctcgtttatttatttcgtcaatcagcgcgttgtgacgcgccgcacacacagaatataaatcctgatattcaacagcaggggcagcaatatccgccccagtattacctttaa

SEQ ID NO: 151880 - DNA, 567 bp, Enterobacter cloacae
atgcagctggcgcggaatttccggatcgctgttgatggccatcgccaggcggcgctgaatgggcagcacttcattctttttgtaggtgcgttcaaccttctccgggtcgccaagcccggcagtgttctgcggaacgatacccgcaagcccggccgggaaacggtgcgcgttcagaatgtcctgggcgctgatgttcttcacgctcgcaaattcatctttggccgaaatgtcccccatctcaataaacttgatcgcgtcaccgtcgccgccagggatattcaccaggatggtggagaagttgccgatccccttgctgtcccgcagctgctgttcaatctcctcctccatttcatccgtcatgctggggtcacgggtatacaaaatgccgcccgtgtgtgcgccgttgtggtagtagcgacggcggaagataaccgcctcactgttcagcagggcagagtggacgccgccgatgtagtccggcagaccatagatgtgctgctgcgggtcgtacatcttgatgaaaatgatatcttcaggcgggaacgccagcggctcgccttcctgtaa

SEQ ID NO: 151881 - DNA, 363 bp, Enterobacter cloacae
gtggacgtaaccgggatcggccagggggtgtttgacaacatccagcactttgccatgaaagttgttgtcccgattcgctacgacatgaacaccaaaaaccagctggtactgaaggccgcggacgtggtggaaagccagcgtatcgagtgggataaaaacctgaaggaaatccccgccagctttatgtcagtgcggcgcactaccacgcagagcggtaacgcaatgacctttgttgcagaccgcagccaggacactggccacgcagaggcattctgggcaatcacccacgccctgcataacgaaccactcaactatgaaaacaaaccaaaatcccgctggggtgtaaggaaacaggcagcatga

SEQ ID NO: 151882 - DNA, 288 bp, Enterobacter cloacae
atgactacattagtatcgcattatgaagggttacctaatgttttattagagtctatcgcttcaaatgtcccttgtattagttatgactgtccgactggcccttcagagatcataattgatggcgaaaatggtgcactagtgaaaatgtatgatattgatgcttttacagatgcaattattgacatatatcacaaagaaatgaagggtactaacattgcacttacgttaaataaattcaagtacgaaaagataatacaagaatatgacaacctcatcaacagtctttaa

SEQ ID NO: 151883 - DNA, 294 bp, Enterobacter cloacae
atgcaggagtatgaaaaggggtttatcgcactggctctgatgggggcgctgattgccctcggaaaaatgctgaacagcgatgagccgatcacgttgcgcctggttctggggcgcgtcattgtcggcagcgccttatcgcttgccgcaggggttgcactgtactttgtgccggacattcatcctctggcgcttgccgggattggttctgcgctgggtattctgggactgaatggtgtagaagcctggctgcgcaaaaaagggattaactttttgggtaaaggagtggggaaatga

SEQ ID NO: 151884 - DNA, 159 bp, Enterobacter cloacae
atgcagactgttggtgataccgctgccctttttagcgttcagtgccgcctgctccggcgtgcggtacgcctcgccaaaggtcaggcgatagccatgctcttcagcccagtggatcagactggccaccatcacggtaaacagctgctgtttctcgcttaa

SEQ ID NO: 151885 - DNA, 276 bp, Enterobacter cloacae
atgacaatgatggatatgagcggacacgatcaggctgcaatgtcccatgaaatgatgcaaaacggcaacgcttctgcccaccaggacatggcggagatgcataaaaaaatgatgaaaggcaaaccaggggccaccaacgaatcagcaacgtcattttcagaaatgaacgagcatgaaaaagccgctgttgtgcacgagaaggcgaataatggtcagtcttccgttattcatcagcagcaggctgaaaagcatcgcagccagatcacccagaattaa

SEQ ID NO: 151886 - DNA, 240 bp, Enterobacter cloacae
atgcctattacgattcatgaaataaaggaacattacgattattacgggcttcatgatatgagctccatgtcaacgacagaataccaacagattttagctaatggtgctttgttctggatggaccatcatgattttattcgcagtactctttccgaagaaatcttggcaacaaacaaagagcaactagatgcaatgattgagcatctacaacaatacagagacagaatgccttctgcctag

SEQ ID NO: 151887 - DNA, 1245 bp, Enterobacter cloacae
atggaaaaagaaacaatctttaataacacctttggtttgggcaatggtcgatttgattggctgaatgcttgtgtcggaacgaatggtttccctgactcattaacttatgctgaaggttaccttagaaccccagagatacttactgactatatatacaaaaataacaagagaggagaagttgatttacttatttatcctattgcctactctgccaggcacggagttgagctttctctaaagactatactcattgacatggcaggtctccgaggattggagatatctgttcctgatgtgacaaaaatccacagcatcaagaaactatgggatgccacgattgatgtcgctgagaggaccgatttacgactatttcacaatgtaaaaaaaatcgagccttatatattagactttgtggctatagacgacacagctcaaacttttagatatcctgagtccaatgtcggagcgacacatttggaaaaaacaccgatcattaaccttgtaagatttgttgtttatttcaaaaagctgacagaaggtttgcgtgaaataattaaacttaccctaaaactgaaagatgagtataaaacaggtacgtttaccgataaattttcacgccgcgacctaattaagctttcaaaatatctaggtaataaacatgactgggcaactacccttccggaggaaaaaaaggaattcattaagaaaaaattcaatctcaatagcaacaaacaacttataagagcaatcgacaaagttgtagggaatagatatctatcatctttaattggcgttgaatttccacttaaacatagcggaaaaaacactctattgctttttaaaaaagcttggtacgcatcccatctaaaagacgtaatgaaaaaaaatagcgtatttcaggacccactcaaggatttagggattagtttatccgatatcagaacagaagaattttttgactacctacgcttaaaaaagcaaatcaccactacttacctacctctcttttcagttgaagaattagcagatttaaccacattggttattatgggccgacaacccaatcaatattacgcagaagattatgaaagagaatttgaaagaaatttaagggatgtacaacaagataaaaatgaagccttccgctatattattgataataccgctgctttatattacattcggaaagctttaaaattattgggctgcaaacaacttgcagttgaaagtcactttaattattga

SEQ ID NO: 151888 - DNA, 480 bp, Enterobacter cloacae
atgctcagttccagcctggcgctgctgggatacacccggcagtgcgccgtatttcagaaccagtccgtgccggaagtggtggagcaggttctgcgcagacacgggctggagggacctgattttgaattccggctggagcgcagctatccggcgcgggagctgataacccagtggcgggagacggatttacagtttatccagcgcattctgtcagaggtggggatttactggcgtacggagatggatgatgtgcgcggtctggatacatacttttttgccgacagccagcttaactaccggtttgatgtgcgcctgccgtaccgcgagccgtcgggtctatttgacggggcggcagaatcggtctgggatgtgcggaccaggcacaggattgtcaccggcaccgtcgccacacgggattacactaccggactgccaccacgccgatggatgcgacggtcagcgtgcgcagtgatgcggtga

SEQ ID NO: 151889 - DNA, 1455 bp, Enterobacter cloacae
atgcttatcagtgctgtcaaaacagcaaaaactgcactggggttaacgacaaataatacactctcctctgaattatcgctggaagatgtttttagcgttctcgagccgcttcgtgaacaactcaatgctgcaaatattcatacctatgtgcgcacaaccgcagaggatgttattgttcgggcctgcgctgcggctgttgaacagaaactattaccacctgccaatgacaaccaggtagatgaactgacccctcattttttggacttattgcatatgacttctcgcgcaatatctccaactgtcaacgaagataccgaggataattttgccaacagcgttagctggggctctccttcaccgaggattgatgctgcacgaatttttctggatgtaattcctttacgtcccgatctgtatgatcgactgaaacctgatatcgaaaggatgttgattgaccctcacccggccgttcgccttcaggcatcaacacgcctgttaaggttgtgggttattgctccggatagcgtatggcattacctgaatgaacgcgtggagcaggaaatcaataccggcataatagagcatatggttggggatggaattagacgtctgctatataccgacccgacgcgttctttctgtctcatccagaaactgctgggacgttttagtaacgatcctgaacgtcagcaccgtattcgcaagatagttagcatcgatctggcaattctttggggagtccatgaaatcagggaagcatatgatattcttcaatgctggattgtcgatcccactatttatagccatgaacttaaacaaattttatttacattaagggatggattcgttcttggctttgccgaacagagtacaccgaaggacattggaatcagacgacgggcgttagatatagcctatagcattattgatgctgccggaaaaaaactggaagagtcttcaccccgcaccgatctgacagagattgaactggaagacgtaagacgctgttttgcaattatagacggagcatgtctgcaacttcgctttgtttgtgaagggaaacataatcctgagaaaccattagaaaaagaagagcttaagagatttttaaacgaaactgaactgcacatgcggcgcattggtgattgcagcacgccacacactatttacaaccttctggaactgctggaaacgcttgttcctgtcgatcctgcaaaatgttttgatctaatggcccatgcattacgtcacggaacaaggtttggtttccagtacgaacatatgggaatggaacagctggtaaaaatgatgggggtatttcttgccgactataaaatcatttttgaagaagaacaccgacgtacctgtttgatagaaagtctggatatttttatggatgcaggctggccatctgccaggcgtttgctttatagcttaccggagttgattcagtga

SEQ ID NO: 151890 - DNA, 2796 bp, Enterobacter cloacae
atgaacaggaaacagaaatcagcgtctgatattttcgaacgctgcgtgttgaccgcgtggggccgaattaccacggaaccccggccatcagatctgttagccgaacttacccgtctgattgtcgttcacgttgttgatgttgaaaatatcgcatcaacacttcagatgcgacttagccgcagccttgccagagaaactgactcagcagcagccctgagtattcttgtcaccacctgtggggagatgatgtcccgacgtgatggctgtgatgccttattattacgtaacatgctggcaggaaaagggattaaactggccgcaccgccacaatatcaggcggatatccatcaacttatccgccattctcagcacgttgctaatgtcttgcagcagtatgaaactatcgataatccctccggccaaccgcttactttgcacagggaatgccaggatgcagttgagcaggctgtgcagtccggctcgttattaattattggtgaacccggagccggtaaaagcggcgtgctgaatgcgctggcacgtagcctgcgcaatcgtggggacgatgttcttgaactggcggttgatcactattcggttgagtcgctcgaaggactgagccgtgaactccggctagatcattgtctgactgaagtgcttgaagcatgggatggtacgtctcacggctggctgattattgatgcactggatgcgacccgtggggggaaaggtgaggccgtttttcgtcccctgattgaacaggtactgaatcaaaaggggcgatggcgcgttattgcctccattcgcagtttcgatttacgtatgggggtgaagcttcgcgatctgtttaaaggacatcctccagtgtcggaacgtgccgatacgcagttttcttcggttcgccatattgttattccacgctggtcagataacgaattcagccagttactggaacaatcttcggcgctgacagcagcacttaagcagctttctgacaggcttcgcgatttagcaaaagtaccgtttaatacacgattgctggccgacctggtttcgcaatatgcggatattaatctgagtcgtatttcatcccagagcgaattattaaaactctactggcagtatcgcgttgagaaacatgggctgaacgcccggcagtgtcttaaggctctggttgatcatatgattgccactcgttcactcagggctccatccctgttgacgggcacagatgctgatatgattgatacactctctcgtgaaggcgttgtcgtcagggaggctaacgatcgctgggtacagtttcgtcatcatctgctctttgactatgctgcggcaaaaatatcattcgatcctgacgcactcattgcggaaaccttgcgtttccctaaacagcaggctcaggggttgatgctttctcccgcactgggttttgtgctccaggaaatctgggattataacgaagatcatcacggtttctggcaagcagtaagtcatctggttaatgatggcgatggcgatcccattatccgtagttcgacaggccgaattgcggctgaatatcctgttgcacaaaacgacctgctctggctcgctaaacgtgtggcaatggacgatcagaacgttatttccacgctcagtcatctctgcggcgcgctggcaattcggtttgaagatgaaaaagaagtggctctgcttccatgggtatacctggtctctgctttaacgcctgacatcaataaagtcgcggagacgttgcgatttttgctgcatccgcttactaagcaggtgactgatcctgatctacgcaatattctgggtacagcctgccgcgccgtgctttcttatggccttaagcagagtgagccgggctattttgtcagaagtgctatacctctcgttgcagatactatcaataccgatgttgatgcatcttgccgtttactggagcaaattatttccgtcaaacgtctccagcattttggttcagaggaaattcccgtactctgttataacatcaataaaatcgcagatcgtgcgcctgagtttgtcgctagggtattcgagtttgtctacagctacgatgtcaccgaagaacgggaaactacgcttgggaacagccgaattctgcctttgagatcaaatgcccgacaggactatgaatcggctcgttattccctcggtgagtttttctcccattttctcgaacaacatcccgaacaggctgttgatgctgccgttaacgctttaaatggatacgttgcccggcgccatcctattgattcccctatgatgcatttatccatttccgggaatgatatctctcttagggccgatcgcagccacatctgggcgtacaatcctacaggcgaacacgcgcatgacggagaagtactggttaagaaactatttcagcatttgaaaagcgcgactgaaccagacgtgttagttctcgcagaacttattcgtcaaaaagcctcactggcaatcttctgggccaggctgtttctggcggcaaatgaacgtaatgatagcctggttgattttctctggcccattgcagcgcaggaagcgtttatccggaacgaagatactcgtaaagatgctatcgatttggtcagcaaaggaattgcccggcgtccagtggagaaaggcaaatgctggagaatgcagcattccagtataatttctctggctatatttacccggaagaggcaaagaaacgactgttatatcgtcttttcaacgcgattggatcagataatctttctactgaagccgtccgggactttctga

SEQ ID NO: 151891 - DNA, 462 bp, Enterobacter cloacae
atggctacaatcctcactcagacacacccgttacttgctgttccctttaatgccgccacggatttcactgtactggccgatcattgcgaaaacttcgccgaaactctgattgaaagcaacgatcccacactcaaaatggcgctctgcggcagactcaacgcctgtctgacgctgttgcagcccacgctgttagaacccgttcctccccatcttattgaaagcctgaccgttgacaccctccctgcaaattccccccgtttcgagcctgaatgcacagagctttgtcgctactgtctctccctgacgcagatgctggcagggcaaggcttttactctgaaatggagaaacaccttagctgcctgctgtatgaactgatcaactatttcgctgcggaaatgaaagcgccgcgctggctccgcactgccgatggcgtgaagtttatcgacgaggtggccgcatga

SEQ ID NO: 151892 - DNA, 222 bp, Enterobacter cloacae
atgatgcgacaggactggcattctgccgacattattgcggcgctgaaaaagcggggaatgtcgctggcggcggtttcccgtaatgccgggctggcgtcctccacgctggctaatgcgcttacccgccactggcccaaaggcgaaagattgattgctgaagcgttggatgttgcgcctgaggacatctggccatcgcgctaccgtaaatcagaatatcgataa

SEQ ID NO: 151893 - DNA, 354 bp, Enterobacter cloacae
gtgtggacaattaaaacaacggatacgtttgatcgatggtttgcctcgctcaacgataccgacagggtcagcgtgcttgcagcactgctggtcctgcgggaaaaggggccgggtttgtccagaccttatgccgatacggtcaggggttcccattacagcaacatgaaagagctgcgtattcagagtcggggcgatccgataagggcgtttttcgcttttgacccgacccgtaccggtattgtgctttgtgccggaaataaggtcggcaatgaaaaacgtttttacgatgagatgctccctgttgctgacagggaattcacgaactggctgaacacattaaaagagaaggagtag

SEQ ID NO: 151894 - DNA, 369 bp, Enterobacter cloacae
atgaagcggcttgcgcagcaggcaggcggtagccataagaccgttcacgaccgtattaagctggcgcagcggttttgtgaacgtctggtactggcgcagaatgtgcagatccgccgggtggagcagcttaaggtgcggcatatagaaggttatgtccgtgaacggctggcgcagggcattgcaaagcgttccctgcaaaatgagatggcggcggtacgttgcattctgaaacaggttgggcgtaacaggctggcgcagagtgagcggctgaacaaccgtaatcttggtctgtctggcgcatcccgtaacggtacaaagcaggctattacgccggagcactatcgtgacgtgctggagacggcgcgttaa

SEQ ID NO: 151895 - DNA, 522 bp, Enterobacter cloacae
gtgacgtgctggagacggcgcgttaaagatccggggctggcggcagcgcttgagctctcaaggctgatgggattacgttcgcaggagacggtgcagagcgtacagtcgctgaaaacgtggcgacaggcgctggaacgtggtgacacccgcttaaccgtggttttcggcaccaaaggcggacggccccgcgagacgattattcttgatactgccgctgtcagaaaagcgctggataatgcgctggcagtggcagaagatcgacacggcaggctgatagataagccggatctgaaaagcgcgatgaaatactggcacagtcaggagtcacgtctcggcttgacgggcgcatattccccgcactcgttgcgctatgcgtgggcgcaggatgcgatccgtcattatctggcgcagggattttgtgagaaagaggcgctggcaatgacggcgatggatttggggcacggcgacgggcgcgggcggtatgtggcgcaggtttacgggcgaaaggatagtgctgattga

SEQ ID NO: 151896 - DNA, 1008 bp, Enterobacter cloacae
atgactgaaaaagccgccgcgtcaccggaaaaatgctttgaggccattgcggtggcatggcacaaaaccaacaaaaagtggtcggctgactatgcagagcgcatccttgccagtatgaaaaatcatatctttccggcgattggtcatctgcccgtcactctgctgaaaacgcagcatttcacggcgttgctgaaagttatcgaggataaaggctttctggaagtcgcgtcccgaacccggcagcaactctgcagcatcatgcgctacgccgttcagcagggactgaccgaaaacaacccggcgcagcttctggaaggtgtcacagcaccgccggttaaaaatcactatcccgccctgccgctggagcggttgcctgaactgctggagcgtatcggtgactatcaacaggggcgacagttaacacaactggcggtagcgctgactttgcatctgtttatccgttccagcgaactgcgctttgcccgctggagcgagatagatttcagacataaaatctggaccattcccgccactcgcgaggcaatcgacaaagttcgtttttcaggtcgtggcgctaagatgcgtactccgcatattgtgccattgtcccggcaggctattactattctgaagcaaatacaggaaatctccggccatctggagttggtctttccccgcgaccataacccgtataagccgatgagtgaaaataccattaaccgggccttgcgcctgatgggttacgataccaaaaccgacgtctgcgggcatggcttccgggcaatggcctgtagcgcactggtggaatctgaactctggtcgcgtgatgccgtggagcggcagatgagccatcaggaacgcaacagcgtgcgggcggcatatatccaccgcgcagaacacctcgatgcccgtaaagccatgatgcagtggtggtcagactatctggacgtgagccgcgaggggtacgttgcgccctatatttatgcgcggcgacataaagcggcctga

SEQ ID NO: 151897 - DNA, 174 bp, Enterobacter cloacae
atgccgctgggaaaggccagcggcaatcgaacagggtttggtgaagcatggagcaacgacaacaaaaacaacaacaacaacaacaacaacaacaacaacaacaacaacaacaacaacaacaacaacaacaacaacctgaatagcgctaactcaacttcaaaaatacgagggtaa

SEQ ID NO: 151898 - DNA, 1068 bp, Enterobacter cloacae
atgacaagtaactctaatttttttgatgcttctgaattttttaatattcctgaacaacctgatattcccgatgcgttttatcgtgttgacgaattctcgaagaaatttaatgtggaacttgaagacattatatccatatggctggatgataaaataagtctctatgttaatcttcgttcagagtactgtcgaattgttcgttacgcgaatgagaaagaacttcgctatgacacatttaacatcagcattggcagggatttttatcaaagtaaacataatcaacagtctgcaataagggccttcataccctgtgatcaatctgaaataaaagagtatccaaattttagtgggcgcagtttttttaaatacgtgtacaatggatacgccagtggtttttggagactcaaacctaccaaaacaacccatttggcaaagggtaattataaccttaagaatgctaatgcagtttgggtaaatacccctggagaagttacagtgtatggtcatgataacaaagatcatctaatttttaataaagatttctttgtttcccatgctgacttgcagattgatggcgaaaactatcataagcttctcaaatcattagcccctgaaagtagtgaacttataagggcagaaaagagtcatatccaaaactttatcactgccatactaatttataaatattgcaggaagaataataataaactgaaggcgatgcctgcgacagaaattttaaactcacttagaaattcttgttgtaaagagattgaagaagttaaacggtcaacagtcgatcgatggtttaacgattattttgataaaaagagtgactctctcacacaaataaaaaatggtggatggtctcaaaaaaaagatgatgtcatatacattctatccaagtcgtactactggagtgatgattttgatgtaatgcttgaattgattgtcaatgatttattaagagaatctgagcgactcaacttacaaaaaacaatcacccaaaaagaattaattgattacctaagaaatatttacttttcccctgcatataaaactgctcaataa

SEQ ID NO: 151899 - DNA, 237 bp, Enterobacter cloacae
atgaatacaacatttacccccccacccgcagaaaaacgacttcagatcttgcgcgattacggtgagaaaggtgaccggctggtgcgggagaaggaacgccagtatatcacgtccatttctcggtcaacagcctggaaactggaacggtcaggtaagttccctcagcgcaagtccattggtctgaaatcctgtggttggttgttaagtgacctactctgttggatcaatgaacgctga

SEQ ID NO: 151900 - DNA, 1047 bp, Enterobacter cloacae
atgagcaagggacagcaaactttgctcaaaggcccccgtatggaggaactactgcgaagttatttcctcaaggctggatactatgtagtgcgaggggttccgtttgtgtatgagagttttgacgttacggatattgacctttggctgtatggccggacgtcatctgtatcccgtgaaataactctggtggacgccaaaaacaagaagacgccgcaagctatagaacggattttctgggtccaagggcttcgtattgcgaccaaggctaccaacgctgttgtcgcaaccacggagaagcgccaggaagtgaaggattttggccgtgaattgggagttattgttctcgacggcaccttcttaggtaaactagacaagacggatgatcctaacgcgttgaggtattctgacgaagagttcttctcaaagattgatgaatactctctgagcaagctcgatggcgactggcggggacgcatggtacattccaaaagcttgttggcgaaatcactttcgtttgacagttgcaatgagtggcttatgcagggaaaattttttgcaggacagtcgataacaaaaagtaatcagcgtgaggctgctttgcgttgcctctatatgatttgttcattcattgctatcgcggtagatttctgcatgaaagagatttcgttccatgagcagtcggagcgcagtgcactcattaaggacggatttacctacggctcgaaaggcagcgcgggtctcaagaaaatattgaatgtttcgataggacttatagagcagcacgcaatagatggggtcgcgacttccagacaggtacggtccagcattgaacgacaactagctgctctcaacactgctattcttggcgaattctttgcaaagcatgatgttgccagaacacttttcgctgtggcaaaagagtttgagcaactagcgatgagcagggacttcctttctgatgctaaggcaacgcccgagctccgtagcgtgctctattgcttgctcgattattgggaaattgaccgggttatgttttctagcccgtaa

SEQ ID NO: 151901 - DNA, 1263 bp, Enterobacter cloacae
atggacaagaagaccaaaggttcgtggctaattcatcacactaataaactacagggaataacaaatcaagccggttacgataagaccttccttgcaggtaaggctggcattttgctatctgcaatctcgtcaaataaccacgcaacactgaacaatgatcgcctgaacgtcctggcgcaagcggcgaatatcaatacgaccttcgagcttccaaaactcattgaggttctgaaacagcagcaactggttgacaccgcgaatggtggtgttgctgttcttggtgtcacaactgcaaagactctccaacatacatcagacatatttgatgccctcatgccaggtgcatctgaggttgcctcgatcgcgcttgcagagaaagcttcagtcgagcccgtactatctggccatgtttccacggaattggccgacttatataagctggcaaaacccgatattcagaggctgatgtctgatgctgaacaaattggattcgtggatgctgaggacctcggtgccgggcaaacattgttatttaatgggaatctctttcgtcgtgaaacgacccgaaaaataaaaactgttcttgactcgctttcatcagccgagcaatcaaaactcaatgaacttactgatacattgaaaaagcgcgcctgcgtcggcacggatttcgcaattcaactccttggagaatctctttttaagaaggttgcagccattggattgtttgatatcagcgttgtcagtaatttgaccgaggatgctggattcctgacgttgccatccgcgttttcaaagtatagcaactcgatggttgatgacgcatttgatctggctaaggcgtttgtcagttctgtgacctatgggatgaccaagagcagctatgccagggggcagattcagatggttgacgcgctattgagcacactggttcgaggtgaaagtgttggaccggtgaatgccattgcacaggactacaaagtgctggaactgaagggggtcgtcgaagtcaagcacgggacaaaaaaaggacgcagcggcccaatgctgaagttgttgaagacagaggttggcgagcttgcattacaagctatcagacaaggcgacgttagcgaacattctctgagctcacttccaactgcggcagtcagcatattcaatggcccggaacataatcgtgagatagttcggcgcgcacaaattaaagcgagccctaaagctaccaatgacatgctctctatccttcgcacaggaggcggtatatga

SEQ ID NO: 151902 - DNA, 249 bp, Enterobacter cloacae
atgattctaccttccaagcacctgcagcaggaccgcgcactattgaccgttggcgcgcatgtgttgacctttcttgtgctgccgaagaccgtttctgcgctttgggaggagttgaacaggcatgacgtaagcgtagctgcaatgccgcggaaaatcacctacgattggttcctactcgcgctcgacctcctgtacgccatagggactattgaactcaaaagcggccttgtgacacggagaacgccttga

SEQ ID NO: 151903 - DNA, 921 bp, Enterobacter cloacae
atggatcgcatacagcagctcaattacgaaaaagacttccgcattgcctttttggaatctaaaggagacagctttcaacatctgttcgaaaaactcatgtcaaaagctcatccaaacgacttcatggcgtgtcgcccgtggggcaatgttggcgatcggaagaatgatggttacctgccctcggcgcgcatcttgtaccagagttacgcccccaatgaattaacagctgccgaagcggtcaagaaaatcaatgaggatttcgatggtgccaaagagtactgggaagaatatttcgatgagtggacctttgtccacaatgctcaagatggccgtttaggtccccacattattgaagcgctgctgaagttgggagatgctcactcccaaatcaagatcggccattgcggatatgaggaaatgctggcgaagtttcgccagttgagcttacaagatcttgagtcttggttcggtccctcgctgacaatggaagcaaacgtgaatttgggattcagtgatctagttgccgtgctcacccacatcagcattatgcccgtacctacgtccagcgaggtgaaagatgtatcgcgcggaaagatcgaggcaaatcttttgtctcaggctgttgccgattttttgaaaatcggtatgcagaagtcaatgctcgtggcccagtttttcaataactggaggaacccggcctacggcgagcagatcgcacaggcattcaacagccaatacagggctctacgtgaccaagttcctccgctgcatcccgatgagatatttgggcggcttgaaacgtgggctggaggcacagccaatatcacgcctacacataaggcggcagtgctagccgttatggcatatttgttcgacaaatgcgaaatttttgaagacgctcaagcagtgggaacagtatga

SEQ ID NO: 151904 - DNA, 339 bp, Enterobacter cloacae
atggcctcgactttgcaagtggcgcggggcgaagcccggaagcagtacattaggatgttcgacctctttatcaatctgcaaatgacattgaggcacctatcgggcaaaatgtggctacaaattcctgaggcagatatcgcaacaagtgacgtagttcgtatccagattgacaggcatatcaaaaaggaagcctcaaacttattggtcggaattggcttgtccatatcggatgccatccggatactgttgacgcgaattgcgactgataaggcgcttacatctgatgtcaaccgtggacagcatcagactggcatcaaaagaccacgaggtatcgcctga

SEQ ID NO: 151905 - DNA, 1728 bp, Enterobacter cloacae
atgaaactctcagacgagcagaaagacattatagatgcgtctttaggatcaatttctgttactgcatgcgccggaagtgggaaaacagctacagccattcggcgtctgctctcaattcgacagaagatgcaaagcagtcgcggtcgcgttgtgctgttgtctttctccaatgttgcggtcaatacattcaatacagggtatgcagagctcgctgctgacctgccggacgatactaatcgtctacgggttgaagtcgatacacttgatggtttttttactaaacacattttacgcccccatgcccaccggactatggccgcaaatcaggctgcgtacttggtgtctggctcggagcctttcctttccagttttcgttattggcctacagacggtcaccctcttcagctcaaagacataaaagtaggcatgtttaataaagatttcttttttgttactagcagtagagatgagtcggagctgcttgatacagagaaggttttaaagattgtgaaggcgctaggacggacaggagcctacactcatgagcttggccgatactgggtctatcagactttatactcacaaccagccatattacgtgcgctcgcagctcgctacccgcaaatccttgtcgatgagtcccaggatctgggtactgtgcatcaggaaattttagaattacttataggtgctggggttcaggttacgcttatcggggatgtaaatcaggggatttatggcttcgctggtgctgacggtgagtttctgaagagctacgaggatcgttttgaggtgaccggctacaagcttactcgcaattatcgttccttgcctccaatcataaatatcgccaacactctttgtggccgccacgatgaccctgaccggggcgaggaacaaggcggagcatatttcattggatacaaagattcagaaattcccaaattaactgaagcattcaaggcccatattgatgagttaggtatgcaacatcgggattcagtgatcctctgccgtggtgcggacagagtcgaagtaattgcgggtagaacccccccgcctgggcaaggtgtggtcaaagtattagcagaagcatcgttgttaagggatcagcataataactatcatggatgttttaaattggtttgccgggctatcattggcttactggataatgccccccataacctcatttcacgacttcagaggttatcacatgatgacgagatgacaggacttaagcgactactatggcgtttcagtcgtagcgctgatgtgggactcccttcgtctgcgcttatcgcgaaaacagcttggcactccaagctattaacgaatgtcagagtgcttctcgcagagattgaagaacattacggatataaagtttctggcaagttaggcactaagctcacaaaaaaattattaccggatcagtcattggccagtgcaggttcggctcaaggacatgggctcagagtcgagacggttcaccaagttaagggggagtctatcgacgcagttatgtatgtggccaagaaagctaatatcaaagcgttgctttcaggtacaggtgatgaagaaggacgtatcgggtatgtcgcgatcaccagagcaaagaatttgttctggctggctgtgccacaatcatgcctaaaagaattgaaggctaatctcattaacgctggttttcaggaacggatcaaatcagccgtcattgaccctgcctga

SEQ ID NO: 151906 - DNA, 1875 bp, Enterobacter cloacae
atgtatcttgcagagctcacgataaagaattttcgcaaactgcgtgaagccacgctggaatttcaacccggtttaaatgttctggtaggcccaaacaacgtagggaaaagtgcagtagtcgatgcactccggacgcttcttgcaggtcatgatgagacttatcctcgcctcgatggttctgataggcaccgtccgcatgagggcgacccaactggcgatatcagcttccattttgtcttcagagatctcagccttgaagatgaagcggactttatagctgccctcaagccaaatggggacaagaacatggaggcgcatatccatgttcagtataccgatatggataagacgggacgattcaaagtccggcgctggtgcggcgatcacccagaagtttcacttacctcagatatgatggagaaccttcggggggtctatctcccgcctctccgcgatgccgcgcagggccttcgtcctaaccgtaacagccagctggctcgattacttcatttgctcaccgatgatgcaggtcgtgacacgataaacacggctttgaagaaacttgacgaaacacttaaacaagacaaatccattcagagcacccataaagcgatatcaagcagacatggttccatgatgggtgctcagttagcgcaggagcttgccgtcgggctcagtgtgactgattttcagcgcctctcttctcgactgaccctgacggctgaagccatggagattgagaagaatggattgggcttcaataatctgatcttcatggcggtagtactcagtgaattggctaaaaatactgattctgctttcaggagtttgattattgaggaaccagaagcgcatttgcatccccaactgcagcgtgtgttgctgcagtaccttgcagggattccaacgggtgaaggcgaaaagcctgtacaactgtttgtcaccagccattccccaaattttgccagtaattcaaagctggactctcttgtatgcttgattgagaacgaggctggcattgagaccttctttccacgtgatatcaaatttgaaaagggaaaacgtgaaaagctagagcggtatctggacgtaactagggctgaactgttttttgcacgccgggtaattttcgttgagggtgctgcagaactcatgttgattgacgcacttgctaagaagatggactttgatctcagggaatatggggtcagtctgattagcgttgagggacttaatttcgactccttcctcccgctttttggagagcaggggctgcgaatccccgtcgctgtagtgactgatgcagatccatttgaagaagaagaggttgaagccgtggcagaggttgaacagggtgaagaggaaattgacgacttactttctgaagctgcctaccaggaagaaacagacgctccggatggggaagaggctactggcgatgcggagaaaaagaaaaaagttaaaaggaaagatgtgtatccagcattgggagatcaggtgcggttgtcggcaaataccatcaagatgaagaatctggaggatgattttgtgaaggtttttcatggattgaaaaccctagaatatgatctggcactcatcgaggcggaccgcgatccaatgcttactgcattagccgacccacatccaaaaatatctaaagctctgcgtaagatagttgatgcccagccagataatacagcaaaagccaaagcgttgttctgcggtatgtttgagcgaaaaggcaacggcaatattcagaaaggtcgattcgcccaagcattagctgaacagatttcgaaagagaatagttttgaagttcctgattaccttaaaaaggctatccagcatgtctgtcagggagtggacaaagcatga

SEQ ID NO: 151907 - DNA, 864 bp, Enterobacter cloacae
atgaacaattctgaaggtctgaagcccctgcagaactctttatcgggcctgccacactggatgtctgagcgcattttgcagcagataaatcagttgacccgctacaagccggtgattggcattatgggtaaaaccggagcaggcaaaagcagcctgtgcaatgccctgttttctgggcaggtatcaccggtcagcgatgtgaccgcctgcacccgtgaacccttgcgctttcgcctgcaggttggtgagcgctttatgaccattgtggatctgcctggtgttggagaaagtgatgctcgcgatgcggaatatgccgcgctttaccggcagcagcttccccggctcgacctggtgctgtggctgatcaaggccgatgatcgggcgctggcggtggatgagcatttttatcatcaggtaattggtgagtcgtaccggcataaggtactgtttgttattagtcagtcggacaaggttgaacccatcagcggaggtgaaaagctgtctacagagcagaagcagaatatcagccgcaaaatctgtctgctgcatgagctgttccagcctgtaaaccctgtctgcgcggtgtcggtacgttttcagtgggggctgagggtgatggctgaacggatgattcgttgcctgccacgtgaggccagtagtccggtggcagtacagctcagtgctccatttcgtaccgatgctgttaataaaaaagcctgtgacgattttggtgaaacggtcggctcggtactcgatacaataagttccatgcccctgataccggccccggttcggacaataatccagactgtacgcgataccgtggtatcggtcgcccgcgccgtctggaatttcttcttctga

SEQ ID NO: 151908 - DNA, 237 bp, Enterobacter cloacae
atgtctgggcttcaattactgccaccgggacctttcacccgacagcaggctgaagcggttacccgccgatatcgcaatatcagcattgaagacgaccaggataaccacttcctcctggtggttcgtgactctgaaggtccaatggtctggcaggcgtggcgctttgaacctgatgtctgtgaagggcttaaccgttatattcgcaagtcaggcatcctcagatcatcctcctgctga

SEQ ID NO: 151909 - DNA, 459 bp, Enterobacter cloacae
atgacaacacaaaaccaacacgaattgatgtctgctaatgaacctcaatttgaccttactgcagcaacagtacctgacgaacagcgcatccgcttctggccacatcactttggcgctatcccgcagtggataacgctggaaccgcgtattttcgcccggatggaccgcttctgtgatgagtacagcggtggtatctggtccttttacacgctcagcaatggcggcgcgtttatggctcccgatgctgacagtaacgacagatggcatctgctcagcagcatgaacggcaatgatgcggaaatgagcgcggaagccgccggtatcgctgcctgcctgattgaatacagccatcacgcctgtcgcaccgaatgcgatgccatgactgagcactactaccgcctgcgggattacgccctgcagcatccagaagcccacgccattctgtgtatcatcgactga

SEQ ID NO: 151910 - DNA, 318 bp, Enterobacter cloacae
atgagtaacatcacatggggcctgcagcgggatatcacgccgcgcctgggagcccgccttgtgcaggaggggaaccggctgcattacctggctgaccgtgccagcatcaccggtaagttcagtgacgtcgaatgtcttaagctggatgtggcatttccgcattttatcagccagatggaattgatgctgaccactggtgaaatgaaccctcgccatgcccactgcgtcatcctgtatcacaacggtgtcacctgcgaagccgataccctcggcagttgcggctacgtatacgtcgccatttatcctactcagcgctaa

SEQ ID NO: 151911 - DNA, 342 bp, Enterobacter cloacae
atgaaaactttacctgcaacaacaccgcaggtggcgaaactatgtctgccgcccgtggccgtctggcaaatgttactgacacgcctgctggaacagcactatggcatgacactgaacgacacgccgttcagtgatgaaactgttattaaggaacatattgatgccgggatcacccttgccgatgcagtcaactttctggtggataagtacgaactggttcgtattgatcgccgagggttgagttggcaggagcaatcaccatatcttggggcggtagatatcctgcgagcacgacaagcaactggcttgttgcgacggagccgtaataactctgtatcgtga

SEQ ID NO: 151912 - DNA, 585 bp, Enterobacter cloacae
atgtcctccgtaaaggttcagcatttcacgcccctggctaagtttctgcactggctgatggcttttatctggattggagcctggtttgttggctatgttgcggtaacgtggcgcgatgagcttaacggggaccattcgctcaccatcgctcataaagctctggcaagtacgttactgttgctcgtcatcatacgtatagcctggcgtctgacgcatcctgctccgcctttaccggacagcatgagcgcagtcatgcgcagggccgcccatgccgggcattttgtgatatacgcagcaggcctcatcgcactgccggtatccggatggctctggagctcggttgctgacaagccgattatggtgctctggtcattcaggttgccgccactggccgcaccgcatcccgaatattatgaactgatgaaagatattcacgtcactctcgcctttacaatgggcgctgtcatcgccggacatattctgattgctatcaagcatgcattgatcgaccgggacggcataatgagcgggatgctgccaaaagctttcatttcacgcaaactcactgacataaaacgtcagtaa

SEQ ID NO: 151913 - DNA, 525 bp, Enterobacter cloacae
atgtctaccgatattattcgcggtatggaccacgtcggtattaccgtttccgatattgatgaggccacccgcttcttttctgaggcttttggcgcagaagtcatctatgactctgtttcgccgtcagatgacgatgtaaaaggtgaagaaacggaaagcattctgaacctgtttccgggcacgaaaattactacggtaaggatgatgaagctcaagcacggcccggggctggagctctttgaaatgaaggggcctgagcagagccagcccgtgcggcccagcgattacggcctgcagcattttgccgtgtacgttgatgacatcagcgaggctgtcagcctgttcgagcgggcaggcggtaaaatgttcacctctcctcagcccctgatgttcccgaccgaggtcggagagaataactttttctgctatggccgcaccccgtggggcagtgtcattgagctgatttctctgccttcaaagcttccgtatgaagaccacacgtctctgcgtcgctggaagccctga

SEQ ID NO: 151914 - DNA, 567 bp, Enterobacter cloacae
atgtctcaggcacaacctctgaaatttgtctcactgctgggcagccttcgcgcgggttctttcaacgccgttgtggcccgtaaccttgacctgctggcaccggaaggcgtggaagtcagcgcgctcggctctgtcgctgacataccccactatgacgcagacctgcagactcaggggtttccggaagcggttgttgcaatgggaaaagcgatagcggcagcggacggtctgattatcgtgacgcctgaatataactactccgtgcctggcgcgctgaagaacgcgctggactggctttcccgcctgccggacacccctgtcgccggtaagccagttgccatacttacggcttcacccggtgccataggcggtgcgcgggcgcagtatcacctgcgtcagattctggtctttctggatggcagagtgcttaacaagccagaggtcatgattggaaaggcggcatcccggcttgacccggaaaccggcagcttaacggatgcggacacccgcagcctgattacggtccagctcactgcgcttgcagaaatggcgggcaggcagggctga

SEQ ID NO: 151915 - DNA, 930 bp, Enterobacter cloacae
atgtctaccgtatttaccgctgaatccctgcggggaattaccaatttcgtcacgacggccaggtcgagcagctttactgaagctgcagagcagctgggtatcaccaaatcggccgtcggaaaaagcgttgcacgccttgaggaaaggctcggcacgcggctgtttcaccgctcaacccgcaagctgagcctgaccagtgacggtgaggcctatctcgccagctgtctgtctgcgctggaaattatggattcagccgaaaatacgctcagcaggcgccaggataaccccgccggaacggttcgtatagacatgccagcctcattcggacgcaacctgatgatgccggtgctgcttgaagtgatgacccgttatccggctttacgactggcgctgacctttaacgaccggctgattgatccggtggaagaaggcgttgacctggtgctgcgtctgggcgaattgcagagcaccgatgagctgattgcccgtcgcctgagccggcagcgcctcatgctgtgcgcatcccccgcttatattgagcggcacggccagcccggcaatattgaggcgctgaaaaaacactgctgcatcatgggctaccgacgcggggcgcctcttgcctggcgtctgcgaccgaccggggaacgggagataaagtttatctccggttcggcgcaccagataagcgacggagacgccatgcttcaggcctgcctggcaggagccggcattgctcagtttccggagtcgatggtgaatgaccatattgatgcaggcagcctcgttgccgttatgcccgatcatatgcccgtaccggtcgagctgaacgtcgtctggccccgtacaagacacctgatccccaaagtcaggcttatcgtggatgagctgctcaggaaggccggcgagggatatttcggcgcgctgaggtag

SEQ ID NO: 151916 - DNA, 1170 bp, Enterobacter cloacae
atgccatttgctctctgggcgctggcgattggtgcattcggtatcggaaccactgaattcatcattgctggcctgcttcccgttattgccgctgatttcagcgtcagcattcctgtggccggaaacctggcgacggcttacgccttgggcgtttttgttggcgcgccggccctgattattctgggctcaaaagtaccccgtaaagcgatgctggtcttcctgatgctgctgtttgtggcaggtaatctcgtgacggcctttgcgccgacgctgggtattgccatccttggcaggataatcacgtccatgacccatggcgccttttttggtatcggatcgattattgctgcagatatggtcgcgccgtccaagcgcgtcagggctattgcgttcatgttcatggggctgaccgtggcaaaccttatcggggttccggtcggtacctggattggacaacacctgtcctggcgggaagcttttatggcgatagccgcaatcggagccataacggttatcagcgtcggcatgctcatcccgcatcagccccgcccggaaaaccataattttgcgcatgagtttaatgccttccgcaacgttaacgttctgctggcaatgggcataacggtcttcggaccgggcgcattttttacctcaatcacctatatcgcccccatgatgacggagctggcaggctacagcgaaagcagtatggcatggctgatgctgctgtttggtctggggctgtttgtcggcaaccagttgggcggcagatatgccgatcgcgcgctgatgccgatgctttatgtgacactggccgcgcaggccgtggtcctgctggtatttaactttacggcccacagtcaggttatgtcggcgatctgtattttcctgatggctgcttttggttttgcgaccgtatctccgatccagaaactggtcatggataaggcgcgggcagctggcgcaccaacgctggccgcggccgttaacatcggccttttcaatctcggcaatgccgtcggtgcctggctgggtggcgctgtgattgcggcagggttcggcctgcagtcgcctaactgggctggcgcggtactttcagtcgtagcgctggtcctggctgtactgtcgggcctgacggataaaacaggacatgctgcagaaatgcactag

SEQ ID NO: 151917 - DNA, 1041 bp, Enterobacter cloacae
atgaaatataaaggcgttgtatatgatgtcgggctgaaattcgtcgcggaaaatccttattcggtcgtagatttcgatccggagctggtcaggtatgacattaatgcaattgccggtcagcttcatgccaacgcaatacgtatcgagggtgaagagataagtcgcctgacgacggcagcacgcattgctcacgaggccgggctgaccgtatttttcaatccctggaaaatgaatgtccctgtcagcgaactgcctgcttattttaaacaggcagccagagaagctgagattctcagaaaagaaggggtagatatcgtttttgtctgtggttgcgaaattacgatgttcaatgaaggcattttccccggtaatacggtgatagaacgggcaacatggatgggttcacagtccgggcatgatgctgagcagaatgcgtatgcgctttactcagaggcgtccgtcaggctgaatgtattgctaagttcagttgtgacagaggtgcgtgctgaataccagggacctttaacgtattcagctggtagctgggaaagcgtaaactgggatctgtttgatatcacaggtgtggattattaccggaacggtgaaacggcagaagaatatgttgcgggcattgaacgttaccgcagtaaaaagccttttgtggtaatggaagtgggctgctgcgcttatgaaggcgctgcacagaaaggtgccggcggctttatgattctggagggcgtaaatccggatggaagcggtaagttcgcggggggcactccgcctctcaggagtgaacaggagcaggctgattatgctggcgaacagcttgaacttctcagcagtgccggggttgatggcgtctttatttatgtattttcgttcccgacttatcgcgccggagaaggggcaaaagatctcgatatgctaagtttttctctggttaaaacctttccggaagacgatccgcgatcacaacagatgccgccctgggcacccaaaaaagcttttcaccgcatagcccgcttttaccagacacactga

SEQ ID NO: 151918 - DNA, 567 bp, Enterobacter cloacae
atgaatacacgaaccctggccagaaaagcgctcaaagagcaaatcaccctgactgcatataagttgttcagggaaaacgggtatgaaaaaacgacggtggaagccatctcaggcgcgcttggcatgtctgcgcgcaactatttcaggtattttcctgccaaggaggatgtacttctggagcccacccatgagttcaggtcccgttttctgacagtcttcgcgaaaaaacttgatactgaggacatctgggaggcaatgaaaaattcaatagctgaatgcgcgctgcacttcaccagtcagcaggaagaagagatgcaggcgtatatccggagtacgcccgcactgttttcacgacagcttgagatatttgaaagtctggtttctgaggccacggactattacgtacagcatcatgctgaaacactgagcaggaacgtggtaaacgcggtgattcggtccggttttgcctgtcttcaggctgttcagggggacagcactgaaacagcgtcaagtgaagcttttatctgtttgatgacagaaatgaaacctgtatttttggctctgtaa

SEQ ID NO: 151919 - DNA, 543 bp, Enterobacter cloacae
atgcgtcatggaaagccgtcttttacaggttctccgagggtaacgagccttgagatggacgagtggatttcacactatgatctctctgatattggcagcgatatagctccgcaatccagtaaattattagcatctagcgcattgcacatcataagtagccctcttccccgggcgctttcatctctgagggagttagggcttgaaccggacctcactgatgaagtcttcagggaagcagacttgcccatactgcggattcccgcttttaggttatctcccatcttctgggcgtctttcttccgtgtgatatggctgtgtggcatctcccgtaatgtagagcccttgggaatagctaaacaacgcgccgttcaggctaccgatatcctggtaacgtctgcaaaagtatcaaacggacctgtgctgctcatggggcatggggtgatgaatcggctgattgcaaaggaactcatatcgtcaggctggaaagagtgccttcgccagggtggtggttactggaacgctggtatttacagcttactctaa

SEQ ID NO: 151920 - DNA, 912 bp, Enterobacter cloacae
atgcagaccaaaaatattcgtgcgatgctcggaggggcttttttattgacgtctgtcttcatcccaatgaccaaagctcaatctctgcccttggcatcagaacatccgaacttgaagcttatgtccattcaaacgcaaggctcaggaacggatgtcatcttgattccagggctggcgtcgtctcgcggaatctggaccgatttagcatcagatttacagttgagccaccgcgttcatattttagagctagcgggctttgcgagtacacccgctgtttccaaccgggacggtaaggtcatcgctccagttgttgacaccatcgctgaatacatccgcacccaacacatcaacgctgcggcgatcgttggccattctcttggaggggagattgcattgatgttgggggcacggcatcctgacctggttggtcgcttaatgattgtcgatgctttgccgttctataccttaatgattgaccctgcggcgaccagcgaaactgcttcccagcgtgctattgctacaagagattggatactggcacaatcgccagaagaatttgtagcgtttcagaaaacatccatagcccgtttagctaagaccgaggcggtgaggcccgctctggtggcagcagggctcagttctgatcgccaaaccattgcagatgctgtgtatgaattgatgattaccgatttgcgccccgagcttggccgcattagagcaccgattgagatcgtttatgcgtatgatgccttattcggggtgcctgcatccggcgtggatgaaatgtaccgtcgagcctataccactgcgccagatatccatttcacacgaatcgatgacagttttcactttatcatgcttgatcagccagaacgattctccagcgcggttcagtcattcttaaataaataa

SEQ ID NO: 151921 - DNA, 282 bp, Enterobacter cloacae
gtgaaaatctattggactctaaaaagtattcccgaactaaaagacttatctttttgggagcgcggaagacggtggcggagtgcgtataaatcggccttccggcactggcagacctggtgcggtctcgccctctgcggggcctgcagcggcgcgggagcgcactttggcggcatgtccagcatcgtaatatttgccgggctgggtggctttatttacggccagatcgtgacacacgttgtcctgaaatattatcggcaccggctgcagggcgaagccgaatga

SEQ ID NO: 151922 - DNA, 213 bp, Enterobacter cloacae
atgaaaatcatcaaaatttttgtcacagtaatcgctctggctacttcttttggttctttcgccgcacagaccgtgaccgcatctgcctccacgctggatggtgcagaagcgaaaattgcggcgcaggctcaggacgcgggcgcgtcatcctacaaaattacccaggcattttccggtaaccgcgtgcacatgaccgctgaactgacccaataa

SEQ ID NO: 151923 - DNA, 2604 bp, Enterobacter cloacae
atggctctgtcagcgaaagaaaagctattccataaaattttaacgcattatgctgccagcccttctggtttcacggcccaggactgtgccgactttatgccggttaaacgcagcgttcttagccattacctgaacaggctttgcgatgatggccagttaagtaaggaaaatacccgccccgtacgcttctatgtcctgcaaaagaacaccgaaacgctatcgacttctcatttagtgtcgaaaagagaggacgtctttcagactctgattggcgcacaaggaagcctggcggaggcggtggcgctctgtcgttccgccgttgattacccgggtgaaggtttaccggtactgctctccggtgaaagcggcgtggggaaaagccacctggcgatgcttatacaccgctatgcggtggagcgtggcgtcgtggctgcggagaaaccctttgttgagctgaactgcgccgattacgccaataaccctgaactgctgtcagccaccctttttggctatacccgtggcgcctttacgggggcagatcgtgaaaagcgcggcgcctttgacgaggccgacggcggttttctgtttctggatgaaattcatcgtctgtcggcagaaaatcaggaaaagctcttcctgttcatggacaaaggctatttttaccgtctgggggataacagaacccgccatcccgcctcgctgcgctttatcttcgccacgactgaaaatatcgagacggtattacttaacacctttcgccgacggatcccagtccgcgtcacgctgcccaactacctgtcgcgttcgctaaccgaacgggttgcccacgtcagccattttctccagcaggaagcacgcagcttgcgacgggatattcacctcgacaatttgcttatgcaccagctggtgacctcgccagtgcgcggcaatatcggcgaacttaaaaaccagatcaaagtcatgtgtgccagtgcgtggagcgatcgccgcgatgcagcggtcatctcgctacgaagtgcacagaccagcggcgaaaccctggtgatttctgcacgtcagcctggcgatacgcccgatgccagcatagtcatcccaaaggcgatgcacgatgcggtcatcttccgtgagttctgccatagcggcaacgtcctgctgctgaaccgtaagatggagcagctgctgacctcggtgagtggcatcatggccccggaagccatttatagcggctatctgtggcagaacactatgcacgcgataaatgaactcgagatccagaccggtattccctgcggacaggagatccgtaaagcggtctggctctgtatgagctatgcgttgaatacacctcagcaaccagaaacagtcagtgagctgcaaaacatctcagattacgtctccggcaaagcccggctgctggcggaagagtgcctcgcgctgctggcaaagcatgtggttaaccagcctatgcccttgcttatgccgctgctgagctgcgcgtttcacacccaggctggagaagatgaccttatccagggcattattgtctcgcatggccgttctactgcctccagcattgctggcattgccaaccagctgaccggcggctattacttcaaagccttcgatatgcccaatgcgacatccacccgggaaattatcgatttattgattacgcatctttcccgcctcaggcaaggggccggattaatcatcctggtggatatggggtcgctgaaggagatctacgaagagattaaacttcatctgcacggcgagctgctggtgattaacaacgtcagcaccgcgatggcgctggatattgcctccagaattcaggaacagcagtcgatggaagccattatcgaagagactaaaggcgcatatgaggtggaagctcgctactacgccgggatgcagcccggcaataaaatcatcatctcctgcatctctggtgaaggcatctcacgaaagttaaaagatattgttcagcggtaccttgctcaggaaagcatcgacatcattacgatggaatatgacgacctgaaatggaaaattacccgcgccgacccggcgctgaacggtacgcgcctcatcatcaccaccacagatctggaggcgggctacataccgctgatcagcgtcgagcagctgatcaaagagaagacccaggttctgaaacgcgactacttccacgggctgctgacggacggcggcctggagccaatggtggaagaggtggtgaagcttttcaccgtcgaaggcgtggccagccgcctgaacttcctcaatccgatggtcatcatcgacgaagtagaagcggtgataaaacagtatgaagccttctataaaatccatttcgagagttacctgcgcatcaatctctttatgcacatcgcgctgatgattgaacgggtgatggtgaataacggcgtgcgccagcgtgaagaggcgcagcttacacccgagcagacggccttcgttgccgtacatgacacctttttccaggcgctgaatcgcaaatacaacatcactctccccctcactgaagtgctgatgatttacgaaattatggagccgtggatcgcccccgatgccctttcgtaa

SEQ ID NO: 151924 - DNA, 483 bp, Enterobacter cloacae
atgcgagagatgtatgtcgcaacccatggccgctatgccgaaggcattatttcggccctgaatttattaattggcgaggatcacggcgttatacccgtttgtgcttactgcggcgagatcgggtccacagcagagctgggcgtccgctttgatgctatggccagggagacagccagccggggaaatgagctggtgctgtttaccgatatgcctggcggaagcgtcaacaacacagccatacagatgatggtcaaataccctcatgtgcatgttgtcagcggggcaaacctgatcatgctaatggaattctgcatgtccgaacatgacgaaacggctctgcgccttcaggacgcaatagcagcggccagcggagcaatgcaatacatgaacgtcttacctgagatcgcctcggctcgtcaggcgcaacatgctgttacccgggatggcgtcgacgatttctttaccctggaggatagccagtga

SEQ ID NO: 151925 - DNA, 1179 bp, Enterobacter cloacae
gtgaagatcgcgctcgaaaccctgaatgctcgctacagcctgccgcatgccgggctggatcctcgctggttgcaggaggctatcgcaaaagtcattcgtcagatcgacgccatgctgccacgttttacggataccttcccggcagccagcgccacggaaggccgctatccggcggttgaaaaggtcgactggacggaagggttctggaccgggatgctgtggctggcctgggaagtaaccggtgatgacaaatatcgtgcggtggcagaaagccttctcgatagcttcgaagagcggcttaaccagagaatcaaagtcgatacccacgacctgggtttcctttatttgctctcctgcgtgaatgcctggaagctcaccggcaatacccgcgcccgcagcctggcattacgcgccgcagagttgctgtaccagcgctttaacgccacggcaggcgtcattcaagcctggggcgatttgagcgaccccgcgcgtcaggggcgtatgattattgactgcaatctcaatgttcccctgctgttctgggctgccgatgagacgggcaaccaggcctggcgtgaagcagctacccgccatctggcgcaggcagcacgctacctggtgcgcgatgacgcgtcaacgtttcacaccttttatatggatatccacagcggcaaaccgctgcgcggggatacccatcagggctttagcgacagctcatgctgggcgcgcggccaggcatggggaatttacggttttgccctgagcttcgcccacacgggcgacgctacccagccggagctttcccgccgtctggcccactacttcctcaaccgcttacccgaggatttcgtttgctactgggacctgatcttcaccccagaggataacgcctgccgcgatacctctgcggcagctattgccgtttgcgggctggcggagctgctcaaacagctgccgcagaccgacccgctgcgccctgcctataacaacgctatcgcgctgatgatgcgcaatttgcaacagcactactttgcgaaatcgcaagacggcctgcttcgcgaaggcgtttataactttggccgcaacatggggattaacgaacccaatttgtggggcgactacttctattttgaagccctggttcgcctttcccgcgtctggacaccctacttttgttaa

SEQ ID NO: 151926 - DNA, 498 bp, Enterobacter cloacae
atgatttctttagttcgtattgacgatcgtctgatccacggccaggttgccgtggtctggaccaaacatctgggcgtaaaccgcatccttgtcgccaatgaccagattgttaacaacgacgtacagaaaatgtcgttgcgaatggcggcacccgataccgctaaatgcgccattatggcggtgaaggacgccggcgacgtgcttaacgacccgcgttcagagagcatgaaaataatggtgatcgttaacaacgcagcggacgcgcgccgtctggtggagcaggttccgggaataaaaaccctgaatgtcgccaatttcggacgcattaccgataatcttgcggccaaaacccgcatcagcgataccgtctacgtcacgccagaggatgtggctgacttccaggccatcgccgcccgcgatgtcgccgttgaataccaggttctgccctctcatccggtgaaaaacctgattgagatgctggccagcgccatcaattaa

SEQ ID NO: 151927 - DNA, 801 bp, Enterobacter cloacae
atgttaacgtccgcatttcttgtcgcgttgattatgttcctggtgaaaaccgccgatcacaccctgggccagccgctgattgagcgtccacttatctgcggagcgctggtgggactggtacttggcgaccttcagcagggcattattatcggggccacgctggagctgatttttctcggcaccattaccatcggtggctccgttccggccgatctcgccgtgggctcggtgcttgccaccgccttcaccattctcactcacgccgagccgccagtcgccgttgcgctggccttgcccatcagcctgctggcggtattcgtttatcaggtgctgaagctggtctacaccggtctggttgagaaatatgatgccctgctcgatcaaggtcacgatcgggcggcccttgcgcttacgctgggcatgacgttgttctacggtgtgcccttcgccctgattgccttctttggcgtgctgtttggcaccgatgtcattcgtagcctggtcgaaagcattcccgggacggtgatgcgcggtatgaccgccgtcgggggtattttgcctgcgctgggctttgccattttgctgaaagcgctgtggaaccgaaacatcgccgccttcttctttattggcttcgctatggcggcttacttaacgctgccgattatgggcatcgccattatcgcagcctcggtggcggtttatctttgctttaacgagttcaaccagctgaaagcaagcaaacaggcaggtgcggctgcgccagcttccgttgatgataaggatgggttcttcaatgactga

SEQ ID NO: 151928 - DNA, 843 bp, Enterobacter cloacae
atgactgatatccagatgaaagacgttaccgtaagccgcgaggacaaaagcgagaagcgcttattccgccagcttttcattcgtcagttcccgctgctgggcaccatgaattttacccgcatggaagggttaagctacggttgggcgctggcaccgatgttgaaaagaatctatgccaacgacccgcatcgctatcttgaggcgcttaagcgcaacagtcagttttttaataccaaccagcacctggcgccctttattatgggcctgacgttgtcgatggaaaaagagaacgcgactaacccgaacttcgacacctccagtattaacgggattaaagttgcgttgatgggaccgtttgctggcgtcggtgattcgtttttctacggcgtactgcgcattatcgccaccggtatcgcgataggtctggcatcacaggggaacccgctggggccgctgttattcctactggtttataacatccccagctacctgctgcgttactacggcggtgttatgggctatcgtctcggctcaaaatatatcgccgaagccacgcaatcgggattattaagctgtattaccaaagcgtcgtcgataatgggattaatgatggtgggggcaatgagtgccagcatggtgaaattcactaccaccttcaagacaaccattgcggggcagcctttcgtattacaagatattctcgataaaatttgcgtaggcctgataccgctgttgttggtattagggtgccttaaactcctcaataaaaaggtcagtccgaataaggtgctcttacttttaattgctcttggctttgcggctgcgggcattggcataatctaa

SEQ ID NO: 151929 - DNA, 960 bp, Enterobacter cloacae
atgatctggcaagcagcgtttttttcaaacgatccgcaaaaatttcatcaggtttactttccgcttaacatcaatgaaatacagtcccgcatcaatcttttcccggatgttatttcggcagacaacatcgaaacatttttacctgcacttacgtcggttgaagttatatttgccacatggggaatgtttagcttatctgaggcgcagcttgaccaactccctaacctgaaggttatattttacgcggcggggtcgacggattactttgccgaaccgtatttagaacggggcgtgagcattgtaagtgcctggcaagccaatgccattccggtggctgaattctgcctcgcacatattctgctgggatgtaaaggctattttagaaatcagcgggaatataccacccccgaacgttttgaagcgctgtcaaaacaccatccagcgccaggaaattaccaggagtgcgtggcattgattggcgcaggcgctatttctcaggtactgcaacgtttgttgcaacccttttatctcgatattatggttatcccatcgcggccagaaagacgaaaactcactctcgaagaggcattctcacgcgcgtgggtcgtcagtaatcatcttcctaatcgtgcggataaccgcggagtgctcaatggcgatctcttccgatgtatgcgacagggcgcggtctttatcaataccggacgcggcttacaggtcaatgaacctgaactgattgaagtgctacaggcgcgcccggatctgacagccattctggatgtgacgaagccagagccgcctgtagccggttcgcccctctacacactgccaaatgtccatctctccagccatattgcaggctcgctgaataatgaaacgcgccgcatggtcaattatattcttgaccagtttcgacagtggctaaaagatccggagagtgttagccagcgagcaatataa

SEQ ID NO: 151930 - DNA, 699 bp, Enterobacter cloacae
atgaataagttacacgtattattaatcggattgccattaacctgcttctcgattaacacgctggctgcggtcacctggattgataatcgttatgcccacaccacagcctcggaaaagaatcagtataaactcggtctgggccatatttttgataatggtgccggggttctggcctccgcaatgtatgatttaggtcaggacttcgatcaaatgaaaagtacatttcaggagttcgagggctggtatccggtaccgttaaatgaaaaatggtccgttaccccgggtgggctgacggatatcgattcaaacggcactaaactggcaccttatatcagcctggattataaattcagcaaacaactgagctttagcagccgttatcgttataaccatatgacacataaagagcgcgattttaacggtgagatggattataacgacagccatcagttcgatttatatatgaactaccaggcgacagaaaaattatggttacaactcaacccggaatttttcgtgaacaccagtgattttcatgctgccaacggccaaaaaacccattgggagccaagcattgttgcccgctaccgcatggataaacactggctaccctatgcggaaatcgcctggctggatcaggaccagaaccatgacgatcaggttcgcttccgtctgggtatccgttactacctggactaa

SEQ ID NO: 151931 - DNA, 1512 bp, Enterobacter cloacae
atgcccctgctctaccaaaacccaattattcatgcagatttcgccgatcctgatgtcattcgccagggtgacgacttctggatggtggcgtccagttttcatctcttgcccggcttaccgctgctccattcacgcgatctcattcactggaaaatcgtcaaccacatcgtaaaaacactgccatcgcctgaatatgatactccccagccgggcaaaggtgtctgggccccggcaatccgttttcataatggccgctattgggtgttttacagtttaccggataacgggatttacgtttctcatgccaatgatccgctgggtgagtggagtgaaccttactgccttaaagcggaacccggctggatagatccctgtccgttctgggacgatgatggccgcgcgtggctggttcacgcttttgcctttagccgcagcggcgtgaaaaacaagctgcagcttttcgaaatgtcacctgatgccacccggctgctcgaccatggccgtattatttttgatggcacgcccacacaccctacccttgaagggccgaaactgtataaacgtcacggtgaatactggctttttgcgccggcagggggcgttaaacgcggctggcagacggtgctgcgtgctcccaccctggacgggccgtggcaaagtcgggatgtgctgcaccaggggaatactgccgtcaatggcccacaccagggcgcctgggtcgagctggaaaatggtgaaaactggtttttccattttcaggataagggtgtttatggtcgtgttatccatcttcagccgctgcgctggcgggacgacggttggccacaaatcggcgaatctctgtcgggaacgtacaaagggcagcctgttagcgtacaccctgtgccgcagcttcaactgtcgccctgcgcactacaaaccagtgatatgtttacaaacgggaaaccggggcggcaatggcaatggcaggcaaacccccgaaaagcgtggttaaccgagggggaagacggtctgcgtctgacatgttcgcccgcagcaatcaattgcccgttgtatcatctgccccaacttctgttacagaatttcccggccgaacgttttacggtgcgtgcccatctgtcgcttgcctgtcatcacgatgaagaggagggtggactggcggtatatggtcagcgttttgctgccctgcgggccgttaatggaaaagcaggggtatcactttggctggatcacggctggacagacgatcgcggcgagctgcatttgacgtcgctgcccgtagtcgatctgtttgatgttaaggacgttgtgctgggttttcaggtggattacgacggcatcgtgcattttggttatcaacgtcctggtgcgcaatggcatgacattgctccaccgttttccgctggggccggaaaatggattggggccaggatgggaatctatgcccgaggcaataattgcgatcgtccgggcaatgtccactttacccactttacagtcgccactctttaa

SEQ ID NO: 151932 - DNA, 390 bp, Enterobacter cloacae
atggcatttggaaaaaataaaaacattttagtaaaattactaatagctctccttgggtgtatcaccgtcctggcagtacatcattttggttacgaatggtatatgacacattttataccacggagtaggggggtagggctcggttttgtaatgttttatgtgaggtatgttattattcctgttgtattcctgtctgcatttataaaaccaaagtactctttattaatctttggcttggttattatctttatgctgtattcatggtatagttcgaatcctctcagagttttattgatgcttctttcttgttcggttggatatatgttggtgatttttttgagaagcatgaaaaggaaagattcagaacacacgaatgccaatgataattag

SEQ ID NO: 151933 - DNA, 819 bp, Enterobacter cloacae
atgaaaaaaatcagtattgaagtcgatggaaaatcttatctaatcgttacaaaggatggaaaaactgaattaggaataaaaggtaacactacgcttgaaaaagatgaagaagcacataaaatctacgtgccaaatatcttaatgatcacaaggaaaaatgctgatgttttgtttgttttgagagggggtgaaaaggattcttttagaattatgacagctcaagatttgtatgataattttaaatatcaatgggttgaaccgttagctgataactttcgggaattgttgtatgttaacgaagctgattacgcaaaaaaagcctacaaaatattcacgtggtcagatatcgctaagttttccctgattgacaggccttcttatagtttttacaaaaatatggagggggactggaaacaaaatccggagggaggtgccggttatttattggtactgatatctggcattccttactggacagatgctgtagggcaaattccatttgctgtcgacacttaccgtagtaattgccgtagtaattaccgtagtgatcagagtatacttaaggcagtacagaccggtattgaatggggggctggtacgattacgggagaggttgactactccaatgaatatgataattattttgtattgagaggagcattgttcgccagcaaaaactttaaatataaggttgagtctactggtaaatcataccctgccgttattgtagaagagactaatcttaacgcaaatcccgagattcttgatgagcacataaacaatggtgagttagaaaaatatggcatttggaaaaaataa

SEQ ID NO: 151934 - DNA, 618 bp, Enterobacter cloacae
atgatcaagtttaaagtatttcctctattgttactaacatactctatctcagcattttcaggtgttactgatgatgattttgataattgctcgaaatatctagataaaatagttgcttccagcgatgcaaatctgataaatgaattgaaagtggacggagatctgattacagcagacatcgaccgtgtcagtaatgataatatatatgctaaagttcaattcaataacaagcaatccgtcgacactccgggcgaaggttttcttttatggatgaagtatgattatctcaaattcagtttggaagacattactattgacccagataaaccagtaaaattaaagtttgatgaaagatatgcttcagtatatcttaactgcttgaacaaaaaaacagtctacaaagttattggtactgctcgattgcagttctataaagatgataagttatctattccaagtcaaggtttattcattttgccaggggagtatgtagaggtcgaagacaactcagggagtgcttcgcatattaaatatcaagcaaagaacgggaaaatttactcctcttggatagactccagtcgcatacaggaaataacgcttggtacaagagaaaaataa

SEQ ID NO: 151935 - DNA, 177 bp, Enterobacter cloacae
atgcctaagagtttgaatacacatattgatgcagacatagcttgtgaagaggacgagaacccaagcccagctaaagatgaacctgattcgttaacagcggaagatttattgtcggttttcgacctggctgagatcatgaatgtcaatcaggtcgtctgtaaatcgtttagtgactga

SEQ ID NO: 151936 - DNA, 402 bp, Enterobacter cloacae
atgaaggttaagaataaaacactgactttacttctaatactcccttgtatttcacatgctgcacttaacgactattccaagattgaaactgattgccgcagaatgaatcaagatataaataactctgttgtaatgggttgtgccgaccaagcatcagacgccgcaaagaaagacatgaacattgtttaccagaaaatatacaaaatcactaaagcgcgtgaaatgcctgacattacaagtaaattcgagacggcgcaaaaaaactggattgcatcacgtgaaaattggtgtgatgttcaagggtttataatcggttcgccgatgtacagcgtatgccgtatggacatgaatatttcaagagtgaatgagttaaatgacttactggaacagattcaggattaa

SEQ ID NO: 151937 - DNA, 444 bp, Enterobacter cloacae
atgaaaaaaatcattttccttctactaattccagcattttgtaatgcaaacactcctactgttttcaaatcttcttgcggtggtattcaatacagtatcgaatcattttgtagtgtaaataaccttaagggtgaccaggataaacttgacataccaatttgcagcaagcaaattttcgtccttggtaaggaaaaccatgatctatcaaagtttacaggtcttgtagaacgcattaatagcaaagacgaaaaaataaaaatgatgaatttcgtcttctacggagcctcatgtaaaaatgacagaattattttatccggcgcaggtggttgcaattcatgtggtgaaacgttcaagacatttgatctatcaggggaagaaataaatgagaaatctaccacgctagatttggagcctatgcaggatattatccccgaactttattaa

SEQ ID NO: 151938 - DNA, 576 bp, Enterobacter cloacae
gtgaaatacctgctggcggattacgcaaccaccttcaccgcctcggtgtttaacattcgtcagaaaaatgtggtgaccagcgatccgggcttcctcaactatcgccagaccggggaagtggaatcgaaaggcgcggagctttccgctatgagtcgtccaacggataacctgacgctgattgccaactatgcctacacccacgccatcaataccgaagatgacaagtaccagggcaaacgaccgacgcaggtccctgagaacgcctttaatctgtggggagattacacctttgacagcacgccgctgagagggttaacgctgggggcaggggcacgctacaccgggccgatggagatctcgccagccaacgacgcaggcaagctgggcggtacgacgcagtacgatctggcggcatcttaccgcatgggcgaactggcgccatcgctggaggggctgacgctgaaagcgagcgcgcagaacgtcaccaacaaagagacgctcacctgctatgacgcgaccaactgctggataggccgcgaccgcaccttccaggtcggggcgagttacagcttctga

SEQ ID NO: 151939 - DNA, 318 bp, Enterobacter cloacae
atgggattcccatcgacagctgcagaaatacgtactgcctttgttgcggacatagagtcatctttacccgaatctgcgagaattgttgaaacgcaagaaggttatgatgtcattgagaaatcagcgctgttgaagcgcggagacacaatgctcatctggtattgcggacgccagcaacatgcatacatggccggtgattcactgataactgatgatggcgaggccatagaaggtgaggcattagagcacgtccgccttgttggagtggtcacgcataccattagcccggtatgggtcgacgacaatccggtgatgtga

SEQ ID NO: 151940 - DNA, 1236 bp, Enterobacter cloacae
atgatcacaaacaattctagttacaggtcagttccacttattgcgggtgtattttttataccatccttactaatggttatgttgggagcatcatccttctcattaggactgctgttggtctgtgttttattcctatttttctttatcgttggaggggagcgaaaaattcacaataaatctaaattgatgatctcagtggtgatgtttttagtagctatgatagcaactcatttcatagttatttcattatttatagatggtggttcgtctcgcgattacggcaggatggtctcaagtcttgcgatgttgttgttcatgtcattatcagcaatagttgcttgctcgtatattggaaatattaatgatagcgcgtttgcaaaatcattaaaaataattgcctttgttctaattgccaacggaatagttggcatgtttggttttgatgtattcaatactggtttgataaaaccagttctagcatttcaggagccttctcactttatattgtgctcaattcctttctttatctatttccataagatagccaagacaacaaccgcaaaggcattactgatattattattcattgtatttgggttgtatgttaaaaaccttatagctatagcatcagttttgtttgtggtgtcaatatcatccaaaaaaacatttgttgcattgatggttatatcaattgtttctgcaactgcatactatctaaccccaccagaatatatgacttactttgcagatagaataaatgttaataacacaagcaatatgtctctactggttctaattcaggggtgggaaaatgctattttatcatttgataaaaaccctttcggtgaagggtttcagcaaatgggtattactactgccattggtgatgcgacacaatctcttaggctaatggcgggtgcagacgtaaatatattggatggcggatcaacggcacctaaaatcatagcagagttcggggtgtttggggttttatctttgattgcctatatgtttatttttataaaaattgcatataaattaaaatcatcagcaggtgatagaaggacaatatttatgtactcgtgtttcctggctacattctttgatttgtttgtgagaggtgctgggtactttactcctactatgtttatgggcgtaacatccttgatgtatattttctgctatgaaaacaataaagcaacatcaatcgcgaaagcaagactgcaggtgagttga

SEQ ID NO: 151941 - DNA, 621 bp, Enterobacter cloacae
atgaatctacccggtcagcagtcgcctgacagcacccttccctcttatgatgtctctcgaagccttggcctacaggccggtactgatatcgactttaaaaagctagccgcgcagctcgactgtacacgtaacttttacaatgtcggcatcattttcgatgatggcaagcaacgctggctggttcgtccgtcacgacgcattgctgatgtgaatcagagcaccgtcagccatgtggtcatcagtaaaattccggatgctaaggaaaccagtgcggaaaaagccgtggtggcgacgttaaccacgccgtcacttgcgactgaaatcacttcaaccggtttcgcctgtggcgcgatgattgttacgcttgtcatggcgtttggtgccggtgcggctgtgccttttaccgctggcggatccggcgtgattgcggctattagcctgtccggctcgttggctacgggagcacaatgcatgattggcgcgggccgtctgctggctatccataacgaccatggttccgatgttgcctggctcgacagccaggactggtacgttgccaccacaacggttctggatgtcatttctctactgcggcaggaaccgcgctacgaggtactttag

SEQ ID NO: 151942 - DNA, 330 bp, Enterobacter cloacae
atgaaagcggcatcttcaggtaaagttactgcctggttccagagcatgagccgtgccgagcgtaagcgcatcacggaagagattattaaagcgcagaatccaggcatctccagtgctggcgtaaaggccacgatccgtgcaggtgtttatccgaaacgtttccccagcgaatcgttacaaaaatcactgcagcgcgagttaataagtgcggtcaacaacgcatcggcctttgtggggagttcactcacagggactatccgcaacccacaaaataccgtccagtcagggcgttatgtagttggtgtgctgcagtcatttttacctaactaa

SEQ ID NO: 151943 - DNA, 198 bp, Enterobacter cloacae
gtgaaggagagggttacccagttatttgaaagcaaaagctataacgttgcctcagaaaaactgagggctttcagcgatgccctaagtgaacggaatgaccaccagagccgtatgttccccctcaccccagccctctccctcaagggagagggggccgtctgtgcaggcattattttgtggggaaccctcagcccgtga

SEQ ID NO: 151944 - DNA, 426 bp, Enterobacter cloacae
ttgagcctgccgttctttagccttctgaaattttgcgctgttacgctcaatgaggttcgaaagtacctggcatacctgattaagggttacatcgcgaccgccaatgggcgcaacaacatgcgtgacgtcccttttattcagcagaaactggaaggctacaagcgtatcgtcgttttttacccgtccgttatcagctgtaggggaatggaaaataatgctggtggtttgcccgtcggtgagggggatttgcgcagtcataacaggaatattagcaacacgtcttactttgccaataatagcaccacctatcgttggcaaaccattgtcatcctctcccgcttcatccgtaccagctttgatgtccgtcccgttgagtccacgattaagtacacgaataaacgcgcgcatggtagccgcgagttttaa

SEQ ID NO: 151945 - DNA, 618 bp, Enterobacter cloacae
atgtcgaagggtgaatacgtccagctcaaatttgaagagctcaacgagaaaggcctgaccaagctgactaaagcgatggcgaaggctggctatgaagtcgctaaggttataccagcgggaaaatcgcgaaagaaagatggtatcgctacgcgaacatttacattgatcggcctagatgaacaggtgatggatgtccaggttaacgacacaggcgatatttccggcatcaaagtaaacggcaaaacatcgccctatcagccagtaaaatcgatttctgccctggcacaatccctttcagcgctattcaaacgtggcgctaccgcttttcaaaaagcacttgctcgaaaaatggctcgcgcagccaagaaaaacctcaatggtagcgataagaagtcaccaggcattaaatccaacgcgcagcaactggcagacgccaaggcaaagcgagatgctgtaagtgacgatatccagcaggttaagactcgcttgggggtggttcagaccaataccgataatgcgatgaccgaagctgaaaaggttaaagctgctctgaaccaggaaacggcccgtactcggcaactgaaagaagaaattgcccaactggaggaggtcgcgtga

SEQ ID NO: 151946 - DNA, 450 bp, Enterobacter cloacae
atgggaagtgagcattattttttaatctttatgtgtggtttggctctttttgaccgattcgctatacgtcgtaaaagcgccttgattatcagcatcggggccgcagctgttaaaccgtatgcactcgccttcccgatcctattggatattaggcgcagttggataagcgatgcccatattgaatacagccttcaagatttaaacaatccaatggttgttatcactggaaagacgcgccctctcgatgtcacgcgccgggggagtagggaggagtttttattgataaacactcgctaccttgaaagcggtcggtgggatctgaaggtacgtatttttaacggtaactgccgtttaaatccgttatatcgcatatttccactgtcacatgtgatggaaaaacagtacacaattaacatcgatccagagggccgcctgaatgtcgaagggtga

SEQ ID NO: 151947 - DNA, 327 bp, Enterobacter cloacae
gtgttcgccaactacgaaactctgtttctggctttactcctgtccctgttaagcggcactggcgtgttccttcatggagtgcgtgaaaagcgcataccggcttcgtttttcaatctgataacggagtgggtgatggcgcttatcgctggcgtaacaggtttttacgtcgccagaaatcaggggtgggaagatagccttatgttcattgcagtgctggttgccagcaacaatggccgggaggtatcaaccgcaataaaaacgaagttcatcactgttcttacggcaatgatgggcagtaacaaaggtggggaaactcatgggaagtga

SEQ ID NO: 151948 - DNA, 654 bp, Enterobacter cloacae
atgcgaattggctatgttagggtgtcaacaaatgaccaaaatcctgaattacagcgtgatgcaattgaacgagcaaaatgtgaactaatttttgaagataaaatgaccggagttaaagcaaagcgcccgggcctgaacaaattactcaaaacccttaaacccggtgacacggttgtagtttggaaacttgatcgcttggggcgctccttgatcaatctggccgatctattgcaaacatttaaaaaaatggatgtgaaatttctctccataacggaggggattaacaccaatacgagtatggggcggtttactttccacatcatgtcagcacttgctgaaatggaaagggaaatcatcattgagcgaacccgagcaggcttggctgcagcaagaaaaaaagggcgtattggcgggaggcctccaaaatactcttacgatgaatggcaacaaatggggcgcttaatccgtaatggattaactaggaaccaagtggcaatcatctatgacgttggtgtatcgaccctctataggaaatttcctgcatctatgatggaacaggttatggatgatgataatgaagctgatcaggcctattttgaagaaaaaactgattgggagaaggcccttgagttaaagcctaggccgttcagttaa

SEQ ID NO: 151949 - DNA, 303 bp, Enterobacter cloacae
atgttcgctagcgcatttagtggcgcaagcggttactgcaagctgcctaatggcgtaatattgcaaagtgccgccattagtggcattcctgctggcggttcgcttgaagtcacctatccgatcccatttcctaacctaatgatgtttgtaattgcagccccggcgatcgctgctaatggaacaacacccatttcaattgcgatagacgcagcatctgtaaccgaccccaaaaaaaccatcatgataaggaatatttcaacagtaaataatggtgggacgcgcctgtttgcgttaggtagatag

SEQ ID NO: 151950 - DNA, 357 bp, Enterobacter cloacae
atggaatttaccgcaacacaattaggtatgcgacgagtgcccaatcaggagggtttccccatgtgggaggccatacctgcagtggtgctgactcaggacgagataaaaagtaaagcaagaaagttacgtgatagcttcatatccgcaacagatagcatgctcgtttcagactacaccattaacgataccgagctcaccgaggatgaaagggaggagctaatgagcgtcaggctcaccttcaagaaatggccaacaaatgatggctggcctggtatagcattacctgacattcctcaatggttattggttgaagcggttaataatgggtacagagtatacagctggcctgaagagtaa

SEQ ID NO: 151951 - DNA, 1359 bp, Enterobacter cloacae
atgagcggatctattagtggtgtgagccttctggccgcagattctcgtaagagcctgatcacagacgtacagttttacgaggcctacacctcaacagcattaaaccggaaatttaaaaatattattaagcctggaatctattcaggttttaatgtcgtgcctggcaacggtctgaaggttacagtgacctccggcaatgaaggcggtgctgcgtctgttgatattgataacgtccagttgtcagtacagcagattttagatattgacgtcgacatccctgctggccagacaacgattatcgcgttgcaggctttttataagtttggtgtgaaaacgagccaagtaacggacgaatcgactgttaatgcagctgagattgttactattacggctcagcaactaaaagacggccaaatagagttgtgccgggttgcggtaccggagggggcaacgcagattacatcggaaatgatagacacctctttccgtgtatttcgcagcttggggcttcagttaagcgcagaacttgatagcgaagaagaaggggtcgctgcgaactccctcgctattaaaaaagcgatttccttcctgtctggggagggagtgccggaagccctctctacactggcccagctagccgcagcgataaacaacgatggtaatttcgcgcagacaattgataaggcactagaccttaaggccccattggcgagcccgacgttaaccgggacacctaaggctcctacagctgaccaaacggtaaataacacacagatagccaccaccgctttcgttaaggcggcgatttctgctctggtaggtggttcaactcccgagggcctcgatactctaagtgagcttgctgctgcgctgaataatgatccccagtttgcatctactatgaaaaaggccctcgatggcaagcagccgcttaatcaaaccctcacagatctttctggtaaaacggttgccggtattctcgaataccttggtttaggagaggccgctaaactgccagcggcaactggcacacttttaggctctggttggctaaacctgcctatatacgggggtaagcaaataatacttcaatgggggcgatgggaggggggagtaacaagcactacatataattgtgatattacgtttccagtcgcgttcccgtcggcttgcttcggtatatattcaagcgcaggcgtaagggcatcaaattatgattatgtgccagtctatagaactttaaggcaagctgtttcagtcggctacccaacgaaaaccggcgctaatgctcagtttttccttgatgatacgctacctggtaactcccgtatgtttacgtggttttcaatcggatactga

SEQ ID NO: 151952 - DNA, 450 bp, Enterobacter cloacae
atggctgatgttctcgccgctcgtactagcggtacgctttataaagcgcaattactcgattactactactcacgccgcgcggagtctgcgatcggcaacggccaacgctttgaaatcaaaacggcatgctggggcaaatcgacgctggtttcggtgaatgaggctggtggttggaatatctcagatatcccaactgacttcgtgctggaagacatgactaccaacttcgcgaaatgtgaacttgtgcggtcagttcaggggaacatcatcacgcttaatgccgtgttgcctcaagacagccttgaggaagacactgtttacgacttcaatacactcgtgctattggacgcagaagacaaagccatcgccgtgcttgctactcagcaagatactgtatacctgggaaagaattactcaatcatcatgatgattgagcaggcggggagctga

SEQ ID NO: 151953 - DNA, 1803 bp, Enterobacter cloacae
gtgaaagaaaattggctgaaagagcagttaacaccagctaagcgcagctcaaatttatgggctgcgtttactgaaaagatgcaggacatgtggaatgaaactgtcgaaccggtcctgacgcgaatcagtaatcgcaaatcctttttcaccatggatagtgaagatatggatacacggatttcggaatatggtcgtttcttcataatcgcagaggaagacagagcccggcggcccatgcttcttactcagcgtctcgatgaggtgcatttcaaaggcactactaggccaatcgagcagaccctttggcgtgagttcggagagatgcctgtatcttgggagccgttgtacgcgcccactgacatcgttaaaaccccttacggatcgtatttggcgacggcacaagaagttgagtcagccaccgctagttatggggactttttccttacttcccgtggtcgggttgtacttaatctcaacaaattatatgagctttacggtgctgacgatattaatgcgagcataaggcgttttcagtctgactttaccaaaatcatagttcctcttattccactgcatattgtctatgacggcttaacgttgcagctagtatttaaagcgatagagaaaaaggaaaatcttgtatttgttgaaactcaaatgagtttcaaccatagctttgatttcggcgataagaccgacgctgttggtgtaaaaactaacatttcattcaatgaaaatcgcgttatcaaaagccttaagcgctctctggacatgatacctatttgctttgatggcatgccgcttgatgcttggcccttaggtatgacagcaattattccaccaataatccctgcaagagaagagggcgatgggcgattgtatacccaggatatgtccgggcgcgatttcacggttgattccactgttttattcacatatagccaaggagagtctcgcttgatgctcaaaactcttggccagtacggctgtattgtcgagtatgcagatagtcgagtcgtccggtacggatttcccggcttcgttgatgaggtgatattacaacctctggcaggtaactggagggatgagattcgtcaaattaactatttgcagtgtgctgatgagatacgtcagagtgcatcagtacacgaaaggcttaacgagataacacttggtcaaatcaggtcagagcatgatcacgccgattttaatgatgctcctatagccatatcgatgatgggcggtgaaagttcagatgtgtttattgttagcgaagtcgctgacgactttcttcaaagtgatgtgtcagccagcattgagccgattttttccgccgtgaatgaagggattataaacgcagacgtcagttcgcaggttcattataggttggatgatcataattcccatctggtgcagggcaggagctttactggggtgtgtgaacaacaatttaatggcgttccacggggactggatgcagtttcgttgacactcgataccttaccgcttgatgcgtggccaataggacacacccacatcgttccagccatcatcccgggtgaaaaaaatcctgatccgcgtatttttgagcaggtaatttctgataccggagagtttgccggtgttgtggggttatacgtgtcaacgcttggattacatggttgtattatcgaatacgcaaatggtgacctagcgacgatcctattcccagttgatagcgaacatgtgctcatacaggagcctgcaggcagctggagaaagactatcaggaaaataaattacctgataggttctagcgcctaa

SEQ ID NO: 151954 - DNA, 1437 bp, Enterobacter cloacae
gtgagtatctccgaggttttagagaaatttaacgccaaactgagcgaaaacagctggtggtcgaggttcgttaacagtcagtttgcgcagatgatggccgtcctaggcgcgcaggttatatatattgctcagacctacgcaagcagggcactggttgagggttttatcacgactgcaacacgtcgatctagtatcctcgccgcagcggaagatcgtggatatgtagggcgttttgttgaggcatctcatggcacggtatcaatcaaaaataaatcttctgaaagcataattctgccctctggcggggaaatactcacatcggatcaaaccccattatcatgtgataacaccgtgacaattggtcccggcgaaactgtctatggcgtgccagtcaagcagcaagaagcgatcagtgttagcttcgatattgcagaagaaaaaccattcctaactttactgcttactcgggatattacggctgaagtttcagagttgtcagttatcattgtgaatggagacgaggagcaggtatggactcgtaacccactattccgtatgtcacgcagtgatagtaaacactatgcgctggtatataaacctacagagcagctaggggtacggttcggtgatggctccatgggaatgatgccaccagctggttgccaggttcggctcgatattctggcaagcctgggggattacacccttgctcagggacagaagcttgaagcagccggtaatatcgctaaatatgcggacgtcctcgaaatcgtaactgattctgttatctccggcggcggcggtatggaatcaaccgaagaaacgagaaatcgtgcgcaatactacgttccctttgatgagcaggttgtatggggtggcgactatcgtcattttgtgcaaggtgcagttagtggcacctcttggctgaacgtctggggagaggctgttcaagagagcataaccggttttgatgtacgaaatattaaccgtatcttcttctgtgggcataaaccgggtgtatcgcaggaaaagctagcttcagagattcttgaagcactggcccccatccctaacgagctaaacaagcacttcgaatatgtgccgacaaacgaaaaaccattcactatcaagttcagcggaacggccaaaaaaagcgttcttattgatgacgcccgcaaggatctgaaggaggcgttagagaataacttcgggaaagattcgccatcattcagcaaattacttcaaagtgaggatgattcacagcaacaatattacgctcaggtaaaggttaaagatatttggcgtgttatcgaggatacagggttatttatttcctatgatgttgaggcgattgatatgagtgacgccgtattgatgaatgacttcgtttatctcaatgttgagtcgtctgacttcgaatcaatcagctatccgtag

SEQ ID NO: 151955 - DNA, 372 bp, Enterobacter cloacae
atgttttatgaggtggacgcccttttaagcgtggacgagaacggaattgtcattgcaaagggacaaaaagatgtatggatggcccggctacacgaatggttacgcactccttccgggagcgtttacgggctgccgcattggggaaatcctatggaggagttcaaacacgagcctattggttcggaaacaagtcacttagtagaagtggccatcgaaggcaggttggtaacgaagttgggagaggatttgccgggcttaaacatcgagtcaattcgttgtgcggctctgagcatggacgaattacaaatcagcttttttgcccatggtggtggaacgagtgtgatcatgaagaaaaagcaggaggaatcgtga

SEQ ID NO: 151956 - DNA, 3879 bp, Enterobacter cloacae
ttggataaacagcaagatcggatcgcaatcattagcgcaatcgaggacgccagcgctaacgagctcaaagcactggccgatattaaaaacgccataaccgccaaaggcaccttagtagcgggcgctggcgaaaatcaggggcgcgttacacgtaggctttcacatataaataaacaggcaccggtagtcacgaatgatgtctctggaatagcgctgcagcatgagaatgtctatgtttcccgaatgcccaaaaaagcccgacgtaagcctaaactggtgtctgatctcggtaacgttttgcataacaatcagacgtcagagccagcggaaaaaaatctgcagcactctgtgcctctaaaaagatcgtaccggcagaatagtaaaaaaatacataatgaccccatagccaactcatcccaaaaagtagcgcaacgtgacgggaaaggtcgatttatctcggaaaataagcaatccgagatagctgagaacaacaaccgtaagaagcaaaacagcgctaccgccaagcttcaagaaggttttttgagaaagctcggttcaataattggcctcgatgataagcatgataaagcagaaggcaatgatgttacggacgcggctggagtgggagtcggtggtcctttatggatggcagccagcggtgtagtggagttagctaaagagactggtgggaaagctatctcgctcaaaaagtgggttgatgagctaaatggtgacaaaaaagacgtcggtaaaaaaacctcacaagttacatcgatcactcagtcggaagctctgagttatccaccagctcaggcaaagccaatttctgctccagagctgggtaaagttaactcatctaaaatttttgcagaaaaccaagcttcccaatcggtcaaagtgatccaggagcagaccaaggccctatcaagtaatgacgatcgtattatcggaacgcttgaggacgtagaagacgagataattaagctcagaaagtctatgtcttccggtggcagtttcagtatgtctgacttcttcaggaatcgttggcctggcggtcgaaggggtacaaaacgccgcgctggtggaggatcaactggccgtgggcataatcgaggtgaacgccctgattctattgagaagtccaccagaaaaacgcgtggcactaaacctaaaggtcggttcggacgtattggtaaaattttcagcagtgtcggtgcaaaggttgcagccggtacagcggcaacaatcggtgcagtgacaggggcgggtgcgctaagctccaagggagcaaacacagcagccaacaccgccaaaccaatactgaaagaaagtaaggcagctgctcaagtcacagccaaagggacagaagccgctgtagccaagcaagcaggcagcgccaccggaatcgcagccgaaaaaagtgtagaaacagcagcaactaagcaggccgggaaagtgaccggctcagtggcgttaagagaaaccgaacatgctgcagccaaaatgggagcaaaggctgcagccaagggtgctttgcgctttattcctggtgtcggcactgcgcttcttgctggttatgacgcggtagagggctttaacgatgaggatgcccaacgggaggctttcggggtagccgaaggcaaagaggtatcgactaaacagaaaaccgcttatgccggtgctaacgtgttagatatgggcgggctgttaactggagccaccaatcttgttggccaaggactttcagcagttggtctaagtggaacaggggataaacttcagtcagtcggaactgactctatcgcacgtgggttagagggcggaatggacttcgcccaatcgatattttcgggggctaaaaacttagcatttggggcagcggccaacgttgtcgataaggttaaatcaggctttaagtcagatgaggacagtaccaaacaactcaagacctccatcgaagatggcactcgaaaaactgtttctgcgatcgaagggttaaaagggcagttacaagggggacagtttggcgaggatggtgtcggcgagcatggttacacatcaaaagctgaattcacggcaccagcggccaataacatcgcagcggatctaaatattggtggaagcaacgctaagaaccgtaattttcgcaacaacaacccgggcaacctggtatatgcaaaccaagaaggcgcaagcctagaaaccgctaactccaatggtgaaaggcgtttcgccaaattcaacacgcctgaagagggcattcgtggattagcaaatcaggtatccagttactacgagggtaccagcaaggctgctggctacgagaaacttcagacagtatcgagcattatttctaaatgggctccgccgaacgaaaataacacgaatcagtacatcaaaaacgtctgtgattatctgggcgtatcccctaacgaaaagatcgacgcttccgaccctgaagtgatgacccgcctcgttcgcgccattgcgacgaaagagggcggaaatcctgcagtcaacgatgggtacattaaagacgctctgggaacattcaacagggatactggtaagtgggaaggcaagttctctgacgaatcgctaacgaagataaatgccgcgcggactgctaacggcgagcaggctattgcggcagattcccaatacagcttcggtagtaaggtgaaattggctaactccacaggcacagcactggcaccacaaaaaaatgctgtgtcttttaaaacgccaattaccgactcagaagtggcgcaacgcgcgcaatcagtgaagaagccagtaccaacgcacgtattatccccaaagccaaatgtgtcgagcgaaacggcatttaaaatggcacatcagcattcagctaagacactgacagctgcacccgcaggacttctcactgaagagactgccgcctctcaggtaccgcaaggtggcgtaatgtcaaccataggggatttaggcgcttcttccacatctgctatgactgggctgatgtcggccaatacacctgaagccatccaggctgcaatagcgaaatcccgtgagctggataaacagatcagcgccaaagttcagggctggacaggaaaaaaggttggcttcactccggcggcacctctggcggctctccagcaagtgaaacgttctagtgcccaccaggactcagataaaagagcggatatcgacctgttaggtaccgccagtcaagatgatttaaacccgccgctaaatgaacgcggaatccccgtctacaacaatggttacaaggtcatagagaaaggtgaggggggagatacatcattcctctcatcctctgtagagggcttaaagaatatcggttcttccattttgccgactgcaggtgagcatgtctcaagagtgattggcgggattagcggcggtggggtaattgacgacctgatgacacaagttacagggggaaataccgacatagcgcgtgctgtgagtcctttaacccaaaaagctggggaattactcgacggcgggcttcagtcagctgcatccactgtcagttccacaacaagtggcctaaacaatactctatttggtgcgaaaccgaagaggcaagagcctttcctaagtatgccgcagcaactgccaacggtaacagacctagcccgaagcggcgttcgacaaactttaaccactgacaacataaataacgatccggctatgttgaaaacgctggacggtgtgtacagcgttcttaaggacatcctgggagccaccaaaagcggaagcaaaggagaccctgacaaagtggttaaaacggcccagccgcagccgagggaacgtgccagcaccacaattagtgacccatcactggatgttctgttggaggattga

SEQ ID NO: 151957 - DNA, 822 bp, Enterobacter cloacae
ttgaatatcccaaacttcccattgccatccaaacctcaaatcgaagtcagattccatgctccaacggtgaaagacgcaatcaaatacagcgatttcaatccaagtgaagatgaggttacaacaacagagtaccttaactccatgcaagaaccaccgatcagcgacagtgctgaatggaccgttcaagaccgtcgaaccgcactatggtggatctttgttaactcacgcccagatccggtaatgacatattcctatgagtgccgccattgcaacagctctcataatgcagatattgacctaaaccagttggccgaaacagttgaactgctaaccgtagagccttacgtaaaaacacaggttccggtgaatgggaagccaacgcagtggactttaaaacctctcaccggtcgtggtgctcatatgctcgaacgtatgcgcgcctctctacctgatatgaaagacccagaatacagtgccggaatgtcccggtttcgcatagctgaacttgctttatgcacagctctcgacgatgacccagaagactttaccgaagcagcaaatagacgattcgaaatgatcgaagctatggctttagaaaccgaatttacacccctcgtagcgcgtattcagctcatgcagcgcgacctgcgccatgggctactcatgtcgatagaacatggtacaagccgtctaatcctacctccgcaaaaatgcaaaaacgcaaaggagggtgcagacgttaccacgacgctgtacgtcccatttctcaatcgagagtttatcccatcaattagacctgaatggatggctaaccatcattaa

SEQ ID NO: 151958 - DNA, 861 bp, Enterobacter cloacae
atgaatcaaccatttatctctgatgttctgtacgcagacattgaaagcaaagctaaagagttaacagttaattcaaacaacacagtacagccggtagcgttgatgcgcttaggggtctttgtgcctaagccgactaaaaaccaagttgaaaacaaagagatagatgcgtccaaggtattctctcaattggagatcgctcaggccgaaggttacgataatatcaaaatcaccggcccgcgactcgatatggatactgattttaaggtatggattggcgtaatttactcttttagtaagtacggcctatcctccaacacgatacagctatcttttcaggagttcgctaaggcgtgcggtttcccttcaaagcgtctggacggaaagcttcgcaacaccatacacgattcactcggtcgtttgcgtaacaaaggtatttcctttaaacgtggcaaaagtgcgcgaggcagttacaacacgggccttctaaagactggttattttgatgctgagcgcgacattgttgagttggaagcagactcaaagttgtgggaaatttttcagctcgattaccgtgtgcttttgcaacaacacgcgctgcgagctctgcctaaaaaagaagccgcccaagcaatttacacattcatcgagagcctcccggcccgccctatccctatttcgtttgaacgaattcgcgagcgcctggctttgatgtcaactgtcagcgagcagaatagaaccattaagaaagctatcgagcaactgaagacgatcggctaccttgactgttctatcgagaaaaaagggcgtgaaaactacatcatcgtgcattcccgcaatcctaagctcaagcctaccgaatag

SEQ ID NO: 151959 - DNA, 975 bp, Enterobacter cloacae
atgaaaaagaaaatagtagctcgcgggcgaagcattttaggcagtgatagctccgattttatccgtagccttgataaccaaggcggtgagaaggttttcacgcttaagtctggaaagcaggctaagttcactctaaagaccattgttagtgatgaaatagagcagataacttttgttgatcctgctgttaatggtcgtgatcaaagaaatgtaactcccgagtcagtgagcgatataacgcgaacgatcactcttcagcaatttttcccggcaattggtcgggctgtaggtgagcgcattgaggtgttggatggttcccgtcgtcgagctgcttgtatttttagcggctcgaagtttgaaatcatggttacagaagatgaaataagtctggaagatgcccgccaactggcaaaagacatccagaccgcccgtgaacatacacttcgtgaaattgggcagagataccagctcatgcacgagaatggcatgacaaaggatgagatcgcgcgcgctgagggagtttcccctgcaagcgttacccgcgcgttccaagccgcttcggtaccagctgagatggttgcgctattcccggtcatcaatgaacttgctcttgctgattaccaactgctgcttaagctttcagaagagctaaacaacaaaggtgttcccctgccagaattacttgcaaaagtgcaagaagacataagtgcagcggaagtggagagcgtaactaagtcgttaatcctggactcgttcaaacgtcacacaaagcagttgaacccgcgaccagtgaaaacagtccaaactgaaaagctgcgtgagttcgaagataaaaaacagtttgcacgtaagaaaactgatacgtctaaacgcttagtgacctatgaatttgctcgactcccagcgtcagttcaagctgagttggataaagccattaagcaggtaatggataacatgcaggcacctgcgaagtaa

SEQ ID NO: 151960 - DNA, 708 bp, Enterobacter cloacae
gtggggatatttagcggcctagagagcactctttcaagttctctttccttcaatactaaatctttcaccagcaaccttattagcgacatccttgataaggctctttccggttcaggtgtgcgtgggaattatgccgacgatattgcctacgggaaaaatatcgtcgcgaccgctatgcgtattcgctacgcacaaggatggcagtggacagtcgatgttgatgggctaaatggctttgacatgtttgttaaagacataacttatgggcatgggactattgaaacagaaagtaaggtgataggtagtgtggaattcaataaacctacccatgttaccgctgggctcgtcacgatgaccgttcgggatacagaggatggcaaaataatgggctggtttaaagagcgaaaagggaaagtgacaaaccgagatggcacaattaacttgccaccttcatacctgatgaatatacgtttgtatcgcgtatctcaagaaggtggaaaaaccctagaagaagagatgcgcgtatttccgactcagcttggagaaatcacccgctcacgtgaccaggtaacagagtttttgagttatccgatcacctttcagaaatacacgtctgctggttctggggttgaggctatcttatctggagcggccggggcagtgggctcagctgcgaagtcagcggcaggaagtgttatcgaattctga

SEQ ID NO: 151961 - DNA, 558 bp, Enterobacter cloacae
atgacaacgcccgccgagctccttgaaaacgtcaagctccgttttaaccctttacttgttcgagaacaggaaacgcttgattcccttctcagaaaggcgctgggagcatatcaggatagggcaggggtcattgccactgttaagctggaaaaggctggagggacggttatatctcgccctgatgactatttagctcttatccatgttaccgacgcacacggcttactcgtttactctgatgaagtagggaataccatcgaactggatcttacaggttcagagcggtggccattcagaatgcagtatcttatgaatttgcgtgatcgtggttttgaaggatggcatttacccccagctattatcggtatgattgaagactacctggaagcgctaataaaagtgcctaatgttgcacgcttaagacgcgcttctatagatggaaagttcgattattctgaccttccagatgaagtaacgctccaccagcgagttttggacatggaggaaaaaatggcatcgaacagagccatcattccaggcgcaaccacggcatcatag
